United States Patent Application Publication US 2026/0226437 A1, published August 6, 2026 (application 19/466,914).

The application's sequence listing, which the Patent Office published only in electronic form, follows.

SEQUENCE LISTING (5357 sequences)

SEQ ID NO: 1 - protein, 520 aa, Acanthamoeba polyphaga mimivirus
MKEAVKNVKPKVPAKKRIITGSKTKKKVFVKKKPPDKKPLKKPVKKTVKTYKLKSIYVSNKDLKMSKWIPTPKKEFTEIETNSWYEHRKFENPNGSPIQSYNKIVPVVPPESIKQQNLANKRKKTNRPIVFISSEKIRIYPTKEQQKILQTWFRLFACMYNSSIDYINSKKVVLESGRINVAATRKVCNKISVRKALKTIRDNLIKSTNPSIMTHIMDEAIGLACSNYKTCLTNYIEGQIKKFDIKPWSISKRRKIIVIEPGYFKGNSFCPTVFPKMKSSKPLIMIDKTVTLQYDSDTRKYILFVPRVTPKYSVNKEKNSCGIDPGLRDFLTVYSENETQSICPIEIVVNTTKNEYKKIDKINEIIKTKPNLNSKRKKKLNRGLRKYHRRVTNKMKDMHYKVSHELVNTFDKICIGKLNVKSILSKANTVLKSALKRKLATLSFYRFTQRLTHMGYKYGTEVVNVNEYLTTKTCSNCGKIKDLGASKIYECESCGMYADRDENAAKNILKVGLKPWYKQK

SEQ ID NO: 2 - protein, 830 aa, Chlamydomonas reinhardtii
MAPKRRRDEAEKAEEEKDHTTSTKCGLAGLLSEKIEADGVAVTREESLAAVDFLVAALTRLRFEALCLLGLVAVRMCEDARREGQGLQPHCATCRRLRKTELVEDDMYAAICAVSVCDLTEQGRKRGRPSKRDQHPEDDLFRHVCEEHFPRDEEAAGARVNRSGLTPFLPPLSKGVFTNVKNHYAANFAAWLARSFRCRIDDELRELRTPATKKLDKLAWSMAHAVLYDGELEQPRWWVGWAQGAAGAAAAAAAQGAGPAGGAAAAQAWTALVDYVNAQRASKRAAELLLREVKGAQATYKKASTRHMEWAAEILAGLEARRDQLGAQVQQLTQAQPLTREDTQRLASLRRELHRARPFTLTPSPSFAPIYVPLDNTSMARLPGLLPTLARRHGEVFAGAGAGAVAPSSFVQAAFGGGGMQSSATLNAVGWGLFQLGGVTSRNAPFANYITTDGVACSVAREAHNKPLANLKPATAPADAEELCTLEEMKATQIIGVDPCGGGNWFMAARSPLYQPGPWAWEGVGPAQRYLLELHDKQLDEELFPGQLPPEPRRRRKGVHRRKQSKHWQPRARTARRRRQKRGRFHMSMGHWRHMSGLERLQPNRPQLAPALQAYVGGIPTAATASAARFEERLRYLFASGAAGQAAGGPAEAGPRGAVHVLWHYHFSAFRRKRWAAFIQRDRALHRVAKQLTGGRPKEEVVVGWGSWAFQGGKGGSPISVRGGRAPTGRLIKLLRERYAKHVFIIDEYKTSKTCYNCGCQEMAIKRLGGLKEGQRPWSVKVCNDCLTTWNRDVSAANVIRVLLLLKLMGFERPTKLQRPPWPPAAAGPG

SEQ ID NO: 3 - protein, 434 aa, Thermoplasma volcanium
MKRANAVKLIVGKETHEKLKELAIVAAKCWNEVNWLRMQQFKEGERVDFSKTEKEVYEKYKQILKVNTQQVARKNAESWRSFFSLIEEKKGKLPKWFKPRPPGYWKDKSGKYKMLIIIRNDRYEIDEEKRIIYLKDFKLSLSFNGKLKWRGKQGRLEIIYNEARRSWYAYIPVEVQNDVKAEDKLKASIDLGIINLATVYVEDGSWYIFKGGSVLSQYEYYSKRISVAQKTLARHKQGRSREMKLLHEKRKRFLKHALNSMVRKIMEEFKNKGVGEIAIGYPKEISKDHGNKLTVNFWNYGYIIRRFEGVGEELGVKVVKVDEAWTSKTCSLCGEAHDDGRIKRGLYRCLRIGKVINADLNGAINILHIPESLGAGSRGQLTVRDRGNGLKTQPAVYRWTNGAGWVSSPTSYEVMKMKAVNCKPMNRHKGTFTL

SEQ ID NO: 4 - protein, 408 aa, Deinococcus radiodurans
MIRNKAFVVRLYPNAAQTELINRTLGSARFVYNHFLARRIAAYKESGKGLTYGQTSSELTLLKQAEETSWLSEVDKFALQNSLKNLETAYKNFFRTVKQSGKKVGFPRFRKKRTGESYRTQFTNNNIQIGEGRLKLPKLGWVKTKGQQDIQGKILNVTVRRIHEGHYEASVLCEVEIPYLPAAPKFAAGVDVGIKDFAIVTDGVRFKHEQNPKYYRSTLKRLRKAQQTLSRRKKGSARYGKAKTKLARIHKRIVNKRQDFLHKLTTSLVREYEIIGTGHLKPDNMRKNRRLALSISDAGWGEFIRQLEYKAAWYGRLVSKVSEYFPSSQLCHDCGFKNPEVKNLAVRTWTCPNCGETHDRDENAALNIRREALVAAGISDTLNAHGGYVRPASAGNGLRSENHATLVV

SEQ ID NO: 5 - DNA, 226 bp, Acanthamoeba polyphaga mimivirus
  source 1..226: mol_type = genomic DNA
aaaaatagtctaataaaatcaggggtacattccgctagtactccaccctacgggttaagcaaatgagaatatcgaaacggtatgcacaggattcttcgagtgataatcttaggatgactcactaaggagatgactaaagtgtatcattcaatattgtattgaacggtattcttccatagagagttgatttttggagtatccagaaatatcaactttttatgagcgg

SEQ ID NO: 6 - DNA, 304 bp, Chlamydomonas reinhardtii
  source 1..304: mol_type = genomic DNA
gccgccatggccgccggcggcggcggggccgggctgagagcctgaacggcgctagcagggcgtggggctgagggtgcacgtgttgattggcggcgagtgacgtgactagtttgttagctgcgggttagcacggactgtgcaccccaccccaccggccacgttccggatttgcggggatgcaaaggcccccaacatagaggcgtgtgcttagtaggcgcccgcgtcaaggtggctgggttgataacgacccgggaggggagggctcagcccttttcctgcctccctaaggcagccacctccttgt

SEQ ID NO: 7 - DNA, 306 bp, Thermoplasma volcanium
  source 1..306: mol_type = genomic DNA
gggaagcccatgatgatgggcgtattaagcgtggtctctataggtgtctccgcatagggaaggtaataaacgcagacctgaatggtgcaataaatatcctacatatccccgagtccctaggagctgggagcagagggcaactcacagtgagggataggggtaatgggctgaagacccagcccgcggtctaccgctggacgaatggagcggggtgggtgtcctcacccactagctatgaagtgatgaaaatgaaggcggtaaactgcaaaccaatgaatcgccacaagggaaccttcaccctttagg

SEQ ID NO: 8 - DNA, 231 bp, Deinococcus radiodurans
  source 1..231: mol_type = genomic DNA
gattcaagaatcccgaagtgaagaatcttgccgtccgtacatggacttgcccgaactgtggggaaacccatgaccgagacgagaacgctgcgctgaacattcggcgtgaagcgttggtggctgcgggaatctcagacaccttaaacgctcatggaggctatgtcagacctgcttcggcgggcaatggtctgcgaagtgagaatcacgcgactttagtcgtgtgaggttcaa

SEQ ID NO: 9 - protein, 482 aa, synthetic construct
MKRKREDLTLWDAANVHKHKSMWYWWEYIRRKDMVNHEKTDCDVIQLLQSASVKKQKTQSDKFLTSFSVGIRPTKHQKRVLNEMLRVSNYTYNWCLWLVNEKGLKPHQFELQKIVCKTNANDVDPQYRMENDDWFFNNKMTSVKLTSCKNFCTSYKSAKSLKSKLKRPMSVSNIIQGSFCVPKLFIRHLSSKDVSTDNTNMQNRYICMMPDNFEKRSNPKERFLKLAKPITKIPPIDHDVKIVKRADGMFIMNIPCDPKYTRRNASNDTIEKRVCGIDPGGRTFATVYDPIDCCVFQVGIKEDKQYVISKLHNKIDHAHMHLTKAQNKKQQQAARERIVSLKKTHLKLKTFVDDIHLKLSSHLVKEYQYVALGKINVAQLVKTDRPKPLSKRAKRDLLYWQHYRFRQRLTHRTTNTECILDVQNEAYTSKTCGVCGTINKNLEKSETFYCDQCKYNTHRDVNGARNILLKSLRMFPFEKQQQ

SEQ ID NO: 10 - protein, 478 aa, synthetic construct
MKRKREQMTLWKAAFVNGQETFKSWIDKARMLELNCDVSSASSTHYSDLNLKTKCAKMEDKFMCTFSVGIRPTSKQKRTLNQMLKVSNHAYNWCNYLVKEKDFKPKQFDLQRVVTKTNSTDVPAEYRLPGDDWFFDNKMSSIKLTACKNFCTMYKSAQTNQKKTKVDLRNKDIAMLREGSFEVQKKYVRLLTEKDIPDERIRQSRIALMADNFSKSKKDWKERFLRLSKNVSKIPPLSHDMKVCKRPNGKFVLQIPCDPIYTRQIQVHTSDSICSIDPGGRTFATCYDPSNIKAFQIGPEADKKEVIHKYHEKIDYVHRLLAYAQKKKQTQAVQDRIGQLKKLHLKLKTYVDDVHLKLCSYLVKNYKLVVLGKISVSSIVRKDRPNHLAKKANRDLLCWQHYRFRQRLLHRVRGTDCEAIAQDERYTSKTCGNCGVKNNKLGGKETFICESCNYKTHRDVNGARNILCKYLGLFPFAA

SEQ ID NO: 11 - protein, 481 aa, synthetic construct
MKRTYSATKSSLTLWTAASVKTTSAPKVVTTFSGWMKKILPTRAETSLTLINPADIADPSPPKKKAKKTTPATPKPTLRIYKIGLRPSPAQRKTLNACIVAANFAYNQCVHLVQHKVCKPHLYDLQKIVAKMKTPEDINHRYAPDRDGWFWKSSTIVRLLATKDFCAAYKAIVSNKKKDVAVIKYKTYDDPEAINPLSGLFGCQKQYATVTQAGLRLLPRLFGKDPIPLVKKKLKVATIDHDFKIEKTSKGKFVLCLTVECSLLRRVKPPAPLFEDGYIHACGIDPGVRSFVTVYDPTRQDCYQFGTSAQKAERLDPITNAIDNWNSFVDQHRDKAPPTAIESWSRKTKKLWYKLKNQVRSLHDQVIAHLLGAYNFISLGKLDVSCFRRGTTAKSTNRWLRIYRHFEFRTKLLARVEGTDNCRVEITDERWTSKTCGMCRSIHRELGAKELFECPNCHYTCHRDVHGARNILLRSFGQFPV

SEQ ID NO: 12 - protein, 634 aa, synthetic construct
MDEGADDSEEAKRKRPDITLRRALRKDKETSVVQTGWKFLCQELGIRDRIEEIIPEVTRIRVETCLLLNLHFIRLLDEGRPIPVIDQNLVGRAMQCTYSKNPQADPDLHETFVHHYLPLCPNRPNNSCLPRITNVLLDLRNQLLSNIKNHVAVLFQSRHRAFMKLLLREAAPDVPFFGDADEDLESCTRLLTTATLWRPNESVRELLPEYPRIYGRIPEAAIECLQDLVDSVRPEVGPLPAAPQSRPHLYMPWMRIISEEFSDRELRSFSLVPHASFSAPFIAITPTTWPELQPKSGKRKAPGELRDAFPSIGRLESGGKTFADRITTDGVSASVYFLVEKRTPPPEDRVVHIHPKQRVVGLDPGKHPDFLTGIAVTGDWDGIERQEEIIGLGTRDFYHRAGFKKRTFLMHSWMSRDLDVAAFNKDAPSGNTVSLEDFGKRVTFVCANLYVLVRFHTARRVRKLRRRVTIKKQIEVDRACKRITAGKKTVVAFGAAQVWAGRTKRQCGPCESVKRRLSSHHKATVVMIDEFRTSQVCSTCHSDVGKFAVLKRQRVMEDGLPTVTEGGRREDEDEDGGGRTSYKTCHNVRACTNPLCRMVWNRDVNAARNIAWICMSIARGEGRPAEFTRAGVWG

SEQ ID NO: 13 - DNA, 300 bp, synthetic construct
  source 1..300: mol_type = other DNA
attggatgttcaaaatgaagcatacacttcgaagacgtgtggagtgtgtggaacaataaacaaaaatctagaaaagagtgaaacattttattgcgataactgcaaatataacacacacagagacgttaatggtgctagaaatattttgctaaaatcgttgcgcatgtttccatttgtcaattcgcagttataattactctgtaacaattaggtcgatccatcctaaattcgaaagtccattgctacgagactttgcgtatgcttagtccagggcaattttctgccgaatgaaatgggtta

SEQ ID NO: 14 - DNA, 300 bp, synthetic construct
  source 1..300: mol_type = other DNA
acttccaagacctgtggtaattgcggtgtgaagaacaacaaacttggtggaaaggaaacgtttacttgtgagtgttgcaattacaaaactcatcgagacgtcaacggagcgagaaacattctgtgcaaatacttgaaactttttccattcgcagcataacgaaagaaactgacaatcgattttttcgggttcgattctatcccacttgactcaaagagtcagagggctcgaatacattttctgcacaggttttgctaatgcaagatctggggcaagaatgtgttcgggtcaaatgagtta

SEQ ID NO: 15 - DNA, 300 bp, synthetic construct
  source 1..300: mol_type = other DNA
cgctcgagtggagggaactgacaactgtagagtggagatcaccgacgaacgctggacctcaaagacgtgtggcatgtgcagatccatccaccgcgaacttggggcaaaagaactattcgagtgccccaactgccactacacctgccacagagacgtgcacggagctcgaaacatcttgctgagaagcttcggacagtttccagtctagaaaaacacgaactttttccttggcccaaggattgccaaacaccactcaaatcctcgttcaggggcctcgagtggctgggcatatatgggtta

SEQ ID NO: 16 - DNA, 300 bp, synthetic construct
  source 1..300: mol_type = other DNA
ggaggagggaggacaagctacaagacgtgccacaacgtgcgagcgtgtacgaacccgctctgtcgcatggtgtggaatagagacgtcaacgcagctcgtaacatagcttggatctgtatgagcatagtcagaggcgagggcaggccagcggagttcacgagagcaggaatgtgaggatgactgagaattagtcgaaagacatagctgcctagaaacgagttcatctaggcacttcggtgagaatccgagatacggctgggtactgtggcgagtgtgccattttactctgaacagactgta

SEQ ID NO: 17 - DNA, 145 bp, unidentified
  source 1..145: mol_type = genomic DNA; note = Catovirus CTV1
atggactgttttatcacttgcttgcagtcttgggagagaattttgaaacgaaagcaacagaagaaaaggccgcgcttgttctctattctccctcggaagtctggattcactataagctatgtcccaaatcttgtctgacgggaaa

SEQ ID NO: 18 - DNA, 147 bp, Prototheca cutis
  source 1..147: mol_type = genomic DNA
atgatgagggaagtttctaaaaaagggaaaggaaaggaaaagtcctctgcttccacttcaaggagtaggaagaggaagaggaaaaggcaaaaaaggtcttcacaagctgcctcttctgccaaagccagagcgtccgcagttaatcac

SEQ ID NO: 19 - DNA, 146 bp, Andricus curvator
  source 1..146: mol_type = genomic DNA
atgatggcctgtaaaattggcgctctgaaaaggcgcaagggtaaacacggtaagattaatataagctatgcggaatacaaggaaaatccgttcagttgttggaactatgtttttgacatgtataagattatgaaataggcatagat

SEQ ID NO: 20 - DNA, 143 bp, Saccharomyces delbrueckii
  source 1..143: mol_type = genomic DNA
atgatgacggagatcaactattactggtttaaaaagaaaaaaaaaaaaaacattgagtctaactcttggtttaacatcaatagcatagaaaacaagaaaaaagagtttgaagagaatgatatacctcgaacaatgtgaaagac

SEQ ID NO: 21 - DNA, 145 bp, Pythium ultimum
  source 1..145: mol_type = genomic DNA
atgaaacgcaaacagcagaagaaacgaccgagactcttttccatccttccgcgcaagtcaggattcaccatttcctacgtccctatttctagtatgacactgatgaaactgctttctatgggggatacaggcatcagaggacgtg

SEQ ID NO: 22 - DNA, 148 bp, Pythium ultimum
  source 1..148: mol_type = genomic DNA
atgatgattaaagaaaagtactctagcaacaagcgcaaaaggtatcctaccacacaccgaaagaaacgcatgtcagacgcccaaatcagtacgaaagctacgacaatacacggcagaagcatccctcccgttttatgtgcggaggtca

SEQ ID NO: 23 - DNA, 149 bp, Scenedesmus sp.
  source 1..149: mol_type = genomic DNA
atgatgaatgaaatccaactccctaccccgagggggtccgcgaggcggaaacgaaagagacaaaccgaaccccaaataagttacgatcaggccaaaaacactttgcttggtgtgcttttgcagaaactgaccgcatcccccggggcagt

SEQ ID NO: 24 - DNA, 148 bp, Scenedesmus sp.
  source 1..148: mol_type = genomic DNA
atgatgagctatgggattgagattgagacggtagcaaaacgaacgagcaaaagtaaaaaaaaacggaagttcgcacagcaactgcattcagatggagaaagcgttaccatcctgtatgagtcagagcttgaaactcaaatctaaacat

SEQ ID NO: 25 - DNA, 148 bp, Chlamydomonas sp.
  source 1..148: mol_type = genomic DNA
atgatgaaagaggcagtgaagaatgtgaaacccaaagtgccagcgaagaaacgaataattacaggtagtaaaactaagaagaaggttttcgtgaaaaagaagccgccggacaaaaaacccttgaagacccaacaagagcccggtccaa

SEQ ID NO: 26 - DNA, 145 bp, Chlamydomonas sp.
  source 1..145: mol_type = genomic DNA
atgcctttcctctgcacgactcgatactgtagacggccaagcaagaatgagaaaagaaagcgcaagacctctcacattttggtggtggcactccaaatttggattcatagcgtcgctcatagtgattactgatggtttcgccgtc

SEQ ID NO: 27 - DNA, 149 bp, Chlamydomonas sp.
  source 1..149: mol_type = genomic DNA
atgaagcgagcaggcggtcgaaaaggaggtcaccggcgaaagcagtcaaagcattggcaaccgcgggcacgaaccgcaagaagaagacgccaaaaaagaggaagactgcacatgtccatgggccacttgcggggcaggctgccggacag

SEQ ID NO: 28 - DNA, 148 bp, Chlamydomonas sp.
  source 1..148: mol_type = genomic DNA
atgatgcgggaggtcaaggcgggaactaagagagcgagacagcctgaggtgaagagtgtagcattgaaaaaagctaagaagacaggtagggcttccaagcaggcttcttcctctaacacggcgtttagtcgtagtcgaagcacacaga

SEQ ID NO: 29 - DNA, 144 bp, unidentified
  source 1..144: mol_type = genomic DNA; note = Catovirus CTV1
atgtacctcttgatgaagaagaaaaaagaacctgacaaaaacaaaagtgacaaagaaaaagagtatgaagaaaagtatcgaaagtatatcacatcctataagacacacaagacatcactcgaaaacaccacgatgaagttgttc

SEQ ID NO: 30 - DNA, 145 bp, unidentified
  source 1..145: mol_type = genomic DNA; note = Indivirus ILV1
atgatgaaaaagcctaaggtgaaagagaaagagaaggaaaaggagaaagaaaatttcgattttatgaagactaataaggggaatatccataagctcataaaggataagatggtactctctataatcgggtaaaggaggttatact

SEQ ID NO: 31 - DNA, 148 bp, Apophysomyces variabilis
  source 1..148: mol_type = genomic DNA
atgatggagactatcgtaaataaagaaccacccgacaagcgcacccgcccggatcgggctgcaaaaattaaagaccgcaaaaatggggaagaaaacgtcgttaaatgtactctttccaggatcataggtaccttccgttgaccaaaat

SEQ ID NO: 32 - DNA, 152 bp, Apophysomyces variabilis
  source 1..152: mol_type = genomic DNA
atgagccccggatcatctgcggcgagaaagaaaaacgagaagcagtgtcgggtgcagaagaagcgaaagagacgcggcccgaaaggtgggggtccggccagtaaaaccgcaagaaagacgacagtaatgtctcaagaagggatgcccatggg

SEQ ID NO: 33 - DNA, 148 bp, Apophysomyces variabilis
  source 1..148: mol_type = genomic DNA
atgatggcaagccgaaacaagcggaaaaaaaagccgcaggcgagcacgagtgccgacacccagagcgacgacgatttccaacaactccttccgccgaagggtaaattgaatatgaaaatgcagatgacgaaaacaacctctgcaggtt

SEQ ID NO: 34 - DNA, 139 bp, Apophysomyces variabilis
  source 1..139: mol_type = genomic DNA
atggttcaccttatactcattcttatgacgaagaaaaagaaaaaattcaagaaaaagaagattttttacaaaaaataccacaaattcaactggctctccaggctcttcaatgataatcagtttagtgaagacaaaattt

SEQ ID NO: 35 - DNA, 146 bp, Cyanidioschyzon merolae
  source 1..146: mol_type = genomic DNA
atgccactgacgcgaaggcgacgacaaaaatcccggagagggcttcaccggagacataggacgaggcgggcgcgacgcaaagagcgagtcatcgaaatctccacccccaagtatcgacatctcgcccggtgtttagtgcggaacag

SEQ ID NO: 36 - DNA, 152 bp, Cyanidioschyzon merolae
  source 1..152: mol_type = genomic DNA
atgtctccacggccgcagccggctgcgcctcctgcagcgcagggaagagcccgcgggggcgccccggcacccgctggcagacgagggggggctgcagcacctagaccgggggcgaggagacgggcagggcgcaacatcacgaacgggacgcc

SEQ ID NO: 37 - DNA, 148 bp, Chlamydomonas reinhardtii
  source 1..148: mol_type = genomic DNA
atgtgtaggaggtgccgcatcacgccactttggctggctggtcggaggatgaaaaagagacgacgacgggtcctccgacccaaaaagtgcatgataacaaccctgtctctggccagaacacggggtagggatgcgggcatgaaggacs

SEQ ID NO: 38 - DNA, 147 bp, Contarinia nasturtii
  source 1..147: mol_type = genomic DNA
atgatgtattgtatgcatgaggattctagtcataaaaagggtcggcggcggacgatgcggatcagctcaagggagtgggcttttctgactcgatctcgcaaatttcgacgcctgttgagaaggcttagaaaacttaggctgtggacg

SEQ ID NO: 39 - DNA, 67 bp, synthetic construct
  source 1..67: mol_type = other DNA
acactctttccctacacgacgctcttccgatctctggaattgtgagcggataacaatttcacacagg

SEQ ID NO: 40 - DNA, 62 bp, synthetic construct
  source 1..62: mol_type = other DNA
gtgactggagttcagacgtgtgctcttccgatctctgcaaggcgattaagttgggtaacgcc

SEQ ID NO: 41 - DNA, 56 bp, synthetic construct
  source 1..56: mol_type = other DNA
acactctttccctacacgacgctcttccgatctcacgtggagtccaaccctggacc

SEQ ID NO: 42 - DNA, 57 bp, synthetic construct
  source 1..57: mol_type = other DNA
gtgactggagttcagacgtgtgctcttccgatcttcagcatcgagatccgtggtcgc

SEQ ID NO: 43 - DNA, 71 bp, synthetic construct
  source 1..71: mol_type = other DNA
acactctttccctacacgacgctcttccgatctctttgttggagttcgttttcttccttgaaatttgttgg

SEQ ID NO: 44 - DNA, 66 bp, synthetic construct
  source 1..66: mol_type = other DNA
gtgactggagttcagacgtgtgctcttccgatctattgactgtagacctagactacagaccgtcac

SEQ ID NO: 45 - DNA, 59 bp, synthetic construct
  source 1..59: mol_type = other DNA
acactctttccctacacgacgctcttccgatctcgggtcacagggcaagactttgtctc

SEQ ID NO: 46 - DNA, 55 bp, synthetic construct
  source 1..55: mol_type = other DNA
gtgactggagttcagacgtgtgctcttccgatcttgccaccacgcctggctaatt

SEQ ID NO: 47 - DNA, 59 bp, synthetic construct
  source 1..59: mol_type = other DNA
acactctttccctacacgacgctcttccgatctcatcattccaccaatcaggactcggc

SEQ ID NO: 48 - DNA, 57 bp, synthetic construct
  source 1..57: mol_type = other DNA
gtgactggagttcagacgtgtgctcttccgatctccagcctggtcaacctagcgaga

SEQ ID NO: 49 - DNA, 54 bp, synthetic construct
  source 1..54: mol_type = other DNA
acactctttccctacacgacgctcttccgatctcccttctccccacagcctccc

SEQ ID NO: 50 - DNA, 67 bp, synthetic construct
  source 1..67: mol_type = other DNA
gtgactggagttcagacgtgtgctcttccgatctgctgtaaactagccaggttgggaatatattgcc

SEQ ID NO: 51 - DNA, 68 bp, synthetic construct
  source 1..68: mol_type = other DNA
acactctttccctacacgacgctcttccgatctcgtctgagtcttcaagttttcactccagctaacac

SEQ ID NO: 52 - DNA, 62 bp, synthetic construct
  source 1..62: mol_type = other DNA
gtgactggagttcagacgtgtgctcttccgatctacagtcctaccacgagacatacagcaac

SEQ ID NO: 53 - DNA, 61 bp, synthetic construct
  source 1..61: mol_type = other DNA
acactctttccctacacgacgctcttccgatctcagagactcagagtccaagagggaagcc

SEQ ID NO: 54 - DNA, 69 bp, synthetic construct
  source 1..69: mol_type = other DNA
gtgactggagttcagacgtgtgctcttccgatctactagggagtggcttatgcacaggtatattatgtg

SEQ ID NO: 55 - DNA, 70 bp, synthetic construct
  source 1..70: mol_type = other DNA
acactctttccctacacgacgctcttccgatctctccttcagttctatccatgttgttgcaaatggtaag

SEQ ID NO: 56 - DNA, 79 bp, synthetic construct
  source 1..79: mol_type = other DNA
gtgactggagttcagacgtgtgctcttccgatcttctttaatcaatgctttgtagttttcactgtataaatatttcacc

SEQ ID NO: 57 - DNA, 61 bp, synthetic construct
  source 1..61: mol_type = other DNA
acactctttccctacacgacgctcttccgatctcatgtctggaattgagccaggtactggg

SEQ ID NO: 58 - DNA, 63 bp, synthetic construct
  source 1..63: mol_type = other DNA
gtgactggagttcagacgtgtgctcttccgatctcattaaccaggtactggcccactataggg

SEQ ID NO: 59 - DNA, 2681 bp, synthetic construct
  source 1..2681: mol_type = other DNA
gatcaaaggatcttcttgagatcctttttttctgcgcgtaatctgctgcttgcaaacaaaaaaaccaccgctaccagcggtggtttgtttgccggatcaagagctaccaactctttttccgaaggtaactggcttcagcagagcgcagataccaaatactgttcttctagtgtagccgtagttaggccaccacttcaagaactctgtagcaccgcctacatacctcgctctgctaatcctgttaccagtggctgctgccagtggcgataagtcgtgtcttaccgggttggactcaagacgatagttaccggataaggcgcagcggtcgggctgaacggggggttcgtgcacacagcccagcttggagcgaacgacctacaccgaactgagatacctacagcgtgagctatgagaaagcgccacgcttcccgaagggagaaaggcggacaggtatccggtaagcggcagggtcggaacaggagagcgcacgagggagcttccagggggaaacgcctggtatctttatagtcctgtcgggtttcgccacctctgacttgagcgtcgatttttgtgatgctcgtcaggggggcggagcctatggaaaaacgccagcaacgcggcctttttacggttcctggccttttgctggccttttgctcacatgttctttcctgcgttatcccctgattctgtggataaccgtattaccgcctttgagtgagctgataccgctcgccgcagccgaacgaccgagcgcagcgagtcagtgagcgaggaagcggaagagcgcccaatacgcaaaccgcctctccccgcgcgttggccgattcattaatgcagctggcacgacaggtttcccgactggaaagcgggcagtgagcgcaacgcaattaatgtgagttagctcactcattaggcaccccaggctttacactttatgcttccggctcgtatgttgtgtggaattgtgagcggataacaatttcacacaggaaacagctatgaccatgattacgccaagcttnnnnnnngcagccacctccttgttattgggtaccgagctcgaattcactggccgtcgttttacaacgtcgtgactgggaaaaccctggcgttacccaacttaatcgccttgcagcacatccccctttcgccagctggcgtaatagcgaagaggcccgcaccgatcgcccttcccaacagttgcgcagcctgaatggcgaatggcgcctgatgcggtattttctccttacgcatctgtgcggtatttcacaccgcatatggtgcactctcagtacaatctgctctgatgccgcatagttaagccagccccgacacccgccaacacccgctgacgcgccctgacgggcttgtctgctcccggcatccgcttacagacaagctgtgaccgtctccgggagctgcatgtgtcagaggttttcaccgtcatcaccgaaacgcgcgagacgaaagggcctcgtgatacgcctatttttataggttaatgtcatgataataatggtttcttagacgtcaggtggcacttttcggggaaatgtgcgcggaacccctatttgtttatttttctaaatacattcaaatatgtatccgctcatgagacaataaccctgataaatgcttcaataatattgaaaaaggaagagtatgagtattcaacatttccgtgtcgcccttattcccttttttgcggcattttgccttcctgtttttgctcacccagaaacgctggtgaaagtaaaagatgctgaagatcagttgggtgcacgagtgggttacatcgaactggatctcaacagcggtaagatccttgagagttttcgccccgaagaacgttttccaatgatgagcacttttaaagttctgctatgtggcgcggtattatcccgtattgacgccgggcaagagcaactcggtcgccgcatacactattctcagaatgacttggttgagtactcaccagtcacagaaaagcatcttacggatggcatgacagtaagagaattatgcagtgctgccataaccatgagtgataacactgcggccaacttacttctgacaacgatcggaggaccgaaggagctaaccgcttttttgcacaacatgggggatcatgtaactcgccttgatcgttgggaaccggagctgaatgaagccataccaaacgacgagcgtgacaccacgatgcctgtagcaatggcaacaacgttgcgcaaactattaactggcgaactacttactctagcttcccggcaacaattaatagactggatggaggcggataaagttgcaggaccacttctgcgctcggcccttccggctggctggtttattgctgataaatctggagccggtgagcgtgggtctcgcggtatcattgcagcactggggccagatggtaagccctcccgtatcgtagttatctacacgacggggagtcaggcaactatggatgaacgaaatagacagatcgctgagataggtgcctcactgattaagcattggtaactgtcagaccaagtttactcatatatactttagattgatttaaaacttcatttttaatttaaaaggatctaggtgaagatcctttttgataatctcatgaccaaaatcccttaacgtgagttttcgttccactgagcgtcagaccccgtagaaaa

SEQ ID NO: 60 - DNA, 21 bp, synthetic construct
  source 1..21: mol_type = other DNA
gcagccacctccttgttattg

SEQ ID NO: 61 - DNA, 20 bp, synthetic construct
  source 1..20: mol_type = other DNA
aaaaaaaagaaaagaaaaaa

SEQ ID NO: 62 - DNA, 20 bp, synthetic construct
  source 1..20: mol_type = other DNA
aagagtggccttgatttgta

SEQ ID NO: 63 - DNA, 20 bp, synthetic construct
  source 1..20: mol_type = other DNA
aaataaaatttaaaaaaaaa

SEQ ID NO: 64 - DNA, 21 bp, synthetic construct
  source 1..21: mol_type = other DNA
gtttccagttttattttgtta

SEQ ID NO: 65 - DNA, 20 bp, synthetic construct
  source 1..20: mol_type = other DNA
gagaaacaaatgaaagggac

SEQ ID NO: 66 - DNA, 20 bp, synthetic construct
  source 1..20: mol_type = other DNA
gagatggtaggttcttctaa

SEQ ID NO: 67 - DNA, 21 bp, synthetic construct
  source 1..21: mol_type = other DNA
aatacacatagatatagggtc

SEQ ID NO: 68 - DNA, 21 bp, synthetic construct
  source 1..21: mol_type = other DNA
aaaaaaacaaaaaaaccaaaa

SEQ ID NO: 69 - DNA, 21 bp, synthetic construct
  source 1..21: mol_type = other DNA
aacatcaaagtgcactgtcag

SEQ ID NO: 70 - DNA, 15 bp, synthetic construct
  source 1..15: mol_type = other DNA
caaaattcttaattt

SEQ ID NO: 71 - DNA, 20 bp, synthetic construct
  source 1..20: mol_type = other DNA
gtgatcatgtaccctgaata

SEQ ID NO: 72 - DNA, 19 bp, synthetic construct
  source 1..19: mol_type = other DNA
aaagaattttatacacata

SEQ ID NO: 73 - DNA, 20 bp, synthetic construct
  source 1..20: mol_type = other DNA
tacacatatatttagtgtca

SEQ ID NO: 74 - DNA, 20 bp, synthetic construct
  source 1..20: mol_type = other DNA
gtagcactaacacttctctt

SEQ ID NO: 75 - DNA, 20 bp, synthetic construct
  source 1..20: mol_type = other DNA
aatacacttatattcagggt

SEQ ID NO: 76 - DNA, 20 bp, synthetic construct
  source 1..20: mol_type = other DNA
tatctgaaaaatgtgtaact

SEQ ID NO: 77 - DNA, 17 bp, synthetic construct
  source 1..17: mol_type = other DNA
tacgataaataactttt

SEQ ID NO: 78 - DNA, 20 bp, synthetic construct
  source 1..20: mol_type = other DNA
agttacacatttttcagata

SEQ ID NO: 79 - DNA, 20 bp, synthetic construct
  source 1..20: mol_type = other DNA
attgacttatttatataaat

SEQ ID NO: 80 - DNA, 20 bp, synthetic construct
  source 1..20: mol_type = other DNA
tagtcagaagaagaagtttg

SEQ ID NO: 81 - DNA, 20 bp, synthetic construct
  source 1..20: mol_type = other DNA
cagaaagatccaaacttctt

SEQ ID NO: 82 - DNA, 20 bp, synthetic construct
  source 1..20: mol_type = other DNA
ttcatctgacaacttccttt

SEQ ID NO: 83 - DNA, 20 bp, synthetic construct
  source 1..20: mol_type = other DNA
tagatgaggagacttgtaga

SEQ ID NO: 84 - DNA, 20 bp, synthetic construct
  source 1..20: mol_type = other DNA
attctacaatgatatattgt

SEQ ID NO: 85 - DNA, 21 bp, synthetic construct
  source 1..21: mol_type = other DNA
tataaatgaatattccgttgt

SEQ ID NO: 86 - DNA, 20 bp, synthetic construct
  source 1..20: mol_type = other DNA
tccatttatctgttaatggc

SEQ ID NO: 87 - DNA, 21 bp, synthetic construct
  source 1..21: mol_type = other DNA
cagtatcatcaggaagaataa

SEQ ID NO: 88 - DNA, 20 bp, synthetic construct
  source 1..20: mol_type = other DNA
ttcttcctgatgatactgta

SEQ ID NO: 89 - DNA, 20 bp, synthetic construct
  source 1..20: mol_type = other DNA
gttaaatttattcctctttt

SEQ ID NO: 90 - DNA, 20 bp, synthetic construct
  source 1..20: mol_type = other DNA
gctccctaaggggacagacc

SEQ ID NO: 91 - DNA, 21 bp, synthetic construct
  source 1..21: mol_type = other DNA
agtttaactttatgaaattgc

SEQ ID NO: 92 - DNA, 20 bp, synthetic construct
  source 1..20: mol_type = other DNA
actttatgaaattgcctttt

SEQ ID NO: 93 - DNA, 20 bp, synthetic construct
  source 1..20: mol_type = other DNA
ttatatgtcaataatggtta

SEQ ID NO: 94 - DNA, 21 bp, synthetic construct
  source 1..21: mol_type = other DNA
tatgtcaataatggttatttc

SEQ ID NO: 95 - protein, 203 aa, Pythium ultimum
VIWNMPTKKTASLERFKEYVGFMIPRLGLLLTFSVEKPFRKLKLRRFISMQKKLLKMCLQLTEGAGRRTIVGFGGWSNLDISRLIKKCPSGPVKRFERKLQEFCTVVPIDEYRTNKVHADCHTSLVYQYCQQLCRDGVERCLKTYSVLYYPHNGCYGMTVSRDANASRNILQLLQHQMQGTSRPEVLCRGETTKSTNAHKCPM

SEQ ID NO: 96 - protein, 308 aa, Pythium ultimum
RRAQPHLHVMARYSPLHQRRRRRQKSRCGLHRRHRTRRARRKERVIEISTPKYRHLARMNDFRFYNENLKMREPWYAGVIRAMPSFKTSSYDLYFQRLQFFWKHLRFLLVFSAEQAFLRWRFTQDRAKMKALDTLAKRIVPKASKQVCIADGDWSHRDGIKGHASGPVKGFVEALKRRATVIPMDEYRTSITCSCCHQRLKQARLFTKMKRKEDEVDIRQKERPFKKEVKEIMEMAKFKNPKLADKKVVLKCTRNVLRCTNSKCKANFWNRDVNAVRNMLELLKSGLKEKHGARRLGARRLRAFRRGQ

SEQ ID NO: 97 - protein, 242 aa, Pythium ultimum
MTSDSTRESEDARAMVRRCHSAMPSSDSSYDLYFQRLQFFWKHLRFLLVFSAEQAFLRWRFTQDRAKMKALDTLAKRIVPKASKQVCIAYGDWSRRNGIKGHASGPVKGFVEALKRRATVIPMDEYRTSITCSCCHQRLKQARLFTKMKRKEDEVDIRQKERPSKKEVKEIVEMAKFKNPKLADKKVVLKCTRNVLRCTNSKCKANFWNRDINAARNMLELLKSGLKEKHGARRLRVFRRGQ

SEQ ID NO: 98 - protein, 643 aa, Pythium ultimum
RDCLEQRPPTTSVCRFSFFNFVSQTTMKARQSNKRKRPPDEDEIVPDSQEYEESALEEVVSDLSHLSTAPVNAEIKPKRLRPDVTARRAMNTGTTFSVVKTTLNSFCKEKAKALPWESVIKDMNKAVLEAYVLANIHVVRLCQANLPIEPLNNIFFYRCLSATASGVQESRDCEQLKQSVALYNEWRGTGVDRANKKYITDGWQQNASMQMATNTTNAVNLNFYRRFHKHFKRKYDFDGRQAYATLKHILDLKYEGDDPIVLEWRARIPRREVDGKLNSQSHLLLPLTYTFLSDIEERNRVNQTSPDYVEIRSFSLLPLKRGFECSHFKMCKIGLRGLLKRAGINIPSKGPKWNAVSDEWWRELFNIDKFETANRKFAGEIVTDGKAVSILMRKPKQKIGTRELKEEDYDVMWGLNPGRRDLFVATNQNGEKISCSSREFYEDARYKKRNQKIKVWQENRPDILEAARNMPTKKTAQLERLKEYVVFMIPRMDLLLQFSIVKPFRKLKLRSFIFAQKKLRELCLKLTAQAGRRTLVGFGDWSNQDIGGLIKKCPSGPVKPLERMLRQYCRVESVDEFRSSKLHERCHTPLSHQYSKRMCRDGIERILKVHGVLHCKNNGCHGMTVNRDNNASKNMLLLLQLQI

SEQ ID NO: 99 - protein, 245 aa, Pythium ultimum
TRRHQFSAKVKGTSFNIDKFETTSRKFASEILTDGKSVSVVLRKPKRKSTPCNINLADYDVVWGLDPGRRDLFVATNQLGDKVSCSRREYCEYAHINESNQIIRHWQHSQSDVLEAIRNMPTKKTASLECMKEYVDFMVPRLGFLLTFFVAKPFRKLKLRRFISMQKKLRKMCLQLIEGAGRHTIVGFGDWSNRDVAGLIKKCPSGPVKRFERELRESRTVVPIDEYRTSEVHADCHTPLVYQYC

SEQ ID NO: 100 - protein, 333 aa, Pythium ultimum
TASHYILLFRTKNELDEAEKQQSERLVPEGYRPEVVIGLDPGMRSVCTAVRERFAPRQIKRVRRRSVRKKRRRKRSWIRRYDGPKRKNGRDIVEVHAKEYRHLAGFRKRRAWEEVLKNSNPEYGTAIRGMPSFKTSRYKVYLERLHYFWKHAGFLLEICWRKPFLKWKFFNKRSSRIAVDALAARIVPDPSVQTCIAYGNWSRRDGIKGHASSPVKGLQQALAKRAKVVILDEFKTSKLCSTCHRELSPVSYLVDPDLDKRRKRAGKIISRYHSEERKLVECHAVLRCDQKKCEASYWNRDVNAAINIVNLLKYEIEHGGRMAAFARVQDRRD

SEQ ID NO: 101 - protein, 287 aa, Pythium ultimum
PLTRRRRQKSRRGLHRRHRTRRARRKERVIEISTPKYRHLARMNDFRFYNENLKMREPWYAGVMRAMPSFKTSSYDLYFQRLQFFWKHLRFLLVFSAEQAFLRWRFTQDRAKMKALDTLAKRIVPKANKQACIAYGDWSRRNGIKGHASGPVKGFVEALKRRATVIPMDEYRTSITCSCCHQRLKQARLFTKMKRKEDEVDILQKERPSKKEMKEIVEMAKFKNPKLADKKVVLKCTRNVLRCTNSKCKANFWNRDVNAARNMLELLKSGLKEKHGARRLRAFRRGQ

SEQ ID NO: 102 - protein, 462 aa, Pythium ultimum
WLGIAHYSEAFDRKNQRSQEISALTSERNGLKKATEDNEDALDLVKEDLKRLAAEEKLMIRRMRKYRLFPTAEQQTKLRNFMGTYHWTYNQAVAHFRKTNVYRADVLRDLYVTKTTRKTREYPEEMGSPPDWAFGTPKSFRYNTLRKFQTNVKSAFSNKRNGNISHFRINFKSRKESRFFTIYEDANYATIAYVDGNMRALLSISSLKDIPIRCDPGLEITNEIQITNTNGFWYAVIPHFVRPSNFENEGRCIALGPGLKAFMAGIDLNGNALHIGRGNRDHSKRLKNRGNLAQQEMAKIKNVPGHRSHKQWKAYARVKYAFNSTTAKMKNCVKEMHYQTCSFLTKHYDAIILPIFRTKQMVKTSSSRTHNFNETILSLKHFQFRDLLRAKCELLGKSLVVCFEMYTSQTCGSCGKLHLRLGDNDVFECSHCDHIAGRDVNAPFNILRFVCGGSLAISKVYC

SEQ ID NO: 103 - protein, 237 aa, Pythium ultimum
CGLGLDPGRRDLLVATNQLDGKVSCSSRAYYSGACTNESNQTIRQWQKSRKDVLKAIRNMPTKKTASVERLKEYIDFMIPRLGLLLNFSMVKPFRKLKLRRFIRVQKKLRKMYLQLTEGAGRHMIAGFGDWSNRDIAGLIKKCPSGPVKQFERKLREFCTVGPIDEYRTSKVHADCHTPLVYQYCQRLCRGVVERRLKTYSVLHCPHNGCFGMTVNRDANASRNILHLLQRQVQGTP

SEQ ID NO: 104 - protein, 315 aa, Pythium ultimum
NAVANATWRELFNIKKFETVSHKFAGKILTDGKSVSVVLRKPKCKSIPCNINPADYNVVWGLDPGRRDLFVATNQLGGKVSYSSREYYSDVHINESNQTIRQWQESRKDVLEAIQNMPTKKTASLERLKKYVDFMTPRLDLLLNFSMVKPFRKLKLWRFISAQKKLRKMCLQLTEGAGRRTIIGFGDWSNRDVAGLIKKCPSGPVKRFERKLQEFCTVVPIDEYRTSKVHADCHTPLVYQYCQRLCRDGVERRLKTYSVIHCPHNGCFGMTVNRDANASRNILHLLQRQMQGTSRPQVLYRRGTTKSASVHGCPV

SEQ ID NO: 105 - protein, 226 aa, Mayetiola destructor
IKNTCIFTLLYISYENGEFKYEVKVDPGMKTYLAAVWQDWTDDNHNTNSTAKLFKIGSTEFHRRTKQPDRDEKAAEIVGDLEIRRRLDRENNYPRMPSANGLEWMSYITHNLKFFNETIHTYTKAIYTHLAFDNYSNKQATMDNIVNELTQRQPIMFFIDGAKFSPASPIGNYVRCPGVRKLIMAVKKAAELWNGFGTRTEHFTSVSTRFEIFPPTNEKGSFRNLL

SEQ ID NO: 106 - protein, 470 aa, Mayetiola destructor
RKDEIHGRFMGDERVKHWYNWFDKEKIRKMEKGGKFFHFQIVTNGLGASVLFARVNQQSSNKPDNYMESIRQKLESGHYKRSIGMDPGYKVWISAVIRYLRTGQEFNCDVTSRQFHKFTKKKKREKKAKRLTGDFENRRKADAENRELYTAGIPSPNRRQNWFDYIRWRFKWCNEGFDLYTDIQYARLGLDQHFRTQKVMDRMVNILVGNDAALVCVGSTNFNPRAPIKKHIRCPGTKMILQYLKKKTKVDILLIDEFNTSQVCGHCHSFFDREWQDRHENRGRRFKQCTVANCQIRFPNPIGPTNVIVAKKNHRKIQKERRAFPIVAEHPEGQQEQDPKKSTHQFLKTKYVRHVKSNNWRFGLEAEKKGRNVQLKKPTKNHRKYQPDLQNINDHTNVIVAEQNHRKFQKKIRPYPEGPKPKYVCNVQNNDWGLVTQRGNSKITWNRDTSAARNILYKGKKILMQLIIIC

SEQ ID NO: 107 - protein, 287 aa, Mayetiola destructor
ERYVIKIDYIHKKTICNFFFILLTGRGAKLAERKRLADERKMEESTKATKRKAGKDADEPPAKRRNAPVPTRERDLLQKLKSGEVFGTVIQIDPGVKNTLGCVAIDMQNGHERNLLITSKYYHHLLQTHLRKERKRPIIAHLHAMIRGVHASYANPPTRKGGDIREYLDSVFRLFDMFTEVYQRRVFSRMRFDAHICKQKAVDKISKQIASLNPHQESATLIMFGNSQMSRKSPIKGYVKSPHKNYWVKQFDELERVEVYEVDEYRTTKTCSFCGQILHVTRNIGHR

SEQ ID NO: 108 - protein, 272 aa, Mayetiola destructor
CYAHRSNIPKIYGFQTNSKNYSWQWSSSVCECCVPRFLYHFLCHNRAAKTNKYMKKEQKEAIAEANKVAKAAYDRRPKRPNRFFAGKTTNEVPQEIKDRFTHNYYDVLVGIDPGYRSPAAGVRLHMNEDIEQNFKFSIGKCRSFQKEWERDNKRKKITTHFDRAEKESRKRCEEISGVQPSSRDPNYFRYINHKLQFFKQGCDAYHHLKMKDIMKWKDITHLAKTIIGSHVNTLNKALIFFADAKVFAANSPIKRHVRFSFKHCCGNVWNTS

SEQ ID NO: 109 - protein, 280 aa, Mayetiola destructor
RAIIERENKITRNLIEMQYTTIKGIDRNMKISLACTVMDIQTNDETNLFIHRKCYHHIIGSDSRYQKYHNHTRQLILRCLEIRGDYERNHGELPSNEGRNYSIFIIYKLRTFLERRNYHSAKKISRLRFDHFKRKTKGMSQFCRRIRDLDIRNGRVLVILGASQMSRKSSMKGHQRTPFKVVDWKFLKRCQESKTLNIMNIEPQRCVPFVVLIWIYHYLLIGKRKKKIKNTKSTKRCSHKGAQKLDEASPRRRQLKNNLYCIGVKPTRTVQYSCEHAYST

SEQ ID NO: 110 - protein, 224 aa, Mayetiola destructor
IRERDLLEKLTSGEVFGTVIQIDSGVKNTLGCVAIDMQNGQERNLLITSKYYHHLLQTHLRKERKRSIIAQMYAMIRGVHASYGNPPTRKGGDIREYLDSVFRLFDMFTEVYQRRVFSRMRFNAHICKQKAVDKISKQIASLNPHQESATLITFGNSQMSRKSPIKGYAKSPHKNYWVKRFDELERVEVYEVDEYRTTKTCSFCGQILHVTCNIGHRYVFFELN

SEQ ID NO: 111 - protein, 232 aa, Rhizopus delemar
KVLCTNIMEMRQQSLKKYFLESEFDFRVDQKCNLYYGNLFIAKIRGFSPQPENYSTDSSVKPQLYDAYLQIMLQKKHTSERLNDSEKSKVLELAKEMYRRPLQSNYKKTINTALEKLQLLPFRKLKFSSKLFFNQNDQKLVRSLRVKFSPDAILIFGDWSAPNVKYQEPTKSKGLIRVLKKNGFVVYLINEYKTSSHCATYENELEKFKTAPNPRPYQRKKKPDVLCNGLLR

SEQ ID NO: 112 - protein, 207 aa, Rhizopus delemar
LRVDQKCNLYYGNLFIARIRGFFPQPKNYSTDSSVKSQLYAICLQIMLQQKHISERLDCSEKSKFLGLAKEMYKQSQKSNYKKTIGTALEKLQLLPFRKLKFSSKLFFDQNDQKLIRSLKAKFGQDAVLVFGDRSAPNVKYQEPTRSKGLIRMLKKNGFAVYLINEYKTSSHCPTCENELEKFKTVPSPRRYQRKKKPNELCNGLLR

SEQ ID NO: 113 - protein, 205 aa, Rhizopus delemar
VDQKCNLYYGNLFIAKIRGFFPQPESYSTDSSVKSQLYATYLQIMLQQKHISERLDDNEKSKVLGLAKEIYRRPEQSNYKKTISTALEKLQILPFRKLKFSSKLFFDQNDQKLVHSLKAKFGQVAVLVFGDWSAPNVKYQEPTRGKGLIRMLKKNGFVVYLINEYKTSSHCPTCENELEKFKTVPNPRPYQRKKKSDVLCNGLLR

SEQ ID NO: 114 - protein, 210 aa, Rhizopus delemar
LGSNDNLTKFIPELWGWKYRVALLRSRSEHTAVLQALVRGIDPGVTDIFTAVDSGFSSLNARIRKASIKEYHHICGLNLATQRRMQHQQYNQEDVRFISKSPTLKTPNLINFSKAASIRLKTIKRSPTAIVGITGKRSLLEDDYFILAKYTFRLIKLNFKGYIKKLPMRLPKDRLMILSSTTVKALFMKRNSTVAISKNGSHLRQRQQAS

SEQ ID NO: 115 - protein, 208 aa, Rhizopus delemar
SVTVNLSYTTFFESNGSKDSFNVHQQEKNVLRKFYYSSTRMKRKRRCEIQKRKAYDRVCSAERRSCPPCPSQKSSTRLIMFVGDRGYGYGSRVKNHVRLGGPWKPLKHSLYASVCITNEHNTSQTCVFCFQKTDHPQKVFSKKGAIALKTVNGASVCNNNECILSLSDTSHKARDSVSALAIGISGASRLTSGTTLEVFNPSATTTIR

SEQ ID NO: 116 - protein, 520 aa, Allomyces macrogynus
TESPRAPFVIPRVAPIPDLLHPVMNDRQLKARHGKNHIKHDYERRQEGPGRSSRKRRSVCDRQHRVNRVIKSMGNTIRPPLIMFGTSGANNPSGCTMPVKQLIRRLVHGGTKLMLVNEYFTSRKSAVCGDDTVQYQHSWGCKHCPIYRRALLRDRNAAFKIFRACVRDGFQARDVPAAWSNSSRPPLHDWRQIHSYGAQQQGGAGGGGNNSSGSDDDDEPRMLPLQPPPRISSVRATVNPNKTAGGSSTRRVDHRNGGYFGPHQLAHRAGLQQLERVQLVLHQQEPARPPPGALHDHRRQARPSPDRRSASVSGRRPRPPRATAATQTIRACLSRRSQKRLPRRKPVQLWVLPRPRLPRRRPAHPRPRLLSPRPVRPQARPPRQRKHQQHVGHCQVGLPRTKRLSSCVQAQGNHRQSLASRPSPRLPIKGQLAATVMLAAVATIQSLLDRPDSAGIAALHTAILVGVFNHSRFCFLFVGWCFCSPSFQMLLVEPPFSLCPKKGIARHKALITVAIRLACV

SEQ ID NO: 117 - protein, 229 aa, Allomyces macrogynus
KSDSPAEYAECMFWDLAGHWTRHLTGQSNLTKRLLQFWARDPSLKAYMDGKPTLKTHQMDEILAATRYMLSRMHSIMQCVLCSFVAKMTFQKNNHKQSFLDALDAQLMNPMDASIKLVLIMFGNAGASNPCGCSMPVKQFIRHLVHAGAQVMLVDEYYTSKKCAVCGMDLVQDPDAWGPKHCKGPCHWVISRDCNAAFNIFWVGICDGIVNWDVPVVWKNSGHPLLLAW

SEQ ID NO: 118 - protein, 212 aa, Allomyces macrogynus
SVGCCTSLHKPSFKTLDLDKLRAAAAYLTAWLPFVLPLMLSNFLASHQFRAANADRAFYDRLAARFMDSPDPTRPALVLMGNSGHFSLRGVSAPIRHMVRYLIHAGARVVLLDESWSSKKCSLCESDMPNDRRRWSSKRCRTCKRIRTRDRNARVNLIRIAVRDALDVPFRQHWRDRGHPLCERRPHANGVPIGDDGGLDQGGGGGGGGGAV

SEQ ID NO: 119 - protein, 419 aa, Ectocarpus siliculosus
GHTIPAGFTPTRGLTRELLTILLPTRARPSFMRAHELALRGLLHSNDAWWYKDVLRPFSKEANIKCLVNKENARYASSEHGYLSSLQGSGPDKCPWMIGESFLTDGVQIKLLLVTLEHGRKAFSGSSELNEAGYNKLPRADAQLESLLKEGRGVYNISSLLESTSIREDVIVMSADPGQAKVINVSSATASTWAKQDPGVILKTSTCVFGDDYRRDTLASRSDEYETFRRKDQPYGVAIDRLGNEKKRTSCLATFIKYCRRWCANGPVLFLETLQTGRKFMRFDRFRATQKTLAKIADKYMGHVEDTCRVMLFGKASFRAQKGRASAPRKALIREMASRGVVLMVKEYNTSKKCPGCGEDTVEDKERRIRSCKNFKIGSPEESCRLHRLTPEFEMDRDDVGSTNIGMRGFGQLLGQEWF

SEQ ID NO: 120 - protein, 301 aa, Ectocarpus siliculosus
PGTGSKPTNDSRSSTSPGDSFELDSKSIRMDKKNLVLFGMNLKVSEDLCESETQPEHSRKIGYCFGRWYFIIPETVEAQEPEQDSKKSEEEPRIVGIDPGLRKAFTRVSNHGRIDEIGIKTKGTMEKLRTKSYGILKAIKDSKDDKKKNNLGRACYRVNARAKDLVTDFHFKTIKFLMDNYDVIILGKINVQQLMSMKSQNKTNKDHFRFLSHFLFRQRLLMKTSITPHAVVIQDESYTTQTCVKCGVLKKDVGDAEVYKCSRCNLCMGRDISGASNILLRCASETHQEATRTSGRKRKTT

SEQ ID NO: 121 - protein, 208 aa, Phytophthora lateralis
RRQVTPRTYSVYITCGGKSTTCWTSAVCTRLGSGGLRYVGKQKALATIAKRLVPKVDRQVCVAVGDWHQHGGTKGHPSSPVVGLVAALRKRATVMLMDEFRTSKLCAGCFNALAPTRLWCAAAEELRSNKTVLRCTSSGRLLEPRRERGMQQAHSSQSASERGGQTRGIRSRVNRPQCLLAGKGTHTHTRSIRGQHKCAKHSNGSDQF

SEQ ID NO: 122 - protein, 232 aa, Phytophthora lateralis
RHRPQRDFPPAVRLQYLRTGKFYLCVPRHRNFELSDSSRVCAIDSGVRDFISIYDPDGFVVAVYDAENQIARCFASIDHLQSRKTRIRYAPEKSEGLASEGHQVVIPHLPRGAAARVPGVGDGATPKSPRWPSSRNQQEDGLTWSPYKYRNMLEKKMARAGGRLIVCTEPFTSKTCSLCGRINRGLTSQKVFRCPTCATETRMGQETHSSFNWYDTHHRSMQNALNSSTLPP

SEQ ID NO: 123 - protein, 279 aa, Phytophthora cryptogea
QNNNVEVHCRPHHPRRHATSSVLLSELKAAYSAFNNGKSTGIKAAMCVPIVQAFPQSQTGRACAIDPGVRDFITVYDPKGLTLGITDKKEKIFQRCLAIDRLQSRLSSEGRKRIRYRLRRKSYSSYQRVKRMIKDMHQKVSKWLSVNYDEVLLPTFATSEMTKKQKRISSKTSRAMLTWSHYAFRMMLTDKMERTGGRLIECTEPFTSKTCSRCGRINYNIKKQKTFSCPSCNHSLDRDVNAARNIYLMNEHLLAWTLRSSRWNAYSMVSAYTVSTVYV

SEQ ID NO: 124 - protein, 308 aa, Mucor irregularis
LVFQAQHKSNSRKRNTMTITHIKGYYPRNRNNDHNDSAYNFGLALMEPHFTNRMTEEDKVEAQMLVEKFYDKSLSLKEFEDLSSLILKKLLLIPFRKLRFSTYVNGRKSDQLLVKNMQTKFNQDAILIYGNWSAGNSKYHEPVRGKGIRSLLRKGGFKVLLIDEYKTSTFCPQCKFSPVEKFKKIDNPRKHNRHKMPQVLCHGLLRYKTFIHLTLPELTNSFIRCTNRKCLESNMRLWNRDVVGALNFRHILNELRSNKSRPARFFRSHTISTASSASSSSSSSSSSTTPSKRKGKALPNQPTTKKQK

SEQ ID NO: 125 - protein, 233 aa, Mucor irregularis
LKEFEDLSSLILKKLLLIPFRKLRFSTYVNGRKSDQLLVKNMQTKFNQDAILIYGNWSAGNSKYHEPVRGKGIRSLLKKGGFTVLLIDEYKTSTFCPQCKFSPVEKFKKIDNPRKHNRHKMPQVLCHGLLRYKTFIHLTLPGLTNSFIRCTNRKCLESNMRLWNRDVVGALNFRHILNELRSNKSRPARFVRSHTIFTASSASSSSSSSSSSTTPSKRKGKALPNQPTTKKQK

SEQ ID NO: 126 - protein, 230 aa, Mucor irregularis
VAYVLQYIDRLLLHCSSAIEWGRFNLYQGRQSAADEMVEILIDGGKKYNRERRSIRKRKTKRRANKRSNARERPIIEIPTKYEYIDNAKISSDAKHTSHCRPFKFKPAQFELSSKMPLIVFGDGMFGKDNVKLKGNRCGVTDKLWKALKRREKSGNLVAVTVDEYLTSQICSKCKKRRPVDAGNKGRSTLICLECLTIWQRDVNAARNMLEKAESVWKTGKYPEEFKRKK

SEQ ID NO: 127 - protein, 199 aa, Mucor irregularis
AASLFHLYQFTIPILTNHFTTTKVVENIEKKRQPYIPPKVKINLLILKIDVKTLVQFVGDRGTGVGSALKGFRRYGGKWLEELRSKRSTVCITNEHNTSQLCLFCFQKLTHPKGKNQKPIKGSFLCINPACVSVKNGKAAKSRDALSSLAIGISGLSHCLFGTYMPAFSPSKISQFNTDKFKSLSTAFLNEETVRQQRC

SEQ ID NO: 128 - protein, 215 aa, Mucor irregularis
KTRFSTYVNGRKSDQLLVKNMQTKFNQDAILIYGNWSAGNSKYHEPVRGKGIRSLLRKGGFKVLLIDEYKTSTFCPQCKFSPVEKFKKIDNPRKHNRHKMPQVLCHGLLRYKTFIHLTLPELTSSFIRCTNRKCLESNMRLWNRDVVGALNFRHILNELRSNKSRPARFVRSHTISTASSASSSSSSSSSSSSSTTPSKRKGKALPNQPTTKKQK

SEQ ID NO: 129 - protein, 222 aa, Mucor irregularis
SSESHTLFEYYTRAGFKKTNKRILQFKNDDEAFLRVERGIPSHKTANLTTYAAFIEYLLLNLPALFQFYDDRFTSLRFLNYIGRQRADAEMVNIFVTGGKKYLHKQFKQTGRNQDKRGPRKKRKKREKRSDAKRDKGKGREKTRKHRPLPFRQDNRIPLIALGDAVFPSTMRGTISGVARRLPRLLKKAELEGLLVIVPATEYMTSKVKKRKYTRFLNLTTF

SEQ ID NO: 130 - protein, 266 aa, Rhizomucor miehei
TKGDPVRKMLAVLHANVSILCRKSIELINQCQYLMLRGLTRQQLSFLWASFMIRMKKKHQLLLWPHLKHTKQNIGYDKIHPVSSRQSCRQNHEIAKQGFTFYRQAPVLFAFGMDGMTVTHRKGRLPAMDKKLARYLFKQLSRISHDICRIDEYCSSKTCCICLESGRASLVTVWKNPTGDTIYRITQCQNPACGRMLHRDSNAAHILALNAASYIKYRQRSSVLIRKSRELYIATQAGDNNPYEKWTETSRFMADDVSLSFLGRPI

SEQ ID NO: 131 - protein, 225 aa, Rhizomucor miehei
PKTRARTTIWHHRARDKKRWNVSKDGGRRGTKWTTSRKRARADSRKANHRRQKQRWKQSRQENTPRILVAIGRDGVSSNVRRKNAPSPMGTRPGNALIKQARAKGHMVTSIDEYMTSKVCPPPRCAMHGRRSFSYFDHRPPALSRHINQDALDQNGEEDIIRLTVCDAYGMRFHRDGAAAHCQALIGSSIFQHGERPPQFIRSSRRISTDYFSPFPSDGQCLVPV

SEQ ID NO: 132 - protein, 236 aa, Phytophthora rubi
GAHSQRDGRRLLEAPIRRHRREQVYSGKPGQRCQGCDQGATPHQAAHQGEGGHRHAEQESRRIRVQVKRPSPARSTAERDQRYQSQDHKRSEGLPPQVLQLDRLELQDILAAVVPDVADGAQVRAADGGGRHPGVAQPVQGPPRQEAPYPQLHGARHAGLEPLQLLGAAQVQDGAGRGKMVTCEEEYTSKTCSGCGKLKENLGGSEVYKCVFCGAHMDRDLNGAKNILIKNIEMLF

SEQ ID NO: 133 - protein, 213 aa, Klebsormidium nitens
NRISGAQCWRRSAASSHRRALDPGVRTFLTAYSPSEAYKLGDGCVQRLFSLAITLDRLLAFEKRIPKDHRRKQRTVRLRIIKTRRKIAHLRDEMHYKVADFLTRKAKIILLPTFETSEMVRRFQRRIGSKSVRQMSFLSHYKFKQRLIAKAAGRGVRVLIVSEHYTSKTCGRCGEVKQNLEGARTFKCESCFAVIDRDCNGARNILLRAIRRK

SEQ ID NO: 134 - protein, 590 aa, Podila verticillata
FADESDEPQDPTLSAIESFFLRNEARRSFADFPKARFVPGFVYLTEEGLVHALWATETTKVLLQTILRRVGEEDLYFRKDMASLHPVLEGSAPEEPTALEQASLVHSLVIQPRADGSLDLGPVLETFSTKGRAVDYVQEHKGRLIDALFGRGNHPISLQQELDEKRLRLKGTITCNGLEVKALVYDTQYYRPKAARELRAQGIMAQTEHEFLREVPLDIQDNGAEEDDDDDQEGLEGLDDDDEIDAAFLELDESEQETTGPGGSGGQDQTDPDIGLPGWVDVGMDMMDVDRDGIVAAGGFVGPGDLIQQRLPYDQVLIRDPFMGVMTPQVDEDIVLDESALDIHRRRSSSTPAQQNRLIMNFKQASKLVPNIEVHFDHPEKCPDPDNAILLGMDPGEVNSLTITKLDPRFPNQRHVLKVRRSFLSQPDVRFRNALQDRKAAEGINQLESQIPEFSRATLERHFFYLTSCHHLPGTVQGTWTVWDRILNFYQGSSWYLKKKWEVSKARTACLDYAIKAILRLAGGSEGRKHRTDDRPVVMCLGLGSFNSQSGLPSKHSVLERRLVIKVQMHSSKLFIFFISGTHSAFFSLH

SEQ ID NO: 135 - protein, 279 aa, Phytophthora pisi
LMVGPVPMYMLIIVSLAIAIGINLLINYVVPMFFKIRVIAHDFRDFLLSLGQAITLSTFVVNFMKNTAGRKWHETLRLRFPEYQIAISSLPCLKTADARVFLIRMEQVWLNLDYLLFFGIAHNFRKWRFFSSVEHRVAVDDVAKWLIPEAGSHVCVGFGNWSQSDNIKGGPKPPLRPLEKAMRKRATVVKVHEFRTSKLCSACYQPMKMAVFLDPDDPGPDELDADERPLYYDRSVLRCANKNCKKNVLNRDVNAAVNMQTLLTARLQGLPRPAEFVRQ

SEQ ID NO: 136 - protein, 464 aa, Schizochytrium sp.
VEQLRIERDAEKKRKKLEDVAIKALLELQTESRAAPLAQGKREQVDTPRRSHKRKAEVETNGNETVAGIGKQIRARKIRVYPNKEQSQKLMQWFGTVRFAYNKLAEKFMHVDQNVSLAALRKELKQYEVAHAWFKEVPGEVRDCAVRDMDKARKAHLAKKKKGATAVKGGAKFKFRSKKDRQQSFDVRARDWERVRGMFAGLFGPALKSAEGPLPKHVDATVRVVRDFRGCFYVCIPMSVEIKGDDHAPNPDAHSTVAMDPGVRTFMTPFDADGLVTEWGKRDIERVYRLCRHADKLLGRIKDKTATKQQRRRRHRAWRKMFVRIRHIVGEMHKKLATWLCNNYRVIILPSFDTKQMVLRGTRKITSTTARKMLTWSHFNFRQRLLARAELNTWTNVIVCEEAYTSKTCGACGHLHHKIGGAKTFRCPFPDCSYVADRDVNGARNILIRFMTNYLGGHYAANVF

SEQ ID NO: 137 - protein, 505 aa, Acanthamoeba astronyxis
GHTRGDVCTPSVRAYVRRNAVMGFCRAVKATQAFMEERQKEWELKMHLYKKQCAKMETYERECMACEDGHPQLFVNDPDFIEPDRLPHQQQLQSQTHAPKRQQKTHSVAATPMGGKKRKRAPRSQKSTLPPRPPVDMSRVKPPRGDKPEMKERQVKPPSRNDPTHSFTIDCDSDAGHSISWDASRGCMYIMREEVKLMGSPSARQRQLHRLTQRMPNEQQRTPKPCTIKYENGRYYALVVFAIEPQVRPSVVATMESGEPIKAVALDPGVRTFHGLCDTKGRFGEIGTGQIAHMIRIARRSDKIKSHIDTHLLSADQKWKRGTWRPNRQRQTKQDKKKMKRRRHKARRKVRSLNQRVRDLRNDAHWRTARALCERYDHIIVPKFHSSAASRFLAKSSTRELLHWSHYQFRQRLLHKAEQLGAKVHLVTEQYTSMTCSRCLWVNEAFRNNRSKWFECPRCDYALDRDWNGARNILLMNLEKCVGQLRCQSRRHKERRTTPLLSEQT

SEQ ID NO: 138 - protein, 517 aa, Acanthamoeba astronyxis
VRMQRQWLMVILLKASNGHLYNPSVRSYVRRNAVKEFCRAVKSTQAFMQERQKEWDLKMHFYRKQCAKMEAYERERMACEDDHPHFFTNDQDFIKPDRPHQQKLQSHTQAQKRQKKTHSGAATVVEGKKRKRAPRTQKPTIAPRPPVDMSRVKPPRGDKPQMKERQVKPPSRNDPTHSFTIDCDSDAGHSISWDTTRGCMCILKEEVKLMGSPSARQRQLQRLTQRMPNKQQRTPKPCTIKYENGRYYALVVFAIEPQVRPSVMATIESGEPIKAVALDPGVRTFNGLCDIKGRFGEIGTGQIAHMIKIARRSDKIKSHIDTHLLSADQKWTRGTWRPSRQRQTKQEKKKIKRRRHKARRKVRSLNQRVRDLRNDAHWRTARALCERYDHILVPKFHSRAASRFLAKSSTRELLHWSHYQFRQRLLHKAEQLGAKVHLVTEQYTSMTCSRCLWVNEAFRNNSSKWFECPRCDYALDRDWNGARNILLMNLEKCVGQLRCQSRRQKERRTTPLLSEQT

SEQ ID NO: 139 - protein, 255 aa, Acanthamoeba royreba
QTTLHYPNSQYHLMIQCLTAKVPPQENNNSVSFISLDPGVHTFNTFFNHQGQFGSISDSQVKSIIQVAHRADHLKAHIDTQLPGATGQMKCKRAQAHRRVRQINAKRHDLKADAHWKTAQVLCERYDHVMLPKFNSRAVMQVLGRTTTRQMLCWSHFEFRQRLQHKAQQLGARVHLVSERQSTITCGHCLRIEPSAKWFECHRCGYAIDRDWNGARNVALMNVERSLGKMEPYAIEEGGGRRDAHVLRNDDRDFK

SEQ ID NO: 140 - protein, 200 aa, Acanthamoeba royreba
FGSIGDGQVESIIQVAHRADHLKAHVDTQLAGATGQMKCKRAQACRRVHQINAKCHDLKANAHWKMARVLCERYDHVMLPKFNSRAVMQVLGRTTTRQMLCWSHFEFRQRLQHKAQQLGARVHLVSERQSTITCGHCLHIEPTMRKNSAKWFKCHRCGYAIDHDWNGARNVALMNVERSLGKMEPYAIEEKEEDAVMHMC

SEQ ID NO: 141 - protein, 738 aa, Acanthamoeba quina
QPPACASWPIGATCARAASATRASGSTTAATSSLKSPQSRAPTMDTQSRPRRGHPASASPTPGSPARSSGPTSSAKSPSSDASAPTTRSCPKWLVASTSGARVSAPFWTDASRAWSTRSPCCTETDSLALPRSCWSTCLSATTSGSWWSARAIQLRPPLSTPSIHSASWPTTSSPSPPSLWRDRMASALRRIEEHDAIEQPWRKADQARQASLLRKKARNEAAARKANEMRQTAAAAAAAATTTTMTVAGGEKGKGRVGGSGGGGGRKQKRKGPPDAEGGGATHEPRKGSGGGDGAGGLVAFDGKTRKICVFPTAEQKTLLKRWIGTVRWTYNQCVAAVRRRQCAPTKKALRARFVTESGLREAERIKRAKSGGGGGGDVGISWVFETPHDLRDQAVGQFVTAYKNAVQAHGRGKFDIAFRSTKRLQQETVVIRSRDWNRTRGEYAPIFGNTVLRSSESLPVKMDHEFRVTRTKLGRYYISIPVPLLDAKHPIKQQQPLGGVVGGGDNQAPAVAPHAAAAIDPGVRTPFTVYSPEEARVYELGANDFGRIRRLCHHLDDLVGRTTDRDVRKKRRRRMRRAAARMRRRIRDLVDDLHRRAAKWLCETFETIVYPHYETSNMVVGGSKRHRLHSKTVRAMLTWSHFRFKQHLLHKIREYPGCRVVLVSESYTSKTCGACGRINRGLGKSKLFWCEQCGFRTDRDWNGARNIWLKFLTEWCNDSSHGNDDDDKEQQQQQHH

SEQ ID NO: 142 - protein, 366 aa, Picochlorum sp.
ITITYGKWCLEVCQMRGKKGMGDDATALFPRPKDLIGEVTLPVDFLVLFSRIYPLIDGLQRKRMNLLAGINKRNDQTLIHEDIKDLMQLEKVDGIYYAKCKVVGLDPGKKSAATWVYHDPLKQTKHKKWKGDEGEKTMKEERYDSGSIGGGEWRYLSGQKQYTAKMNKRMTAFCPSWRSLSSTKTVDIERTLAAYRKQVELWPQINNAFFHGSKWFQKQRMRKFCKRQKAMEDVVAKIAGTKNKEEQKKVIIAYGDGDKNGTLRGTAPMMSTKLFKKVSENCRVVVTNEFRTSKLCSCCHGIMSQLRKQFRMKRCLQNDCIRTVWDRDINASINILNLFLHYCYSVKDNGEGERLSPFKRKRGCDE

SEQ ID NO: 143 - protein, 1021 aa, Picochlorum sp.
STASVSLATGTNVGCESHHVNEDFYNYQACMMATADGEMQAYVQDTSPKLGLYRKPSGKQTQYENLVVKVIKPGSLGGYQNHNRETKGQWRGVARSPRLKNLLFDTATMLGHISFEATQAAHYHVYRCLENGIDLGPMDFNGFWYKIFDAIKDLRYGGGLSHIDTPLYDSLREYEENAPLRRGDHHLDGDEPFLGMWDLPGHMYWRHACLKAAAKTKEQNLGIILQTNAYHNLGKVIKVRIAEYFGDKYADNFRSLVSAIAKCIWDAQPLEKVKEGYKRLSDLTQEEIREIACHVIDPIREKFPDETGRKDNSKMIQFVYFVMGEVIEYNRVRSRQRGAQVVKFVNVCVGQQLANDIEREMGDLSKKKFVLFMKHALDIFRQCSGSDTSSVCRDIGIRCSRHVSMNGKYRSHILRRLSERILYQTENSMLKDELVLDQHQTMWIERTAAQLQLPSSLSEFESKKDLFVKYLREYIVPKLRESNLCVAQRDHQNGNNKIPWGRKIVVPSILPLAKKRACHVSIPNDAITSLAKFLAEEDKDIEQKITPMQIILSEAKERKMAIEKEIDERMLQEQTDEEYEMVCQIERNKIASEKQFRAIPTGKIHKYKMRPEETAFSMDRKKRKEEYLSSSEEFKQAEKEWERAKLLYQECCWMALFNFKVKRRQDAHEWLFGGELSTDGVDVSMQYYRIKTDVEVEADQKEKKESGKKALQRKTKRTGKKPAGSGSALTGDKSDDISSRADWRRAKDVLEDDLSNLCVFDPGPSGHVGIRMDRSKFDTLKENRKHGDYDPFETIHLSNHEMRARSGKLKRMKLNAIWSESKPKIRVWNATAPSRKVATTAEILDFCRNTNSQLHDVYGFYSQNCFRRQRFSVYSRTQHMLDMMVEKICGTSERKVQERTVVVFGNAAINSGECRTGRICLGELKRLLRQRCCYIEVDEFRSSQYCCACQTKLEPPPRVGLHKRWKVRRCMNNECERAFWQRDVNAAINLSKFFLWEVNGEDKDKVFRRPCRLDEDDVPDV

SEQ ID NO: 144 - protein, 215 aa, Picochlorum sp.
TCMFTMKPIVCKVIGIDMGKSNVLTAAYRHTCSQRVHMSNVKTSKEDRFKTLSKTNKAWRHYSGQMAYPFLIKKWIKKFVPNLDSRPTTKTTNTETIMESYRFMNNQWENGTDAESGGGLKEAFFSPMRCLCCMEGMKAGCVFRLKCCRNNPCVRTNWNRDTNAAINMFNLLLWKTLYEDRPRTFSRTERKKRNKYVVPSQYIRALICLQRKFYL

SEQ ID NO: 145 - protein, 202 aa, Parasitella parasitica
YICSSVNARRPLRDFYFSNSNAKKRRKLELCRETYYDRLASEERKFSASQRPVMMIGDRGHGYNSTIKGHQKWGGLWKQKRHARYTTTLVTNEHNSSQICLFCFHKLSHPITSQSGKIKRNNGSFICLHPGCPSQFTVRSRDKVSALAIGLAGAAHLLLGATFPCFDPRNTSEKQRLFFKSARCFLNRNRSLGLPVVEGDTQ

SEQ ID NO: 146 - protein, 211 aa, Parasitella parasitica
YIYLAKHADQIHQEILRAPQSAEDDKTNTFKLTARFIDKACLKQPNIHSNHKRVQRRRVTGRIRLKKVCQKHCSRHKTKLNGRSAVTFVGDWSGVSTFVKGHTRRSTKPYYKQSSAPENDHLVVVDEFASTITCNSCFSRNQKQFCRLPSGKIRRVPGAVYCINPQCPRRLNSNATTTNRDRNGAMNIALVGFSSPISEDGHPLPPFSKII

SEQ ID NO: 147 - protein, 214 aa, Parasitella parasitica
LQIQYNMQERKISRSFYFSSAMCRLRRSIELATNRTKDRGAATERRFVKRGSNNALVMGIGNAGTGVGSTIKGYERRGGKWLPKLHTRYAKVAMTDEYMTSQLCLYCYLPIVHAKTSSNKSILGSARCLNPKCEAFKHGRACNNRDVMSATAIGISAMTKFFIQQELPSIYKRQSPVISPTFSTLGHLRNDAPCWLPRLCGLNTFWVSYFTMLS

SEQ ID NO: 148 - protein, 735 aa, Tilletia horrida
HNSLHALFPLLDQWRSPQSTTSMSTSQHTDDISDNESASDANSSPQLHPKQPQPLENDDDRATHKAWLHPCVRGPTDKKDAVISKIRQIVEAMSQAEHIATWLVSFILERELNEPSPIQDSVTVNLYNSHIEMLSDDTGGGRSSSPLYKLFEESLGFALKGHLPDAPSTARGSAHYRRTCRNLIAHHSPEFRQLFPFPISSVVIERATLQAAATRWETAYLNQIQKHLFDTLMFIVNKASNYALARKFRHSPDARLREAAQSRTENVQAYKAWLQGTGSKPDTNDAGIGRVDLLFRQLEPLLRPVIGTHGRRQAQATDETSATLTLQQTIQSQPAKFLRLLLHTLALLGNDNRFKDSRPPLALPVRRSFIPTHQLLDASCMKLFDPSVEYDINNRKQKRTDAMRLSAWNQVFDIDKLPFATRTGEAGKRTDRWTLNASIVTDGYAISVHKRRSKPISAKRTRQRRAKRTRGSASTARAIAAARGESAVPKLTELGDADVYRIADKVVFIDPGRHNLLYCMAVWDRKGDGGMSTLRYTSAQRRHGLGLELFAKRIQQYERSLQPDLAATLQDFRKTTMPSARKFTRQGIATWLKIYSQIFEPMTRIYKHPLYRELKMLRYSRTQREISRLIQAFTAKYGAEAVVIMGDWKSGKVRPNALPGHIRMLFDNFLFRETVSEGSSRHALSNDNGRSVHQSGFRGVSRRRVQDEFFLPRVPRTRSKINGDPIQQTPAAERY

SEQ ID NO: 149 - protein, 270 aa, Sporisorium scitamineum
EKTSSSSSSSQQDPSTNTTRFLSQVTQTNQAASRAPTKATRPRQLNSTQRRYLRKHFRRINSKMRNLVREIYCRTAYFLALSSDVIIVPRMEVHNMVRSRRPSRRTKQELLRWSHGAFLDRLTIKCHDVQFDARYPHKTAAATLLVQPEGYTSKTCSNCGQLHQSLGSSKRFLCPTCCYSADRDHNGAFNMIIKAIRWHSPRRSGTATLDSNAHRQLHAIFQPRLVHLFSTLFRLCFNFVPTLFQLCIDTVPTFSFLCRYLVTTSFFYAI

SEQ ID NO: 150 - protein, 257 aa, Balamuthia mandrillaris
AGVFRYNQAPSSSRVPKVVAIAPGVRTFGTCFVGPEGKAYEWGRNDIGRIYRICHYLDDLQSRWGQPGVKPRQRYRMRRAAARMRERIRNLVDEVHKKMALWLVKKHDLVLLPKFDTSNMVLRRSGRCIPSKTARAMLGWAHYRFRMRLLNKAREYPHCRVEIVDEHYTSKTCGRCGRIHQKLGGKKVFRCPRCRLEADRDIHAARNVLLCFLAHQDIIVAKGRELYGQSPAALGPTPVNASTHCGAFVQDLQNVQV

SEQ ID NO: 151 - protein, 216 aa, Balamuthia mandrillaris
APKERGRHHRLGSRSAHIHDHLQRLRGGHRVGKADINEIGKLCHRLDRMQSKGTKGNHRQRRRLRRAAARLRQRIRNLVDDLHKKLVSWLVRNFSLILLPEFRSQQMVRRGHRRIGSRTARAMLTWSHYRFRQRLLNKAQQFPSCTVCLCDEEYTSKTCGKCGQVHHQLRGNKTFRCPQPECGYQADRDANAARNILIRFFTLQALTTSSSSVRGR

SEQ ID NO: 152 - protein, 604 aa, Balamuthia mandrillaris
DLRTTKKEITTLVFWANEHVSRQNNPSFSHAFEGKVVGWGVGWGVRNGCHGLAIHFGRVHKEGGRATTSATSTATRKRRAENAPAAPQAQKRGRPQAAPAQPFWNQFSSEIGRRLIRPEALCLEEPFACGSGWFTACKHIPNGEKVLEEEEEKKEKEEKEKEKEEEEKNQKGLLGLIEGLVPSRPAVQLTKKGKNGEEKPVVGRVEKIRLYPGSEQKKTLAKWFGTVRWTYNKAVEFHREHQGMPRDEMKEQVRKKFLNNSNFKGENKSLAWVLETPRFIRSDAVDDFFNGVKSSLAAGRGTTGFQMKFRGRKDKSQSLSIQAREWNHNSSIRQLFFGEARIKARDKNYQVPSEVLYAVRLVKDTRLGHYYLCVPQPLKLMGESQAREHRRREAGIIALDPGVRTFMTTYNGCGEVTEWGKADINEIGKLCHRLDRMQSKGTKVNHRQRRRLRRAAARLRQRIRNLVDDLHKKLVSWLVRNFSVILLPEFRSQQMVRRGHRRIGSRTARAMLTWSHYRFRQRLLNKAQQFPSCTVCLCDEEYTSKTCGKCGQVHHQLGGNKTFRCPQPECGYQADRDANAARNILIRFFTLQALTTSCSSVRGR

SEQ ID NO: 153 - protein, 577 aa, Balamuthia mandrillaris
MASCPQCGKKFATSHGLAIHFGRVHKEGGRATTSATSTATRKRRAENAPAAPQARAQKRGRPQAAPAQPFWNQFSSEIGRRLIRPEALCLEEPFACGSGWFTACKHIPNGEKVLEEEEKKKEKEKKEEEEEEKEKEEEEKNQKGLLGLIEGLVPSRPAVQLTKKGKNGEEKPVVGRLEKIRLYPRSEQKKTLAKWFGTVRWTYNKAVEFHREHQGMPRDEMKEQVRKKFLNNSNFNGEDKSLAWVLETPRYIRSDAVDDFFNGVKSSLAAGRGTTGFQMKFRGRKDKSQSLSIQAREWNHNSSIRQLFFGEARIKARDKNYKVPSEVLYAVRLVKDTRLGHYYLCVPQPLKLMGESQAREHRRREAGIIALDPGVRTFMTTYNGCGEVTEWGKADINEIGKLCHRLDRMQSKRTKGNHRQRRRLRRAAARLRQRIRNLVDDLHKKLVSWLVRNFSVILLPEFRSQQMVRRGHRRIGSRTARAMLTWSHYRFRQRLLNKAQQFPSCTVCLCDEEYTSKTCGKCGQVHHQLGGNKTFRCPQPECGYQADRDANAARNILIRFFTLQALTTSSSSSVRGR

SEQ ID NO: 154 - protein, 591 aa, Balamuthia mandrillaris
MASCPQCGKKFATSHGLAIHFGRVHKEGGRATTSATSTATRKRRAENAPAAPQARAQKRGRPQAAPAQPFWNQFSSEIGRRLIRPEALCLEEPFACGSGWFTACKHIPNGEKVLEEEEEKKEREEEEEEEEEEKEKEKEEEEKNQKGLLGLIEGLVPSRPAVQLTKKGKNGEEKPVVGRVEKIRLYPRSEQKKTLAKWFGTVRWTYNKAVEFHREHQGMPRDEMKEQVRKKFLNNSNFNGEDKSLAWVLETPRYIRSDAVDDFFNGVKSSLAAGRGTTGFQMKFRGRKDKSQSLSIQAREWNHNSSIRQLFFGEARIKARDKNYKVPSEVLYAVRLVKDTRLGHYYLCVPQPLKLMGESQAREHRRREAGIIALDPGVRTFMTTYNGCGEVTEWGKADINEIGKLCHRLDRMQSKGTKGNHRQRRRLRRAAARLRQRIRNLVDDLHKKLVSWLVRNFSLILLPEFRSQQMVRRGHRRIGSRTARAMLTWSHYRFRQRLLNKAQQFPSCTVCLCDEEYTSKTCGKCGQVHHQLGGNKTFRCPQPECGRLSLSHILILTKRDARWRNFSARWKTPSMKNKKDIAHSRARTCDP

SEQ ID NO: 155 - protein, 586 aa, Balamuthia mandrillaris
MASCPQCGKKFATSHGLAIHFGRVHKEGGRATTSATSTATRKRRAENAPAAPQAKAQKRGRPQAAPAQPFWNQFSSEIGRRLIRPEALCLEEPFACGSGWFTACKHIPNGEKVLEEEEKKKEKEKKEEEEEEKEEEEEEKEKEKEEEEKNQKGLLGLIEGLVPSRPAVQLTKKGKNGEEKPVVGRVEKIRLYPRSEQKKTLAKWFGTVRWTYNKAVEFHREHQGMPRDEMKEQVRKKFLNNSNFNGEEKSLAWVLETPRYIRSDAVDDFFNGVKSSLAAGRGTTGFQMKFRGRKDKSQSLSIQAREWNHNSSIRQLFFGEARIKARDKNYKVPSEVLYAVRLVKDTRLGHYYLCVPQPLKLMGESQAREHRRREAGIIALDPGVRTFMTTYNGCGEVTEWGKADINEIGKLCHRLDRMQSKGTKVNHRQRRRLRRAAARLRQRIRNLVDDLHKKLVSWLVRNFSLILLPEFRSQQMVRRGHRRIGSRTARAMLTWSHYRFRQRLLNKAKEFPSCTVCLCDEEYTSKTCGKCGQVHHQLGGNKTFRCPQPECGYQADRDANAARNILIRFFTLQALTTSSSSSVRGR

SEQ ID NO: 156 - protein, 681 aa, Balamuthia mandrillaris
ENPPKICTTSPPRSWSSAMASPSVAWPSGTKRARWRPSARQAGTAATRQSTLDSFLASPPQPPNPRPPKRSRPSTAESPVTDNESTSSIRLRVCEKPTRGTRSTATSARASTGSARTLSPFWSRSLLDVSRRLWLPTETASVGSPTSSSSTSSVSAEPVSWCTVRTTRRTTSPSQATSSPRTSSPSLPSLSVDTTVKDDIQLAKETAQARQRGRGGRKKKAPKETESPSGGGGEGEEDQTLFKTRKIRLRPTREQARILNRWFGGARKVWNTTLRELKRGNVGWKLNQMQGVCVVRPSITLDYLEGVPYSIKHEAVKQLHSNHLACETLKDQGHIRRFSVKYKRKKDHRTESIKILGHYIHWWNGFVYPDELHKSKLWQEANKRKPKQKRTRNPHVKHVDPLFDPVADAFEGLELDDRGRLKRTCTLHKDKRQHFWLCVPIPIQQHERAPENQGSIVALDPGVRTFLCGYSPTEGAVREFGRNDFGRIWRLGKHADALQSKIDRSPPSRRKRKLRALLKLRKRITNMVDDFHRKTALFLCRRYDHVIIPTFGVKGMTAIRGRRRRKIGKKTARMLYSWGHYRFRQWLMHKAREWGTRVYVRSEAWTSKTCTWCLRVTHEQKQHNRRERIFECKHRDCGIRLDRDINGARNILLRSLCCAALPDGANGGVLVGKWMGASEAL

SEQ ID NO: 157 - protein, 578 aa, Balamuthia mandrillaris
MASCPQCGKKFATSHGLAIHFGRVHKEGGRATTSATSTATRKRRAENAPAAPQARAQKRGRPQAAPAQPFWNQFSSEIGRRLIRPEALCLEEPFACGSGWFTACKHIPNGEKVLEEEEKKKEKEKKEEEEEEKEKEKEEEEKNQKGLLGLIEGLVPSRPAVQLTKKGKNGEEKPVVGRVEKIRLYPRSEQKKTLAKWFGTVRWTYNKAVEFHCEHQGMPRDEMKEQVRKKFLNNSNFKGENKSLAWVLETPRFIRSDAVDDFFNGVKSSLAAGRGTTGFQMKFRGRKDKSQSLSIQAREWNHNSSIRQLFFGEARIKARDKNYKVPSEVLYAVRLVKDTRLGHYYLCVPQPLKLMGESQAREHRRREAGIIALDPGVRTFMTTYNGCGEVTEWGKADINEIGKLCHRLDRMQSKGTKVNHRQRRRLRRAAARLRQRIRNLVDDLHKKLVSWLVRNFSVILLPEFRSQQMVRRGHRRIGSRTARAMLTWSHYRFRQRLLNKAKEFPSCTVCLCDEEYTSKTCGKCGQVHHQLGGNKTFRCPQPECGYQADRDANAARNILIRFFTLQALTTSSSSVRGR

SEQ ID NO: 158 - protein, 746 aa, Balamuthia mandrillaris
GSTTTSPMKAFVVGRRRETDVCASPVPQEATVSTTSTTSNASSTKRGSKRKRNTSATPALAAVTKGQTLLNRWTISGHSTPATRSSRTSAPASITSGGAFSPFWNACTQAWSPLLWLPTRTASAATVSSCLTSYSAKQARDSWFSVTKTPQRTEPGNSLMTCWPSAITSWLRTTAAVPLSIDASAAKPEGQEGEKKEEEEEEEEEEEEEEEEEEEEEEEEEEEEELTTMTTTTKPKEYKVRKIRLFPTSLQKAVLAKWFGASRWTYNQCLAGVKDGSVKRTMTALRKRYLNQKDVPDLPLWVLETPFDVRDEGMRDLVKAYASNLAKQRKQKKRLKFEVQFRSKKDPQESIVIHSKHWVGPGRFYPSIFKKCLKDEIADREEWKRKQKLLDDFRGRQGGLELMLKWRKGRRMRCAHWIPLQTQRQKGRTPKKKRGKTKRERRGRVADAKPTGLEDELTLRGAEPLPEVLPSDSRLIRTRWGKYYLAIPMPLEGSDNQAPSSSRVPKVVAIDPGVRTFGTCYVGPDGKAYEWGRNDIGRIYRICHYLDDLQSRWGQPGVKARQRYRMRRAAARMRERIRNLVDEVHKKMALWLVKKHDLVLLPKFDTSNMVLRRSGRRIPSKTARAMLGWAHYRFRMRLLNKAREYPHCRVEIVDEHYTSKTCGRCGRIHQKLGGKKVFRCPRCRLEADRDIHAARNVLLCFLAHQDIIVAKGRELYGQSPAALGPTPVNASTHCGAFVQDLQNVQV

SEQ ID NO: 159 - protein, 215 aa, Balamuthia mandrillaris
SLYSLYAVRLVKDTRLGHYYLCVPQPLKLMGESQAREHRRREAGIIALDPGVRTFMTTYNGCGEVTEWGKADINEIGKLCHRLDRMQSKGTKVNPRQRRRLRRAAARLRQRIRNLVDDLHKKLVSWLVRNFSVILLPEFRSQQMVRRGHRRIGSPTARAMLTWSHYCFRQRLLNKAQQFPSCTVCLCDEEYTSKTCGKCGQVHQLGKQDLSVPST

SEQ ID NO: 160 - protein, 355 aa, Balamuthia mandrillaris
WGEWRRSAFIRARNKRRRWPSGSAQYDGPTTRPWSSIVNIKEREEMKEQVRKKFLNNSNFKGEDKSLVWVLVTPRFIRSDAVDDCFNGVKSSLAAGRGTTGFQMKFRGRKDKSQSLSIQAREWNHNSSIRQLFFGEAPIKARDKNYQVPSEVLYAVRQVKDTRLGHYYLCVPQPLKLMGESQAREHRRREAGIIALDPGVRTFMTTYNGCGEVTEWGKADINEIGKLCHHLDRMQSKGTKGNHGQRRRLRRAAARLRQRIRNLVDDLHKKLVSWLVRNFSLILLPEFRSQQMVRRGHRRIGSRTARAMLTWSHYRFRQRLLNKAKQFPSCTVCLCDEEYTSKTCGKCGQVHLRRA

SEQ ID NO: 161 - protein, 282 aa, Balamuthia mandrillaris
PGLACPRLLRRRASRWGKYYLAIPMPLEGSDNQAPSSSRVPKVVAIDPGVRTFGTCYVGPEGKAYEWGRNDIGRIYRICHYLDDLQSRWGQPGVKARQRYRMRRAAARMRERIRNLVDEVHKKMALWLVKKHDLVLLPKFDTSNMVLRRSGRRIPSKTARAMLGWAHYRFRMRLLNKAREYPHCRVEIVDEHYTSKTCGRCGRIHQKLGGKKVFRCPRCRLEADRDIHAARNVLLCFLAHQDIIVAKGRELYGQSPAALGPTPVNASTHCGAFVQDLQNVQV

SEQ ID NO: 162 - protein, 628 aa, Balamuthia mandrillaris
TASWPPRRSPEPSSPKKIKAVYCRVSSHGQREHLKHQIESLREAYPRHKVYSDIGSGINWKRKDFVALLEQVLAGRVEEVVVAHRDRLCRIAYELVEHVFRKCGTRLLVHRPDDEEDDEPEPSNVLAEDLLSLVTVFVCRHHGQRRYTAGQGNSTSAPKRPRRKEKEGSQRDRKSKRRRRRGEEDQTLFKTRKIRLRPTREQARILNRWFGGARKVWNTTLRELKRGNVGWKLNQMQGVCVVRPSITLDYLEGVPYSIKHEAVKQLHSNHLACETLKDQGHIRRFSVKYKRKKDHRTESIKILGHYIHWWNGFVYPDELHKSKLWQEANKRKPKQKRTRNPHVKHVDPLFDPVADAFEGLELDDRGRLKRTCTLHKDKRQHFWLCVPIPIQQHERAPENQGSIVALDPGVRTFLCGYSPTEGAVREFGRNDFGRIWRLGKHADALQSKIDRSPPSRRKRKLRALLKLRKRITNMVDDFHRKTALFLCRRYDHVIIPTFGVKGMTAIRGRRRRKIGKKTARMLYSWGHYRFRQWLMHKAREWGTRVYVRSEAWTSKTCTWCLRVTHEQKQHNRRERIFECKHRDCGIRLDRDINGARNILLRSLCCAALPDGANGGVLVGKWMGASEAL

SEQ ID NO: 163 - protein, 587 aa, Balamuthia mandrillaris
MASCPQCGKKFATSHGLAIHFGRVHKEGGRATTSATSTATRKRRAENAPAAPQARAQKRGRPQAAPAQPFWNQFSSEIGRRLIRPEALCLEEPFACGSGWFTACKHIPNGEKVLEEEEKKKEKEKKEEEEEEKEKEKEKEKEKEKEEEEKNQKGLLGLIEGLVPSRPAVQLTKKGKNGEEKPVVGRVEKIRLYPRSEQKKMLAKWFGTVRWTYNKAVEFHREHQGMPRDEMKEQVRKKFLNNSNFNGEDKSLAWVLETPRYIRSDAVDDFFNGVKTSLAAGRGTTGFQMKFRGRKDKSQSLSIQAREWNHNSSIRQLFFGEARIKARDKNYKVPSEVLYAVRLVKDTRLGHYYLCVPQPLKLMGESQAREHRRREAGIIALDPGVRTFMTTYNGCGEVTEWGKADINEIGKLCHRLDRMQSKGTKVNHRQRRRLRRAAARLRQRIRNLVDDLHKKLVSWLVRNFSVILLPEFRSQQMVRRGHRRIGSRTARAMLTWSHYRFRQRLLNKAKEFPSCTVCICDEEYTSKTCGKCGQVHHQLGGNKTFRCPQPECGYQADRDANAARNILIRFFTLQALTTSSSSSVRGR

SEQ ID NO: 164 - protein, 210 aa, Balamuthia mandrillaris
GALCRSSGERHSTKPLLPLRASAFPCFMGESQAREHRRREAGIIALDPGVRTFMTTYNGCGEVTEWGKADFNEIGKLCHRLDRMQSRGTKVNHRQRRRLRRAAARLRQRVRNLVDDLLNKAKQFPSCTVCLCDEEYTSKTCGKCGQVHHQSGGYQADRGQRRPNTAAPKQPYRPLTEEEEVVSACNVTLTILRRVIYSPPRRAPAFDKNK

SEQ ID NO: 165 - protein, 232 aa, Balamuthia mandrillaris
GRINEAIFGELAAALPIGQKRVGPKLTEDLILAEGLGSTPEPMEPTRVKARRRYRMRLAAARMRERIRNLVDEVHKKMALWLVENHDLVLLPEFATGNMVLKRARRRIGSKTVRAMLGWAHFRFRQRLLNKAREHPRCRVEIVSEAYTSITCGHCGQLRRDLGKKEVFYCPHCHLKAGRDIHAARNILLRYLATHNYYPQTTTTTTSTRADESLPMGRDGLLALGPTPSYVA

SEQ ID NO: 166 - protein, 467 aa, Balamuthia mandrillaris
MASCPQCGKKFATSHGLAIHFGRVHKEGGRATTSATSTATRKRRAENAPAAPQARAQKRGRPQAAPAQPFWNQFSSEIGRRLIRPEALCLEEPFACGSGWFTACKHIPNGEKVLEEEEKKKEKEKKEEEEEEKEKEKEKEKEEEEKNQKGLLGLIEGLVPSRPAVQLTKKGKNGEEKPVVGRVEKIRLYPRSEQKKTLAKWFGTVRWTYNKAVEFHREHQGMPRDEMKEQVRKKFLNNSNFKGENKSQAREHRRREAGIIALDPGVRTFMTTYNGCGEVTEWGKADINEIGKLCHRLDRMQSKGTKVNHRQRRRLRRAAARLRQRIRNLVEDLHKKLVSWLVRTFSVILLPEFRSQQMVRRGHRRIGSRTARAMLTWSHYRFRQRLLNKAKEFPSCTVCLCDEEYTSKTCGKCGQVHHQLGGNKTFRCPQPECGYQADRDANAARNILIRFFTLQALTTSSSSVRGR

SEQ ID NO: 167 - protein, 398 aa, Balamuthia mandrillaris
STTKRSREKGQWPSFNPSRRAQALRLTFAFEAAVPIGSRFYPSIFKKCLKDEIADREEWKRKQKLLDDFRGRQGGLELILKWRKGRRKRCAHWIPLQTQRQKGRTPKKKRGKTKRERRGRVADAKPTGLEDELTLRGAEPLPEVLPSDSRLIRTRWGKYYLAIPMPLEGSDNQAPSSSRVPKVVAIDPGVRTFGTCYVGPEGKAYEWGRNDIGRIYRICHYLDDLQSRWGQPGVKARQRYRMRRAAARMRERIRNLVDEVHKKMALWLVKKHDLVLLPKFDTSNMVLRRSGRRIPSKTARAMLGWAHYRFRMRLLNKAREYPHCRVEIVDEHYTSKTCGRCGRGREEGPVAPVVAWKQTETSMLPGTSFCVSWHIRTSLWRKVGSCTDRVRQHWVLHP

SEQ ID NO: 168 - protein, 218 aa, Balamuthia mandrillaris
APKERGRHHRLGSRSAHIHDHLQRLRGGHRWGKADINEIGKLCHRLDRMQSKGTKGNHRQRRRLRRAAARLRQRIRNLVDDLHKKLVFWLVRNFSVILLPEFRSQQMVRRGHRRIGSRTARAMLTWSHYRFRQRLLNKAQQFPSCTVCLCDEEYTSKTCGKCGQVHHQLGGNKTFRCPQPECGYQADRDANAARNILIRFFTLQALTTSSSSSSVRGR

SEQ ID NO: 169 - protein, 558 aa, Balamuthia mandrillaris
MASCPQCGKKFATAHGLAIHFGRVHKEGGRATTSATSTATRKRRAENAPAAPQARAQKRGRPQAAPAQPLWNQFSSEIGRRLIRPEALCLEEPFACGSGWFTACKHIPNGEKVLEEEEKKKEKEKKEEEEEEKEKEKEKEEEEKNQKGLLGLIEGLVPSRPAVQLTKKGKNGEEKPVVGRVEKIRLYPRSEQKKTLAKWFGTVRWTYNKAVEFHREHKGMPLKEMKEQVREKFLNNGNFNGEDKSLAWVLETPRYIRSDAVDDFFNGVKTSLAAGRTGFKMKFRGRKDKSQSLSIQAREWNHSKSIRQLFFGEARIKARDKNYKVPSEVLYAVRLVKDTRLGHYYLCVPQPLKLMGESQARELRRREAGIIALDPGVRTFMTTYNGCGEVTEWGKADINEIGKLCHRLDRMQSKGTKGNHRQQRRLRRAAARLRQRIRNLVDDLHKKLVFWLVKNFSLILLPEFRSQQMVRRGHRRIGSRTARAMFTWSHYRFRQRLLNKAKQFPSCTVCLCDEEYTSKTCGKCGQVHHQLGGNKTFRCPNPSVATRPIEMPTPPETS

SEQ ID NO: 170 - protein, 391 aa, Phytophthora multivora
LMKKYRPIAVLKSMSKYFRNNKKSRARIRQVHDEVRDSAFRDFKKAVKSSLSLFFTKKAKNEKTTYPDMKFKSKFSPSNTIEIRSRHIKTLDRDGVQLLQFHKTFFGFQKNEGIALQETFPELMASVRLQRLREGEHYIIVPRLREFPQPDCKRSCAIDPGVRNFVTVYDPNGRTLSVKDSRGVLKKKFEAVDEMKSILQKMNNLCKSRHLTQVRTKAKKGINSCKSAEHRLRYRLRRRIRFTSRKATRTVNDMHQKLSSWLASRYQDVLLPSFQTSEMVRRYFLEVASDATPEAAATVQKRKIKSPTARAMMALAQYRFKMLLKYKMERAGGRVIDCEEEYTSKTCSSCGEIKNNLGGSDVFRCSFCHGRYSRDVNAARNIFHKNMGLVP

SEQ ID NO: 171 - protein, 391 aa, Phytophthora multivora
LMKKYRPIAVLKSMSKYFRNNKKSRARIRQVHDEVRDSAFRDFKKAVKSSLSLFFTKKAKNEKTTYPDMKFKSKFSPSNTIEIRSRHIKTLDRDGVQLLQFHKTFFGFQKNEGIALQETFPELMASVRLQRLREGEHYIIVPRLREFPQPDCKRSCAIDPGVRNFVTVYDPNGRTLSVKDSRGVLKKKFEAVDEMKSILQKMNNLCKSRHLTQVRTKAKKGINSCKSAEHRLRYRLRRRIRFTSRKATRTVNDMHQKLSSWLASRYQDVLLPSFETSEMVRRYFLEVASDATPEAAATVQKRKIKSPTARAMMALAHYRFKMLLKYKMERAGGRVIDCEEEYTSKTCSSCGEIKNNLGGSDVFRCSFCHGRYDRDVNAARNIFHKNMGLIP

SEQ ID NO: 172 - protein, 329 aa, Phytophthora multivora
SHPYMRFKSRYAPSNTIEFAARSFTMVHEHRLRFKPTYFGFDRLDGIELRGQMPELTMSVRLQRLREGEYFIVVPQKKAFTRSETTRICAIDPGVRNFVTVYDPEGRAFSVNDFGLTLKTKFEEVDAMKSTLAILDNESKAKHPDKVPTKHKRGHRHSKTKQHRQRYRLRRRIRLTSRKATRVVKDMHHKLASWLSAHYYNVLLPSSQTSEMVRRYLVDVAADATPESTSDEARVTFQKRKIRSPTARAMLAQAHYQFKILLKYKMARVGGRVIDCEEEYTSKTCSNCGAIKEGLGGNSVFRCAACGSAFDRDLNAAKNIFHKNMLLLG

SEQ ID NO: 173 - protein, 473 aa, Phytophthora multivora
APIARHIMDELTDLGVFGDDATKVNSISKLRLYPTKKQKQKLDQMFAANRAVYNKLVGMSKEDLATRLVTRDKKVKMTLRQLGEKYRPIAKLGTMDKYFRNKKGLTRHREVPDEVRDSAYRDFMKAVKASVAGFFAKREKDEKASHPCMRFKSRYAPSNTIEFAARSFTMVHEHRLRFKPTYFGFERLDGIEVRERMPELTMSVRLQRLREGEYFIVVPLKKAFTRSETTRVCAIDPGVRNFVTVYDPEGRAFSVNDSGLALRTKFEAVDAMKSTLAVLDNESKAKHPDKVPTKHKRGHRHSKTKPHRQRYRLRRRIRLTSRKATRVVKDMHHKLTSWLSAHYYNVLLPSFQTSTMVRRYLVDIATDATPESTSDEAQVTSQKRKIRSPTARAMLAQAHYKFKILLKYKMARVGGRVIDCEEEYTSKTCSNCGAIKEGLGGNRVFRCSACGSAFDRDLNAAKNIFHKNMPLLG

SEQ ID NO: 174 - protein, 274 aa, Phytophthora taxon totara
GADPGYRDMFMACTDATNTEQHSDEFMSYPSSKIYSNSGYNKSNRYIRRKMNRNADVKRVFQSMPSAETASLYKLRLYMYYAVPKMEKLFLFFTRSNIRNMRFRRKMLSDKNLAIACRELADPPEQRTLVVFGDLNISNKGGVIKKNKPGPVMRLQRKLREFCDVMVVNEYLTSKIHHDCKNPARMENQKVKRRYRRDRKLHTEGVHKVFHCLKRKNGCGASVNRDVNGSKNILAVGLFQLLNGVDSRPERLQRPDHFNKKDAEGDQDVKGRTT

SEQ ID NO: 175 - protein, 203 aa, Phytophthora agathidicida
DTGVVYAMPSFKTASYDTYFRRLQFFWMHLRFLLAFSAEQAFRRWRFTQGRAKMTALNTFAKRLVPIASKQVCIAYGDWSRRDGIKGHATGPVKWFADALKQRATVISVDEYRASMTCSCCHQRRKQARLFTQIKRKADEVDIRTKERPSKKEVKEIEEMQMFKNPKLPNKKVVLKRARNVLRCTNRRCKATFWNRDVNTARN

SEQ ID NO: 176 - protein, 292 aa, Phytophthora agathidicida
VAGDRWFSEHHGGWYAVIPSQVDEINSATALDPGVRCFLTGTDMEGNICEIAPGTQEKLDRFRKRIADAQRVISRFKSRRKHRYRNYRTYVRAKREFACATACQNNVIKDLHRKACYYLVNRYDTIILPKFSTSELLRSSKAQNHKFNEHLLSLKHFQFRELLRTKCVRPGTALIICSEMYTSKTRERCNSLHLTLGSNPVFKCPHCEPTASRNANAAYNILRFVCAGSLEIKQEGAGGGRTIAARPQCGSWRGGGHSSAVKLKSCLSDLDLESSLRWYMCWKSLKALYAFY

SEQ ID NO: 177 - protein, 275 aa, Phytophthora agathidicida
RMQTPHAVIQILQGTVKSFTVLPTKKGFGVSHMKMDSTGLRELMLRCGLNPPGIHQRNRVRGQFWQRFFCIDKVETENRKFANEIGTDGSAVSIRVRKPEYEAITQPKAPAMAMFDARWGLDPGRCNLFVATNQNGDTVSCTAAEFCEDARYTKSCQKIRRWTKDRDDIRAAQQAIPTMKTASVDGFRRYINIKTAHMDLLMTFQRRKPFRRHRLRRYIYKKRKLQKLCRTLVLPGQRVAVGFGDCSNYDPTGIIKGHPNVPAKEFERELAETRG

SEQ ID NO: 178 - protein, 604 aa, Aurantiochytrium sp.
GLLARPRQAAPRPIGRDPIGCQRARDRASFAQDDAAQQVQRLHVRARIASPALGRAAWLLQQATGEVLSPLRARECHARRRYTAEISSKLWSVSNTDMRELPHNEWPKSLHDMGCGSWFTTCAYRAIWRLPSQVPLWQVVDDVEQLQIEKQWQLRIYGMPVQQVVTPEEARERSERNRRLGKRKRKSDADRRQAKKRKAEDLEEGTTSTDAVETADLLLRTRRIEVFPTPEQKSTFRRWLGVVRFAYNKLVEKFPRVESGVDKTDMRHELKQYTEAHPWFAAVPHDVRDTAVTDLHKARMAHFAKLRIDTNSVREDATFKFKTKKARQQSFEVRKGDWSRQTGMFAGLFGPHLRSSEGLLPEKVHATVRVIKDHAGRFFVAMPTKVEPKGGEHGPAPRLHSTVSMDPGVRTFMTTFDADGLATEWGKDDVERIIRLCHAADELKSRIQEAQNKDNRRNRYRAWLKIYQHMRNLVKELHKKLAAWLCANNRVIIIPPFATREMMGDLGRETARKMLHWSHHSFREYLIQQAEKNSWIKVIVCSEAYTTKTCGACGHLHRTIGSNKLFRCPRPECFYEADRDINGARNILLRYMTNYLGHFGTYVL

SEQ ID NO: 179 - protein, 250 aa, Aurantiochytrium sp.
PTTSAPSRPPRSSTKAATRSRGPSSRPRGALPAGRPHPVQAHQEERQRDRPSNVAPISARALAHQEQAHRVPTQRSWRFGSARTSTAASSFPNSRRLRMMINRITRKINHGQDCASDVKSKARQFDWCIVVVCDEAEACTSKTCDECGHINNNFCCPQCHHHHADRDLHAARGILLRYVHNQGAVSLRVWVRAELVIRSCIHTRHFAARLLRMATSASAAEKRSPSWRGEAPVDLQMERMMPAGRVKARM

SEQ ID NO: 180 - protein, 206 aa, Aurantiochytrium sp.
TRRLPTSSAPAGRAASSSARRRLPGIIRKQPTSTASPRPSGCASRTTTSCGRCTEAASFSRSSSRRVWHAGALSMSSCIGSPGADRSRSAWAIGRQPRACAPWRYIRRHAIKRGYDVTLVNESYTSRRSCSCKGFDLQPARDQENQELHGLRTCQKCGSTWSRDTIGAINILDAFYTWTIPGRPRPEHLTMHGVAPPPASPLFELH

SEQ ID NO: 181 - protein, 661 aa, Aurantiochytrium sp.
RRQRSAHSQAASLVCCSAALSGSQMTAVVATTVAEGTAVRPDQPTDFNAVGALASSAVHEADPPDPPAESAEGSGTIDAAQTDPHAVEALPETTASTRDVEDAAATDVADSIETLTPQQVAREAITSAFDSIEEFAMGTFFATSRTLARVSAKIARDFAVNWLALMLGNVDWLTLRLGTDPGNPDWPTPETMDLPNEVLQASALSVAVSRALDRAEKAMLSAATTIATTLRTNDEINAARVKVAEAREAVAEARAAAEAEGFRDLQKLEGDGPWETHSTDTAQGDGVMEMADVDEALEMAGAAQGDEAMETADVAHGEGATAAKPLSRGKDWVLGRIFRTNGYELHILFEKNAPRRQGRLVKISEGDKCINQDYDPEYEWENATPVPGTAPRPLPGFVKPTPRLRHHFAAADVGVHNVVTAVSPRDCETNFHGQPLMEVRNYSLKKFNFHSKRKAVNKKVARIKKVGGQDLKQREAELAADHPKTANQEQLQRAINVRRKHYEKIYEYYGSHQLLRLKTTARMAEQRTIDELCHWITWGGTKPLGWGDCSKTTGIRGAPPSGPVRRIRRHARKKGYDITLVNEAYTSKRACCCRGANLKPARRNGKSIHGVRLCPTCGSPWDRDVSAGINIFEIYFYHTIWGRGRPSHLQPAPTNTDDPVA

SEQ ID NO: 182 - protein, 760 aa, Aurantiochytrium sp.
PRRHGLPVHRGLCSRQVWDRAQRSVQVPHQLHHVAQARRAQEPAQEPRGKDHSRKRAEHHRHRTGALHREGIDAQVPLHDAPRDQTRQRQSSGWQEVQALHADPDSLDRRQVHPGRRADPSKSVDAEAESGEVREGWERRGMGGTARKRQDPAELVHSLPSENREKSETLWRGADWEVARTMRTNGFEFHFLFERKTTRVGGFRPTKNEFITHDTAYDPAYEWTNFKNMPIERERFAAADIGVHNLVCAVSPRDGTTNRNGQPEMEIRNYSRKSFNHHSKRNAVNKKARRIKKLNGNVQVSEADLALAHAKTTRDEDLQRAIRTRLKHYDTLWKAYSSRNFMKLKAAARIAEQKTIDRLVHYITGGGTKPLGWGDCSRTTGIKGTSPGGPMRRIRRHAIKRGYDITLVQEQYSSKRACCCRGTDLNPVKINGKPVHGLRTCARERPREDNWAASACGSSQAPRAQSSSARTSSARSARDCGRCLRRALRARQQMVADMQDLIDREDLDGIRTAVQANPRLKKPSRLYWVHDQPHDQPMLLYAVKRNALKVVELFLELGPQLFRERDEEGRTPLIVACSAGHKDIAQFLLERGANPDLRTTKGATALIEASLLGRTETVQLLLERGALVYLQTNYGSTALKVACLDESAEIVQRLLEYGALVDLQCKDGYTPLMQACHENHSEVARMLLEHGAQVDLQAKEGCTALLLACLYGSAEIVQLLLERGAKAVLQADDGYSALMINLQKWPQQDCTASAGAGRQG

SEQ ID NO: 183 - protein, 258 aa, Gonapodya prolifera
GDLSPTKPCLAGEQNNPNAKQTVAQFESTLPSKKTSSLGKFKIYLKAIGPEFENLLDFYDADFFHQLRFRSYMRAQKQHQEIIRDLFAKFTSDNPHNFQQKLSKIHVHFGNTRFGVATRGYAASHHKKFRETMKKMKDVIACIGQSGHNKSVTANHNDKILFKRVPFQCDEVEEYHTSALCSSCHRFLVPKVVTNNVGSNTKQKALCPWGFKFCPYECITWNRDHNVVQNILFVYMYKQATGHRPPGYRPPPKSERSW

SEQ ID NO: 184 - protein, 245 aa, Gonapodya prolifera
YVFLRDFTWFLQWNDPLVEFDTDLTGDIHARWRWRTWSGKQLEVDRAARYALPWFLFSLIRQVSPCPSSFIAGLGPLHRQRSLAKRDLHIAWGSANVNRIQCIPGKSEPAKRIMMRLQPLLKVLRPTHESYTSSGCHSCILDALPGLPRQLPKVVYPTIPNTRPRDEGWTATIQPWELLKCGACGVIWNRDRVRALNIRLIYIHQHRNGGSGLGCSGGPFLLRVYEIVRVVGTLSQVYCSLLAPG

SEQ ID NO: 185 - protein, 636 aa, Gonapodya prolifera
IMKGKKKQDKTETTRSRPDVAARKLRNKTMKDSVIKMSFNSFCKVEAKTLEWKSVLMDLNKTVFEAYILANVHVIRLCKSGKTLPKFNQDLCYKFLSAVSEASTKSDKIKDDELRLSFETYKSWRPDGYQAASSEHLSAGWQNNISLQMATNIKNMVKNHFYPKFLKYLKTKHKLNGKEGYNLLKEIMDPKYKGNSKQVKKYKELIPPARGRIDSNPELALPILYKFNKYLELLTEDKWPVGRNGLPREPRKSSLLPLKQGFKISHMKMCSSSLRGLLLRSGVKGIHDKDIWIKEGHADTWWRQLFNITKVEKGQRTFANEIVIDGKAVSITVKTPDPEKTDPITGKTKKKAQRDVEEKSKQVVPSYEEVSKNPIWGLDPGRRDLFCAIKNKGESVHCSTAQYREESFFKKSNQKHATWTRSKPDIVQMYAEMPCKRTVLLKQLEVYSRYALDKLDKLLKFSSEKPYRQLKFKKYVFAQKTLAKFAKKLASTPDTIVGFGDWLNQDSGIIKKCPSGPVLKFKAELKKHCKVYGVDEFWTSKLHSLCHEELEHHVSHKHIQRVNKETGSKETKFAKVTLHSVLYCTNNSCKGITMNRDINAAQNILDRFVEMLKREEREPCFCRGNQDKTCRLSLPV

SEQ ID NO: 186 - protein, 201 aa, Gonapodya prolifera
IEKCSSIKLYLMFFHLVHNRNPCTKLMEQDPKITYINKAMPTGKTVDKPKLEEHVLFVLCYLMKMLKFLEAKTLEVVSQNCLYCCFLAPLIKQWYSLHSPIHPTQALILFHAGLAVLTTLVQKFFGKHWPSECIVAWGSAVFNQLSGRHHMSPNQLICKAFVNASMTVILVDKFRMSRICSQCHHAFTKESGTKQKLYSIW

SEQ ID NO: 187 - protein, 282 aa, Gonapodya prolifera
PLMKTQKGKFHTRKTISLDFQRVLKNAYAVDFEVGFGEYYHSTGMTTNQLRREARLKDTNMDQILSSKPSTKTSKQPQINLFLDWYQLHASNVIDFYQSNNQEFARLRWRQYIKKQQYDIKICKRIASLNGFQSWRDGKDNLVIAWGSANVNRFQRISGNSGPSLRIKKTLKSFVRLIRTTAEAYTSSGCHCCALKEINSPERVIQKLYHPTVLNNRKDRTSDLIKPWKLLACPECGVYWNRDRCGAMNIRLIFLYMNSHRGERPWMFKKGVFKKDIDILQP

SEQ ID NO: 188 - protein, 759 aa, Gonapodya prolifera
QFSKSEFLKKLFSGFNILICPQSETQNMLQPLSSKMSLDLALPPLETTPSKEHSFISDSMEESDSMTLTTSEELLASASTSTTMTKKRKRGSSTPESLPLTKRKTSKDKLTTSNSNIQPSESSQTLPVDSTGKEKDLKPWWTQFSTEMSRQLWLPTETDCVDLDMSLLNPSLKSLTQKSWFRVKATKKEEAIPITSLPKTFLQLQTSLSQKITDSEQLKKGESASKTITKQQEMEFLQTQITTMEEQKNLTLQEIQKLQTFKKKVSTLKGQLTRSDKQANIIGTRRYKLKGFKSFWDQQKQEPHFFWDDMCSFKDLYRAAYNASVAYYNARELPEKEKFDALEEKKYQDSLQKIREWKNKNKSKRKKKDKKKKDTTKTKKQTGPKRYRKKIYPKKGIKKQELVEEFRKMDIYSGPKWDKIRSAFGCELLDYACKQFCEAVSACIELRKLGHQKDFDMKFKSKKAKKETFTIRSRMWGNSGNYKFGEGVYITKKTNLGQKREKILLKDLLTHDVTISYINGSFFANIQVDGERSVLDVENQHVQLSASYDPGVRSFMTIYSPQGYSIQWGANDHKRSLRLFTAQCKLTRLARKPPSSTNTVKHRTRRHLKQTAAKIRERIRGLVDECHRKLIHFVTNTFLNHNIPVFKTKNMLQGKLNRKTKNCMSMWRHYTFRKRLMDKGKMKGCIVNVCTEEFTSQHCTGCGYRSKTSAKWKKCPNCGLEIDRDESGSRNVCLMQITNTYNEITMSQVPQDSASVQCS

SEQ ID NO: 189 - protein, 459 aa, Gonapodya prolifera
DPGQTSINIHQLGHALFTEGICHGMTFLVSPPSPSTPDNFLSATPISSFSSMKKCWKCFLPLHQYILHTLVDMPPVESRPKPYSLCPIGDFQRKSILLDQTGVKDILRTIKINEENIRVLFHVSQYETENKFFRGTVTTNGNQNSIHLLKHFVVRDLPNYDVAEGTPAFIPTPFESNTIVLGMDPNRPGDCFAGGPTHEQGVHPSYKFNISTKEYYHLSGRNSATKRLNTFRVEQGIQTLENQLITAKTRDPAVLLVQRLDQIATIGGQLVLLYHQSPGVKDKFRTYIGKERALHRMAKRGSCLGGREDKGKDWIGVRKSTSRQRKCIRHKFREKKKDIALVVGDLSAPDNAFMKGSTMPLKRLCHLLSKHQYVRALVSENEDRTSIECNQCYENGCPTFMPNDAADYRRKECSRCRVWWNRDVNAALNIRSVLLYRQRNGGERPVNIIRGYQGHMDVE

SEQ ID NO: 190 - protein, 231 aa, Gonapodya prolifera
LENSLPTAKTTDVANALQRLDAIAQHGKQLIDLYTMSPSRRQRWKVRNGKNRTLHRFARRVAVLGQRTVKGDDLPAVKHPMNLHGKRERRRMTRRKTIPPIVVMVGDLSVIENANVSGMSMPLKQLVKILQQNQYVTALIHVEEDRTSLECNKCFHAGTPSMMGNGRGAWYRRKKCDRCGVCWNRDVNAALNIRGVGLYQQEHGQRPVNFVRGFRAHQPPSTSENLARATA

SEQ ID NO: 191 - protein, 245 aa, Parhyale hawaiensis
KTQNIKNAVNRENGQDLHKHETASATPSPSVSVPHHAIGLDPGLVNILSCVEYDTRVHNITRKLHMSAQQYFAESWMTDHREASEEAKTSNKKYKKALEDISSSVVTKNVHEAYVRELYENFRSLWAEKVKKKWRMWKVKIYSRKRRCVSNFLNKLLDGDGNEDIPGKSLLAFGDTTFAGTGRGEHFLSSFRLFKEALQERATNSLKNPPSMTMKFSTVNENYTSKLCNRCCRPLNLIERDFFRR

SEQ ID NO: 192 - protein, 220 aa, Parhyale hawaiensis
QNKEVEKGLEVGVVTTHGWCRRLCLVQQTDFGSRRLVTIAATVKKNKTQLSENGVSDGGQRQRRQQKKRVIGIDPGRVNIVSCIEYANTDKKTGTRKLKMTAKQYYTECGYVAQRKLTERLQTEHEEYKKAMEDLSSVENPRKNIDNYIRKLYENYETFWNVKSAKEWRNTKIKTYGKKRKCIAKFCNRLFSGDGDDDIYVAFGSAKFASTGKLVYLVRQ

SEQ ID NO: 193 - protein, 312 aa, Parhyale hawaiensis
ISKNDVNRETEQGLHEHETDEATPSPSVPVPHRVIEIDPGRVSILSCVDYDTRVHKITRKLRMSAKLYYAESWMTDHRKASEEAKTKNKKYKIALEDISSSVVTQNFHEAYVRELFENFQSLWAEKVKKKWCKWKVYSRKRRCILNFVDKLHDGDRTEDNPGECLVAFGDATFASTGRGEHFSNPFGLFKKTLQERATNNLKKPPSKLKFSTVNENYTSKVCNRCCQPLVTALCSDTPMFRHPYVPTPLCYDTPMLRHPYVTTPLCYDTPMLRHLYVTTPLCYDTPMLRHPYVPTPLCSDTPMLRHPYVRLG

SEQ ID NO: 194 - protein, 232 aa, Parhyale hawaiensis
KTKQGKKRQEKEKEVDRMVEYINGNDFKNAVPVIAFGNAKFACTSRGEHFSSSARVFRKKLEEKYIQLNCMEKFIEVNENYSSKVCHRCFKPLQKVERYLSNSSSNMNEVQDGESEDTSLPKIRRRKRRLENLDIRRCQTLKSVLSSSTGVCCANGGCFFDRDFNAATNIAKKNFERPLARRSDRAPTEYAFTMVQCYSRSVARCFGSRVTLTCVANYFQPCCTRGGKEVAR

SEQ ID NO: 195 - protein, 239 aa, Parhyale hawaiensis
QEAKTNNMEYKKALEGISSPVVNKNVHEAYVRELFENFQSLWAEKVKKKWRKWKVKVYSRKPRCISSFVNKLMDGDRYEDSPGECLVAFGDATFARTGRGEHFSSPFGLFKKALQERATNSLKNPLSMTLKFSTVNENYTSQVCHRCCQPLNLIENDFSVVDGKVIMMKKKRKKQSCHRDDTTTTYSSVERKRQAMRDTKVVFQSLYSYGESPPALNQRMASSLAPLGVLPRSRLQRRR

SEQ ID NO: 196 - protein, 504 aa, Cystobasidium pallidum
DYDPTFLSWPAGRIDRAIRSAVLDVTQLCNWFNTYHLPLLSKSTAQITGSIGWLDEAGCFEHNTEGRNLLQTSKGQSQLRVAQWWTDAMQEYQTNWSTTMGPQAFGSERLKMFDLLFKRCIPNAELWAGSFSTDGFNLRILSIDPTRFVYNKSIEKKLPSIDFKRAGMNCYDFVTALFDGVKQSATTVETFGSVSHKLLGMQANPSEVVSSGSFASRTLRSKTVDFVQDLPAQRTRKGLPVDWTRLDGRNYQQVRQNLQKWADNQGDGHAIIAGVDLGIAFSQAIHVNRPAKPYECLTGSRAGVPKTTSSNSSFSKTFVVSPHALHEITRRLIRRKQSLRAQLCSSFLPCSPSKDPDQILRVSNMLDTSLKSGKHYCEASFRSLQCKRRFFDRIAVQFRELAWPELARGAGNPVRDSKDVGKLSPLVIVVGDGCELGGGSRGFKVHGADSATLGLRELVKRLLQWRLPVKVLVVDEAYTSQVCPDPNCKTSTSNEEAIQGLRSL

SEQ ID NO: 197 - protein, 820 aa, Meira nashicola
NLTIILSILISLIAVKEAYDAYLSNRRKQIGNPDHQFKLFFKSFDKFYGLISFTSQSWRQGGLCRTIFLPGPIKSTKGEYIESIDIDTSLIREGKRWKLIYRKDLNKRQDSLTKYIGYKEFFFIDIQRNKDTPLGYSLIELIWISKIWKLEERSDDDRIMVHLPPIKSIIHGDAKDTAFIRFTALSAKRITFSKFEQVVIRQRVQISISQSETISILLVYLYSQDNIQHALLIKGKKGVWTERCDRILDGRGKAIPLTPKRRSTFYHLYNIWEKEQNESVSIFARRYILEEEVSQISSTLKRITALQHLEKVKILEKENSSLLINKRIDFLYKNLVIIGIESQCNTPARYTLNDLELGIEEDIRIAEAPRQNIQSEQRQEFLASIIDPDLIPENGDDEQEEEVEILSEENQYSSAFIGIAPEAPSISQTTLLGIQTQADISRIHSEVVVRPALQRLEEIRSLEDLEVVEEETPIDPDLSTTSSMVAQLIDSLLQNRSRQQSIYSFFHQQAPDLIIPTSSGSDSISNYRPELTPLQLDATALVQSIYPQTQIPPTTQEDIVIPLPEEIGVFIEDAENQSFEEVQIRICAIDPGIRTFATIIDPIRCKGFRWGEQDFQRLVIIRKKISRIQSELSMPLKNSKKRAKQEVIFRLWQKHNNLVRDLHIRLSKWLNENYDVVFLPKLDVARMVRKKGRFNPPPPPRITTVPTQAEQIAEIQRRREERKKGRKINKQTAASMHALAHSKFYNRLQETMGFLPTITEEFTSQGCSSCGTRKTNLGSAKVYNCPNPLCQLRADRDLNGAKNILQKIIIEVEKLGTVPS

SEQ ID NO: 198 - protein, 365 aa, Pilasporangium apinafurcum
HPSIECRFNIRQNKKNCSFEKQHNQKSNQLRGVLVFEHCDKMTSTSDGIEKEITKKRKVRQKQSVYTTVKTGWRNFCKYKRMAEKIDEAVRVCSRIACEASMLASIHVLRLLEAGEELPPLDNNFFNRCSSAIANLAGSGEVHSDLETSLDLYRTQHPSVYEPTEKKSYMTQMLVMIAQHARQNFQVSNRLTFYSRLCKWIRLQIRLHNSDYFEKHQDKIIKSAVSMLGRASTQTQHSLFGQMLTYGNASFTSSAKGNIAVPATTLRKKIGSRCHVVDVGEFRTSKLCCACHKKMKGFVLDEKIHSDGLYGVQHCKKSECHRILWDRGINAAINILRLFIDQVKKKRRPEAFTRKENELVLEIKN

SEQ ID NO: 199 - protein, 220 aa, Pilasporangium apinafurcum
EYSYLAGMKKHTFWHDNLKKREHEYGRIILEMPSFKTTSYEQYMGNLKYVWRYLDFLVSFRARHPFHKWRFFQFGFSRKTLVHLAKRLVPTPSPHVCIGLGDWSQQDFVKDHAHGPVKRFTRELVKCATILQIDEYCTSQRCSKCYQQLEETPFPTKKTDGSTDIKFSHQVLRCNNSECRITWERDVNASKNILTLAMCLLHGLSRPQELRRGEKNVGRE

SEQ ID NO: 200 - protein, 210 aa, Pilasporangium apinafurcum
SKDRFYRECGYHGRTKLTKEWIGAEPDIKTFNESVPSTKVANLVSYLKRVRFCLVYLDCLFGVYSSTRMKRLRWSTYIRRQQTYEKVVKNLTGGNKRTVIAYGDASFTSSAKGNVNVPTTTLEKKVGSRCRVVDVNEFRMNKLCCACHKRMKGFVLDGKTVSDGLYGVRHCKNSECHRTLWNRDINQVKKKRRLEAFTRKKNELVLEIKT

SEQ ID NO: 201 - protein, 285 aa, Pilasporangium apinafurcum
ALHFDRRYVSLTISRPKLLAREQKETFSLEDWIFGLDPERKKIFTAVVYKEESMATLQKPKGENVKHEVIHWSKGRFYRECGYHRRTKLTKEWIGAEPDIKTFNESVPSTKVANLVSYLKRVRFCLVYLDCLFGVYSSTRMKRLRWSTYIRRQQTYEKVVKNLTGGNKRTVIAYGDASFTSSAKGNVNVPTTTLEKKVGSRCRVVDVNEFRMNKLCCACHKRMKGFVLDRKVVSDGLYGVRHCKNSECHRTLWDRDINAAINILRLFIDQVKKKKRLEAFTRGKG

SEQ ID NO: 202 - protein, 361 aa, Pilasporangium apinafurcum
SDGVWGRTLPPDPGLPYYKTVKTSLASVLKTSEKQLMISHAATTVNRIVIRSLLFLRLYLMHHKGIPPVVNAKLVDTVFKTPCQQKARGRLPSATAKALRDKLTAFYKQYFEPLLLIGDELLFYTHLNAALDYASVQAVIIFETNIKQHFVEYVEAYVNTAWQKDYLVKRIRVTRKLLVNSKATEFYEGRLYRKMRLNNFYNIHKAEQRPVQRFKEIFGTLNAVVMGIGDWEQKNHRKFKEPTKGKGFRTLSRKGGYSVYLVDEFKTSCQCSHCQAHGAKCEKFRVRLDPNTKKTGEDRQLRLVHGLLLCQQCHRLWNRDANSSINIARPTRQALERRGQAVYLSRQARLPPADSAVMSTA

SEQ ID NO: 203 - protein, 200 aa, Pilasporangium apinafurcum
ADAEFDIKTFNEKVPSAKVANLVSYLKRVRFCLVYLDRLLDVYSSRRMKRLRWSTYICRQQTYEKVVKNLTDGNKRTVIAYGDASFASSAKDDIAVPTTTLRKQIDSRCRVVDVDEYKTSKLCCACHKKMKGFVLDGKIVSDGLYGVRHCKNSECHRTLWDRDINAVINILRLFIDQVRKKRRLEAFTRKENELVLEIKN

SEQ ID NO: 204 - protein, 269 aa, Pilasporangium apinafurcum
RWTTKALRDRLTAFYKQHFEPLLPIGDEPLSYTHLSIVLDYASVQAVTVFEANIKQHFVEHTEAYVNTVWQKKCLVEHIRATRKLLVNSKVTEFYEGNLYCKMRLNNFYNIRKSEQRLVQRFKEIFDTLNEVVVGIGDWEQKKYRKFKEPTKEKGFMTLLRKAGYSVYLAGEFKTRCPCSHCQAEDVKCEKFRIRLDSNTKKADEGRQLRLVRGLLLCQQCHRLWNRGTNYSINIAQLTRQALEGRRRLEYLSRQRRLPPADSAVTSTA

SEQ ID NO: 205 - protein, 395 aa, Pilasporangium apinafurcum
SKASKKSNQLRGVLVFEHCDKMASMSDGIEENTTKKRRARPDFAERKVRQKQIVYTTVKTGWRKFCKDKQMTEKIDEAVRVCSRIACEASVHVLRLLEAGEELPPLDNNFFNRCSSAIANLAGNRKVTNSELETSLDLYRTQHLSVYEPTEKKPYMSQMLVMIAQQVRQNFQVSNRLTFYSWLCKWMHLQIRLHNSDCFEKHQGKIIKSAVSLLAHTSAQTQYSLFGQILAYGNASFTSSAKGNIAVPTTTLEKKIGSRCRVADVDEFRTSKLCCVCHKKMKGFVLDGKVVSDGLYGVRHCKNSECHRTLWDRDINAAINILRLFIDQVKKKGDSRRSQGKRMNWYLKLKNEVINDLTAMIPETTNECSNMNQESNKATLVGNSGDIICKSREKQ

SEQ ID NO: 206 - protein, 350 aa, Pilasporangium apinafurcum
SKASKKSNQLRGVLVFECCDKMASMSDGIEENTTKKRRARPDFAERKVRQKQIVYTTVKTGWRKFCKDKQMTEKIDEAVRVCSRIACEASVHVLRLLEAGEELPPLDNNFFNRYSSAIANLVGSGDVHSDLETSLDLYRTQHPSDYEPTEKKAYMSQMLVMIAHHARQNFQVSNRLTFYSRLCKWMHLQIRLHNSDYFEKHQGKIIKSTVSLLVRASTQTQYSLFGQMLAYGNASFTSSAKGNIAVPTTTLRKKIGSRCRVVDMDEFGTNKLCCACHKKMKGFVLDGKVVSDGLYGVRHCKNSECHRTLWDRDINTTINILRLFIDQVKKKRRLEAFTRKKNELVLEIKN

SEQ ID NO: 207 - protein, 372 aa, Pilasporangium apinafurcum
SDGIWRQAPLPDLNLPYYRTVKISLASVLKTLEKQPVISRAAATVNHIVIRSLLFLRLYLMHRKDTPPVVNAELVDTVFKTVCQQKAIGRSPSATAKALQDKLTAFYKQHFEPLLPIGDQPLSYIHLNTILDCASVQAVTVFKTYIMQHFVEYVEAYVNMVEQNYRVERIRATRKLLVNSKTTEFYEGRLYNKVTGFYEGGLYRKMRLNSFYNIRKSERRLVQRFKRILGTPDKVVIDIDDWDQKKHRKFKEPTKGKGFRTLLKKADCSLYLVDEFKTSCQCSHCQAEGAKCEKFCVRLGSNTKKADEDRQLRLVHDLLLCQQCHRLWNRDANSSINIARLTRQALERRGRLEYLNLQTRLPSADSAVMSTA

SEQ ID NO: 208 - protein, 312 aa, Pilasporangium apinafurcum
CTYFNIGLVTKVQRKEFGHFILTDGMSVSVTISRLKLPAREQKEGFSHEDRIIGLDSGRKKVFTAVVYKEESMATLQKPKGENVKHEVIHWSKDRFYREWGYHRRTKLTKEWIDAEPDIKTFNKNVPSAKVVNLVSYLKRVRFCLVYLDRLLDMYSSKKMKKVRWSTYIRRQQTYEKVVKNLTGGNKRTVIAYGDASFTSSAKGNIAVPTTTLRKKIGSRYRVVDVDEYMTSKLCCACQKKMKGFVLDGKVVSDGLYGVRHCKNSECHRTLWDRDINAAINILRPFIDQVKKKRKLEAFTRKENGLVLEIKN

SEQ ID NO: 209 - protein, 227 aa, Pilasporangium apinafurcum
NMKSSTGLRVVSIECGYHRRTKLTKEWIDAEPDIKTFNENVPSIKVANLVSYLKRVRFCLVYLDCLLDVYSSRKTKRLRWSTYIRRQQTYEKVVKSLICGDKRTVIAYGDVRFTNSAKGNIAVPTTTLRKKIGSRCRVVDVDEFRTSKLCCACHKKMKGFVLDGKVVSDGLYGVRHCKNSECHRTLRGRDINTAINILRLFIDQVKKKKRLKAFTRKENELVLEIKN

SEQ ID NO: 210 - protein, 307 aa, Pilasporangium apinafurcum
ALHFDRRYVSLTISRPKLPAREQKEIFSLEDQIIGLEPGRKMIFTTVVYKGESMATLQKPKGENVKHEVIHWSKDRFYRECGYHRRTKLTKEWIDAESDIKTFNENAPSAKVANLVSYLERVRFCLMHLDHLLDMYSSRRMKRLRWLTYICRQQTYEKIVKSLTGGDKRTVIAYGDASFTSSGKGNIAVPTTTLRKKIGSRCRIVDVDEFGTSRLCCACHKKMKEFVLDGKVVSDDLYGVQHCKNSEYHRTLWDRDINAAINILRLFIDQVKKKRRLRALTRKENELVLEIKNRGDKRPHCYDSGNG

SEQ ID NO: 211 - protein, 346 aa, Pilasporangium apinafurcum
NKNEIWETFFRTNMKVFKARDYWFNHMISIDGVARSILLIRRDLHDKNTPKKKLVVARERYVDDLTVDEAQQLSERCVVGIDPNMSDLLFCTNEDVSKQHRYTQNQRRQETKAKKYAQIMLNDKMHSLVEGRTIVEWESDLSVYDRKTVNSDKFKAFIKAKLLLNSKVTKFYEGGLYRKTRLNNFYNIHKSEQRLVQHFKEIFGTPDKIVVGIGDWEQKKHRKFKEPTKGKGFRTLLRKAGYSVYFVDEFKTSCQCSHSQAESAKCEKFRVRLDPNTKKADEDRQLRLVHDLLLCQQCYRMWNRDVNSSINIARPTRQALMGRERPEYPNCQIQLPPAHSAVASAA

SEQ ID NO: 212 - protein, 200 aa, Pilasporangium apinafurcum
IDAEPDIKTFNENVPLAKVANLVSYLKRVRFCLVYLDRLLDVYSSKKMKKLRWSTYIRRQQAYEKVVKNLTGGNKRTVIAYGDANFTSSAKGNIAISTTTLRKKIGSRCRVVDVDEFRTSKLCCVCHKKMKGFVLDGKVVIDGLYGVRYCKNSECHRALWDRNINGSINILRLFINQVKKKRRLEAFTRKENELVLEIKN

SEQ ID NO: 213 - protein, 259 aa, Pilasporangium apinafurcum
RYVSWYGNLPSKASHKRAKKEIFSLEDRIISLDPGRKKIFTAVVYKDESMATLQKPKGENVKHEVIHWSKDHFYRECGYHRRTKLTKEWIDAEPDTKTFKGNVPSTKVASLVYYLERMRFCLVYLNRLLDVCSSRRMKRLRWSTYVRRQQTYEKVVKNLTGGNKRTVITYGDANFTSSAKGNIALPTTTLRKKIGSRCRVVDVDEFRTSKLCCACHKKMKEFVLDGKAVSDGLYGVQHCKNSECHPTLWDRDIKPQSTF

SEQ ID NO: 214 - protein, 252 aa, Pilasporangium apinafurcum
QSPVQSFPRERKKETFSLEDRIIGLDPRRKKIFSAVVYKEESMATLQKPKGENMKHEVIHWSKDRFYRAYDYHRRTKLTKEWIDAEPDIKTFNEKIPSAKVANLVSYLKRVRFYLVYLDRLLDMYSSRRMKRLRWPTYIRRQQTYAKVVKNLIGGNKRTVIAYGDASFISSAKGNIAVPTTTLRKKIGSRCRVADVNEFRTSKLCCACRKEMKGYVPDEEIGGKGLYNVRHCKNSECRRTLWAVTSTPQSTF

SEQ ID NO: 215 - protein, 386 aa, Pilasporangium apinafurcum
MLRTRKGKANRQPHLLLPVMYKFLHFIKDFNTKNTGNPEYRELRSFSLLPFKSGFTCQHFKMCNRGLRALLRRADLFVLPEGEKWNEVVGYWWEELFKISKFETKNRKFAGQIMTDGKSVSITLRKPKKAQHETPFKPQIEQYEEFRGLDPGRRDLFVAMNQKGETMSRFTKEYCGDAGFKRANKKIKQWQSLNAKVLEAIRNMPTKKTCSLEGLKKYVVFMIPKLDYLLKFHIKKPFRKLKFKRYWSMQRELQQLCQQLTMKAGKRTIVGFGDWSNQDIGRFIKKCPSGPVKKLEHELRRHCVMISIDEHRSSKVHLHSSVDERIDFEEHACLSDQFSDRKCRDGVVRRCKVHSVLYCTKLNGVCGMIMNRDKNASKNTVTKRLK

SEQ ID NO: 216 - protein, 200 aa, Pilasporangium apinafurcum
QTDSTRACATDPGIRSFITLYDPHGMTLSVDDAKDAMFNHCLLIDRLQSQLSQEESKRKRHRMKKRVYRLFQRMKAMMSDPHHKVSKWLSDNYHEVLLPTFGTSELTSKQKRISSKTSRKMLMWSHYKFKKLLSYKMERSGGCVIDCGEHYTAKTCSQCGRINHAIKYQKVFDCSHYKLVLDRDINAARNIFLKNEHLFS

SEQ ID NO: 217 - protein, 331 aa, Pilasporangium apinafurcum
RHFKPIFIEINTTFLKELAKALDDPVELYADKAELWRTYFNIGLVTKDKRKEFEHFILTNDMSVSTISRPKLPTREKKERFSLEDRIIGLDPGRKKIFTAVVYKDESMATLQKPKGENVKHEVIHWSKGRFYRECGYHRRTKLTKEWIDAEPDIKTFNENAPSAKVANLVYYLERVRFCLVYLDCLLGFYVSKKMKRLRWSTYIHRQQTYEKVVKSLTGGNKRTVIAYGDASFTSSAKGNIAVPTTTLEKKIGSRCCIADLNEFRTSKLCCACHKEMKGYVPDEEIGGKGIYNVRHCKNSECHRTLWDCDINAAINMLRLFIDKMKKKRIL

SEQ ID NO: 218 - protein, 404 aa, Pilasporangium apinafurcum
MQELSDRVRNEIGLLLLDLNKSPKRHMPFLRTMLIDIQAHVDDGMKGCRVWSLLPQKQFRPIFIKINTTVLKHLAKALGDPVELYADEAELWRTYFNIGILTKGQRKEFEHFISTDGMSVSVTISRPKLSTREKKEIFSLEDRIIGLDPGKKKIFTAVVYRDESMATLQKPKGENVKHEVIHWSKGRFYRECGYHRRTKLTKKWVDVEPDIKTFNENVPSAKVPDLASYLKRVRFCLLYLDRLLGSYLSKKMKRLPWSTYIRRQQTYEKVVKNLTGGNKRTVIAYGDASFTSSAKGNIAVPTTTLRKKIGSRCRVVAVDEFRTSILCCACHKKMKGYVPDEEIGGKGLYGVRHCKNSECHRTLRDRDINTAINILRLFIDQVKKKRKLESFTRKKNELVLEIKN

SEQ ID NO: 219 - protein, 238 aa, Pilasporangium apinafurcum
NLVADRRRTVVLHSPEHYTRLCFRASGDRLQDLHHAALCRVCKDICHMVGQNYRVERIRATRKLLVNSKATEFYEGRLYNKVTGLYEGGLYRKMRLNSFYNIRKSERRLVQRFKRILGTPEKVVIDIDDWEQKKHRKFKEPTKGKGFRTLLRKAGYSVYLVDEFKTNCQCSHCQAEGAKYEKFRVKLDLNTKKPDEDRQFRFVHGLLLYQQRHRLWNRDVNSSISIARLTRQALEGRG

SEQ ID NO: 220 - protein, 225 aa, Pilasporangium apinafurcum
KEFEHFISADGMSVGVTNSRPKLPAREKKETFSLEDRIIDLDPRRKKIFTAVVYNEESMATLQKPKGENIKHEVIHWSKGRFYRECGYHRRTKLTKEWIGAEPDIKTFKGNVPSAKVANLVSYLKRVRFCLVYLDHLLDVYSSRRMKRLRWSTYIRRQQTYEKVVKNLTGGNKRTVIAYGDASFTSSGKGNIDVPTTTLRKKIGFRCRVVDVDEFRTSKLCCACH

SEQ ID NO: 221 - protein, 206 aa, Pilasporangium apinafurcum
EKNKDMTASPKNYVRDTVVGIDPGMQSLCTAIRVQEVDVEEKKAKCNGRIPKQSQAKESKEKRRKKRKKRRKRVSKHRHGIQQISAREHRHFAEVKKHTLWYEKLKQREHEYARIIREMPSFKTASYDQYMTSVKYVWRHLDFLVSFCASHPFRKWRFLQSRFSQKTFAHLATRATVLQINEYRTSQRCSECYQQVEETPFPTKKT

SEQ ID NO: 222 - protein, 275 aa, Pilasporangium apinafurcum
CGSHPSKASHERKKEAFSLEDRIIGLDPGRKKIFTAVVYKDESMTMLQNPKGENVKHEVIHWSKGCFYRECVYHRRTKLTKEWIDAEPDIKTFNENVPSAKVANLVSYLKRVRFCLVYLDRLLDVYSSRRMKRLPWSTYIHRQQTYEKVVKSPTGGDKRTVIAYGDAIFTSSAKGNIAVPTTTLRKQIGSRCRVADVDEFRTSKLCCACHKKMKGFILDGKVVSDGLYGVRHCKNSECHRTLWDRDINAAINILRLFIDEEKKKRRLKPFTRGKG

SEQ ID NO: 223 - protein, 200 aa, Pilasporangium apinafurcum
IDAEPNIKAFNEKVSSAKVANLVSYLKRVRFCLVYFDRLLDVYSSKKMKRIRWSTYIHRQQTYEKVVKNLTGGNKQTVIAYGDASFTSSAKGNIAVPTTTLRKKIGSRCRVVDVDEFRTNKLCCACHKKMKRFVLDEKIHSDGLYGVRHCKNSECYRTLWDRDINAAINILRLFIDQVKKKKRLEAFTRKKNELVLEIKN

SEQ ID NO: 224 - protein, 243 aa, Pilasporangium apinafurcum
CDNLSSKASHEREKREAFSLEDRVISLDPGRKKIFTAVVYKEKSMATLQKSKGENVKHEVIHWSKGRFYRECGYHRRTKLTKEWIDAEPDIKTFNRNVPSTKVASLVYYLERMRFCLVYLDRLLDVYSSRKMKRLRWSTYIRRQQTYEKVIKNLTDGNKRTIIAYGDASFTSSAKGNIAVPTTTLRKQIGFRCRVADVDEFRTSNLCCACYKKIKGFVLDGKVVSDGLYGVRHCKNSECHHTL

SEQ ID NO: 225 - protein, 312 aa, Pilasporangium apinafurcum
RTYFNISLVTKVQRKEFEHFISTDGMSVGVTISRPKVPVREKKERFSLEDWIIGLDPGRKKIFTAVVYKDESMATLQKPKGENVKHEVIHWSKGRFYRDCGYHRRTKLTKEWIDAEPDIKTFNENAPSAKVASLASYLKRVRFCLVYSDRLLDVYSSRRMKRLRWSTYIRRQQTYEKVVKSLTDGNKRTVIAYGDASFTSSAKGNIAVPTTTLEKKISSRCRVADVNEFRTSKLCCACQKKMEGFILDGKVVGDGLYGVRHCKNSEYHRTLRDRDINAAINILRLFIDQVKKKRRLEAFTRKENELVLEIKN

SEQ ID NO: 226 - protein, 241 aa, Pilasporangium apinafurcum
RVHLQRTNGKRSRGHQLLDMYAITQISTREYRHLAGFNRVHAWNEGIKQHEAAYGALMHGMLSFKTASFSRYFGRLKFVWTHINWLIDFCSRHAFRKWCFYQYVYKAKALNHVAERIVPVASKNTLVGFGNWSCRDGIKGHGIGPVKALKKKLAKRTTVRSVDDFRTSKRCFHCHAELSKVVFPKMVNGVPDGTIESRPVLHYESSECKTFWDRDVNASLNIMRVTTELFKNRARPEYLQR

SEQ ID NO: 227 - protein, 219 aa, Pilasporangium apinafurcum
NMKSSTGLRVVSIECGYHRRTKLTKEWIDAEPDIKTFNENVPSTKVPDLASYLKRVRFCLVYLDRLLNVYSLKKMKRLRWSTYIRRQQTYEKVVKNLTGSDKRTVIAYGDANFVSSAKDGIAVPATTLRKKIGSRCSVVDVDKFRTSKLRCACHKKMKELVLDGKIVSDDLYGVRYCKNSECHRTLWDCDSNAAINILRLFIDEVKKKRRLKAFTRGKG

SEQ ID NO: 228 - protein, 316 aa, Pilasporangium apinafurcum
QSPVQSFLAREQKEGFSLEDRIIGLDPGRKKIFIAVVYKDESMATLQKPKGENVKHEVIYWSKSRFYRECGYHRRTKLTKEWIDAEPDIKTFNENVPSAKVPDLVSYLEQMRFCLVYLDRLLDVYSSRRMKRLRWSTYIRRQQTYEKVVKSLTGDDKRTIIAYGDASFASSGKGNIAVPTTTLRKKIGSRCRVVDVDEFRTSKLCCVCHKKMKGFVLDGKIVGKSLYNVRHCKNSECHRTLWDRDINVAINILRLFINQVKKKRRLEAFTRKRTNWYSKSKTGVIKVLTAMILETDECSLYSPHVLYHAWYITPRE

SEQ ID NO: 229 - protein, 218 aa, Pilasporangium apinafurcum
YIGQQFASSCCDHCSVRFSSCHLTLIHCDETPTFFSKLIQFCTISIAFIQVACRSKTVIVFFICHIHLAKPVILTRKPDKRITSKSYFQYNQLQVCLCNQYGNFFLLVCHSTIRHHGVKALKKELAKRTIVRSVDEFRTSKRCFHCHAELSKVVFPKMANGVPDGTIESRSVLHCESSECKTFWDRDMNASLNIMRVTTEFFNNRARPEYLQRESSES

SEQ ID NO: 230 - protein, 262 aa, Pilasporangium apinafurcum
SLLPQKQFKPIFIKINTTVLKKLAKALDDPVELYADKAELWRTYFNIGLVTKDQRKEFEHFISTDGMSVGMTISCPKLPAKEKKETFSLEDRIISLDPERKKIFTAVVYRDESMATLQKSKGENVKHEVIHWSKGRFYREFGYHRRTKLTKEWIDAGPDIKTFNEKVSSAKVANLVSYLKRVRFCLVYSSRRMKRLRWSTCIRRQQTYEKVVKNLTGGNKRTVIAYGDASFTSSAKGNIVVPTTTLRKKIGSRCRVVLATRR

SEQ ID NO: 231 - protein, 302 aa, Pilasporangium apinafurcum
IIHQRKEFEHFISTDGMSVSVTISRPKLPAREKKTFSLEDRIIGLDPGRKKIFTAVVYKEESMATLQKPKGEDVKHEVIHWSKGRFYRKCGYHRRTKLTKEWIDAESDIKTFNENVSSAKIANFASYLERVRFCLVYLDRLLGFYLSKKMKRLRWSTYIRRQQTYEKIVKNLTGGDKRTVIAYGDASFTSSAKGNIAVPTTILRKKIGFRCRVADVDEYKTSKLCCACHKKMKGFVLDEKIVSDGLYGVRHCKNSECHRTLWDRDIHAAINILRLFIDQVKEKRRLKAFTRKENELVLEIKN

SEQ ID NO: 232 - protein, 302 aa, Pilasporangium apinafurcum
IIHQRKEFEHFISTDGMSVSVTISRPKLPAREKKTFSLEDRIIGLDPGRKKIFTAVVYKEESMATLQKPKGEDVKHEVIHWSKGRFYRKCGYHRRTKLTKEWIDAESDIKTFNENVSSAKIANFASYLERVRFCLVYLDRLLDVYSSKKMKRLRWSTYICRQQTCEKVVKNLTDGNKRTVIAYEDASFTSSAKGNIAVPTTTLEKKIGFRCRVADVDEYKTSKLCCACHKKMKGFVLDEKIVSDGLYGVRHCKNSECHHTLWDHDINAAIKILRLFIDQVKEKRRLESFTRKENELVLEIKN

SEQ ID NO: 233 - protein, 263 aa, Pilasporangium apinafurcum
LLVQPHDQHRWGRSQHPADQTRSVWKEYPKKKLVVARERYVDDLAPDEAQQLSKRSVVGIDPNMSDLLFCVNEDASKRYRYTQNQRREETKAKKYAQIMLNDKRHSLVEARTIVEWKSDLSVYDRKTVNSDKFKAFIKAKLLVNSKVTEFYEGRLYRKMRLNNFYNIHKSEQRLMQRFKEIFGTPDKVVVGIGDWKQKKDRKFKEPTKGKGFKTLLRKAGYSVYFVDEFKTSCQCSHSQAEVAKCEKFRDRLDPNTKKADEDR

SEQ ID NO: 234 - protein, 354 aa, Pilasporangium apinafurcum
SKAPKKSNQLQGVLVFEHCDKMTSTSNGIEENTTKKRRTRPGFAERKVRQKQSVYTTVKTGWRKFCKDKQMAEKIDEAVRLCSRIACEASMVASVHVLRLLEAGEELPPLDNNFFNRCSSAIANLTGSGKVHSDLETSLDLYRIQHPSVYEPTEKKSYMTQMLVMIAQQARQNFQVSNRLAFYSRLCKWMCLQIRLHNNDYFEKHQDKIIKSAVSLLIHASIQTRYSLFGQMLAYGNASFTSSAKGNIAVPTTTLRKKIGSRCRVVDVDEFRTSKLCCASHKKMKGFVLDGKIVGDGLYGVRYCKNSECHRTLWDRDIHAAINILRLFIDEVKKKRRLEAFTRKENELVLDIKN

SEQ ID NO: 235 - protein, 343 aa, Pilasporangium apinafurcum
FNIGLVTKVQRKEFEHFISIDSMSVGVTISRSKLPEREQKETFSLEDWIIGLDPRRKKIFTAVVYKEESMTTLQKPKGENVKHEVIHWSNGRCYRECGYHRRTKLTKEWIDAEPDIKTFNENVPSAKVANLVSYLKRTRFCLVYLDRLLDVYSSRRMKRLRWSIYIHRQQTYEKIVKNLTDGNKRTIIAYGDANFTSSAKGNIAVPTMTLRKKIGSRCRVVDVDEFRTSKLCCACHKKMKEFVLDGKIVSDGLYSVRHCKNNECHHTLWDRDINAEIDVLRVFIDQVKKKKRLEAFTRKKMNWYSKSKTEVINDLIAMVPETDECSLYSPGVLYHTWYRTPGE

SEQ ID NO: 236 - protein, 224 aa, Pilasporangium apinafurcum
TSNQQYNVQQISTRGCRHLTGMNKCTFWHENLKKREHEYERIIREMPSFKTVSYGQYMANVKYVWRHLDLLVSFCAMHPFRKWYFLQLRCSQKTLANLAKRLVPTPSPQICVAVGDWSPVDSVKGHTHGPVKRFIHELAKRATVLQINKYCTSQRCSECYQQLEETTFPTKKADGSADINFSHQVLRCNNSECRITWEQDVNASKNILTLAICLLHGLPRLPEL

SEQ ID NO: 237 - protein, 337 aa, Pilasporangium apinafurcum
KSNTGIQSDGVRRQAPPPPPDPSLPYYKMVKTSLASVLKMPEKQPVISQAATMVNHIVIRSLLFLRLYLIHHKDTPPIVNVELVDTVFKTICQRKARGRLPSSTAKALRDKSNVFYKQHFEPLLPIGDQPLSYTYLNTVLDYASVQVVTIFETSIKQHFVEYVETYVNTVWQKDYLVERIRATRKLLMNTKATEFYEGRLYNKVTGLYEGRLYRKMGLNNFYNIRKSEQRLVQRFKEIFGTLNEIVVGIGDWEQKKHRKFKERTKGKGFRTLLRKAGYSVYFVDEFKTSCQYSYCQPEGAKCEKFRVKLDPNTKKTNEDRRLRLVHGLLLCQQCHRL

SEQ ID NO: 238 - protein, 277 aa, Pilasporangium apinafurcum
STTAEQAKCGGHWSNMSDLLFCVNEDTSKRYRYTQNQRRQGTKVKKYAHIMLNNKRHSSVEGRTIVGWESGLSVYDRKTVDSDKFKAFIKAKLLVNNKVNEFYEGELYRKMRLNNFYNIHKPEQRLVQRFKEIFCTSDKVVMGIGDWEQKKHRKFKEPTKRKGFRTLLRKAGYSVYLVDEFKTSCQCYHCQAENAKCEKFRVRLDLNTKKANEDRQLRLVHGLLLYQQYHRLWNRDVNSSINIDCLTRQALKGRERPEYLSHQTRLLPVDSAVTSTA

SEQ ID NO: 239 - protein, 345 aa, Pilasporangium apinafurcum
SLLSQKHFKPIFIKINTTVLKHLAKTLSDPVELYADKAELWRMYFNIGLVTKVQRKEFVHFISTDGMSVSVTISRPKLPTREQKEIFSLEDWIIGLDSERKKIFTALVYKEESMATLQKPKGENVKHEVIHWSKDRFYRECSYHRRTKLTKEWIDAEPDIKTFNEKVSSAKVANLVSYLERVRFCLVYLDHLLDVYSSRRMKRLRWSTYIHRQQTYEKVVKSLTGDDKRTVIAYGDTSFTSSAKDNIAFPTTTLRKKIGSRCRVIDVDEYKTSKLCCACHKKMKGFVLDGKIVSGGLYGVQHCKNSECHCTLWDRDINAAINILRLFIDEVKERRRLEAFTRGKG

SEQ ID NO: 240 - protein, 244 aa, Pilasporangium apinafurcum
IIHQRKEFEHFISTDGMSVSVTISRPKLPTREQKEIFSLEDWIIGLDSERKKIFTALVYKEESMATLQKPKGENVKHEVIHWSKDRFYRECSYHRRTKLTKEWIDAEPDIKTFNEKVSSAKVANLVSYLERVRFCLVYLDHLLDVYSSRRMKRLRWSTYIHRQQTYEKVVKSLTGDDKRTVIAYGDTSFTSSAKDNIAFPTTTLRKQIGFGCRVVDVDEFRTSKLCCACHKKMKGFVLDRKSYQ

SEQ ID NO: 241 - protein, 408 aa, Pilasporangium apinafurcum
RHINMMWQKNYLVERIKANRRTKREREAAIRKLCVTLRQLKNDLLNVGSEPFQSHPFYYSWVRQQKSLVLPAKTRYEKDLLYYDLKCKPQDYWPGMLRMIEVIKQTRKKVRNFCPLRTSVIPRHITLDTTTLIHLLFTKENGTKSKLLTEGELVRKKKIWKMFFRTNMKVFKTRDYWFNHMIDTDEIACSILLVRRDLYGKNIPKKKLVVARERYVDDLTADEAQQLSKQSVVGIDPNRSDLLFCVDEDVSKRYRYTQNQRRQKTKVKKYAQIMLNNKRHSSVKGCTIVEWELDLSAHNRKTVDSDKFKTFIKAKLMVNNKVTEFYASRLYRKMRLNSFYNIRKSEQRLVQRFKEIFDTPDEVAVGIGDWKQKKYRKFKEPTKDKGFKTLLRKAGYSVYLVDEFKTSC

SEQ ID NO: 242 - protein, 345 aa, Pilasporangium apinafurcum
SLLPQKQFRPIFIKINTTVLKHLAKALSDPIELYADNAELWRRYFDMDLVIIAQRKKFEHFILTDGISVGVTISRPKLPTREKKEIFSLEDRIIGLDPGRKKIFTAVVYKEESMAMLQKPKGENVKNEVIHWSKGRFYRQCGYHRRTKLTKEWIDAEPDIKIFNENVPSAKVANLVSYLKRVRFCLVYFDRLLGLYLSKKTKRLPWSTYIRRQQTHAKVSKNLTDGDKRTVIAYGDASFTSSAKGNIAVPTTTLRKKIGSRCRVVDVDEYKTSKLCCACHKKMKGFVLDGKIVSGGLYGVRHCKNSECHHTLWDRDINAAINILRLFIDEVKKKRRLKPFTRGKG

SEQ ID NO: 243 - protein, 350 aa, Pilasporangium apinafurcum
LTTFVANQLRFLTAQQCKPIKGLPFYKLAKALSDPVELYADKAELWRTYFNIGLVTKVQRKEFEHFISTDGMSVSVTISRLKLPAREQKEGFSHEDRIIGLDPGRKKIFTTVVYKEESMATLQKPKGENVKHEVIHWSKGRFYRECGYHRRTKLTKEWIDAEPDIKIFNENVPSAKGVNLVSYLRRVRFCLVYLDRLLGFYLSKKMKRLRWSTYIRRQQTYEKVVKNLTDGNKRTIIAYGDASFTSSAKGNIAVPTTTLRKKIGSSCRVADVDEFRTRMLCCACHKKMKGFVLDGKIVGDGLYDVRRCKNSECHHTLWDRDINAAINILRLFIDEVKKKRRLKPFTRGKG

SEQ ID NO: 244 - protein, 380 aa, Pilasporangium apinafurcum
LTIYSRLCKWMRLQIRLHNSDYFENHQDKIIKSAVSLLVRASTQTQHSLSNLISAYSRFKKYPIPTEEIVWIQELSDRVRNEIEPLPLDLNKSPERHMPFLRTMLKDIQAHVDNGMRGCRVWSLLPQKQFKLIFIKINTTVLKHLAKALGDPVELYADEAELWRTYFNIGLVVIAQRKELVHFISTDGMSVSVTIFCPKLPTREQKEAFSHEDRIIGLDPGRKKIFTAVVYKEESMATLQKPKGENVKHEVIHWSKGHFYRECGYHRRTKLIKEWIDAEPDIKAFNENVPSAKIANLVSYLKQVRFCLVYLDRLLDVYLSKKMKRLRWSTYIRRQQTYEKVVKNLTGGNKRTVIAYGDASFTSSAKGNIAISTKANWFQM

SEQ ID NO: 245 - protein, 285 aa, Pilasporangium apinafurcum
FFRFRKKKRVAATRKRSSRRRKKRLLRRKRCKLAEPVTRRVHLRRTNGKRSRGHQLLDMYAITQISTREYRHLAGFNKVRAWNEGIKQHEVAYGALMHGMPSFKTASSSRYFERLKFVWAHINWLIDFCSHHAFRKWRFYQYVYKAKALSHVAERIVPVASKNTLVGFGNWSCRDGIKGHGTGPVKALKKELAKRATVRSVDEFRTSKRCFHCYAELSKVVFPKMVNGVPDGTIESPSVLHCESSECKTFWDRDVNASLNIMRVTTELSNNRARPEYLQRESSES

SEQ ID NO: 246 - protein, 237 aa, Pilasporangium apinafurcum
ADAEFDIKTFNEKVPSAKVANLVSYLKRVRFCLVYLDRLLDVYSSRRMKRLRWSTYIRRQQTYEKVVKNLTDGNKRTIIAYGDASFASSAKDDIAVPTTTLRKQIDSRCRVVDVDEFRASKLCCACHKEMKGYVPDEEIVSDGLYGVRHCKNSECHRTLWDRDINAAINILRLFMDQVKKKRRLEAFTRKKNESVLEIKTEVIKVLIVIFPGTDECSLYSPTCSVPRVVENMWSKCY

SEQ ID NO: 247 - protein, 295 aa, Pilasporangium apinafurcum
LTSKSRKDNSTSIEIQPQSLEYVEGQLRFFPRYFSFSKNGWIKIKGQLPALKYSVRLQQTREDRYYLCIPQVKEFKQTNSIRTCAIDSGIRSFITLYDPHGMMLSVDDAKDAMFNRCLLIDRLKSRLSQENSKRKRCHKRERVYRLFQRMKAMMSDAHHKVSKWLSDNYHEVLLPTFGTSELTSKQKRISSKVSRKMLMWSHYKFKKLLSYKMERSGGRMFDCGEHYTTKTCSHCGRINHTIEHQKVFQCPHCKFVLDRNVNTPRNIFLKNEHLLSWTHQVQVSETPTPRSSSLS

SEQ ID NO: 248 - protein, 295 aa, Pilasporangium apinafurcum
LTSKSRKDNSTSIEIQPQSLEYVEGQLRFFPRYFSFSKNGWIKIKGQLPALKYSVRLQQTREDRYYLCIPQVKEFKQTNSIRTCAIDSGIRSFITLYDPHGMMLSVDDAKDAMFNRCLLIDRLKSRLSQENSKRKRCHMRERVYRLFQRMKVMMSDAHHKVSKWLSDNYHEVLLPTFGTSELTSKQKRISSKVSRKMLMWSHYKFKKLLSYKMERSGGRMIDCGEHYTTKTCSHCGRINHTIEHQKVFQCPHCKFVLDRNVNTPRNIFLKNEHLLSWTHQVQVSETPTPRSSSLS

SEQ ID NO: 249 - protein, 212 aa, Pilasporangium apinafurcum
ALHLDRRYVSWYGNLPSKASHKRAKKEILSLEDWIISLDPGRKKIFTAVVYKDESMATLQKPKGENVKHEVIHWSKGRFYRECGYHRRTKLTKKWVDVEPDIKTFNENVPSAKIPDLASYLKRVRFYLLYLDRLLNVYSSRRMKRLRWSNYIRRQQTYKKVVKNLTGGDERTVIAYGDPSFTSSAKGNIAVPTTTLGKEIGSRCRVVLVTRR

SEQ ID NO: 250 - protein, 213 aa, Pilasporangium apinafurcum
HFVEYVEAYVNMVWQKHYLVKRIRATRKLLVSSKATGFYEGRLYRKMRLNNFYSIRKSEQRLLQRFKEIFGTPDKVVVDIGDWKQKKHHKLKEPIKGKGFRALLRKADYSVYLVDELKTSCQCSHYQVEGAKYEKFRIRLDPNTKKRDEDRQLRPVHGLLLCQQCHRLWNRDVDSSINITRLTRQALEGRGRLEYLSHQTLLPPVNSAVTSTA

SEQ ID NO: 251 - protein, 265 aa, Pilasporangium apinafurcum
RHFKPIFIKINTTVLKEIAKALSDPVELYADKAELWRTYFNISLVTEGQRKEFEHFILTDGMSVSVTISRTKLPMKEKKETFSLEDRIIGLDSGRKKIFTAVVYKEESMATLQKPKGENVKHEVIHWSKDRFYRACDYHRRTKLTKEWIDAEPDIKTFNENIPSAKVANLVSYLERVRFCLVYLDRLLDVYSSKKMKRLQWSTYTRRQQTYEKVVKSLTGGNKRTVIAYGDASFTSSAKGNIAAPTTTLRKKIGSRCRVVLVTRR

SEQ ID NO: 252 - protein, 210 aa, Pilasporangium apinafurcum
LCSRIACEAYMLASIHVLRLLEAGEELPPLDNNFFNRCSSVIANLTGNRKVTNPELETSLDLYRTQHLSVYEPTEKKSYMSQMLVMIAQQARQNFQVSNRLTFYSRLCKWMRLQIRLHNSDYFEKHQGKIIKSAISLLVRASTQTQHSLFGQMLAYGNASFTSSAKGNIAFPTTTLRKKIGSRCRVANVDEFRTTKLCCACHKKMKGVRP

SEQ ID NO: 253 - protein, 293 aa, Pilasporangium apinafurcum
ALYLDRQYVSVTISRPKLPAREKKETFSLEDRIIGFDPGRKKIFTAVVYKEERMATLQKPKGENVKHEVIHWSNDRFYRECGYHRRTKLTKEWIDAGPDIKTFNGKVPSAKVANLVSYLRRVRFCLVYLDRLLDVYSSRRIKRLRWSTYIRRQQVYEKVVKNLTGGDKRTVIAYGDASFTSSGKGNIAIPTTTLRKQIGLRCRVVDVDEFRTSKLCCVCHKKMKGFVLHGKVVSDGLYGVQHCKNSECHRTLWNRDINAAIKILRLFIDQVKKKKRLKAFTRNENELVLEIKN

SEQ ID NO: 254 - protein, 387 aa, Pilasporangium apinafurcum
IEVFTTSHSSSHPLSVASTLFAKIERTAALRNSIIKGTEKSNQLRGVLVSERCDKMASTSNSIEEKTTKKRRARLGFAKRKVRQKQSVYTTVKTGWRKFCKDKRMAEKIDEAVVLCSRIACEASMLASVHVLRLLEAGEKLPPLDNNFFNRCTSAIDNLADSREVHSDLKTSRNIYMAQHLSVYESTEKKSYMSQMLVMIAQLARQNLQVSNRLTFYSRLCNWMRLQIRLHNSDYFEKHQGKIIKSAVSLLVRASTQTHSLSGQMLACGNASFTSSAKTNIAVPTTTLRKKIGSRCRVADVDEFRTSKLCCACHKKMKGFVLDEEIGSDGLYGMRHCKSSECHRTLWDRDINTAINILRLFIDEVMKKKGLEAFMRKENELVLEIKN

SEQ ID NO: 255 - protein, 275 aa, Pilasporangium apinafurcum
MPSWWTRYSRWFVSRRLQVDCLRPSAIAKALRGNLTVFYKQYFKPLLPIGDEPLSYTHLNTVLDYASVQAVTVFEANIKQHFVKYVEAYVSMVWQKDYLVERIRATRKLLVNSKVTEFYEGRLYRKMRLNYFYNIRKSEQRLLQHFKEIFGTPDEVVVSIGDWEQKKYRKFKEPAKGKGFRTLLRKVGYLVYLVGEFKTSCQCPYCQTEGAKCEKFRVRLYPNTKKTGEDRQLRLVHSLLLCQQCHRLWNQDANYSINIARLTREALEGRGDQSI

SEQ ID NO: 256 - protein, 346 aa, Pilasporangium apinafurcum
NKNEIWETFFRTNMKVFKARDYWFNHMISIDGVARSILLIRRDLHDKNTPKKKLVVARERYVDDLTVDEAQQLSERCVVGIDPNMSDLLFCTNEDVSKQHRYTQNQRRQETKAKKYAQIMLNDKMHSLVEGRTIVEWESDLSVYDRKTVNSDKFKAFIKAKLLLNSKVTKFYEGGLYRKMRLNNFYNIHKSEQRLVQHFKEIFGTPDKIVVGIGDWEQKKHRKFKEPTKGKGFRTLLRKAGYSVYFVDEFKTSCQCSHSQAESAKCEKFRVRLDPNTKKADEDRQLRLVHGLLLCQQCYRMWNRDVNSSINIARLTRQGLVGRERPEYLSLQTRLLSADSAVTSIA

SEQ ID NO: 257 - protein, 247 aa, Pilasporangium apinafurcum
SKLFHIKNFETKNRKFAGEIVADGKAVSIVLRKPKVKVVAQEPKLEDYDVIWGLDPGRRDLFVATNQNDQKISCSSKEYCEDAKFKHSGKKIKYWQEKNKMVLKAIRNMPTKKTATLQSFKVYIEYLIPYLDLLLDFNMVKPFRNLKFKRYIFMQKKLCELCLRLTEEAGRRTIVGFGDWSNQDIGGFIKKSPAGPVKRFEKQLRRYCTVISIDEYNTSKVHAECRKKKLYNQCIRVTLLLAYTVVQ

SEQ ID NO: 258 - protein, 235 aa, Pilasporangium apinafurcum
KSKGENVKHEVIHWSKGRFYRECGYHRRTTLAKEWIDAESDIKTFNENVPSAKIVNLVSYLRRVRFCLVYLDRLLDVYSSRRMKRLRWSTYIRRQQTYKKVVKNLTDGNKRTVIAYGDASFTSSAKGNIAVPTTTLRKKIGFRCRVVDVDDFRTSKLCCACHKKMKGFLLDGKIVSDGLYGVRHCKNSECHHTLWDRDINAAINILRLFIDEVKKKRRLKGFTRKENELVLEIKK

SEQ ID NO: 259 - protein, 338 aa, Pilasporangium apinafurcum
IEVFTTSRPSTHLLSVASTFAKTKRTAALRNSIIKKSNQLRGVLVFEHCDKMASTSNSIEEKTTKKRRARPDFAKRKVRQKQSVYSTVKTGWRKFCKDNRRAEKIDETVRLCSRIACEASMLPSVHVLRLLEAGEELPPLDNKFFNRCTSAIANLVDSGEVHSDLKTSLDLCRTQHPSVYEPTEKKSYMSQMLIMIAQHARQNFQVSNRLTFYSRLCKWMRLQIRLHNSDCFEKRQGKIIKSAVSLLAHTSAQTQYSLFGQILAYGNASFTSSAKGNIAVPTTTLEKKIGSRCRVVGVDEYKTSKLCCACHKNLKGFVLDEEIGSKGLYGVRHCKNSE

SEQ ID NO: 260 - protein, 238 aa, Pilasporangium apinafurcum
DLFSTILLSKKECKSMTVHVRKDRHWFRSQRQQARNFITLYDPHGMRSSVDDTKNAMFNRCLLIDRLQSQLSQENSMRKRHRIRKRVYRLFQWMKAMMLDAHHKVSKWLSDNYHEVFFPAFDTPELTSKQKRISSKVSRSILTWSHYKLKKLLSYKMERSGGRVIDCGEYYTTKTCSHCGRNHTIEYQKVLQCPHCKFILDRNVNATRNIFLKNEDLLFWTHRIELSETPTPRSSSFS

SEQ ID NO: 261 - protein, 270 aa, Pilasporangium apinafurcum
KAQAHVDDGMKGCQVWSLLPQKQFKPIFIKINTTVLKHLAKALSDPVELYVDKAELWRTYFNIGLVTKHQRKEFEHFISTDDMSVSVTISRPKLPAREQKEIFPLEYWIIGLDSGRKKIFTAVVYKEESMATLQKLKGENVKHEVIHWSKSRFYRECGYHRRTKLAKEWINAEPDIKAFNENVPSAKVPDLASYLRRVRFCLVYLDRLLDVYSSRRMKRLRWSTYIRRQQTYEKVVKNLTGGDKRTVIAYGDASFTSSAKGNIAVPTTAV

SEQ ID NO: 262 - protein, 251 aa, Pilasporangium apinafurcum
KINVFSVTSSDKPKSHPTSKEFQVMRDELWEKGFHIRKFETMNRKFGYQITINGYSASSLQQRPTKKKDMMVPPGNYVPDTVVGIDPAMWSLCTAIHVQEVGVEEEKAEYNERKPKQNQAKERKKRRKHGVRRERPSNQQYDIQQISTREHRHLAGMNKYTFWHGKLTKRKQEYARIIRATPSFKTVSYDQYMINVKYVWRHLDFLMSFCAMHPFRKWRSLQFRFSWKTLAHLTKRLVPISNSQVCIAVGD

SEQ ID NO: 263 - protein, 282 aa, Pilasporangium apinafurcum
LLEPGKELPSLDNNLFNRCTSAIANLAGSGKVHSDLETSLDLYRTWHPSVYEPTEKKSYMTQMLVMIAQHARQNFQVSNRLTFCSRLCKWMCLQIRLHNSDYFEKHQGKIIKSNVSLLVRASTQTQDSLFGQMLAYGNASFTSSAKGNIAVPTTILRKKIGSRCRVVDVDEFRTSMLCCACHKKMKGFVLNGKIVSDGLYGVRHCKNSECHRTLWDRDINAAINILRLFIDQVKEKRRLEAFTRKENELVLEVKTEVIKVLTVMIPGTDGCNYFLIVPCMVQ

SEQ ID NO: 264 - protein, 210 aa, Pilasporangium apinafurcum
LPSISLVSLLPSHDIDFSRKRWPSIDPLPKLERYLVSILKPLEDENFQIWLTPELSQAVAGTECGCEILNRLGQGMDIISSLLDNYHEVLLPTFGTSELTSKQKRISSKVPRKMIAWSHYKFKKLLSYKMERSGGCVIDCGEHYTTKPYSQYGRINHTIEHQNIFQHPHCKLVFDRDVNAARDIFLKNEHLLSWTHRLQMSETPTLQCLV

SEQ ID NO: 265 - protein, 427 aa, Pilasporangium apinafurcum
LIQLDAAYSRFKKYPIHTEEIVWMQELLNRVRNEIELPPSKLKSSPECYIPFLHTMLKDIQAHVDDRMNDCRVWSLLSQKQFRPIFIKINTTVLKELAKALDDPVELYADKAELWRTYFNIGLVTKVQRKEFEHFISTDRMSVSVTISRPKLPAREKKEAFSLEDRIIGLDLGRKKIFTAVVYKEESMATLQKPKGENVKHEVIHWSKGRFYKECGYHRRTKLTKEWIGAEPDVKTFNESVPSTKVANLVSYLKRVRFCLVYLDRLLGVYSSRRMKRLRWSTYIRRQQTYEKVVKNLTGGNKQTVIAYGDAGFTSSAKGNIAVPTTTLRKKIGFRCHVVDVDEFRTSKLCCACHKKMKGFVLDEKILSDGLYGMQHCKKSGCHRTLWDRDINAEIDVLRVFIDQVKKKKRLEAFTRKENELVLEIKN

SEQ ID NO: 266 - protein, 207 aa, Pilasporangium apinafurcum
TFTEPSTLHFMNQQKKKSHMSQMLVMITQHARQNFQVSNRLTFYSWLCKWMHLQIRLHNSDCFEKHQGKIIKSAVSLLAHTSAQTQYSLFGQMLACGNASFTSSAKGNIAVPTTTLRKKIGSRCRVADVDEFRTSMLCCACHKKMKGFVLDGKVVSDGLYGVRHSKNSECHHTLWDRDINAAINILRLFIDEVKEKRRLEAFTRGNG

SEQ ID NO: 267 - protein, 280 aa, Pilasporangium apinafurcum
HRDIVGWSLRTSPPPPLPDPNLPYYKTVKTSLASVLKTPENQPVIGQAAVTVSCIGIRSLLFLRLYSMYHKDTPPVVNSELVDTMFKMVCQRKARGRPPSVTAKALRDKLTMFYKQHFESLLPIGDETLSYTHLNTVLDYASVQAATVFETNIKQHFVEYVEAYVNTVWQKDYLVECIKATRKLLVNRKVTEFYENKLYRKMRLNSFYNIRKSEQRLVQRFKEIFGTLNEVVVGIGDWEQKKYCKFKEPTKGKGFRTLLRKAGYSVCLVDELKTSCQCSH

SEQ ID NO: 268 - protein, 354 aa, Pilasporangium apinafurcum
SKASKKSNQLRGVLVFEHCDKMTSTSDGTKENTTKKRRARLDFAEWKVRQKQSVYTTVKTGWRKFCKDKRIAKKIDEAVRVCSRIACEASMLASVHVLRLLEAGEELPPLDNNFFNRCTSAIANLAGSGEVHSDLETSRNIYMVQRPSVYEPTEKQFYMSQMLVMIAQQARQNFQVSNRLAFYSRLCKWMRLQIRLHNSDYFEKHQGKIIKSAVLLLVRASTQTQYSLFGQMLAYGNASFTSSAKGNIAVPTTTLRKKIGSRCCVVDLDEFRTSKLCCACHKKMKGFVLDERIVSDGLYGVQHCKNSECHRTLWDRDITAAINILRLFIDQVKKKRRLELFTRKENELVLKIKN

SEQ ID NO: 269 - protein, 257 aa, Pilasporangium apinafurcum
IQRRKKIFTAVVYKEESMATLQKPKGENVKHEVIHWSKGRFCRECGYHRRTKLTKEWIDAEPDIKTFNEKVSSAKVGSLASYLRRVRFCLVYLDRLLDVYLSKKMKRLRWSTYIRRQQTYEKVVKSLIDGNKRTVIAYGDASFTSSAKGNIAIPTTTLRKKIGLRCRVVDVDELRTSKLCCACHKEMKGYVPDEEIVSDDLYGVQHCKNNECHHTLWDRDINTAINMLRLFIDQVKEKKRLEASTRKENELVFEIKN

SEQ ID NO: 270 - protein, 274 aa, Pilasporangium apinafurcum
VCSRIACEASMLASVHVLRLLEAGEELPSLDNNFFNRCTSAIANSAGSGEVHSDLKTSLDLYRTQHSSVYEPTEKQSYMSQMLVMIAQQARQNFQVSNRLAFYSRLCKWMRLQIRLHNSDYFEKHQDKIIKSAVSLLVRASTQTQYSLFGQMLAYGNASFTSSAKDDIAVPTTTLRKKIGSRCRVADVDEFRTSKLCCACHKEIKGYVPDEEIVSDGLYGVRHCKNNECHHTLWDRDINAAINILRLFIDQVKEKKRLEAFARKENELVLEIKN

SEQ ID NO: 271 - protein, 237 aa, Pilasporangium apinafurcum
NSSQERIMQRQSIDHVSSKKILLAFSQGILVRHIKSLKSRNLFQNSNIWFDCREHEKDGFIFVSASKRVCTDCQEVIDPGVCNFITIYDSQWLTLSVNDSKDKDKIFMRCLLIDRLKSKLTNKKSKRKYYRIRRLIVRLYNRIKAMISDMHYSVSKWLSDNYNQVLLPTSATSEMAWKQKRISSKTSRAMLTLSHYKFKKMLDYKMERSGGRVIGCKEDYTSKTCSCCGRINYSIQA

SEQ ID NO: 272 - protein, 229 aa, Pilasporangium apinafurcum
RTYFNIGLVTKGQRKEFVHFISTDGMSVGVAISRPKLPTREKKETFSLEDRIIGLNSERKKIFTAVVYKDESMATLQKPKGENVKHEVIHWSKCRFYRECGYHRRTKLTKEWIDAEPDIKTFNENVPSAKVASLVSYLKRVRFCLVYLDHLLDVYSSRRIKRLRWLTYISRQQAYEKVVKNLTGGDKRTVIAYGDASFTSSARGNIAVPTMTLRKKVGSRCRVVLVTRR

SEQ ID NO: 273 - protein, 224 aa, Pilasporangium apinafurcum
NQVKESKQKRRKKRKKKRKRRRKRASNQQYGIQQISTREYRHLARMNKCTFWHENLKKREHEYGRIIRDIPSFKTASYEQYMTNIKYVWRYFDFLVSFCASHPFCKWRFLQSRFSRKTLAHMAKRLVSTASPQVCIGLGDWSQQGFVKDHAHGLVKRFTCELAKHVTVLQIDEYRTSQRCSKCYQQLEETGFSIKRLMEAQASSFPTKFFAATTASAESRGNEM

SEQ ID NO: 274 - protein, 222 aa, Pilasporangium apinafurcum
NRRKKRKKKRKRRHKRGIRRKRASNQQYDIQQISTREYRHLARMNKCTFWHENLKKREHEYGRIIRDIPSFKTASYEQYMTNIKYVWRHFDFLVSFCASHPFCKWRFLQSRFSRKTLAHMAKRLVSTTSPQVCIGLGDWSQQGFVKDHAHGLVKRFTRELAKHVTVLQIDEYRTSQRCSKCYQQLEETPFSIKRLMEAQASSFPTKFFAATTASAESRGNEM

SEQ ID NO: 275 - protein, 246 aa, Pilasporangium apinafurcum
RLCAIDPGVRNFITIYDPQGLTLSVNDPKDKYKIFMRCLLIDRLKLMSMNEKSKRKRYRIKRLIVRLYNRMKAMISDMHHKVSKRLSDNYNQFLFPTFATSKMTSKQKRISSKVSRAMLTFSHYKFKKILEYKMERLGGRVIECKEYYTSKICSCCERINHSIQVQREVLCSSCNLAVDRDINAVKNIFLKNECLFLGQSGPSIGAVFLEISACPSTCQTQVDQLEDKQQEPLFDTLVSLDNFSIS

SEQ ID NO: 276 - protein, 337 aa, Pilasporangium apinafurcum
SLLPQKQFRPIFIKISATVLKHLAKALGDPVELYVDKAELWRTYFNIDLVIIAQRKEFEHFISPNGMSVGVTISRSKLPAREQKEVFSLEDRIISLDPERKKIFTAVVYRDESMATLQKPKGENVKHKVIHWSKGRFYRECSYHRRTKLTKEWIDAEPDVKTFNEKVPSAKVANLVSYLKRVRFCLVYSSRRMKRLRCSIYIRRQQTYEKVVKNLTGGDKRTVIAYGDASFTSSAKGNIAVPTTTLRKKIGSRCRVVDVDEYKTSKLCCVCHKKMKGFVLDGRIVSDSLYGVRHCKNSECHCTLWDRDINAVINILRLFTDQMKKKRRLEAFTRCKG

SEQ ID NO: 277 - protein, 258 aa, Pilasporangium apinafurcum
NQAKESKKKWRKERKKKRKRRHKHGVQRKRSSNQECNVQQISTREYRYLAGINKYTFWHKKVKKREHKYGRIIREMPSFKMASNNQYMTNVKYMWRHLDFLVTFYATHPFRKWCFLQSRFSRKTLAHLTKRLVPIPSLQVCVALGDWSRQNLINGHVHEPVKWFTRELATHMTLLQNNKYRTSQRCSECYQQLEETPFLTKKADGSADVKFSRQVLHCNSSECRIIWERDVNASKRILVLVMCFLHRLPRSFELRRLE

SEQ ID NO: 278 - protein, 200 aa, Pilasporangium apinafurcum
IDAEPDTKTFNENVPLTKVANLVSYLKRVRFCLVYLDRLLDVYSSRRMKRLRWSTYIRRQQTYEKVVKSLIGGNKRTVIAYGDASFTSSAKGNINVLIITLRKKIGFRCSAVDVDEFRTSKLCCACHKEMKGFVLDGKIVSAGLYGMRHCKNNECHRILWDSDINAPINILRLFIDQVKKKRRLEAFTRKKNELVLEIKN

SEQ ID NO: 279 - protein, 681 aa, Pilasporangium apinafurcum
LVERNGWTTEYVQHKTISFFLIFQSAMSGKRQRTDEEKEEQEKREYFSVVCKLFRVYTNTLLVEEIQNTCRVLKQVQLEAWHVANIHLLRCLKEDVELPELDEMFFYHCCAGVLKAENKLLRCPDPTLTTTLEIYRNKRKSISGYQRPHMTHAGASLLELGAQMSTNAKVMIAEHFGKRLLRYVSFYYNKSYKEAQKIVRSCYRMEGSFTQDEIKVREWLGCIPYKSTIKQNLTYFIEKLYEMLTWMEICQEMEPNIKGCRVFSLLPYSNSYAAAHIKINASTLHGICARIFNGKNRGANPLRIPISKRALVDKRYFQINKDELLRRAFKVSQFETRTRKFAHQITTNGYDVSVLLRRLKSDIELERGKQEKNNIEIKENESVLPDDYNPEVVIGIDPGMRTMCTAVIEGNISFRPRSRCKLTKKIRRIRVRRKKRRKRHKRRPARERRKHRERMIKSGRRICEVSTKEYRHLAGMNKARYWHEGLKTRNEDYTSVVRGIPSYKTASYDIYLERLGYFWKHVNFLLKFCEEKDFLKWRFFQACMKKKALRTLAKRIVPVPSSQVCIAYGDWSRRDGIPGHAPSPVKGFKRELQKRATVISMDEYCTSKLCSGCHQSLQKASYRYVGDNNEIVEKKNRYVLRCINSDCKATFWNRDVNAALNILSLLKTKLLNWSRPTEFCR

SEQ ID NO: 280 - protein, 271 aa, Pilasporangium apinafurcum
RTYFNIGLVTKVQRKEFEHFISTDGMSVSVTISRPKLPMREQKETFSLEDQIIILDPGRKKIFTTVVYKGESMATLQNPKGENVKHEVIHWSKSRSYRACDYHRRTKLTKEWIDAEPDIKIFNENVPSAKVANLVSYLRRVRFCLVYLDRLLDVYSSRRMKRIRWSTYIRRQQTYEKVVKNLTCGDKRTVIAYGDASFTSSAKGNIAVSTTTLRKKIGSRCRVVDVDEYKTSKLCCVCHKKMKGFVLDGKIVSDGLYGVRHCKNSECHRTL

SEQ ID NO: 281 - protein, 504 aa, Pilasporangium apinafurcum
WKWHVNSRSRGLWLPSKIDLNMDSSHKCVKNIASKSWFTLTNNFMKTTTKTWKQENAKKTSSLVLTSLLSEEMEGRQKCSEDSDLRPPKSIRRKRNKPSPNSTVKVRLDPTKEQKQLLRKMFGTHRAIYNKIVELSRDDCYKLSLKELNAKYLPIAQKHSLAKYLPEYDLNAPSVAMISTYRDFVKALDSSKARFESQKDKEKKTSFPQLRFKSRKDNSTSIEIHPQYIEFSEGQLRFCSRYFGFSKNEGVKIKGRLPALEYSIRLQRTREDRYYICIPRVKELEQTDSIGICAIDPGVCSFITLYDPHGMALNVDNAKDAMFNRCLLVNRLQSQLSQEESKRKCRHIRERIYRLFQRMKAMMSDAHHKVSKWLSDNHHEVLLPTFGTSELTSKQKQISSKTSRKMLTWSHYKFKKLLSYNTETSGGRVVDCEEHYTTKTCSQCGEINHTIEHQKVFQCPHCKFVLDRDVNAARNIFLANEHLLSWTHQVQVSETPTPRSSSLS

SEQ ID NO: 282 - protein, 302 aa, Pilasporangium apinafurcum
SVYTTVKTGWQKFCKDKRIAKKIDEAVRLCSRIACEVSMLGSVHVLRLLEAGEELSPLDNNFFNRCTSAIANLAGSGEVHSDLETSQNIYMAQHPSVYEPTEKKPCMSQMLVMIAQQVRQNFQVSNRLTFYSRLCKWMRLQIRLHNSYYFEKHQGKIIKSAVSLLAHTSAQTQYSLFGQILAYGNASFTSSAKGNINVLIITLRKKIGSRCRVADVDEFRMSKLCCAYHKKMKGFVLDGKLVGKGLYNVRHCKNNECHRTLWDRDINAAINILRLFIDEVKKKRRLEAFTRKRNELVLEIKN

SEQ ID NO: 283 - protein, 207 aa, Pilasporangium apinafurcum
QRPTKEKDENMIIPPDNYVLDTVVGIDPGTRSLCTAIHVREVDVEEKKAKCNGRIPKQSQAKESKQKRRKKRKKKRKRRHKHGVRCKQASNQRYNVQQISTREYRDLARMNKCTFWRENLKKREHEYGRIIRKMTSFTTASYEQYMTNIKYVWRHLDFLVSFCASHPFRKWRFLQFRFSRKTLTHLTKRLVPTPSPQVCIALGNWNQ

SEQ ID NO: 284 - protein, 253 aa, Pilasporangium apinafurcum
SRSTQVHHAIRPRRQGDPNKELVRRFQLINTYKRELSLMENAIESATCKKSVCNCKRFCKTRTRTAKKQARQRIRTRKRQRYRLRRKIRFLLRKVSRMVNDMHQKLSRWLSDNYHEVLLPRFQTKKMSARYVREEVEDATPRNLWEPEEMLTVRGRKRKISSPATRMMLAQSHYQFRMLLTQKMERTGGHLEEVCERYTSISCSRCGKINKRLGESETFKCKKCTFDHDRDVSAAKNIFHKNIGGSILREHFA

SEQ ID NO: 285 - protein, 437 aa, Pilasporangium apinafurcum
QKRLVLPAKIRYEKDLLYYDLQCKPQDYWPAMLRMTEMIKQANKKVRNFCSLRTSIIPRHITLDTTTLVTLLFTKENGTKSKLLTKGELVRNKNEIWKTFFRTNMKMFKADDYRFNHMISTDGAACSILLIRRDLYGMNTPKKKLVVARKWHVDDLAADEVQQLSKRNVVGIDPNMSDLLFCVDEDASKRYRYNQNQRRQETKAKKYAQIMLNDKGHSSVESRTIVGWESNLSAYDRKTVDSNRFKAFIKAKLLVNNKVTGFYEGELYRKMRLNSFYNIRKSEQRLVQHFKEIFGTPDEVVVDIGDWGQKKHRKFKEPTKGKGFRTLLREAGYSVYLVDKFKTSCQCSYCQAEGAKCEKFRVRLDPKTKKTDEDRQLQLVHGLLLCQQCYRLWNRDVNSSINTARLTRQVLEGRGRPEYLSRQIRLSPVDSAVTSTT

SEQ ID NO: 286 - protein, 329 aa, Pilasporangium apinafurcum
WRSRSTRRSPRTRPTSTRTYFNIGLVTKGQRKEFGHFISADGMSVDVTISRPKLPARERKEAFSLEDRIISLDPGRKKIFTVVVYKEESMAMLQNPKRENVKHEVIHWFKGRFYRECGYHRRTKLTKEWIDAEPDIETFNEKVSSAKVANLVSYLKRVRFCLVYLDRLLNAYSLKKMKRLRWSTYIRRQQTYEKVVKNLTGSDKRTVIAYGDASFTSSAKGNIVVPTTTLRKKIGSRCRVADVNEFRTSKLCCACRKEMKGYVPDEEIGGKGLYNVRHCKNSESHRTLWYRDINATINMLRLFIDQVKKTRRLEAFTRKKNELVLEIKN

SEQ ID NO: 287 - protein, 308 aa, Pilasporangium apinafurcum
NEIVGEMWGDLFNIEKFKTDNRTFAGEISTDGKAVSILLRKPKREEVIPKKLNAEDYDVMWGLDPDRRDFFVTTNRDFKKISCSTKEYYEDARFTKSNQTIRLWQEKREDMLYAIRNMSTKKTASLKQLKKYIEFMIPKMDMLLVFSADKPFRDLKFQRYIFMQKKLRKLCSKLVKKNKRTVIGFGDWSNQDVGGFIKKSSAGPVKRFERMLKQYCTVVSIDEHKTSKIHSACYESLLVNQNSKRKCKDGKERTLKVHSVLHCKNNGCRGMTVNKDDNASQNILQLLKDQLEGRSRHLVFCRDRRRRT

SEQ ID NO: 288 - protein, 229 aa, Pilasporangium apinafurcum
KTKTKTVPPGNYVPDTVVGIDLGTRSLCTAVRVREVDVEEKKTKCNGRKPKQNQVKESKQKRRKEGKKKRKRKCKRASNQRCDIQQIPTREYRHFAGMNKCMFWHENLGQREYEYRRIVWEMPSFKTASYEQYMTNVKCVWRHLNFLVSFYVSHPFRKWRFLQSRFSWKTLAHLPKRLVPTPSPQFCIALGDWSQQDFIKGQTVLQIDEYYMSQHAPSATSSLRIHHSR

SEQ ID NO: 289 - protein, 288 aa, Pilasporangium apinafurcum
SRTRFSVAKMIQRDYYQQRVLFFRCYLWCLSDCPALRFNADERCKSHIHILHVRYRQQLHRSLIRYLFYPTRDLVTSQVGFFLRNEWPKRAKRKRKQSFPLTLEITKPRCRLIVASLRHFFKPRKRKWEGLSRLYFCMCNCKEYLILFVHKDDPNENKQDKMLVLFSLTINYLAYEFVTASRHRFQSKDMTGSHYKSKTLLKYKMERTEGKMIECEEHYTTKTCSHCRRINHTMKHQKVFQCPHCKFVLDRDVNAARNIFLKNGHLLSWIHRVQVSKMPTPQLAILDY

SEQ ID NO: 290 - protein, 376 aa, Pilasporangium apinafurcum
NLHSRTMLATLVRDSDYFEKHQDKIIKSAVSLLVHASTQTQHSLSNLIPAYSRFKKYPIPNEEIVWMQELSDRVRNEIEPSPSKLKSSPECHIPFLRTMLKDIQAHVDDGMKGCRVWSLLPQKHFKPIFIKINITVLKELAKTLGDPVELYADEAELWRTYFNIGLVIIAQRKELVHFISTDGMSVGVPTSRPKLPTREQKEAFSHEDRIIGLDSGRKKIFTAVVYKEESMATLQKPKGENVKHEVIHWSKGHFYRECGYHRRTKLIKEWIDAEPDIKAFNENVPSAKIANLVSYLKQVRFCLVYLDRLLDVYLSKKMLQWSTYIRRQQAYEKVVKNLTGGNKRTVIAYGDASFTSSAKGNIAISTKANWFQVSFC

SEQ ID NO: 291 - protein, 221 aa, Pilasporangium apinafurcum
SKGRFYRECGYHRRTKLTKEWIYAEPDIKTFNENVPSAKVANLVSYLKRVRFCLVYLDRLLDVYSSRRTKRIRWPTYIHRQQAYAKIVKNLTGGDKRTAIAYGDVSFTSSAKDDIAVPTTTLGKQIGSRCHVVDVDEFRTSKLCCACHKRMKGFVLDEKILSDGLYGMQHCKKSECHRTLWDRDINAAINILRLFIDQVKKKKRLEAFTRKENELILEIKN

SEQ ID NO: 292 - protein, 302 aa, Pilasporangium apinafurcum
WYLLIITFPILSLGSTLVCGRSTLPFVCEKLLWKKKKARCNGRILKQSQVKESKQERRKKRKKKRKKRHKRGIRCKRASNQRYNVQQISTRKYRYLAGMNKCTFWHENLKKKEHEYGRIIREMPSFKTASYEQYMTNIKYVWRHFDFLVSFCASHPFCKWRFLQSRFSRKTLAHMAKWLVPIPSPQVCIGLGDWSQQDFAKGHVYGPAKRFTRELTKRTTVLQIDECYQQLEETPFRTKKADGSASVIFSRQVLCCNNSECRITWERDVNGSKDILTLAICLLHRLPRPPELRRGERNVGRE

SEQ ID NO: 293 - protein, 354 aa, Pilasporangium apinafurcum
SKAPKKSNQLRGVPVFEQCDKMASTNDGIKENITKKRRVRPGFAEWKVRQKQSVYTTVKTRWRKFCKDKRMVEKIDEAVRLCSRIACEASMLASVHVLRLLEAGEELPPLDNDFFNRCSSTIANLAGNGEIHSDLETSLDLYRTQHPSVYEPTEKKSYMSQMLVMIAQLARQSFQVSNRLTFCSRLCKWMRLQIRLHNSDYFEKHQDKIIKNVVSLLVRASAQTQHRLFGQMLAYGNASFTSSAKGNINALIMTLGKKIGSRCRVVDVDEFRTSMLCCACHKKMKGFVLDERIVSDSLYGVRHCKNSEYHRTLWDRDINAAINILRLFIDEVMKKRRLKTFTRKENELVFEIKK

SEQ ID NO: 294 - protein, 354 aa, Pilasporangium apinafurcum
SKAPKKSNQLRGVPVFEQCDKMASTNDGIKENITKKRRVRPGFAEWKVRQKQSVYTTVKTRWRKFCKDKRMVEKIDEAVRLCSRIACEASMLASVHVLRLLEGGEELPPLDNDFFNRCSSTIANLAGNREVHSDLETSLDLYRTQHPSVYEPTEKKSYMTQMLVMIAQLARQSFQVSNRLTFCSRLCKWIRLQIRLHNSDYFEKHQDKIIKSAVSLLVRASAQTQHRLFGQMLAYGNASFTISAKGNINALIMTLRKKIGSRCRVADVDEFRTSKLCCACHKRMKGFVLDGKTVSDGLYGVRHCKNSECHRTLWDRDINTAINILRLFIDQVKEKRRLKAFTRKKNELVFEIKK

SEQ ID NO: 295 - protein, 308 aa, Pilasporangium apinafurcum
SLRTNVIPRHITLDMPTLVHLLFTKENGSKSKLLTKGELVRNKDEIWKTFSRTNMKVFKAGDYRFTHMIDTDGVACSTLLIRCDLYGKKTPKKKLVVVRERYVDDLTVDEAQQLSERRVVGIDSNMCGLLFCIDKDASKRYCYTQNQCRQETKAKEYAQIMLNNKKHSSVEDRTIMEWKSDLSAYDRKTVNSDKFKAFIKAKLLVNNKVTGFYEGRLYHKMRLNNFYNILKSEQRLVQRFKEIFGTPNEVVVGIDGWEQKKRRKFKDPIKGKGFRTLLRKPDYSMYFMDEFKTSCQCSHNQAEGAKCE

SEQ ID NO: 296 - protein, 223 aa, Pilasporangium apinafurcum
ALHLDRRYVSWCGNLPSKASHEREKRKAFSLEDRIIDLDPGRKKIFTAVVYKEESMATLQKPKGENIKHEVIHWSKDRFYRAYDYHRRTTLTKEWIDAEPDIKTFNENVPSAKVPDLASYLERVRFCLLYLDRLLGFYLSKKMKRLRWSTYIRRQQTYEKVVKNLTGSNKETVIAYGDASFTSSAKGNIAVPTTTLRKQIGSRCSAVDVDEFRTYCVVLVTRR

SEQ ID NO: 297 - protein, 645 aa, Chlamydomonas asymmetrica
GGPYNMNECGCAELVEARDDALDECGNADPTLVAVSGETDVDLTPVVVKMSLRSTCANVQLRKCLNAIVRDANRMFGEGYLFANFHVRRLISSGMPAPVINRSFYYRCLLAVSINKARVTTLGDDIKISRDKFDALRSRPAKKVDATKYGQLLADMSISMATMATNHLLMNAARRLRAWLRFKHLRLKSYHRKITDAVLVRPQEALVEVFGSHDSNPKYHDAVSIARTLRGLSTLPGRHIRFASQVHHLLPLYHFIMVELEHLLMSATSTKRQAAIRRRMFTLLPEKSGYAVSHIPISSSFFMRILKGITRMEEFPGDGRSEDHTAYWRKYFNINAFETPERMFGDRIVTDGHAVGFLLRRNVSRKDAGDDTPLQVIQQAYRESAAVSVVGVDPGFKNTVTIARRGGQCASYTSARYYHEAKVFSSMRKVNRWNKETQDLTDVADDIVSVTHPIAIARYLKNLPRLVAHRMQGGYRQQRFLRFAYKKKAVKAIADFIAPPSACATHLVCFGDWNGGHASPISRKTSGPMKDVKRALRSRDDVLFMTVDEFRTSQTCHYTWSKMQSMVASSIRKRRNGEIVQRRGKVHGVLHCQNSVAVPQPLETTWNRDVNASKNILMLGLFQVLGYARPVAFSRPVRRMRRQQQ

SEQ ID NO: 298 - protein, 796 aa, Chlamydomonas asymmetrica
PWTMAHIIVERAKAKQFFAAEYIPTIRKAVQQHHVVTSYATLLVKAFYLKDVLPLWNACRERNIAFPTIAIDSDLLGDAFTIVRGKSVQTRKKRVTLTVPIVDPRQPATSSNQTSSDQPSASTQGGKATKRKTRTAKSARKKLQDVERSKVDTDRVVRWCRARLRKLWIDDFADPKTKAAPGLVPKDLLSLSHAFEYAADQLAAAYEANVVVHFEAYVARFAKESMLLIPSPTLPCIPKRRSKRHALKATRRSVVNNEVNKAVQDLLLNRLGDAAKCRVPEFTIWVASHRDRMLPSQPGRFETIQSHLEARPWDFLPHMVWMAAAVEDLPVHEACRRRRLLQPLVVRKSLVPGHIVLDTTALLHVLFEDANAIARFKADYAVLYDVEMVNLTNKASLAASFATLTGRHGVTKDDEAKHAQRIWEYTCRLDPATNKHATRFLQQSRDLERVRTLFRFGRMVRTDGYNVSVMMTTAPDTLGRKRVARAANALVLPSLNTNTWERVRTELASSPGDQVDLASCDPGKTAVLTMVDGSGKSLVYTYARRERECRFKQHRERLQTASRFRVLSGLVLTWNDVSAPNGVRTLSSPSLDAVQTQFLARFSAKSCKFDTFMAYVEARRLVEAHMRQFYEAAFHRHNKYSGYLAKRHSEDRLVDRIRNTFGGSATAPKAVNIAWGNWGLAPNSLGGSPSSPGIGLRRRIHSRLRRDERPQGVHLSGGTLTVYEGGTSSACNACGGRVSPGRDSNRRITRRVLCCKECGTRWPRDILGALNILACAESLLTCGHRPDFLVHPLDDA

SEQ ID NO: 299 - protein, 506 aa, Chlamydomonas asymmetrica
RHENTQKDQLWGLIKNPLYPCSKIHNDDFKDIVEFRELLGMIDTIICDKQTKEKKLRRSFEFCLKHLSEDLSAFNTKTWTLYCWIVKYKNTLEDAKKCSLLPVSSIGRKFAYIDHKIAINLIKKPLREKMLKESEGHDGSELQKIFGLAPQLFNKRRLKIRNRLRSKEFKRYKKCKKGGSFLSRKKLLNDKWKCLGGGCLSKRSIVRSISTDGVGLRLCLETIPGRSSLNYDVFQVTKDTFKVAGDTGRVRMITTIDSNGDVKMITRKAYYNHLRTKKTAKFIEDQMQNTPWGEANNAFASSGGLKNVSVSTWMNALNVLGNNVETIKNYQLFPKDQAFRKMKSLRHKKAFFDQNLKRIIRPDKTSQENILIGLGDGDFACTGKGEQAVPTTGLGILLRRIIKVLQLSRRVRIVILNEYNTTKVCHRCGSIMEKIITSKGEECLRYRLCKCCDKTNGMRRHRDVNSCKNHMKLLECDVHGLERPRGLEIPEWFWNKKTPSWVAPIC

SEQ ID NO: 300 - protein, 490 aa, Chlamydomonas asymmetrica
LSQRYQDDSNMYTRAAKRYIVNLKNSFAMNFESRLKTFLRQYQKVHDFSVDQRSVMYYKICGYTLPKDLKKVVMTPLLEEMIKEQRRMLDLNDTSKITKSKLKNTMFYQNILKQWVFFNRFYERHGFKLFGIVPIAKIKSSFVSIDNEGLFGICKECGLLRDVSRADFLESSDKYWTKIFNMRKITKTIKNPSKQFSNVIETDGISMCAHFKSLRTLPNNEKCLETVLDPKKTTLGIDPGRVNIYTVVEVTPEGKILYYTLTHNQYYSEAGIFKARKQSNTWSENIQKTLEALSTVSIKGVNFQQHLEFLKVYFQTLDYLKKEYTKPKWARQRLRLYGGKKKVFEKFWKKVIGDRDRESLQVAYGSAKFAPGGKGEISVPTSRAFKECASRLLTKAVDEFRTTKVDNRTYNVLKGIKYKGKLSSKKFLRGLQWCESTILAKEGKFVNRDVNAAMNIRMLGLALERPRIFKRDPSNTKLVMVLGKKIKNHK

SEQ ID NO: 301 - protein, 204 aa, Chlamydomonas sphaeroides
RLGCGSDWGCGLGHGSACGSGCVLSCHGLGTCWAAGAASPVQDLLAYYFDPRQSKKRLKVYIRKQRGLHREAVRLTGGRPKDEVVVDWGCGSAGWNSAIRRQGQLPRKEFVRLLYELYVRHVVIINECRTSQVRRLGGRWRVQCMPAGKGACGACSKPHGACAAPALRPRSATTAGAASCLRGCYLGRGVRMACKSAKAAARHE

SEQ ID NO: 302 - protein, 231 aa, Chlamydomonas sphaeroides
GARRAGPQARAANDRGRAAGKQAWPSLPTCPPFPALGLPPAPLTRYGCGTCSAAGACWACWTSWSTFSTPPPRKKRLEVYIRKQRVLHREAVRLTGGRPKGEVVVGLGCGSAGWNSAISRQGQPPHKESVRLLRERYSRHVVINNECRTSQVRRVLGGRWREKCMSARKGACSRSNGVCVRGPCPTPPVYNNCGCGQLPARMLPGARRAHGMQICQSCGTTWSKFRGFMGG

SEQ ID NO: 303 - protein, 495 aa, Tilletia indica
SGVGRRVAASATQLVAYSATTFSSTTDSSPRQPPGLEDVAFSATELHQRRLQQQVRQNRPIRASAVVRMQQGRTRTAEDETTRTRKVRIYPTTHQKARLREAVGTYRWVFNQAIAFIKDDSSNADQAILREALIRADAYVGNVDKFPLRLPYDARDTAVAEAVEAYTVSARRCAEGQIAGFNLKFKRKRMGHGVLPIRKAAWHEGGRLWPRAFGREFGALRGAEPLPDHLTADTVITCKNHKWFLHVPYIVQAPKKPEVGPRVCAIGGSLSCVPVSPCFALSVTNTIHIRLILAHTDPGVRTFATVYDPNSASVWKWGHGDITRIFRLSRHVDRLVALARQARCRRRYRLRRAANRLRGKIYNLIRDVHTRLAAFLVRSYDIILLPELNPHGMSRRGRRRINSRTVRQLMSWAHGRFRSRLKDKVSYVAVPEHYTSQTCSECGWRNRRLGGPQTFPARLADFARTGTATQPKTFSCASFTTRHSRITTKTKDSIE

SEQ ID NO: 304 - protein, 306 aa, Tilletia indica
RLYSASEWLGGRSGRQNSELRAEVPEKEGVLLLLPNSDTGYVTGKWDGGCLKIPKFGLGPGQHQTKIQTGIDVPSLEHDGACIKQENGLWFLLWQKDMGKKRCGLLQHVGQRCVSSTPAFGHLPPFTLYDLLRGTAAKFGDGDHKRLFRLGTHLDELISRSTQASAKKRYRMRRTANRLRARIRHLVDELHWKLRSYLKQSFDTVLLPKFNAHQMSRRGQRRIGRTTVRAMMTWVHGRFRSRLNEAMEVVEVVEDWTSKVCSTCGTVNHRLGGSEFHRCPECLTVSDRDVNAANNISLHWKYDFLN

SEQ ID NO: 305 - protein, 224 aa, Tilletia indica
VFYQQLWRFVSILTLFSSQPDPGVRTFATLFDPLVGIAIKVGEGANARIFRLGLHLDNLLSRMAASNAKQRYRMRKAANRLRKRIKDLTTDLHKKLASFLRANYDTVFIPTFNAHEMSRRGKRRIGRRTIRQMMSLAHGRFRSWLGWKMKTVEIKEDWTSKTCSTCGRVNYRLGGSDTHRCPSCGTHSDRDVNAAKNIFIHSLFDLRRSLTTTGNGLNTAVVHL

SEQ ID NO: 306 - protein, 217 aa, Tilletia indica
WLKTLTTFYQSTDPGIRTFATVYDPLRQKAFQWGTGRDVKVLFDVALKIDNLLGKLHAPDIRHRARYRMKRAVNRYRMRLRHLVMEIHKKFALWLSKNYDTVLLPSLSAHGISARGRRKIRKSTVRQMFSWAHGKFRDRLSNKISFVEIKEHYTSRTCSQCGADNPRLGGKSVFRCPSPACGLEADRDVNAAKNIFLKWLHDFHQDASFACKLRRRQ

SEQ ID NO: 307 - protein, 221 aa, Tilletia indica
LFCYRSRCADVRHHLRRASRVRFPVRRRRQVPPIPPGLMPGQFDLQVGSTGRPGESQIPDATGSKLPECNNPKLGRRSISAVCKFAQKNYYTVLLPTLNAHQMSRRGQRRIGRRTVRAMMTWAHGRFRSRLKEAMEVVEVEENCTSKVCSKCGTVNCRLGGSKIHRCPGYHTISDRDINAAKNIFLHWKYDFLKSSPRNLDQCSAKSHIYESYIHIYIYMT

SEQ ID NO: 308 - protein, 226 aa, Tilletia indica
WGMHQAGERVMVPPLAEGHGGRKDAGSCSTWARDVCHRPRRSTFATIYDPLRGTAAKFGDGDHKRLFRLGTHLDDLISRSTQASAKKRYRMRRAANRLRARIRHLIDELHWKLRSYLKRGFDTVLLPKFNAHQMSRRGQRRIGRNTVRAMMTWAHGRFRSRLNEAMEVVEVVEDWTSKVCSTCGTVNHRLGGSEIHRCPGCLTVSDRDVNAAKNIFLHWKYDFLSL

SEQ ID NO: 309 - protein, 622 aa, Nothophytophthora sp.
MEWNTPPRGAGGSSRSRPDMSRRAARNQLTRFTVIKTTLHSFCKESADRLIEPLNAALLAMNKATTEAYILANLHVLRLCVEGLHAHLQFPTVDQLFFDRCLSAVSTGCRERKACEDAQLQQTIELYKSWRPIGYEPADTSYLSSGWMSATAQMMAVNTNNALLQNFVPRFQKYLRLEYRLTKAEARDMVNRIIADSYDGRANRNVIMEYRAEVPRPFSATLEKPHLLIPLMFTFLKSFEAHHPVDVTSENADPKIVKLLRLYTLLPHKSGFCLSYCKINTTGLRGLLLRAKAADRTADDVPPQTTWGADEGRVANEHWRELFNISTFETSTRKFAGEISTDGKAVSILMRRNDSPTGLSSHQRASSPVDSVDSVDYERWGLDPGRKDLFVATNQSGERARCSSKQFYEDARYTHSNKKVKVWQEKNHRVHDVIRNMPSMKTIQLHALESYVRFLLPQLDLLFSFYSAKRFRNLRFKRHIFKAKKLHDICIQLTAVSKANTAVGFGDWSNRDAVGLIKRSPSGPVQGLKRQLRRYCRVIDIDEYRTSKIHSEPSCHRLLTNQVSLMRLEDGSVRKKRVYKVLHCKFSGCGMTVNRDANASENMLMLLEAHLGGRDRPAVFCR

SEQ ID NO: 310 - protein, 281 aa, Nothophytophthora sp.
SQGGESAVDVAGGSESADVLAEGPHADVTWSGGAPYASDTGDKRHESTVFGDAERQTPDATFNKRHIANTTTTHSNYWHEKLQKAPSGLRAAASCDPGIQDASSTHYLQRLEFVWTNMSYMIAFSAAISSRKWRFTLARFKKRTLSALAKRLVPTADDDVCVALGDWSQQGGFEGHRHSPVKDFAHEPQRRATVLSIDEFRTIKLCCECYVILQKVKFKVENDSGVIEPRDCRNVLRCSDRACNLVWERDVNAAKNMLQLGLLRIHGELRPQALTRGHTIG

SEQ ID NO: 311 - protein, 628 aa, Nothophytophthora sp.
PRLSYASASLVELANAMVVNAANHITIHFNRRLSRCLELSFQLGRREMRVMLARLQREQCEFTVAENEVLDWLQEHPNEDNTKGIPGHPTEANIKKYPVHFLGKMYDMLMLLEETVASKDRTPRGCKLFSILPVSTSFVPSYITINTTILYNMGKRILKQKGVDVFNLFKRTDTKGAKVYATTGEFQAMRHRIWPEFLRVDRHTSKKKDPELGILRRKFEYQVQTNGYSAAVLTSIPAKVSRNPSVEYKPHTVIGTDPGKRSLYTAFCKPTDDQQHRRAIQHRQQVARHQRRAAARQLQRTARYQHQTARQQQRAAARQQHRAPPNHFPVCPMLNYCKMCTGPKPRRGKRRRRGGWQRKRRRPRGRPTRGCNVVGWCAICARYRRPTTRKHGVRRRRASNAGCHIQQTTSREYHHLARTPHSNYWHENCKRRHPDYARRLRATPSFKTASSTHYLQRLEFVWSNMSYMLAFCAATSFRKWRFTLARSKKRALSALAKRLVPTADDDVCIALGNWSQQGGIKGHRHSPVKSFARDLQRRATVLSVDEFRTSKLCSECFGTLQKVTFKVENDSGVIEPRDCRNVLRCSDRACNLVWERDVNAAKNMLQLGLLRIYGELRPQSLTRGHIIG

SEQ ID NO: 312 - protein, 201 aa, Nothophytophthora sp.
RLAGGRSAGRRIVDINRTRRSTRSTLWSTGTMPERGRSRSGSRLSRSTKCGTPASSVQCLLSRRRVTNDVYRERLKFLWLHLRFLFSANADKIFRFLQSQVRMNSLDALVRRIMHKTSQLVCIVYDDWRNQGRIMGHRTIPVKRIKETFKKRSTVLAVNEYYTSQLRSRYHRRLEWVRLVYTKRRHGRPEGKPKCLALCPR

SEQ ID NO: 313 - protein, 297 aa, Nothophytophthora sp.
TTAKCALGQGQGGESAVDVAGGSESVDVLAEGPHADVTWSGGAPYARDTGDQRHESTAFGDAERPTPDATFNKRHLANTTTSRVPPPPPHSNYWHENCKRRHPDYARRLRATPSFKTASSTHYLQRLEFVWSNMSYMLAFCAATSFRKWRFTLARSKKRALSALAKRLVPTADDDVCIALGNWSQQGGIKEHRYSPVKGFAHELQRRATVLSIDEFRTSKLCSECYGILQKGKFKVENDSGVIELHDCRSVLHCSDRACKLVWERDVNAVKNMLQLGLLRIHGELRPQALTRGHNIG

SEQ ID NO: 314 - protein, 272 aa, Nothophytophthora sp.
KARSVTRLTAISATSRSSSKSRKRDGRFFTFCEDANAAKITYRDGKSRAMLSITKTKNISLQCDPGLEISNEIQITNTNGLWYAVIPRFVRPSNYVNRGRTVALDLGVKAFMTGVDLDGNALHVGRETREHLDRYRTRIVEAQQEMALIKNFKGHRSGRQWRAFAKAKRAFNCATDKLNNFVKDMHYQTCAFLTKRYDTIILPIFSSMDMVKKSASRKHTFNSLLLGLKQYQFRKLVQAKCEIMGKSLISCSEMYSSQTCGRCSRLHLKRGS

SEQ ID NO: 315 - protein, 575 aa, Cladosiphon okamuranus
FLFLLSSFEYFELKYFYSSQRRCMSPPQRSLQNTISPNLHSDDGGSLDRSNSSQQRGITFGISNPVSENLQRIPETRSITVESHPQSRRTTSKGKRKRQESSSRITKSSKTLGRDSTSREKDSLTWWTKSSKEVSGKLLSRIGTDSVDLPSISWNGSVDDQIANSWFKARSSNLPIKNSQKISWPLFTSSLANLTVKDVTRARKIRIRPTSDQIKILRKWMEDYRKTWNMALKLVKDQKRKVSLDLKKDVVTRRSTHGPELVDLKSSPTVIRKGAVNDLVKANKSAWALYKARLKESKSNWRKNPFEIKYKSRKSNTGSFPVDQVYVKKIDTESFSLFSEPKFKMVLRAKNVPDITKDCRITCVFDRWYLIVPETSKSVKRNIGEEPKVVGIDPGLRTAFSCLGTDGSILEIGSDTDERLDKINEKIESIKTRMKTDTSKRGRLKKAWHRQLMRAKHLSDELHWKTINFLTSKYDVIVLGKLNVKSLIMKNNKKNKKMLSFLSFYKFRQRLEEKAQSRGNFVVVQNEAGTTQGCPRCGYKKLDVGSSKIYKCDRCSFVGDRDIKAALCMIIKSCS

SEQ ID NO: 316 - protein, 222 aa, Cladosiphon okamuranus
QKEILEASSCVFGDNYRRDTLASRSDEYEAFRRRSGPYGEAIEALNKEKKRTSCFATFLRYCRSWCTNGPALLNETLQKSRKLLRFGRHRATQSALAKIADKYMGRVGGACRVMLFGKASFRAQKGRASAPRKAMIREMASRGVVLMVSEHNTSKKCPGCLGDTVEDKERRTRSCTNFKDGHPEESCRLHPLTPEFEMDRDNVGSTNIGMRGFGLLLGQEWF

SEQ ID NO: 317 - protein, 666 aa, Cladosiphon okamuranus
CSPTNMSQAATPHVSSGCMQTPSEDGTGLALSSASGSTAATGCTISQSSRGTRQAEGSHRRKRQKKEPTPSTAESPPPSKKKTCNAKPKVFRHPTLGFRYFLTQGPGSTSSGRGSKGFFKKSCADISENLWYPTETDCAELLSTSSNGYVTSTKLNSWFTTKIRRDPMRRSSWRTSWRLPTFLVPDSMESDRISRGNTVQKSAKNVLIMKLLVVQLRILAVCKEHNAQVSTAVVQSVRERMETIREYGDTTGKLSKTQQKQLDTLGTALDKYNAGSFHGDDSISDLICYQDKLTDEITKRFVTTEAHLKRSKRVGVRHIDPKSKSKLREYMRASRKIFNKALDCHNKGINGEALRQKCVRSSNLSDDLKQIPEHIRQKAFDKYRSSQASCDELGGHLAFISRNKDQQWVGLQKRDCKIEGRTLKVFGKVELELKETVDQGEPDCDLEITEHRGIFYVAIQSNLQYHKPLEIDIRSSRFCALDMGERTFGTLYDPDGTIAFLGTDANERVKKRLRVIHKLRNGLKTKLASWKRTRVLRAVRRASAKLKNLIKEMHNRIATWLVTNYEVVLIGKLGVGVMRSKRRGKRVLQALSHYSFRQTLLQKASVYQKDVRVVSEAYTTKQCNRCGFINWTIGSNETFSCKNCKVVCHRDVHSGRGIFIRSLGRD

SEQ ID NO: 318 - protein, 779 aa, Cladosiphon okamuranus
PRYEIKQKTFDANDPATKLTKYSDRFIAIMVLPSSRVKKKKKKAASPPDVPDFLQTIERLYPTACRTKDGKLPRKYKGTYCCQLFSRVRLGQDVSQRLRTRTVSVGFRTATTDAKRDVFQEKVDQAVHHLSHERVLASLFANFVFLERLREGSALPEPNRSFFKSCLSSCVISRGGGSLNADFERFTERTGLKRIDPPKNLNLDQQREYEAGCMATSTSTRAELHTEPRRISITKWFLRGRISRGEMGHKKYAYRLYSLASTIVKEFEATPDGEQNLRDRVLAVDPAAQTGPIITFARREKEFSDQVCGDKTSAPKIKHLSWMFNTYVADARRRYDEALSRAHARFPGEDKERRKERYEFMVGELGEDADYPPPKDAAVLPICSTRSVFIHIDMKTLKFWGLLASNDAWWFRDVLRPFSKEANIKCLRNKENTKYASSQQGYLSSLLESGPDKCPWMVGESFLTDGVQVKLLLLTLNHTRTTFSGSSELNEAGYNKLPRADVPLETLLSQGRGVYNISSVTPSASVPDGLVVMSADPGQAKVVNVCSATSDVWAKKDPGNILPTSTCVFGDDYRRDTLASLSDEYESFRRKNRAYGEAIDNLGGEKKRTSCLATFIRYCKSWFTNGQALLNETLQKGRKLLRFGRHRATQSTLAKIADKYMGKVGAACRVMLFGKASFRAQKGKASAPRKAMIREMASRGLVLMVREHNTSKKCPGCLGDTVEDKERRTRSCRNFLIGNPEESCRLHSLTQEFQMDRDDVGSTNIGMRGFGILLGQDWF

SEQ ID NO: 319 - protein, 605 aa, Cladosiphon okamuranus
VMSRHRSSQKSTESPKLPQGDGESRGSCDQCEHQEDTTDTCLMTSSRSGTAQLTEERSHIVESARQNRRMTCADKSSPSKKRTRNTRSSKTSDQASTSKGKVFCEWLTPFSKDMSKKLLSRTGIDCVDSLSTFSNGYAGGGIHESWFKTKSYALPNKSSQKISWPSSMCFPSSFTEAGDTGTKARKIRLKPVNGQEKVLRKWMTSARQTYNEALRLVKAKKAKANLLLSKLVVTARDTDKNSRLESMKLAPADVRKSATRDLVKNFASARAAYTARLRKVKSGKARIKKRRKSGQFKGRRRYKKRKPFEVKFKSRRLTSDSIELEKKSISFQDNTVCFFGSTKKHKLRVDMSEAFSDEPGAHKPSQSCRLAYCFGRWYIIVPEKVQIKKECADASMEPRIIGIDPGLRTAFTCSSNFGDVLEVGINTRYRFQREHGKKTSIAKKMRDATCVKKKTKLRKAWYRCQARAKHLAADLHWKTIKYLLDRYDVVVIGKIGVQSLVSKTGQSASNKRMFSYLSHYSFRQRLKYKAALLNKVVVEQDESYTSQACLRCGHLKKDLGDAKTYVCKECGLVIDRDVSSGFNIMVRCASEHHVTETTVLGKRKS

SEQ ID NO: 320 - protein, 729 aa, Byssochlamys sp.
KGRESSQNDSQGKKANSEQLRSSDYWFESDYDFFQSLLSGESSKTIGLQKNLASNTFASTSGAAATFSGTAMPTLETVAPSSATGVSNASASVSASNGRIMSIKTTVKDIWKAPYVKPLHDLVDLTNKVVTHTFALSKFIFLKEITSDANFDLGNHINKNFFVEVFLSLLLRQSRDGSVTGKSKLTDAVQNYRKLIGKHKDHYFQHAKYTPAKLTNAQQIALYECVKIQTAYVNNIRAHFGNRLLMVLNKLFKKTEKTENLRQKMKTQGYSDDDINKAIREQITTPCTLFKLSISKGVIHNDTQLDNESRLKLEDFLSTYPKSYRFEKDSIYYDVVSRPQNHFKAFFKLASICESLKSDCFVCFPLRTSFIPMYMTIDSKIVNFHILKNKKVSSDKLDIWNQVVYLQKKVLRRQGTISFEGTIQTDGVGVSVVKQNFPTSRKQAGNKRRKDIDTDENKVEYIEKLTSSQHAEIKGKCVLMDPNRRDLFYCMKETSSTERKQILRYTQSSRSKLSRHFRKLQKNLKPEDVRFAEEMTSKKKSKSVDLPSYIEYIKVRAEYEDVLTEYYGNETKTNVRNFYPDTINDFFITTTHDLYWGRLFVARFTGTFPKNNTDNEDELFKLQNFITHLQILLNQAHVKKRLPKTTITHISRFAEEALIWSFGCQDQAAIVQKLKVVKNFTSSQLQTLNLLPFRKMRFSSKLDSRQNEESLVKGLKEKFGSDCVLVLGN

SEQ ID NO: 321 - protein, 214 aa, Byssochlamys sp.
RERYVRYKVNVAFIKGPLSVDRGFSFFVCTNANKFIQLKFKSYTNKQKGTQEIAKRLFDNSKKYGKTSTVGAKSQNPNKSKHVPLPPADFPSSSQRKRIIAFGSGSLLSMKGKRAAPTKRITEEIKRKCKQSNVGTEFVSVDEYLTSQICNKCKSKQLNNFSVSGPKRRVHSVLKCESCGTVWNRDVNSALNMYMVSLFTNQNTIMKVLPPSKG

SEQ ID NO: 322 - protein, 557 aa, Erythrobasidium hasegawianum
VEAQLTQINAKISCQAIDPSFCHFGMTKIYYVLSNPAHIVASLTSWLNDHWNKSPSIVRSVSTLQCFNLARGRCGLEVNTNWMTRCERWTQEFMRSVSSPNKDDFPKARLEVFDILFKRVLPKYQIYAGSFKTDGIRVNITAMDISKAKLPKNLESDCAVKKIDVPKEWTVPDFFKAAVTLYQKSFSNLQGHLERTSIAEPSTAFKKKGKWWPWTFERIFGSNRRGVLRKGMMQDRPLTILSDFREESTRRGIPTDMLVLRPDTVEVIEEKMKELLTACEQDTSGDWLSDLRILGLDTGIVCPSAMAINDPINGTSSTLLTRRGALENIRRSGTRFKQDLLQRPGTNKLEGRAGQLAKAMLESSHEWSNDSYMNNRRRKAWVEQYYQQLRRHLFPPDRPRVPILFSLGDSSGFSRGSGSTKRQQIDYSHSIFRDIRKKCIDNGLPILFVVVGEAYSSQVCPDVSCTLNIPQVDSEEVKLARARSVYRHTASGSALTIHYRLFHPFHRGCLDQCLRVLQCEKCKKVYHRDTAAAINIAFIAWHMLRFGEHPWRKGDDD

SEQ ID NO: 323 - protein, 453 aa, Porphyra umbilicalis
EMRPCSKRQRTRRRLSRPRQTRRCTQRLYGVQCWATMGYMPRASNSERRRTSARRRRYCARQSEWRLRQPQLHPLRPRSSARPARRCRRQTVCECCVPSSGVRPRPGDRARARPPAGATLVVSEGAYRKSTCASMTQPAETAAAAAWAATRPDVSCESLTAGCSLTVASWGAWVVAATTRIARTYTDAYQSAYGAAVTWGRRKARLHALIQRNWYAAKLAHRMTSTFLRHTVVGTKAVLAVGRCRPRAGSVDPVRRMAKHVHLVYVDEHNTSQTCAEFGHVLFNTYVSPDSQLDLTLLKATRIYAQRASASAAKRASPLRNGRRARRGVTIGSRSGPRDDAAAQRAKEHAGTVRTEVLQAIAAHGKCAFGTDPLVLWGVKLCTSVANPATYVGRDTNAARNMSKIAIKSIQGRSVYPKIRGYTISRAPPRDDPVQAVRHAAAIEAGSYKAGYG

SEQ ID NO: 324 - protein, 674 aa, Porphyra umbilicalis
ALVGPTAATPAAQASLPPLEHAPTEPAAALDPSSPPDPPKPPRYTQPSYGDACLTPVQRQEVARKRGPSGPDGRRSLLTRLRALTHAADNDGGVQPWRLPNYVCVWMGEAALFKASTDAAADAGAKAEAAANAETAWHALSVGDQRHAARVWHSAARTAKQTAAVARNAKRAAAAAAAAAPTELPQHGVPGTPLPSADRLRVLCAALRRAATTTRPRARAPPAGATLVVSKGAYREATGAGMTRRAEAAAAAAWAATNPDVSRESLTAGCSLKVASWRAWLVAATARIARTYTDAYQAAYGAAVTSGRRKARLNALIQRNRYAAKLAHRMTGGLLRRTVDGTKAVLAIRRCRPRAGSVDLVRRMAKHVHLVYVDEHNTSQTCAECGHGFCNTYVSPDSPVDLTPLKAASSYAHRASASAAKRASPLRGGRRARRGVTTGSRSGPRDGAAAQRAKEHAEAVRTKVLQAIAAHGKWAFGTDPLALWGVKLCTNVACPATYVGRDTNAARNVSKIAIRSMQGRSIYPHIRGYTVSRAPHQENPVQATRHAAAIEAGTYEAGYRWTRCSPTSWERWRRSVVTNPAVAEAGMTSAVAEAGTAPTAVPVAAPRVRVEALGVVADGAHDAAAASASGDLATSNVGQMAAASPAPAVGHSHSSSSRLQRVIVDCSPGSSRGV

SEQ ID NO: 325 - protein, 772 aa, Porphyra umbilicalis
TRWPCDSGHCTLTRCCAMPRPCASAPTSRRPTRHRPSRHVHRVRARQRRAAPQALAVHGGSIPPQTAEGLVVQALLRRAGIIRASTLVGPTVVSDGVGVHFTIRHPATAASTAAARQARRRAASDGRGEGGPTETASVRTQLDRMAFAPDAVKALVFVGWDPGVASVVAAYCPGAVPFALSTAPHLHACRAYRALRVAANALARAAMAATAAAACHVRPSGRLLPTVDTLRATVAQIVRAAKATAAGLPVGGGDAVCGTTKKRGRGALGASTGAEGSPPKQSRGALVGPTAATPAAQASLPPFEHAPTEPAAALDRPPPPDPPKRPRYTQPAYGDSSLTPVPRKEVARKRETSGPDGRRPLLTRLRALAHAAVNDGGVQPWRLPNHVCVRMGEAALFKASTDAAADVGAKVEAAANAEAAWYALSVGDQRHAARVWHSAARTAKRAAAAARNSQRVAAAAAAAAPTEPPHHGLPGTPLPSSDRLRVLCAALRRAATTTRPRARAPPAGATLVVSKGAYREAMGAGMTRRAEAAAAAAWAATNPDVSRESLTAGCSLKVALWGAWLVAASARIARTYTDAYQAAYGVAAKSGRRKARLHALIQRNRNAAKLAHRMTGEFLRRTVDGTKAVQAIGRCRPRAGSVVLVRRMAKHVHVVYVDEHNTSQTCAACGHGLCNTYVSPDSPVDLTPLKAASSYAHRASASAAKRASPLRGGRRARRGVTTGSRSGPRDGGAAQRAKEHADAVRTKVLQAIAAHGKWALGTDPLAMWGVKL

SEQ ID NO: 326 - protein, 568 aa, Porphyra umbilicalis
MGEAALFKASTDAAADAGAKAEAAANAEAAWYALSVGDHRHASRVCHSAARTAKQAAAAARNAKRAAAAAAAAAPTEPPQHGAPGTPLPSADRLRVLCATLRRAATTTRPRARAPPAGATLVVSKGAYREATGAGMTRRAEAAAAAAWAATIPDVSHESMTAGCSFKVASWGAWLVAATARIGRAYTDAYQAAYGAAATYGQRKARLRAVIQRNRYAAVMARRWTGGLLRRTVDGTKAVLAIGRCLPRAGSVDLVRRMAKHVHLVYVDEHITSQTCAECGHGLCNTYVSADSPVDLKPLKAASTYAHRASASAAKRASPLRGGRRARRGVATGSRSGPRDGAAVQRAKEHAEAVRTKVLQAIAAHGRWAFGTDPLALWGVKLCTNVACPATYVGRDTNAARNMSKIAIKSMQGQSIYPHIRGYTVSRAPPQEDLVQATWHAAAIEAGTYEAGYGWTRCSPTSWERWRRPVVTDPAVVEAGTTPAVAEAETAPTAVPVAAPTVRVEALGVVADGAHDAAAASTSGDLATSNVGQMAAASPAPAVGHSHSSSSRLERVIVDCSPGSSRGV

SEQ ID NO: 327 - protein, 692 aa, Porphyra umbilicalis
RGEPDDQKARPWSARCVDRGGGISPKADSYRPGWPAGGHARGTSVFAAFGARTDGADRRGGPPPPKRRRYKQPAFGDEWLTPMQRQEVARKRGTSAPGRRRAILTRMRATAHATINGGNVQPWHLSNHVCVWVGEAALFKEAAHATAAVKAKTEAAAHAEAAWRAVSVDIGAHAACLVQRAAQDKRQTAAALRTAERVAAAAAAAAPAAPPQLGAPGTSLPSADRLRVLCAALKRAAAAGRRRRVCVPPTGATLVVSKGAYREATGAGMTRRAEASAVAVWAAAHPGVPRESLAAGCSLKVTTWGAWVVAATVRIARTYTDAYQAAYGAAATYGQRKARLHALIQRNRYAAVLARRLTGGLLRRTVDGTKAVLAIGRCRPRAGSVDLVRRMAKHVHLVYVDEHNTSLTCAECGHGLCNTYVSPDSPVDLTPLKAASSYAHRASASAAKRASPLRGGRRARRGVTTGSRSGPRDGAAAQRAKEHAEAVRTKVLQAIAAHGKWAFGTDPLALWGVKLCTNVACPASYVGRDTNAARNMCKIAIKSMQGRSIYPHIRGYTVSRAPPQEDPVQAVRHAAAIDAGTYEAGYGWTRCSPASWEPWRRPVVADAPAAEAGTAPTAVPVAAPTVRVEALGVVADGAHDAAAASASGDLATSNVGQMAAASPAPAIGHSHSSPSRLERVIVDCSPGSSRGV

SEQ ID NO: 328 - protein, 640 aa, Porphyra umbilicalis
RGVRDDQKARPWRARRVDRGGGISPKAESYSSGGGPAGGHTGGTGVCAAFGGRTDAAGCCAAPPPPPDPAKRPRYTQPQYGDEWLTPAQRKEIARKRGTSGPDGRRPLLTRLRALAHAAVNDGGVQPWRLPNHVCMWMGEAALFKASTDAAANAGAKAEAAANAETAWHALSVGDHRHAARVWHSAARTSKQAAAAARNAKRAAAAAAAGAPTESPQPGVPGTPLPSADRLRVLCAALRRAATTTRPRARAPPAGATLVVSKGAYREATGACMTRRAEAAAAAAWAATNPDVSRESLTAGCSLKVALWGAWLVAATTRIARTYTDAYQAAYGAAATYDQRKARLHALIQRTRYAAVLARRLTGGLLRRTVDGTKAVLAIGRCRPRAGSVDLVRHMAKHVHLVYVDEHNTSQTCAECGHGLCNTYVSPDSPVDLTPLKAASSYAHRASVSAAKRASPLRGGRRARRGVTTGSRSGPRDGAAAQRAKEHAEAVRTKVLQAIAAHGKWAFGTDPLALWGVKLCTNVACPATYVGRDTNAARNMSKIAIKSMQGRSIYPHIRGYTVSRAPPQEDPVQATRHAAAIEAGTYEAGYGWMRCSPTSWERWRRPVVADAPVAEAGTTPGSRRPGRPPRPCQWRRQRCG

SEQ ID NO: 329 - protein, 704 aa, Porphyra umbilicalis
RGVRDDQKARPWRARRVDRGGGVSPKSESWSFGGPDGGHTGGAGVIAAFGARTDGAGRCAGPPPPPDPPKRPRYTQPAYGDAWLTPVQRQEVARMRGTSGPDGRRPLLTRLRALAHAAVNDGGVQPWRLPNHVCVRMGEAALFKASTDAAANAGAKAEAAANAEAAWHVLSVGDQRHAARVWHSAARTAKRAAAAARNATRAAAAAAAAAPTELPQHGVPGTPLPSADRLRVLCATLRRAATTTRPRARAPPAGATRVISKGAYREATCAGMTRRAEAAAAAAWAATSPDVSRESLTAGCSLKVASWGAWLVAATARIARTYTDAYQAAYGAAATSGRRKARLHALIQRNRYAAKLAHRMTGGLLRRTVDGTKAVLAIGRCRPRAGSVDLVRRMAKHVHFVYVDEQNTSQTCAECGHGLCNTYVSPDSPVDLTPLKAASSYAHRASASAAKRASPLRGGRRARRGVTTGSRSDPPDGAAAQRAKEHAEAVRTKMLQAIAAHGKWAFGTDPLALWGVKLCTNVACPATYVGRDTNAARNMSKIAIKSMQGRSIYPHIRGYTVSRAPPQEDPVQATRHAAAIEVGTYEAGYGWTRCSPTSWQRWRRPVVADAPVAEAGTTPAVAEAGTAPTAVPVAAPTVRVEALGVVADRAHDAAAASASGDLATSNVGQMAAASPAPAVGHSHSSSSRLERVIVDCSPGSSRGV

SEQ ID NO: 330 - protein, 319 aa, Porphyra umbilicalis
TATIPDVSRESLTAGCSLKVSSWGAWLIAATARIARTYTDAFQAAYGAAATYRQRKARLHALIQRNRYAAVLARRLTGCLLRRTVDGTKAVLAIGRFRPRAGSVDLVPRMAKHVHLVYVDEHNTSQTCAECGHGFCNTYVSPDSPVDLTPLKAKSSYAYRASASAANRASPLRGGRRARRGVTTGSRSGPRDGAAAHCAKEHAEAVRTKVLQAIAAHGKWAFGAAPLALWGVKLCTNVACPASYVGQDTNAARNMSEIAIKSMQCRSIYPHMWGYTVSRAPPQEDPVQAMRHAAAIEAGTYEAGYGWTRCSPTSWERWR

SEQ ID NO: 331 - protein, 373 aa, Porphyra umbilicalis
SAWVVAATARIARTYTDAYQFAYVAAVSYGRRKARLHALIQRNLYAAMLTHHIKGGLLRRTVDGTKAVVAICRCRLRAGSVDLMRRMAKHVHVVYVDEHNTSQTCAKCGHGLCNTYVSPDSPLDLTPLKAATSYSHRASASAAKRASPLHDGRRARRGVTTGSRSGPHDGAAAQRAKEHEEAERTNVLQAIAAHGKWAFGTDPLALWGVKLRIKVACPATYVGRDTNAARNMSKIAIRSMQGRSVYLHIRGYTVSRAPPQDDPVQAVRHAAAIEAGIYEAGYGWTRYLATSWEAWRRPIVTDAPVAEAGTAPTAVSVAAPTVRVEALGVVADGVHDAAAASASGDLATINVGQMAAVSPAPAVGHSHSSSSRL

SEQ ID NO: 332 - protein, 358 aa, Porphyra umbilicalis
RPGAPSKSLRGARGWWRPLRASPAPTQTPIRRRTGRPRRRAGERRAYTPSSSATGTRQVGPPLDGWAPAAHGGRHQGGAGHWAVRPRAGSVDLVRRMAKHVHLVYVDEHNTSQTCAECGHGLCNTYVSPDSPVDLTPLKAASSYAHRASASAAKRASPLRGGRRARRGVTTGSRSGPRDGAAAQRAKEHAEAVRTKVLQAIAAHGKWAFGTDPLALWGVKLCTNVACPATYVGRDTNAARNMSKIAIKSMQGRSIYPHIRGYTVSRAPPQEDPVQATRHAAAIEAGTYEAGYGWTRCSPTSWERWRRPVVHPVADRPGGRGGRDGPHGRASGGANGAGRGAGCGGRRGARRSCCVGKR

SEQ ID NO: 333 - protein, 696 aa, Porphyra umbilicalis
RGVRDDQKARPWRARRVDRGGGISPKAESYSSGGGPAGGHICGTGVCAALGGRTDAAGCCAAPPPPPDPPKRPRYTQPAYGDEWLTHAQRKEVARQRGTSGPDGRRPLLTRLRALAHAAVNDGGVQPWRLPNHVCVWMGEAALFKASTDAAANAGAKAEAAANAETAWHALSVGGHRHAARVWHIAARTAKRAAAATRKAKRAAAAAAAGAPTEPPQPGVPGTPLPSTDRLRVLCAALRRAATTTRPRARAPPAGATLVVSKGAYREATGAGMTRRAEAAAVAAWAATNPDVSRGSLTAGCSLKVASWGAWLVVATARIARTYTDAYQAAYGAAATSGRRKARLHALIQRNRYAAKLARRMTGGLLRRTVDGTKAVLAIGRCRPRAGSVDLVRRMAKHVHLVYVDEHNTSQTCAECGHGLCNTYVSPDSPVDLTPLKAASSCAHRASASAAKRASPLRGGRRARRGVTTGSRSGPRDGAAAQRAKEHAEAVRTKVLQAIAAHGKWAFGTDPLALWGVKLCTNVACPATYVGRDTNAARNMSKIAIKSMRGRSIYPHIRGYTVSRAPPQEDPVQATRHAAAIDAGTYEAGYGWTRCSPTSWERWRRPVVADAPVAEAGTAPTAVPVAAPAVRVEALGVVADGAHDAAAASASGDLATSNVGQMAAASPAPAVGRSHSSSSRLERVIVDCSPGSSRGV

SEQ ID NO: 334 - protein, 331 aa, Porphyra umbilicalis
FVGLVVGTLCWGELGGGDLCGEVHAPFWEVRRGPRALRTEARGCAPRSGCTTTCPGAAWGTLGGWTRPRTSAIVKQRTHLTTPTSHAHPAQPVRGKLAHHMTGGLLRGTVDGTKAVLAICRCRPRAGSVDFVRRMAKDVHLVYVDEHNTSQTCAECSHGLCNTYLSPESPVDLTPLQADSTYAQRASASTAKRASPLGDGRRARRGVTTGNRSVPRDGAAAQRAKEHAEAVQTNVLRAIAAHGMWAFGTDSLALWGVKLCTNVAFPATYVGRDTNAASNMSKIAIKSMQGRSIYPHIRGFTVSRAPPQPDPVQAVRHAAVIEADTYEAGYG

SEQ ID NO: 335 - protein, 692 aa, Porphyra umbilicalis
RGEADDQKARPWRARRVDRGGGISPKADSYRSGGPAGGHARGTSVFAAFGARTDGADRRGGPPPPKRRRYKQPAFGDEWLTPIQRQEVARKRGTSAPGRRRAILTRMRATAHATINGGNVQPWHLSNHVCVWVGEAALFKEAAHATAAVKAKTEAAAHAEAAWRAVSVDSGAHAACLVQRAAQDKRQTAAALRTAERVAAAAAAAAPAAPPQLGAPGTSLPSADRLRVLCAALKRAAAAAGRRRVRVPPTGATLVVSKGAYREATGAGMTRRAEAAAVAAWAAAHPGVPRESLTAGCSLKVTTWGAWVVAATARIARTYTDAYQAAYGAAATERRRKARLHALIQRNRYAAVLARRLTGGLLRRTVDGTKAVLAIGRCRPRAGSVDLVRRMAKHVHLVYVDEHNTSLTCAECGHGLCNTYVSPDSPVDLTPLKAASSYAHRASASAAKRASPLRGGRRARRGVTTGSRSGPRDGAAAQRAKEHAEAVRTKVLQAIAAHGKRAFGTDPLALWGVKLCTNVACPASYVGRDTNAARNMSKIAIKSMRGRSIFPHIRGYTVSRAPPQEDPVQAVRHAAAIDAGTYEAGYGWTRCSPTSWEPWRRPVVADAPVAEAGTAPTAVPVAAPTVRVEALGVVAYGANDAAAASASGDLATSNVGQMAAASPAPAVGHSHSSPSRLERVIVDCSPGSSRGV

SEQ ID NO: 336 - protein, 700 aa, Porphyra umbilicalis
SSGASGQEARAGCRRSAVWGRQASFKAGPLCPRRVDNRVATALPVGKCAPATNGADRRGGSPPPKRRWYKQPAFGDEWLTPIQRQEVARKRGTSAPGRRRAILTRMRATAHATINGGNVQPWHLSNHVCVWMGKAALFKKTAHTTAAVKAKTDAAAHAEAAWRSVSVDSGAHAACVVQRAAQDKRQTAAALRTVERVAAAAAAAAPAAPPQLGAPGTSLPSADRLRVLCAALKRAAAAGGRRRVRVPPTGATLVVSKGAYREATGAGMTRRAEAAAVAAWAAAHPGVPRESLTAGCSLKVTTWGAWVVAATARIARTYTDAYQAAYRAAATYGKRKARLHALIQRNRYAAVLARRLTGGLLRRTVDGTKAVLAIGRCRPRAGSVDLVRRMAKHVHLLYVDEHNTSQTFAECGHGLCNTYVSPDSPVDLTPLKAASSYAHRASASAAKRASPLRGGRRARRGVTTGSRSGPRDGAAAQRAKEHAEAVRTKVLQAIAAHGKWAFGTDPLALWGVKLCTNVACPATYVGRDTNAARNMSKIAIRSMQGRSVYPHIRGYTVSRTPPQDDPVQAVRHTAAIEAGTYEAGYGWTRCSPTSCERWRRPVVTDPAVVEAGTTPAVAEAGTAPTAVPVAAPTVRVEALGVVADGAHDAAAASASGDLATSNVGQMAAASPAPAFGHSHSSSSRLERKFVDCSPGSSRGV

SEQ ID NO: 337 - protein, 696 aa, Porphyra umbilicalis
RGVRDDRKARPWRARRVDRGGGISPKAESYSSGGGPAGGHTGGTGVCAAFGGRTDAAGCCAAPPPPPDPPKRPRYTQPAYGDEWLTPAQRKEVARKRGTSGPDGRRPLLTRLRALAHAAVNDGGVQPWRLPNHVCVWMGEAALFKASTDAAANAGAKADAAANAETAWHALSVGGHRHAARVWHSAARTAKRAAAATRNAKRAAAAAAAGAPTEPPQPGVPGTPLPSTDRLRVLCAALRRAATTTRPRARAPPAGATLVVSKGAYREATGAGMTRRAEAAAVAAWAATNPDVSRGSLTAGCSLKVASWGAWLVAATARIARTYTDAYQAAYGAAATSGRRKARLHALIQRNRYAAKLARRMTGGLLRRTVDGTKAVLAIGRCRPRAGSVDLVRRMAKHVHLVYVDEHNTSQTCAECGHGLCNTYVSPDSPVDLTPLKAASSCAHRASASAAKRASPLRGGRRARRGVTTGSRSGPRDGAAAQRAKEHAEAVRTKVLQAIAAHGKWAFGTDPLALWGVKLCTNVACPATYVGRDTNAARNMSKIAIKSMRGRSIYPHIRGYTVSRAPPQEDPVQATRHAAAIDAGTYEAGYGWTRCSPTSWERWRRPVVADAPVAEAGTAPTAVPVAAPTVRVEALGVVADGAHDAAAASASGDLATSNVGQMAAASPAPAVGRSHSSSSRLERVIVDCSPRSSRGV

SEQ ID NO: 338 - protein, 567 aa, Porphyra umbilicalis
LCRQIPDRPFQFVGCVFDRAPHCVALKSLESNQISAMAEPPTTVGDQRHAARVWHSAARTAKRAAAASCHAKRAAAAAAAAAPTEPPRPGAPVTSLPSAARLRVLCAALRRAAATRGPRARAPPTRATLVVFQGAYREATGASMTQRAEAAAAATWAATNPYVSREALTARCSPKVASWGAWLVAATARIARTYTDAYQSAYGAVAMEGQQKMRLHALIQRNRYAAMLAHIMTGGLLRRTVNGTKAVVDIGRCRPRAGSVNLVRRMAKHVHVVYVDEHNTSQTCAECGHGLCNTYVSPDSSFDLTPLKAESTYAQRASASAAKRASPLCGGRRARRGVTAGSRSVPRDGAAAERAKEHVEALRTKVLQAIAAHGKWAFGTDQLALWGVKLCTNFVCPATYVERDTNAARNMSKIAIKSIQGRSVYFHIRGYTVPRAPPQDDPLQAAQHADVIEAGTYEACYGCMRCSPTSCERWPRPVVTDLPVAEAGTARTAVAVAAPTERVEALGVVSDGAHDAAAALASGDLATMNVGQMAASSPAPVVGHSHSSSSRLERVILDCSPGSSRGV

SEQ ID NO: 339 - protein, 701 aa, Porphyra umbilicalis
RGEADDQKARPWSARCVDRGGGISPKADSYRSGGPAGGHARGTSAFAAFGARTDGADRRGGPPPPKRRRYKQPAFGDEWLTPIQRQEVACKRGTSAPGRRRAILTRMRATAHATINGGNAQPWHLSNHVCVWVGEAALFKEAAHATAAVTAKTEAAAHAEAAWRAVSVDSGAHAACVVQRAAQDKRQTAAASRTAERVAAAAAAAAPAAPPQLGAPGTSLPSADRLRVLCAALKRAAAAGGRRRVRVPPTGATLVVSKGAYREATGAGMTRRAEAAAVAAWAAAHPGVPRESLTAGCSLKVTTWGAWVVAATARIARTYTDAYQAAYGAAATEGRRKARLHALIQRNRSAAVLARRLTGGLLRRTVDGSKAVLAIGRCRPRAGSVDLVRRMAKHVHLVYVDEHNTSLTCAECGHGLCNTYVSPESPVDLTPLKAASSYAHRASVSAAKRASPLRGGRRARRGVTTGSRSGPRDGAAAQRAKEHAEAVRTKVLQAIAAYGKWAFGTDPLALWGVKLCTNVACPATYVGRDTNAARNMSKIAIKSMQGGSIYPHIRGYTVSRAPPQEDPVQAVRHAAAIDAGTYEAGYGWTRCSPTSWERWRRPVVTDPAVAEAGMTPAVAEAGTAPTAVPVAAPTVRVEALGVVADGAHDAAAASASGDLATSNVGQMAATSPATAVGRSHSSSSRLERVIVDCSPGSSRGV

SEQ ID NO: 340 - protein, 641 aa, Porphyra umbilicalis
TAPPPPPPDPPKRPRYTQPQYGDEWLTPAQRKEVARKRGTSGPDGRRPLLTRMRALAHAAVNDGGVQPWRLPNHVCVWMGEPALFKALTDAAANAGAKAEAAANAETAWHALSVGGHRHAARVWHSAARTAKQTAAALRRAERLAAAAAAAAPTEPPQPGAPGTPLPSADRLRVLCAALRPAATTTRPRARAPPAGTTLVVSKGAYREATGAGMTRRAEAAAVAAWAATIPDVSRESLTAGCSLKVASWGAWLVAATARIARTYTDAYQAAYGAAATSGRRKARLHALIQRNRYAAKLAHRMTGGLLRRTVDGTKAVLAIGRCRPRAGSVDLVRRMAKHVHLVYVDEHNTSQTCAECGHGLCNTYVSPDSPVDLTPLKAASSYAHRASVSAAKRASPLRGGRRARRGVTTGSRSGPRDVAAAQRAKEHAEAVRTKVLQAIAAHGKWAFGTNPLALWAVKLCTNVAFPATYVGRDTNAARNMSKIAIKSMQGRSIYPHIRGYTVSRAPPQEDPVQATRHAAAIEAGTYEAGYGWTRCSPTSWERWRRPVVADAPVAEAGTTPAVAEAGTAPTAVPVAASTVRVEALGVVADGAHDAAAASASGNLATSNVGQMAAASPAPAVGHSHSSSSRLERVIVDCSPG

SEQ ID NO: 341 - protein, 533 aa, Porphyra umbilicalis
VADARAAERGRPQAGDERPRRPAAAADAPARARTRRRQRRRRPTVGLPNHVCVWMGEAALFKASTDAAANAGAKAEAAANAETAWHALSVGGHRHAARVWHSAVRTAKQTAAAARNAKRAAAAAAAAAPTEPPQPGAPGTPLPSTDRLRVLCRPPARGHDHETARARSAGGGDSGRLQRRVPRGDGRRYDEACRGGSGGGVGGGTPRRAARVTDGRVLPQSRFVGRVAGGGHCAHRPHLHRRLSGGVRGGRDVGPAKGAPTRPHPAQPVRGKVGPPHDGWAPAAHGGRHQGGAGDWAVQARAGSVDLVRRMAKHVHLVYVDEHNTSQTCAECGHGLCNTYVSPDSPVDLTPLKAASSYAHRASASAAKRASPLRGGRRARRGVTTGSRSGPRDGAAAQRAKEHAEAVRTKVLQAIAAHGKWAFGTDPLALWGVKLCTNVACPATYVGRDTNAARNMSKIAIKSMQGRASTPTSGGTPCHARHPRKTLYRRCGTRLRSTRVPTRPATGGRGVHPRRGSVGADLSSPTRRSRRPG

SEQ ID NO: 342 - protein, 702 aa, Porphyra umbilicalis
RGVRDDPKARPWRARRVDRGGGISPKAESYSSGGGPAGGTGVCAASGGRTDAAGCCAAPPPPPDPPKRPRYTQPQYGDEWLTPAQRKEVARKRGTSGPDGRRPLLTRLRALAHAAVNDGGVQPWRLPTHVCVWMGEAALFKASTDAAADAGAKAEAAAIAEAAWYALWVGDQRHAARVCHSAARTAKRAAAAARNAKRAAAAAAAAAPAAPPQLGAPGTSLPSADRLRVLCAALKRAAAAGGRRRVCVPPTGATLVVSKGTYREATGAGMTRRAEAAAVAVWAAAHPGVSRESLTAGCSLKVTTWGAWVVAATARIARTYTDAYQAAYGAAATYGQRKARLHALIQRNRYAAVLARRLTGGLLRRTVDGTKAVLAIGRCRPRAGSVHLVRRMAKHVHLVYVDEHNTSQTCAECGHGLCNTYVSPDSPVDLTPLNAASSYAHRASASAAKRASPLRGGRRARRGVTTGSRSGPRDGAAAQRAKEHAEAVRTNVLQAIAAHGKWAFGTDPLALWGVKLCTNIACPATYVGRDTNAARNMSKVAIKSMQGRSIYPHIRGYTVSRAPPQEDPVQAVRHAAAIDAGTYEAGYAWTRCSPTSWERWRRPVVTDPAVAEAGMTPAVAEAGTAPTAVPVAAPTVRVEALGVVADGAHDAAAASASGDLATSNVGQMAAASPAPAMGHSHSSPSRLERVIVDCSPGSSRGV

SEQ ID NO: 343 - protein, 504 aa, Porphyra umbilicalis
RAAAAAAAGAPTEPPQPGVPGTPLPSTDRLRVLCAALRRAATTTRPRARAPPAGATLVVSKGAYREATGAGMTRRAEAAAVAAWAATNPDVSRGSLTAGCSLKVASWGAWLVAATARIARTYTDAYQAAYGAAATSGRRKARLHALIQRNRYAAKLARRMTGGLLRRTVDGTKAVLAIGRCRPRAGSVDLVRRMAKHVHLVYVDEHNTSQTCAECGHGLCNTYVSPDSPVDLTPLKAASSCAHRASASAAKRASPLRGGRRARRGVTTGSRSGPRDGAAAQRAKEHAEAVRTKVLQAIAAHSKWAFGTDPLALWGVKLCTNVACPATYVGRDTNAARNMSKIAIKSMQGRRIYPHIRGYTVSRAPPQEDPVQATRHAAAIDAGTYEAGYGWTRCSPTSWERWRRPVVTDPAVAEAGTTPAVAEAGTAPTAVPVAAPTVRLEALGVVADGAHDAAAASASGDLATSNVGQMAAASPAPAVGRSHSSSSRLERVIVDCSPGSSRGV

SEQ ID NO: 344 - protein, 959 aa, Porphyra umbilicalis
TRWPCDSGRCTSTRCCSTPRPCASAPTLRRPTRHPAEPPRAPRTRVSAARCSASVWRPTGGPSHQRRPTVWSCRRCSAARASSAPRRSLAPPSCRTASACTLRYDAPPLPRRRRPHGGRAAGRPVTAAGGGVRPRRRACGRSSTAWRLRPTLSRRSSLSGGTRASRPSSLPTAPAQCLLRSQRHRNCTRTGRTGRCGLRPTRSRGWPWPRPQLQSATCGAAVGYCRPSTRCVQRWPRLFVRPRPPRRTYPSAAVTRCAGRPKSAAVARSARRPGRRVSPKAESYSSGGGLAGGHAGGTGVCAAFGGRTDAAGCCAALPPPPDPPKRPRYTQPAYGDEWLTPVQRQEVARKRGTSGPDGRRPLLTRLRALAQAAVNDGGVQPWRLPNHVCVWMGEAALFKASTDAAANAGAKAEAAANAETAWHALSIGGHRHAARVWHSAARTAKQAAAALRRAERVAAAAAAAAPTEPPQPGAPGTPLPSADRLRVLCAALRRAATTTRPRARAPPAGATLVVSKGAYREATGAGMTRRAEAAAVAAWAATNPDVSRESLTAGCSLKVASWGAWLVAATARIARTYTDAYQAAYGAAATSSRRKARLHALIQRNRYAAVLARRLTGGLLRRTVDGTKAVLAIGRCRPRAGSVDLVRRMAKHVHLVYVDEHNTSQTCAECGHGLCNAYVSPDSPVDLTPLKAASCYAHRASASAAKRASPLRGGRRARRGVTFGSRSGPRDGAAAQRAKEHAEAVRTKVLQAIAAHGKWALGTDALALWGVKLCTNIACPATYVGRDTNAARNMSEIALKSMQGPSIYPHIRGYAVSRAPPQEDPVQAVRHAAAIDAGTYEAGYGWTRCSPTSWERWRRPVVTDPAVAEAGMTPAVAEAGTAPTAVPVAAPTVRLEALGVVADGAHDAAAASASGDLATSNVGQMAAARPAPAAGRSHSSSSRLERVIVDCSPGSSRGV

SEQ ID NO: 345 - protein, 704 aa, Porphyra umbilicalis
RGVRDDQKARPWRARRVDRGGGISPKAESWSFAGPDGGHTGGAGVFAAFGARTDGAGRCAGSPPPPDPPKRLRYTQPAYGDAWLTPVQRQEVARKRGTSGPDCWRPLLTRLRALARAAVNDGSVQPWRLPNHVCVWMGEAALFKASTDAAADAGAKAEAAANAEAAWYALSVGDERHAARVWHSAARTAKQAAAAARNTKRAAAAAAAAAPTEPPQHCVPGTRLPSADRLRVLCAALRRAATITRPRVRTPPAGATLVVSKGAYRKATGAGMTRRAEAAAAAAWAATNPDVSRESLTAGCSLKVASWGAWLVAATVRIARTYTDAYQAAYGAAATYGQRKAWLHALIQRNRYAAVRARRLTGGLLRRTVDGTKAVLAIGRCRPRAGSVDLVRRMAKHVHLVYVDEHNTSQTCAECGHGLCNTYVSPDSPVELTPLKAASTYAHRASASAAKRASPLRSGRRVRRGVTTGSRSGPRDGAAAQRAKEHAEAVRTKVLQAIAAYGKWAFGTDPLALWGVKLCTNVACPATYVGRDTNAARNMSKIAINSMQGRSIYPDIRGYTVSRAPPEEDPVQATRHAAAIEASTYEAGYGWTRCSPTSWERWRRPVVTDPAVVEAGTTPAVAETGTAPTAVRVGAPTVPVEALGVVADGAHDAAAASASGDLATSNVGQMAAASPAPAVGHSHSSSSRLERVIVDCSPGSSRGV

SEQ ID NO: 346 - protein, 885 aa, Porphyra umbilicalis
TRWPCDSGRYTFTRCCTMPRPCASAPASRRPTRHLAESLRAPGTRASAARCSASAWRSTGVQSHQRRPTVWSCRRCSAARASSAPRRSLAPPSCRTASACTLRYDTPPLQRRQRPLGGRAAGRPVTVAGGGSDRDGERADAARPHGVCARRCQGAGVCRVGPGRRVHRRCLLPRAVPFALSPAPHLHAYRAYRALRVAADALARAAMAATAAAECHVRRSGRFLPTVDTLRATVARIVRSAKATAANLPVGGGDAVCGTTKKRGRGALGASTGAEGSPPKQSRTALVGGPPAATPAAQASVPPLEDAPTQPAAGCPPPPPPDPPKRPRYTQPQYGDEWLTPAQRKEVARKRGTSGPDGRRPLLTRLRALAHAAVNDGGVQPWRLPNHVCVWMGEAALFKASTDAAADAGAKAEAAANAEAAWYALSVRDQRHAARLCHSAARTAKRAAAAARNAKRAAAAAAAAAPAAPPQLGAPGTSLPSADRLRVLCAALKRAAPPGRRRVCVPPTGATLVVSKGAYREATGAGMTRRAEAAAVAVWAAAHPGVPRESLTAGCSLKVPTWGAWVVAATARIARTYTDAYQAAYGAAATYGQRKARLHALIQRNRYAAVLARRLTGGLLRRTVDGTKAVLAIGRCRPRAGSVDLVRRMAKHVHLVYVDEHNTSQTCAECGHGLCNTYVSPDSPVDLTPLKAASSYAHRASASAAKRASPLRGGRRARRGVTTGSRSGPRDGAAAQRAKEHAEAVRTMVLQAIAAHGKWAFGTDPLALWGVKLCTNVACPASYVGRDTNAARNMSKIAIKSMRVGASSPTSGGTPCHARHPRKTMYRRCGTRLRSTRVPTRPATGGRGVHPRRGSPGADLSSPTRRSQRRGRPPRPCQWRRQRCG

SEQ ID NO: 347 - protein, 812 aa, Porphyra umbilicalis
RSRGGGSDRDGERADAARPHGVCARRCQGACLCRVGPGRRVHRRCLLPRRSAVCALTGTAPARVPGVSGAAGCGRRARAGGHGRDRSCRVPRAAQRSVPADRRHAACNGGPDCSCGQGHRGGPTHRRRCRGVRDDQKARPWRARRVDRGGGISPKAESYSSGGGPAGGHAGGTGVCAAFGGRTDAAGCCAAPPPPPDPPKRPRYTQPQYGDEWLTPAQRKEVARKRGTSGPDGRRPLLTRLRALAHAAVNDGGVQPWRLPNHVCVWMGEAALFKASTDAAADAGAKAEAAANAETAWHALSVGGHRHAARVWHSAARTAKQTAAALRRAERVAAAAAAAAPTEPPQPGAPGTPLPSADRLRVLCAALRRAATTTRPRARAPPAGATLVVSKGAYREATGAGMTRSAEAAAAAAWAATNPDVSRESLTAGCSLKVASWGAWLVAATARIARTYTDAYQAAYGAAATSGRRKARLHALIQRNRYAAKLARRMTGGLLRSTVDCTKAVLAIGRCRPRAGSVDLVRRMAKHVHLVYVDEHNTSQTCAECGHGLCNTYVSPDSPVDLTPLKAASSFTHRASASAAKRASPLRGGRRARRGVTTGSRSGPRDGAAAQRAKEHAEAVRTKVLQAIAAHGKWAFGTDPLALWGVKLCTNIACPATYVGRDTNAARNMSKIAIKSMQGQSIYPHIRGYTVSRAPPQEDPEQAVRHAAAIEAGTYEAGYGWTRCSPTSWERWRRPVVTDPAVAEAGTAPTAVPVAAPTVRVEALGVVADGAHDAAAASASGDLATSNVGQMAAASPAPAAGHSHSSSSRLAG

SEQ ID NO: 348 - protein, 701 aa, Porphyra umbilicalis
RGEADDQKARPWSARCVDRGGGISPKADSYTSGGPAGGHARGTSVFAAFGARTDGADRRGGPPPPKRRRYKQPAFGDEWLTPIQRQEVARKRGTSAPGRRRAILTRMRATAHAKINGGNVRPWHLSNHVCVWVGEAALFKEAAHATAAVKAKTEAAAHAEAAWRAVSVDSGAHAACVVQRAAQDKRQTAAAWRTAERVAAAAAAAAHAAPAQLGAPGTSLPSADRLRVLCAALKRAAAAGGRRRVRVPPTGATLVVSKGAYREATGAGMTRRAEAAAVAVWAAAHPGVPRESLTAGCSLKVTTWGAWVVAATVRIARTYTDTYQAAYGAAATYGQRKARLHALIQRNRYAAVLARRLTGGLLRRTVDGTKAVLAIGRCRPRAGSVDLVRRMAKHVHLVYVDEHNTSLTCAECGHGLCNTYVSPDSPVDLTPLKAASSYAHRASASAAKRASPLRGSRRARRGVTTGSRSGPRDGAAAQRAKEHAEAVRTKVLQAIAAHGKWAFGTDPLALWGVKLCTNVACPATYVGRDTDAARNMSKIAIKSMQGRIIYPHIRGYTVSRAPPQEDPVQATRHAAAIEAGTYEAGYGWTRCSPTSWESWRRPVVADAPVAEAGTTPAVAEAGTAPTAVPVAAPTVRVKALGVVADRAHDAAAASASGDLATSNVGQMAAASPAPAVGRSQSSSSRLERVVVDCSPGSTRGV

SEQ ID NO: 349 - protein, 766 aa, Porphyra umbilicalis
RSRGGGPTETASVRTQLDRMAFAPDAVKALSLSGGTRASRPSSLPTAPAQCRLRSHRHRTCTRTGRIGRCGLRPTRSRGRPWPRPQLQSATCGAAVGYCRPSTRCVQRWPRLFVRPRPPRRAYPSAAVTRCAGRPKSAAVARSARRPGRRDLPQSRVVQLWWGARRRPRRRHRRLCRLWRTHRRSRLLRCPPPPPRPAQAAAVHAATYGDEWLTPAQRKEVARKRGTSGPDGRRPLLTRLRALAHAAVNDGGVQPWRLPNHVCVWMGEAALFKASTDAAADAGAKAEAAANAEAAWHALSVGGHRHAARVWHSAARTAKQAAAAARNAKRAAAAAAAGAPTEPPQPGVPGTPLPSADRLRVLCAALRRAATTTRPRARARRRGDAGRLQGRVPRGDGRRYDQARRGGSGGGVGGDQPRRVARVTDGRVLPQSRFVGRVGGGGHCAHRPHLHRRLSGGVRGGRDVRSTQGAATRPHPAQPVRGSWPPLDGWAPAAHGGRHQGGAGIGRCRPRAGSVDLVRRMAKHVHLVYVDEHNTSQTCAECGHGLCNTYVSPDSPVDLTPLKAASSYAHRASASAAKRASPLRGGRRARRGVTTGSRSGPRDGAAAQRAKEHAEAVRTKVLQAIAAHGKWAFGTDPLALWGVKLCTNVACPATYVGRDTNAARNMSKIAIKSMQGRSIYPHIRGYTVSRAPPQEDPVQATRHAAAIEAGSYEAGYGWTRCSPTSWERWRRPVVTDRRSWRPGRPRRSRRPGRPPRPCQWRRQRCG

SEQ ID NO: 350 - protein, 692 aa, Porphyra umbilicalis
RGEADDQKARPWRARRVDRGGGISPKADSYRSGGPAGGHARGTSVFAAFGARTDGDDRRGGPPPPKRRRYKQPAFGDEWLTPVQRQEVARKRGTSAPGRRRAILTRMRATAHATINGGNVQPWHLSNHVCVWVGEAALFKEAAHATAAVKAKTEAAAHAEAAWRAVSVDSGAHAACVVQRAAQDKRQTAAALRTAERVAAAAAAAAPAAPPQLGAPGTSLPSADRLRVLCAALKHAAAAGGRRRVRVPPTGATLVVSKGAYREATGAGMTRRAEAAAVAVWAAAHPGVSRESLTAGCSLKVTTWGAWVVAATVRIARTYTAAYQAAYGAAATEGRRKARLHALIQRNRYAAVLARCLTGGLLRRTVGGTKAVLAIGRCRPRAGSVDLVRRMAKHVHLVYVDEHNTSQTCAECGHGLCNTYVSPDSPVDLTPLKAASSYAHRASVSAAKRASPLRGGRRARRGVTTGSRSGPRDGVAAQRAKEHAEAVRTKVLQAIAAHGKWAFGTDPLALWGVKLCTNVACPASYVGRDTNAARNMSKIAIKSMQGRSIYPHLRGYTVSRAPPQEDPVQAVRHAAAIDAGTYEAGYGWTRCSPTSWEPWRRPVVADAPVAEAGTAPTAVPVAAPTVRVEALGVVADGAHDAAAASASGDLATSNVGQMAAASPAPAAGHSHSSSSRLARVIVDCSPGSSRGV

SEQ ID NO: 351 - protein, 579 aa, Porphyra umbilicalis
PWRLLNHVCVWMGEAALFKASTFAASNACAKAEAVANSETAWHAPSVGGQRHATRVWHSALRTATQAAAAARSAKRAAAAAAAGAPTEPPQPGAPGTPLPSADRLPVFCAALRRAAATKGPRARAPPAGEALIVSKGAYREATGAGMTQRAEAAAAASWAAIEPVVPRESLTAGCSLNVASWGAWLVAATARIARTYTDAYQSAYWVAATSGRRQARLHALIQRNRYAAKLAHRMTGGLLRRTVDGTKAVLAIVRFMPRAGSVDLVRRMAKHVHLVYVDEHNTSQTCAECGHGLCNTYVSLDSPVDLTPLKVARTYAHRVSASAAKRASPLRGGRRARHGVTTGSPSGPRDGAATQRAKEHAESVRTMVLQAIAAHGKWAFGTDLLALWGVKLWTNVACPASYVGRDTNAARNMSKVAIKSMQGRSIYPHIRGYPVSRAPPQEDPVLATRHAAAIEAGTYEAGYLWTRCSPTSWERWRRPVVTNPAVAEAGTTPAVAEAGTAPTAVPVAAPTVRVESLGVVADGAHDAAAASASGDLATSNVGQMAAASPSQAVGRSHSSSSRFERVIVDCSPGSSRGV

SEQ ID NO: 352 - protein, 205 aa, Trebouxia sp.
TERPRQTPHEKLSCICSRWRHVSGVKYRSAKTDTWLQSDKALDSALRDTPTAKVPTAATFLQHVKHRLHHLPAALQHFDALRHKKLRWQTHIKHRQAYTVISRGIYRNDSSTVVAYGDASFSSSCCKGNPSTSTVSLRRKIGQCCRVSETDEFHTMLCCGCRIKMDGMPLPPAGKTSCQSCSQAADYKPTRTSCKHDCQHSLSLA

SEQ ID NO: 353 - protein, 321 aa, Trebouxia sp.
HKCVLVFAALTETNAYPSYDALYFCTLCTSSTLQCCACRYDTLTCSKSRWQEESGHRHRQKQTASWMQADPDLIGIFEQMPSAKVASTAALGQHILYRLRHLSIVLDHFCAPECQMLRWATFRKRQAAMAKLCNYITDKDSNTVVGYGDAAFNSSAPTSSLQRRLRSLCHVYDVDEFRTSRLCCACHQPMIGMPSAASGQAHKSQLSAQCFVACTHGQTPFRCPSSTCVALYYTVLACLHVSTVRLVFLSDRAFEMLADNEKCRRQRGYGVRLCSNTECNRMIWNRDVNASINILNLLMSCMRGDSKPVAFLRTGNLDPGG

SEQ ID NO: 354 - protein, 234 aa, Trebouxia sp.
LQDVDSSITAFTTALHSDHAKQHKHEQHIRKPEKFSSSSRRQRRWQEVSGCREHKAKADKWLLSAPAVQQALLATPTPKVANVQAYCTPIRWKVQHETLVSEYFGKPCHRKLRRKHKIRRQAALQSACNTISQSKRSTIVAYGDAKFSSVSKGLAPTPTTALRRQLGKTCKVCDVDEFRTSMLCCNCHCAMSGMPEHKQPRFRGSLGPPDGKLQAQNAPCADEVLEHTLLQLPS

SEQ ID NO: 355 - protein, 245 aa, Trebouxia sp.
SAEHRIPAVHRLRAEADACVCMGKQVIHSVGDFCAPEYQMLRWATFRKRQSAMAKLCNNITDKDSNTMVGYGDAAFNSSAPTSSLRRRPRSLCHFYDVDESRTSRLCCACHQPMIGMPSAVSSKAHKSQLSAQCLVACAHGQTPFRRPSSICVALYYTVLACLHLSTVRLVFLSDRAFEMLADNEKRRRQRDYGVRLCNNTECNRMIWNRDVNGSINILSLLLSRMRGDSKPVAFLRAGNLDPGG

SEQ ID NO: 356 - protein, 208 aa, Rhizophlyctis rosea
QWRDGWRKRLAEEAGDNTNVSKVTSQITTPKTVVVDVYLEHLRTTFRHVDFLKKYHSKEPRWNFFKYRREQKALCEVVRRVKGDDGVGKQKSQIVVAFGNGKFGNSGRKGSRGAPVERFKKHLRRHVTLVVVDEYRTSRACSKCWLKDCWGETGDNNSTDSQRLCLALSLVDVDDDDDEDIALEEVEGPPDEEEDDDDTATTQGQKQW

SEQ ID NO: 357 - protein, 610 aa, Phytophthora plurivora
AVRAGTVFSVCRTATQESQASRSGGSQKKKNKTIDFFVMKETLRDFCKPEATGLAWDECIQEVNQAVAEAYLLANLYVLRQLQSGRPLCKIDAEDLYQPCLSLVTSVPRREKYKKFLRTQATKDRRNKWEVSGKVEKLKDVPVVTSSFTEDGFQHWISTQKTKNQDLEEAADEFCKMRRDRPRPSTEHLNQGWFQSAAKQMATNAKNGVVRNFAKRLRSYVLEKYEVTKVVGHEIVNGVFAQTFESVPARVADPVIVELREKIPRTKEGKISWAPQDLLPMFYEFLLYIEKCNKKSKGKPDYVEKRTFSILPTKRGFESSYCKVDSTGLRSLLLRSPSVRRDIAVVYEGNVWTLEKSLADRAAWIELSSLWWRRLFHVDKLEKPGVPSFHREITTDGYGVGVHMNRPTRGKKEKKKGKDGKTVTTKSKNVSNALGFPLSKTPKSTTEEYDVIWGIDPGRMDVITATNQHGKTVRFRTSDFYRASGYTRSNRKTKYRIDKSPRTRELLKNAPSKKTSSVELFCNAIEFWFEHGRTLLSFFMDPFFRKLKFHRYTLRTARLLRTSGCEGYQNNSRVRRLRHGWRGRDQAKCARTREDVRAQACPLLRGRGGR

SEQ ID NO: 358 - protein, 708 aa, Phytophthora plurivora
EAEIAKARAKGGRQAHEEILILNSFSNLPQAPQSPSNKSSRPDSLLCKPRACHAMGRKRKKIDDYPDEWDIVEETQDRDDVPPPNETVAGSEIDSDTDALSQLAPEDLYRLKQTTKNTHSSVICKLTRIYHVPELIEEIKRICVVMRQVQLEGWHLANLHVLRCLKGDEDLPELDQMFFYRCCAASLANVAARDRRTSQPKHPCLHRTCLEYWSGRERVVSYAADSLVFGNGMINEMAKLMNIIAGNMITIHFRRRLRQYIRFRYAPEGTIELKYKDTKRIVDSCYRVKLVPELDEDEKLTGRMVKSRTTWDKTDDPVEKSLREWLEIVTWQWQIQNNSAHFVHKLHDMLSWMETFVNDHPTTRGARLYSLLPVATSYQATYVKLNATTLHGLFARILKEPKVKEFLNNELNIVPTVEQTSDSQRPFSRKTFQTHRSEILRKVFDVEGFETKNRKFVDEVETNSYGPSITIIRPLTTTSVFVVKKKASNKKRKKDDGTAVATAKEPKRKKAKTPEEIAEVDSFAKELFKLNPGYFPDVLMGIDPGMRSLVTVASVGRRREGHHPQRPQSKEKVTDISTRKYRHLARINDFQFWNENLKKREPWYAGVIHAMPSFKAASYDTYFQRLRFFWMHLGFLLAFSAEQAFLQWRFTRDHAKMRAQDMLVKLIVPIASKQVCIAYGDWSRRDGIKGHATGPVNTIVVHPPKTLQ

SEQ ID NO: 359 - protein, 274 aa, Bifiguratus adelaidae
RTSTKEYYDLAGHNIATKRREMWRHSADSTTTKIIDDIPSLKTSDVRSLTSAIQYRMTHFSVIVGYYDQGRRFNVLKLKSYKGKQKALAEISRRLTHGSSKYGQVPLPCHSHMTNPITPTRPKWTPSPACYRASDGKNRHYVIAYGSASWGNLPGKRPGPSKTFLQKLRDICRMPHCRVSLCMIDEYNTSKVCPRCHTKSVDNVKQKNTSGGHSNERIHAVLRCHNCDTVWNRDEMAARNMAYIFRYMALHNNQRPEPFKRLSVEERGANLPPG

SEQ ID NO: 360 - protein, 493 aa, Bifiguratus adelaidae
TYLPFARFIFLHELEKKSDFPLNEWVKKEFFAEVFLSLVDSKQTSKASLATRAYRSLIGQYRSSYLNTTSFEPIHLTYAQQIALYQATTIHTAYLNNVKLRFGQQLRRIVNRLLNLKERKQSLKDELEHKNYNSENIKQTIEDTIIKPAREFKTSIANRKVDRATINQNLTTIYVKFKPILEAYSPEYKFDKDNIYYDCKANPEMHFNAFFQMALFCEKMAIKSFQCFPLRRSWIPGYMQIDTTILCQHILLLGRTRPKDKMTAWRQVVDLDSKPFKAQGTDRSLKFRGTIHTDGVGVTVLKQNCDTVKGGSGQRRNKMKVKDNEPYIHKIQRQELDATEGRCVFMDPGRRDLLYAMHENSTPEAPLTYRYTRNQKAKETRSGRFKRLREKLKKQFADVQKAENALALHTQSSIDPEAYRLYLGKRTEASSTMVAHYQDLMSTHTSQHPIFRKLRLSAYINKMQADDRLARSIRQKFGNDAVLIMDDWSAPNT

SEQ ID NO: 361 - protein, 315 aa, Dunaliella salina
MCMCARARTHTHTHTHTHTHTHTHTHTHTHTHTQGSDPKHHVVIGVGASKMPPAPHGLQKFVAPTQLWKALIRALLRGVGHSWLHLRLMMSLNEFRTTLCCSKCGTETVAPIVADFATHKPRESKRLRECPHCKKWYLEQQQGEGMMEEAAAGEQQQGEGMMEEAAAGEQQQGEGLGDEAEAGELQQGEGMMEEVAAGEQQQGEGMGDEEEAGEQQQQGEGVGEEEEEEQPMPSEQGSTEWGGIDVEEEEGEECGVEGEVQAAVLGERRARVHKPQPAYRMHRDMNAAWNLWEVCIAEYAGNPRPRYLTRAHNAA

SEQ ID NO: 362 - protein, 233 aa, Dunaliella salina
KRHVVIGVGASKMPPAPHGLQKFVAPTQLWKALIRALLRGVGHSWLHLRLVTSLNEFRTTLCCSKCGTETVAPIVADFATHKPRESKRLRECPHCKKWYLEQQQGEGMMEEAAAGEQQQGEGMGDEEEAGEQQQQGEGVGEEEEEEEQPMPSEQGSTEWGGIDVEEEEGEECGVEGEVQAAVLGERRARVHKPQPAYRMHRDMNAAWNLWEVCIAEYAGNPRPRYLTRAHNAA

SEQ ID NO: 363 - protein, 423 aa, Dunaliella salina
KDDLCGYLLRSIALAFAKSNTKETLSSQSWFSLKQWKSSDLQKEKVRGKTKIKDIDKEKKEKKRGNSLRKSKKPPANYSKKIKLQPKKEDAQTFNQWFGCCRLTYNWALSCIKKKPKEYKMTDIVWLRKRFINKCNIPKDRQYLLGTPKEIRDSALSDLAQAYKTNFAVRKKDPSHTFDIEFRKKKDNQSITLGYQNGIKLWDTQQQEMKMYPTYLQNKINFHIRKNRSLPEKLENDCKLTKDKLGRYYLIIVYHRVACDDQTGKKGNEWCSIDPGVRTMLTIYSSSNGLAYKVGENDMTRIFRLCKCLDKLISRMNNIKRKFRRKKYNIRERIKNLVTEVHCKAVRLLVTNFNNVIIPPFNVSQMTKRSNRKINSKSVRGMLCWRHFAFRQRLLQTAQRYNVNVFVRGEEYTSKTCTPTKLA

SEQ ID NO: 364 - protein, 569 aa, Notospermus geniculatus
KIERADKNSFFNMSKRKHPSISDRLKPTTIWDFVKKELASTNSHRYTTPEVKKREICSHPAVQRHHVKIYLRLNCPNVTCEEISVAKKMKHDQDEDVDEIHLSTMSVGLKPTKHQRGVLDKMIMTANHAYNWCLWLYNNDMCVKQNTVTDKNGVTKIYSNPNIMELNKVVTCQNKENIPNQYFPSRKSDSDPLYFADNNDWFFEKTSSQVKLCAVKEFVGSFKGCRKKAKTMRYKTLDPTFGGSFGVQRSYIKRSKTNPMELAIMSVLLANDAGQRSNIKTNCSSEMMPFQPWMTKKGTEKSYGPYLPHDCKIVKQIRSGKFVLQIPCDPKHVRKRLPENVGRVTSIDPGIRSFATGFNATQGLAWNFLKAEDRKKYMNEGLFEKRYTDMCRNLEDCVKKLKNKMPGSKAYGRKMKWKDSIVLGMRKLFARARNKMNGIHSHLCRTLLCENSVVVVGDLNTKEIVKKGRRDENNTRVHLAKSTKKTVSLLSHARFRQRLLCRATGTDRHVIIQCEKYTSKTCSNCDHLHPKLGGNKTFKCPSCKITLDRDLNGAINILRKGLNIFHDNN

SEQ ID NO: 365 - protein, 497 aa, Notospermus geniculatus
ITPSIPHPEMKRQIPVLTLWEAAHVKGHSTMWKWWNSTRRRDLNVRDGTLGLDLTDFASSEKKKSDDKKVMTMFSVGLKPTKIQKRVLEEMLRSSNTAFNMCSYLVEQKGVKPSQIDLQKFVCKAKARDVDDSYRVPGDDWLYREGGNPHTTIRLTSCKMWCANYKSAKTWQKKRNKTGEPIELRRRNQIDPYTDSFQVQKMYVRFLSDEDMKYASDKCEFQRRYIRLLPQAFGVLKNPKERFLKLKKNTAKLPPIEHDVTVSKLPGGRFVLRIPCEANHTRTATRVPGTENAMCGIDPGGRTFATVFDETSRAAWQVGLVEDKQHLIRPLMVKIDDQRRRLSLAKSRSQTQSEKDVGRRMAKLHYKMANVVNTIHATLASHLVTNYGLVSLGDIAVRRIVLKDKPGNAKLSKKAKRDLLCWRHSAFRKRLLHRALGTKCNVIVQDESCTSKTCGRCGVKNEKLGCSETFKCTECDYEVHRDLNGARNILRKTLNLF

SEQ ID NO: 366 - protein, 298 aa, Coemansia reversa
LFVASTRTTRRHGGFKLRRYSLHQKLRLSVYINQQQADARLVRNMYEKFGADPVLVIGNWSALNVRFHALIRGVGLRDMLRAHLFKVYLIDEYCTMVTCPLCYHQLEKFCWLVKPRPWQRRNYLRILCHGLLRCTSERCSEDVVASIERNAKKHKSNVDSVVNPVPTLKTKARAKARTKAKAKRRPKKTLRDNPIENMPNHIWNRDLAAVINMRAILHSLRDDNVIPRAFQRGNNNALAALQPRHLRTSTSSVSAIPNPGSASTSTASQFFSHQRICLLNVSDCWHKCYICICDCRPK

SEQ ID NO: 367 - protein, 237 aa, Coemansia reversa
WGYERQCQNDQLQRHYQQMRDQNQMEAEHQLPDNERHHLQQQPQQKYENGKQRCQMQKAWRKQWQQELQDQHRQHQKEEFECRLLPRRHPWSAQPLHRKLQKSAYIDCQRMDANVACGLRQKFGLNPTLVLGNWSAGIVCYHAPIPGKGLRQMLIKQGFRVLHIDEFKTSTWCPYCGEGQLQKFLDIKNPRPHRRDERPVIKSHAVLRCNNVKCIGRVVNSTTGQSCPRIINRDLAA

SEQ ID NO: 368 - protein, 200 aa, Apophysomyces variabilis
QRYIEQILFGEEIIKKSKRIQDIYTQKAYATVASNERNFLNGSGKKTNMLLMMTGSAETGVCSPIRGHYRRGGKKLREQHLQQTSVGIINEFRYFQLCPYGYQVLSHPNKKKDGYIKKNFGTVICTNSECISVKKGYGSCGRGQNAALNIALAGTSALFSNHHEPFPEFNPKKASKYLLDNNLLASLMSIPEGCGVDARA

SEQ ID NO: 369 - protein, 201 aa, Apophysomyces variabilis
RITTKHYDRYREYLRQVKTNENGLRLWKFYSNRSVRRRIWDNVISQRSCLDKACYLITNQARRTFDMNHEMDDNRRHVDEPRLVYAFGLDGMSRKSRRGGLAPMDHKIANALYRKINQKNRNKDRQHADVCSRIDEYLTSKVCCRCSKEGQDRGVDFLRRPPTASVQDRARLENGQEKVLRVVQCANCDCTFHRDGNAADN

SEQ ID NO: 370 - protein, 200 aa, Apophysomyces variabilis
QRYIEQILFGEEIIKKSKRIQDIYTQKAYATVASNERNFLNGSGKKTNMSLMMTGSAETGVCSPIRGHYRCGGKKLREQHLQQTSVGITNEFRSSQLCPFCYQVLSHPNKKKNGYIKKNFGTVISTNSECISVKKGYGSRDRDQNAALNIAVAGTSALFSNHHEPFPEFNPKKASKYLLDNNLLASLMSIPEGCGVGARA

SEQ ID NO: 371 - protein, 298 aa, Prototheca stagnorum
GAGGGRLLAARYPAVRGGARPLHPGGLCPRREWWRSATRCEPGASGPRRPAPCRLPLPRFRDGGDGTAAAGGTVHERSDERVRPRGFTDPPGPPRGDRLPLLRRGPPQRGRRRGKRRGAPPTARELSRDERDVPRRVDAGSRVGGRSPPARPRAERAPSSPLAGPGRRAARRPGQTGDASFDHASRGRAATPSGHWVAERMRRAHGLDVLDVREFNTSQVCSRCRAPRRIRPVAGAASPHFVRRCAYTSCRTRVVGRDANAARNIAFLAGELLAGRGRPAPFSSPLPNSTGRTAAEEG

SEQ ID NO: 372 - protein, 204 aa, Prototheca stagnorum
SGGGGEEEGSGRPGWPGAPPRGTRRPAPRRRRGPTSSGARRRCAPGRSGRPPPPPRAPGVTARTTIATLVRSAGRAKAEVLVAFGDPSFDRASRGRAATPGGRRVAEPVRAAHGLDVLYVRERNTSLACSRCRTPRRLEPVEGAVSPRFVRRRANTSCRTGACDRDVNAARDVASLAGGAPGGLGAPRTIFLATAPAPREGGPR

SEQ ID NO: 373 - protein, 280 aa, Prototheca stagnorum
PLSLPPLPGRLGWEGLWRSSVTPGSPLLSTAVCEETRKPEFDPGDFPRPPGHRTGVWCPSAAVVRPLERGRCRGEGFGAPPACQELPREERAVPAPRSRRGPASSGARRRRAFGRSGRSRPPSQAPGAAARATIATLVRSPGHAKAEVLVAFGDPSFDRASRGRAATPRGRRLVERMRRARGLDVLYVRERNTSLACSRCRAPRRLEPVEGAASPRFVRGCANTSCQTRVLGRDANAARNIASLGGELLAGGGAPRHFPRHRPRSTGRTAATEGYPVPGR

SEQ ID NO: 374 - protein, 202 aa, Tetrabaena socialis
SSGVSHTTCSGPIASLDLTSTSSPSLQARTNAKGLNSECGTTWELRLYGGKKRVLAKFSSTRSLVEIGGRPPAQSSSVTEPPSSLQAERESCPSRVFKACRARFPTHLVDEFRSTKVYHADDSILQGVAERRWKGDRMKTVRGLLWCGSTNETKSKFVNRDFNGAMNIRRCFLSEERPAILDRSKCQGRLQFIRTGRVIRMK

SEQ ID NO: 375 - protein, 260 aa, Prototheca cutis
LCDYAGFSFGALLDVTCSYKWRKDAFDVYIMRYMAMDKSIKDVIACTGHQPSRIVVFMGNASFRHNSPDHPPSLGWRRWAKRMREAHGLLVIEVDEFRTSQARAGGLCTCGGVLWVPGWMGVGSGLGEQVPGEVGAGQVHACSDTQCRRAAGHADPKRTTPQICSACEAHMRLGGCSTARNKYAILKCDRCGVVWNRDVNAARNIRHLGEALVLTGKRPPPFDRKTKASPPAHPLPPGRSTWYDFITKILRWLWPAEQHH

SEQ ID NO: 376 - protein, 219 aa, Prototheca cutis
GCKWELSLRDYAGFSFGALLDVTCSYKWRKAAFDVYMMRYMAMDKSIKDVIACTGHQPSRLVVFMGNASFRQNSPGHPPSLGWRRWAKRMREAHGLLVTEVDEFRTSQARAGVVAHVWGCLVGAGLDGCGQWAWRAGAWGGWSRAGACTRAQCRWAAGHADPKRATRQICSACEAHTRLGGCSTARNTYTILKCQSCGVVWNRDVNAARNIHHLGRDWS

SEQ ID NO: 377 - protein, 261 aa, Prototheca cutis
LCDYAGFSFGALLDVTCSYKWRKAAFDVYMMRYMAMDKSIKDVIACTGHQPSRIAVFMGNASFRHNSPGHPPSLGWRRWAKRMREAHGLLVTEVDEFRTSQARAGVVAHVWGCLVGAGLDGCGQWAGRAGAWGGWSGQAHVRTQCPGAAGHADPKRATPHICSACEAHAHLGGCGTARNTYAVLECHSCGVVWNRDVNAARNIRHLGERLVLTGKRPPPFDRKTELGAPLFAAHPPSPRRSTWYDFITKILRWLWPAEQHH

SEQ ID NO: 378 - protein, 260 aa, Prototheca cutis
LCGYAGFSFGALLDVTCSYKWRKGAFDVYMMRYMAMDESIKDVIACTGHQPSRLVVFMGNASFRHNSPGHPASLGWRRWAKRMREAHGLLVIEVDEFRTSQAHAGGVAHVWGCLVGAGLDGCGQWAGRADAEGGWSSARAHTCTDTQCPRAASHADPKRATPQICSACDAHAHLGGCSTARNQYAILKCQSCGVVWNRDVNAARNIRHLGERLVLTGKGPPPFDRKTKLPPIARPAPGRSVWYDLITRIRRRPCATEQHH

SEQ ID NO: 379 - protein, 671 aa, Aurantiochytrium sp.
TLCSMYYIVGTFFLGGSYDTTGCGRDLNRKQNQIVSSKTKTRVGGVAQCQMSDTTSPLESPHSGSDCTEIQYETTPTTTKSEVTEQKADIDEYVSRTLTTTRTLLGKRKLSDVDYVMQESVAKRRKTTSPDKSLGSKKTSPITKSCKTSGRASTSKGAVFVPFWNSQCVENSKKSWLPIETVSVDSHSTCSSGLSLPKEGQFELSIQMDKKTMEDRKMNSSKTSSQSSPSSGVVSTVNEAADEEESDLRSMKVKLRPTLRQRKIFAKIHHALRALWNLALEHIKKGNVGTHFAEMKKYFLGPTRNALNREVEKERKLDDEIESIPYHMRGDTLRRLGAAYKSAFSNKKAGNVKKFEMRFQSRRDKRGFGVIPVQKCMFDKNNAFDDNFIFMMKRYRWKVDGDSDTKPFGPLRYKRQGSKKRNRKLPKIEKDCKIVYEEPGRWYLIIPYQKKREKLKPAPFKDATLDPGARDFQTLYSNDAKLCATLNVLPRTTGSEKRGNFKSYSMLDLSKRIDQIRSSRGWDEKTGSRIHRKKTYKHKEQMLWAKMKNKRKDTHDKIIRFLLDNFQEIRVGKIGVKSILESPKLHRTAKRKIQLLSHCRFRDKLIQDHGHVRNTLAVPEEYTSKTCTRCGYVKRNLGGNKRYNCDRCGLSIDRDINGARNIYIKSISCTK

SEQ ID NO: 380 - protein, 265 aa, Aurantiochytrium sp.
KNIGGSWMLTTKLNHLDHSIQTSRFEKAKSKAPQDLKGLQNRSRRSWSLVPDHSISEKRERLKPAPFKDATLDSGARDFQILCSNNAKLCATLNVLPRTTSSEIRGNFKSYNMLDLAKRIDQIRSSRDGDGKTRSRIHRKKTYKRKEQMLWAKMKNKVKDTHNKIIRFLLDNFQEIRVGKKGVKSILQSHKLHPTAKRKIQMLSHCRFRDELIQNHGHVRNTLAVPEEYTSKTCTRCGYVKRNLGGNKRYKCDRCGLSVDRDIIS

SEQ ID NO: 381 - protein, 674 aa, Aurantiochytrium sp.
LEQLQQTYYIVGTFFLGGSYDTTGCGSDLNRKQNQLVSSKTKTQVGGIAQCQMSETTSLLGSPLRGSDCTEIRYETTTLTPTKSEVTEQKVDTGEYVSRTLTVARALLGKRKLSDVDYVMQESVAKRRKTTSPDKSLGSKKASPITKSSKTLDRASTSKGAVFVPFWNSQCKENSKKLWLPTETVSVDSHSTCSSGLSLPKEGQFELSIQMDKKTMEDRKLNSSKTSSQSSPSSGVVSTVNEAADEEESDLRSMKVKLRPTLRQRRIFAKIHHALRALWNLALEHIKKGNVGTHFAEVKKYFIGPTRNALNREVEKERKLDDEIESIPYHMRGDTLRRLGAAYKSAFSNKKAGNVKKFEMRFQSRRDKRGFGVIPAQKCMFDKNNAFDDNFIFMMKRYRWKVDGDSDTKPFGPLRYKRQGSKKRNRKLPKIEKDCKIVYEEPGRWYLIIPYQKKREKLKPAPFKDATLDPGARDFQTLYSNDAKLCATLNVLPRTTGSEKRENFKSYSMLDLSKRIDQIRSSRNWDEKTGSRIHRKKTYKRKEQILRAKMKNKLKDTHDKIIRFLLDNFQEIRIGKLGVKSILESPKLHRTAKRKIQLLSHCRFRDKLIQDHGHVRNTLAVPEEYTSKTCTRCGYVKRNLGGNKRYNCDHCGLSIDRDINGARNIYIKSISCTK

SEQ ID NO: 382 - protein, 644 aa, Aurantiochytrium sp.
FVSLVESDAIASLMSSSSSGFRVPTPETDSASYTHGSLPRSSVATSNDRSLSSVEHTPITASSGIPDLPPISVGKACKPFWTSLSTEVSRKLSSCTRTGLRVLDTPSWSRSLRNLGLGSWFTASAATCAQPTPTTCSLSRRSLWQVITDVEQLRIARDAAKRQRKLEEKVKKTLEELDALAASDDAEATREKLEKKVTRAQGELQAIAAYRQQYEWSMMSREDKVPSGENEPNKNKRKASVLDDDEIEIDESKTIRARKIRVYPTKEQEQKLLRWFGTMRFAYNKLVEKFRHVEHEVSKTTMRHELSQYAKAHDWFQEVPYEVRDSAVRDMDKARQAHFAKKKKGETEVSEKAKFKFRTKKARQQSFEVRARDWNRKSGKYAGLFGPALRAAEGILPTEVEATVRIVRDFHGCFYVCIPMSVEIKGDDQAPETGFHSTVAMDPGVRCFMTTFDADGLVTEWGKSDIQRIYRLCRHADRLQTKIENASNKQQRRRRHRAWRKIFVRIRRLVKEMHRKLASWLCNNYRVVILPTFDTNQMVLRGSRKITSATARKLLTWSHYSFRQHLLEHAELNSWTKVFITGEAYTTKTCGQCGRLHTGIGRDKTFRCPHANCSYVADRDINGARNILIRFMTTYMGRYAASVF

SEQ ID NO: 383 - protein, 679 aa, Aurantiochytrium sp.
TVTLNIKNIYEVCFRCIMLSVYSISVKYDTAGCGSDLNRKQNQIVSSKTETRFGGVARCQMSDTTYPLESPHSGSGCTEIQYETTLTTTKSEVIEQKVDTGEYVSRTSTTTRTLLCKRKLSDVDYVMQESVAKRRKTTPPDKSLGSKKTSPITKSSKTLDRVSTSKGAVFVPFWNSQCKENSKKLWLPTETVYVDSHSTCSSGLSLPKEAQFELSIQMDKKTMEDRKMNLSKTSSQSSPSLDVVSTVNEAVDEEESDLRSMKVKLRPTLRQRKIFAKIHHALRALWNLALEHIKKGNVGTHFAEMKKYFLGPTRNALNREVEKERKLDDEIESIPYHMRGDTLRRLGAAYKSAFSNKKAGNVKKFEMRFQSRRDKRGFGVIPVRKETFSKTAFDDNFIFMMKQYRWKVDGDSNTKPFGPLRYKRQGSKKRNRKLPNIEKDCKIVYEEPGRWYLIIPYQKKREKLKPAPFKDATLDPGARDFQTLYSNDAKLCATLNVLPRTTGSEKRGNFKSYSMLDLAKRIDKIRSSLDGNEKTKSRNRKKNYKRKEQMLWAKMKNKSKDTHNKIIRFLLDNFQELRIGKIGVKSILKSPKLHPTAKRMIQMLSHCRFRDKLIQDHGHVRNTLAVPEEYTSKTCTRCGDVKHNLGGNKRYDCGHCGLSIGRDINGARNIYIKSISCTK

SEQ ID NO: 384 - protein, 618 aa, Aurantiochytrium sp.
FVYLVASDATVFLMSSSSSDCPRISPNAGSVSSTHEFHRRNNISISSDRSPSSVSLTRNIASLRTLDLPSISAAKARKPFWTSLSNAISQKLSSCTKTDVHVLDIPSWSTSLLKLARNSWFTVKATMCDPPTTNSQTMFSPTLVFLWQAIMNVEQLRIERSAELKRIKLEEEVVRALLELASDDETARERRERQAMAGEDRILSKKKSKMKRKTEDVESENAVPPTSRIRARKIRVYPNERQQQKLMQWFGVVRFAYNKLVAKYRNVECGVSLDLLRAELKQYEEKHDWFKDVPCEIRDCAARDMDKARKAHFAKKNKGVTNTSERASFKFKTKSARQQSFEVRSRDWSRKSGKFAGLFGPHLRSAEGELPETVNATVRVVRDFRGCFYVCIPEQVEIKEEEHAPSPSCHSTVAMDPGVRCFMTTFDADGLVTEWGNGDIERVYRLCRHADKLQGFIDKAKNKQQRNRRKRAWRKIFERIRRLVKELHRKFASWLCSNYRVVLIPKFDTQQMVLRGTRKITSKTARKMLTWSHFAFREHLIQHAELNTWTKVIVCDEAYTTKTCGRCGHIHNKIGGAKTFRCPSTSCSYVANRDINGARNILIRYMTNYMGHQAVSVS

SEQ ID NO: 385 - protein, 578 aa, Aurantiochytrium sp.
NNISISSDRSPSSVSLTRNIASLRTLDLPSISAAKARKPFWTSLSNAISQKLSSCTKTDVHVLDIPSWSTSLLKLARNSWFTVKATMCDPPTTNSQTMFSPSLVFLWQAIMDIEQLRIERGAELKRIKLEKEVVRALLELASDDETARERRERQAMAGEDRILSKKKSKMKRKTKDVESENAVPPTSRIRARKIRVYPNERQRQKLMQWFGVVRFAYNKLVAKYRNVERDVSLSLLRAELEQYEEKHDWFKDVPCEIRDCAVRDMDKARKAHFAKKNKGVTNTSERASFKFRTKSARQQSFEVRSRDWSRKSGKFAGLFGPHLRSAEGELPETVNATVRVVRDFRGCFYVCIPEQVEIKEEEHAPSPSCHSTVAMDPGVRCFMTTFDADGLVTEWGNGDIERVYRLCRHADKLQGFIDKAKNKQQRSRRKRAWRKIFERIRRLVKELHRKFASWLCSNYRVVLIPKFDTQQMVLRGTRKITSKTARKMLTWSHFAFRDHLIQHAELNTWTKVIVCDEAYTTKTCGRCGHIHNKIGGAKTFRCPSTSCSYVADRDINGARNILIRYMTNYMGHQAVSVS

SEQ ID NO: 386 - protein, 647 aa, Aurantiochytrium sp.
FVSLVECDAIASLMSSSSSGFRVPTPETDSASYTHGSLPRSSVATSNDRSLSSVEHTPITASSGIPDLPPISVGKACKPFWTSLSTEVSRKLSSCTRTGLRVLDTPSWSRSLRNLGLGSWFTASAATCAQPTLNSPTTCSLSRRSLWQVITDVEQLRIARDAAKRQRKLEEKVKKTLEELDALAASDDAEATREKLEKKVTRAQGELQAIAAYRQQYEWSMMSREDKVPSGENELNKNKRKASTLDDDEIEIDESKTIRARKIRVYPTKEQEQKLLRWFGTMRFAYNKLVEKFRHVEHEVSKTTMRHELSQYAKAHDWFQEVPHEVRDSAVRDMDKARQAHFAKKKKGETEVSEKAKFKFRTKKARQQSFEVRARDWNRKSGKYAGLFGPALRAAEGILPTEVEATVRIVRDFHGCFYVCIPMSVEIKGDDQAPETGFHSTVAMDPGVRCFMTTFDADGLVTEWGKSDIQRIYRLCRHADRLQTKIENASNKQQRRRRHRAWRKIFVRIRRLVKEMHRKLASWLCNNYRVVILPTFDTNQMVLRGSRKITSATARKLLTWSHYSFRQHLLEHAELNSWTKVFITGEAYTTKTCGQCGRLHTGIGRDKTFRCPHANCSYVADRDINGARNILIRFMTTYMGRYAASVF

SEQ ID NO: 387 - protein, 360 aa, Eudorina sp.
ARAVGRLQLWRRHPRARACGGGGGGASAAGAGGGGGGGGGGSAGAAGQTWVVAPAPPLPRVGSATVAPDRPREDPKGEFAGAGRLHLRASTARWVIDRKTIMVHAQVLEQTGQQLAGGRPKENVIVAWGNTNTGYGGIVSRQGRGPNRALLRLLVDKYAHLVVYVDEYYTSQASMEGDRVLGSTVPHSTCLLGNLFDVVQVCAKCGRRSLDNGQRCLQVVFPFGGSRAHVVQVCQHCGTVWVSQVWGAESGLVCRVRFWAGLERRFSFVLATPAMQGRDANSAMNMRHVAMEMLQGKARPAALRPGGGGDAGPGGGGGGPTPGPAAGPGGGGHVRSGGGGKGHVEEESAEPPKKRSRRAG

SEQ ID NO: 388 - protein, 555 aa, Raphidocelis subcapitata
GGWLVGNAFPWVEATSRERLQRAEEEVGTAELSVGYAARRLQSAIFDAAFCVGTAQAAAQGPRPGTAPPPAAPPACKAAEGLCRRLRAAAGRAQKLRFSLAPTPHFKTNYIDITNAGACCLHYEFSRLPRARPANFTPATRVTHPKHERDAAAQAAWRELFKPAALQRPKSTFAGGVSTDGVSLCVRVLRRPLPWDPPPRSRASARAVRAAANAQALQRAQAEIAKLMRLHPSPLPHATDIAAWDTLFLKWGVRFVAADPGIRHFATTIALGGPFAPGTLSPEPLDGIPRGEGGETKRSGPGGPWHGAHSWRANSRQHHNACAFDDYKRWRAGHLRRADPADRAAVAAVPSAKTASAPDFFSYCRAAVAAFEPGMKLYATLAHRRWAVRVQRAKERQLHRVAQSLIFGHPTVSGRWTACRPSPRPKLTIIAWGAASIGAGSPISRAYIPPVRALEALLRRHYRTDVIFLLIDEYKTSQVCPFCWEIRPELFTLMGPKQGPKSRSTAVLACPGCMHSHLNRDASASMAIAARGIGQIAPKAPRGGLDSFERERKAP

SEQ ID NO: 389 - protein, 802 aa, Raphidocelis subcapitata
HAPSHPVICSTHPDTPVKHPTHPAQADKWQRWLPGRGCTFAGFFSTDGEVIHLHHVVEERDPVAVEWKTAYKEKMEQALGAHRRHPPPGAVVAAKRAARAAARAAREAAVRKASLSQHAACLEAIQHCIPQGADPRAGNAFALDFGWARPSATAPYMQFAAIDPGLHYSIVATNAANGPEGQRTGFFRLNSKEWGHGCGFARDARQRERRVEAAPEFRSAESALPSPETTDLHQLILRNAWAAHLVDFAKERIYGSRRARRSRKRVRTVLRPRMTHRVAQVVMWNSTAITGKWGGTWLRWLTLPGGQPPPRPWRAFVAFGAGSLGRGSRISRKWVFPSKEMAVKVNAMYTERGVGPGPVGSIVGWHRRNEFRSSQVHSRLGCWRLKLADFSVLTHTEAGPVLEHSYDLKTCTHLGCGAPNGARRPIDRDKNAARCICAVALCDYLGQELPEVFQQHPPHHPPHHIQPHHPPPAAPPHHPQPPAAPPHPPPPPAAPPHHPPPPLQPPAPPPPGGRFWGAVWGGGFGGRFWGAVWGVEGGCVCSGARLVLGWGGGEGFACRRVRKRLKAHTRARAPADSSLRSPLAASSRRPASGEASPAARAGRSRSAWWRLGGGMVSRVCGACVCGGLFLRRRLGCAPCRAGCRAALLKAFFASRAAARPPPPPPHLPRRGGVGLRIRRPATCPPAAALCVGAGQRTALLLQLPVALGLSELNHVLLAPAARARGVDAALHARAHVLSSRRAPGRGRRGAPRGSGEWWGAAAAPRRRSRNALRAGGGSRRGGTEAAIGRAHRAASGLKSVTR

SEQ ID NO: 390 - protein, 632 aa, Raphidocelis subcapitata
SGLTDCAWGNTRAPKRQNPIRSHQPTPVTKYHTPPPPRPQELFDRASETLAALEHRIARATAKATEGRQGATLALLDVAYAVAERSGAAGQGNLPAKAAQNAEAAPSAALAKRLRTLQQGMRSSTRQASRLSFSLAPLTGFKTVFLQIDNTTMSHLHFDLCSHRTPFPPLAGLPRCGARITRDPIPPRAEAAWRAFFPGLAAAFSLDRNDPDFESGAFAGHVATDGVSFHVLIKAKRSAAAADTDGVEAAAAAAAEAAAEAAPAQRRPAARRRAADAERYKMLAEKLQECGVGGHDFEPYQNLLPQSLAGLSRFGELLLSLGIRICTVDPGVTDWITAFSFSPFKRRDSADKPPTPPHQPMGQWLGEHVFVESAAGFRDATGQAAAARRAQRRLRGQDPTDRARVRNCTPSGRVGSLRAFSLHCRRKLAAFDAGRRLYGGIQQRQERLRKRIVRTRHFHRLAQMLAWGETSVRGVWNRVRRTVLNKPTLSIIGWGDSSAGAGSAISRKGLGPSRDFERFVRAHYPRIFFIRVPEHFTSRTCTACFKQRPAWSKRSKGPKGPNFCIGGRPVHKLLVCKGHAPQLVVDRDVSASYAIMAVLLHHVFAGGAPEWQQRCPRRTRKKRKRPARSTTA

SEQ ID NO: 391 - protein, 273 aa, Raphidocelis subcapitata
TQPSPHKAKLRVAGLITSAPPWHRAHSWRANSRQHRNACAFDAYKRWRAGHLRRADPADRAAVAAVPTARTAHAPDFFSYCRAAVAAFEPGMRLYATLAHRRWAVRVQRAKHKQLHRLAQSLICGKPTVSGRWRARRTTQPRPGLTIIAWGAASIGAGSPVPRAYIPPVRQLETLLRRHYRSDVIFLLIDEYKTSQVCPFCWEIRPDLFTLMGPKEGPKSRCTAVLACPGCMHSHINRDASASMAIAARSIGQLAPDARRGGLDSFERKSKAP

SEQ ID NO: 392 - protein, 199 aa, Raphidocelis subcapitata
GSPAWVCLSAFTLHCRRKLAGFDAGRRLYGSKRAREARLRKRILRIRQMHRLAQTLAWGSTSVTSKRWKSARRPVPNKPPFSIIAWGAASVGAGGPISRKGMGPSRDFERFVRSHYGELGVFFLRIDEFCTSKVCTACWQTNHADFVVGGRPTHKLQVCKDHAPQLVVDRDVSASIAIMVALLERLLAGGAPAWNRRPS

SEQ ID NO: 393 - protein, 298 aa, Phytophthora nicotianae
LFNVTELETRTRKFGNRDTTDGYAASVLLEREMPTTEPTDTNTAPRKRRKTSKNRLTNVVEKDALDLARDKLPEGYTPDIFIGIDPDVRILVTAASTGYLPQQRQGRQCKHRHRRRRFRKKDSRKCIAKNQHGHGQRVIGVSTAEYYHLAKLNKKRVWDLNLRKTEPAYVLILKEMPSFNTSQLTTFMDRLQYFVKHVGFLVSYSTKTSFRKWRFLTTSSKMRALTAITKRLVPIRSAQVCIAFGDWSCQDGLCGNPSAPVQALKKELEQRATVCPWTSFAPVSCAPAATSTSFQLGY

SEQ ID NO: 394 - protein, 204 aa, Phytophthora nicotianae
FRISIREYRHLAGFNKFREWNECLTKLNQEYQRGIDDMPSFKMASFKKYLECLDYFWRHANFLREFCAEHPFLKRKCVRKRMARVTVDAIAKRIVRTKTCGVAYGDWSKRNGIRGHAYSPVKGLRQALQKRTMVVSMDEFMTSKLCSHCHQTLSSVQYLVDTKLVKRKKRKGTVLIRNRPEVQIEEKKCYGVLRCDHEGCGACY

SEQ ID NO: 395 - protein, 299 aa, Phytophthora nicotianae
TSFPELRFKSKKDNSSSIEFRARGFKSMDGIVEFTPRYFGFSKNEGFYIKEKMPELQFSVRLQRIRDEKFYLCIPRSKIFEKTTSTRTCAIFPGVRSFITMYDPDGLTLGVDDANEYIFRRCLTIDRLISRRTKETNKRKRYRMQKRLTKSFNQVKAIIADMHHKVSGWLSTNYKQVLLPSFQTSDMTSKQKRISSKTSRAMPTWSHYNFKMMLAYKMERSGGRIVECEEHYTTKTCSCCGKINYSITSQKVFEYNHCELVVDRDVNAARNIFLKNEELLTWAPTQVPGDAYSEFVRYA

SEQ ID NO: 396 - protein, 282 aa, Phytophthora nicotianae
PLQRLLGNHYTTLVTAASTGYLPQQRHGRQRKRRHRRRRFRKKYSRKRIAKNQHGQRVIGVSTAEYYHLAKLNKKRVWDLNLRKTEPAYALILKEMPSFKTSQLTTFMDRLQYFVEHVGFLVSFSAKTSFRKWRFLTTSSKMQALTAIARRLVPIRSAQVCIAFGDWSCQGGLRGNPRAPVQALKKELERRATVLPVDKFRTSKLCSGCHKRLLSARLLTKVKDRETEKTSIVLKKNRNVLCCKNSRCKAHFWNRDVNAARKILELLQCRLSGLGRLAAFKR

SEQ ID NO: 397 - protein, 223 aa, Phytophthora nicotianae
GGSLSDVRLLSSKRIVSFKPQVQAPHRQVASRPRTAPEHSNEKDFIGRKVLQLHQVWFQHDHELLSLFMDPFIRKLKFRRYTLRTAQLDRACFALAGARRTNAVVGFGHCGMAGEGLIKRSVAGPVKAFACKLARSWCWTNSGQAKSTSTVKQRTTLRINASCASGRDGVVRKVPVHKVLHCLRKHGGCGKSVDRDVNAAKNILSILQNQLTGISEWPLRLRR

SEQ ID NO: 398 - protein, 203 aa, Diversispora epigaea
SRSSNPFVMYSPTKGITEVGKNDAQRLFRLCLHADKLSSTRDKLKSSISKRKKKQAKRIDKAISRIFRRIKNLRNELHKKTINHLVKNYDVVIIPEFNVSNMVRREIRKINSKTVRRMLTWSHYSFRQRLKHKAEEIGMKMIIQNEAYTSKTCSACGNIQNIGGRKVYKCKGCNVVMDRDVNGAGYSFVRCLMEPYACIRMHM

SEQ ID NO: 399 - protein, 223 aa, Gigaspora rosea
TRSIAIASSHILEKPMSGSFPGFMNDKRSRKTYKRFVAINPGVRTPFTTYSLSEGTCEIGKNDSQRLIRLAYHADKLNSKRDKLINSSLKRKKKKGIRIDKAITRIFQKIKNLKNELHKKTINYLVKNYDVIIPEFGVSNMVKRKKRKINSKVVRCMLTWSHYMFKQRLKSKAEETGVEIIIQDEAYTSKTCSWCDNIQNIGGRKIYKYKNCKLIIDRDVNRD

SEQ ID NO: 400 - protein, 211 aa, Caulochytrium protostelioides
RSSDRIPPGDDTNQTKNLLAKSLDHNCIIGNDPGRTNILYMVMVEPKGRVVSWRLSRRLYYVKAGMKAAQKQSETWQRHLKESLLRLSEVSIKGAALAAHHRFLEVWLATYEPLWVEFMKPRWAHQRLRLLSGKQDVFAKVINRVANEATEMAPVVAEVVIAYGASKFALAARGGLPFQRLGYPRRASSGSAPSWSRSSGRPRCMPRRVRS

SEQ ID NO: 401 - protein, 258 aa, Caulochytrium protostelioides
PQYYAEADIRAAQKQSVTWQRDFQEPLQQLSAVSSKGTALAAHHQFLEARLATPEPLWIEYLKPRWARQRLRRYGGKQRMFAQFLNRVAKGEATEMKPVVAEVMISNGASRFTPGGKGKIVIPTACAYQGCAQRRRIVLVDGFQSTQRHAETNRNLTKAHIWTTAVVPRSRASRAGAHPTAPMEVDRVLPIGVYAQPNGALKPGQRRREGTVVRGLLWCEPTNGKFVNRDLNAAVNIRRCLAIPVIPKALCCHPGPVS

SEQ ID NO: 402 - protein, 203 aa, Caulochytrium protostelioides
FASGGKIEISVPTARAYKACAQRFRTVLVDEFRTTQVHAETNEILTKVKSRDPTQVPIARASRASVAQTAPAAVNPVRMRGASARSTAPTRVNPPRRARAGASAAEPTPASPARKTLVYAQMNVVLKPGERRRQGTTVRGLLWYEATHGKLVNRDLNAAMNIRRRLALPARPIALCNSGQTRLQPVVGKVTPNRMRVCFGRDP

SEQ ID NO: 403 - protein, 373 aa, Caulochytrium protostelioides
SYGCGFDPRIGLFVLPALSIYGHGGTQRPGHQLEADPKAGLRESHPNAVRDVTAPFERVDAAARGDELRRHRARRAPPLSGGVARHLRAAVGRVPETAPGMPAPAAAQQQAVRVCPVLEPRRRGGATAMKPVVAEVVVAYGASMFAPGGKDEISVPTARAYKACSHRFRTVLADEFRTTHEHAETNEILTKVKPQDPTKMPITPASRTSAPVTAPAAVNPVCSSGASARSTAPTRVNPPRNARAGASPAKPTPATPVRETRVFAQTNVVLKSGQHRRQGTVVRGLLWYEATDGNEAIHSKLVNRDLHVALNIRRYLALPERPEALCRIPGQTPLQSKVGKIIRYSTECAPASRGTPRVPFRGPGVRLDSIYPI

SEQ ID NO: 404 - protein, 526 aa, Caulochytrium protostelioides
DGNGDGDGYGRRGRVHTGPTQGATREATAMVTAAVTVAVTMSATATTTGTAAAIDREPDGVHATVLMSHRRSDRSARPRLVRDRPPPSAGAVRAAGYRAPYGLPRRHHPTEWVRSRTHRGPSALGGALRRPKSDGPLSPDGLWIRADQYCIIGNDPGRTNIIYMTMVGPKGHVVSWKLSGKQYYVEAGMNAVQKQSETWQRGLKEPLHRLFKVSSKGTALDAHHRFLEVWLATYQPLWVESQKPRWARLRLRLYSGKQRVFARFMNPSSTEVAPVVAEVVVAYGASKFALGGKGEISVPTACAYQACAQRFGTVLVDELRTTQVHAETDDLLTKVKPRDSKKVPISRASRAGAPRPNRNGSTRLVRRVRVPNRPRRRPRPSTQFAGLERPLLRRRRRGSTHPAMLVRVLPRPSRRPSTGSAISGGTVIRGLLWYNATSGNETTNSKRVSRDLNAALNIRRYVALPGRPKALYRNPEQTRLPTKVGELIRRWTKMRTAVGGPWGAPLRAWCACWDAEGGPVYSYGIY

SEQ ID NO: 405 - protein, 320 aa, Caulochytrium protostelioides
ILRSHPCMSRRSCHVAPCRPKGQVVSWKRTRKQYDVEAGMQAVQKRSETWQRHLKEPLQWLAAVSIKGTALAEHHRFLEAWLATYEPLWAEYLKPRWARQCLRLYSGKQRVFAKFMNRVAEGAATEMKPVVAEVVVAYGTSKFAPAGKGEIAVPTPRAYEACAQQFRTIVVYEFRTTQVHAETNEILTKVKPRDPKKVPISPAPQAGARSTAPTAVNPVCKTRVYAQTNVVLKPGQRRRQGTVGRGLLWWDATHGKFVNRDLNVALNIRRCLALPDRSIALCRGPEQDPLRPEVGKLIRQRAECRLPVWGRPLGASRSMV

SEQ ID NO: 406 - protein, 279 aa, Caulochytrium protostelioides
PDQSELLSAAHAGRRGRHQARPLRARLLSGLPVAGRQTAYAAPPRRYEYICCRRNQLQSQSVQSLPFQFRDAGQEVRARLSGGQRPDGPAVYLAIICDIRQRVFAKFMYRVTKEMAPVVAEVVIAYGAAKFAPGGKGDISVPTARAYKACAQRFRTILVDEFRTTEVHLETEDLLTKVNTLDPMQVSTARASRASVPVTAPAAVNTICMRGASARSTARRRRGSTRPAMLAGVLPPPSRRPSTQSARPGQALARPRQRESTCPAGRARVLPRPSRRQPP

SEQ ID NO: 407 - protein, 316 aa, Caulochytrium protostelioides
PRGAPALSPSTANVVESGDKATQKQIEAWHRGLKELLQRLSEVSSKGTALAAHHRFLEVWFATYDPLWAEFLKPRWARQRLKLYSGKQRVFAQLLNGVAERAAMEKMPVMAYGTSKFAPGGEGEIAVSTARAYRACAQQSRTVLVDESRTTQVHAETNEILTTVKPRDPTQMPISGASGASVAQTAPAAVNPVCRSGASARSAAPTRVNPPRQARAGTSPAEPTPATPARKTRVYAQTHGVLKPGPHWRQGTVIRGLLWYKAANGNEAAHIKFVNRDLNAALNIRCCLALPDRPIALCRISRKTRLESKIGKVIRH

SEQ ID NO: 408 - protein, 201 aa, Caulochytrium protostelioides
RFLEVWLVTYEPLWAQFLELRWACWRLLLHNGNQRLFAQLLNRVAKGAAKEMDLVVAEVVIAYGASKSAPGGKGEIAVPMARTYKVCAQRFRTVLFDELWTTRVHAETNQILTKVKPPAPEKVPISGASRDGAPRPRLRPSARPAGLGRVLPPRQGRPTRGKHRKKHSQRCLDDASRFKLGPALAQLRRTHIGRGQRPDVM

SEQ ID NO: 409 - protein, 228 aa, Caulochytrium protostelioides
FLKPRWAHQRLRWYSGNQRVLAKFMNRVAKEAATEMAPVIAEVVVAYGASKFAPGGKGEIAVPTARAHKVRDQRFRATLVDEFRTTQVHAETNDLLTKVKPRDPTQVPAARAGNTRTGARSTAPTWVNPPRDVRAGASPAKPTPATPVGKTRVDAQTNVVLNSGQRRRQGIVVRRWLWYSSTDGKFANRDLNAALNIRRCLVLPARPEALCRNGEDPLQPRDGKLIRS

SEQ ID NO: 410 - protein, 328 aa, Caulochytrium protostelioides
RAQAQETWHFWYAGRRMPQAERMRPTPCRLSRLPSKQSSWLAARISTASLGTTNIPFMAMEGSNGKVVSWELSRKQYYVKADIKATPKQSETLREPLQGLSEISIKGTELAAHHRFLEVWLATYEPLWAELACSGMQRVFAQFLYRVTKGAATEMEPVVAEVVIAYGASKFAPEGKGGISVSPARAYKAYAQRFRAILINEFRTTPVHAETNEILTKVQPRDPMKMPISRASRAGAPPTEPTAIDPVRSTRGYAQMHVGRKPGQRRRQRTVVRGLLWFDSTNGKFVNRDLYAASNIRCYLTSLTIPIALFRNPGQAPLQPKVGKPIGH

SEQ ID NO: 411 - protein, 249 aa, Caulochytrium protostelioides
TEYLKPRWARQRLKLYSGKQRVFAQFLNSVAERAAMEKMPMVIAYDTSKFAPGGEGEIAVSTARAYRACAQQSRTVLIDESRTTHVHAETNEILTTVKPRDPTQMPISRASRASVAQTAPAAVNPVCRSGARARSAAPTRVNPPRRARAGTSPAEPTPATPARKTRVYAQTHGVLKPGPHWRQGTVIRGLLWYKAANGNEAAHSKFVNRDLNAALNIRCCLALPDRPIALCRIPGKTRLESKIGKVIRH

SEQ ID NO: 412 - protein, 215 aa, Caulochytrium protostelioides
GAAAEMAPVIAEVVVAYGASKFAPGGKGEIAVPTARAHKVRAQRFRATLVDEFRTTQVHAQTNDLLTKVKPRDAMQVPAARTSRTGVAQTASTAANPTGNTRTGARSTAPTWVNPPRNARAGASPAKPTPATPVGKIRVDAQTNVVLSSGQRRRQGIVVRRWLWYSSTDGKFVNRDLNAALNIRRCLALPARPEALCRNHGQTPLQSKVGKVVRH

SEQ ID NO: 413 - protein, 212 aa, Caulochytrium protostelioides
VWLATYEPLWAESLKPRWARQRLRLYSGKQRVFAKFINRATKGAAAAMEPVAAEVVVAYGAYKFAPGCQGEISVPADRLYKACAQRFHIVLVDGFRTTRVHAETDNILTKDDLLTKVKTRDPTKVPIARASRTSVSQSAPAAVNSVRASRSGARLTAPTRVNPPRRARAGASPAEPTPATPVRKIRVYAQTHVVLKPGQQRRQGIVVRGLLW

SEQ ID NO: 414 - protein, 254 aa, Caulochytrium protostelioides
DSRRAIAVRSILATSSSRHAMLTLPGCAAQRYWSDQRDLGTSAFAAIQKQELAQLLNRIAEGAVTEMKPVVVAYGASKFAPGGKGDIPVSAARAYKACAQRFGTVLVDELRTTQMHAGTKDLLVKVRHRDPTKVPISPASWTGARSTEPTRVNPARNTRTNAYLAAPTAVNRVRKTRVFAQTNMVLKPGQRRCQEIVVRGLLWYKAPHSKFVTRDLNAAWNIRRCLALLTRPEALCCHPEPTRWQPKVGKLIRH

SEQ ID NO: 415 - protein, 250 aa, Zygotorulaspora florentina
EYQSYFADRNNSPPILLNSEHTRGGKPKAPTKLGEKTTRLVLEMHKTDALILCKNYQNSFIPKLNLHKYTGLNRKLKSSMATMAHCAFHDRVSVELQQFAGARVIEAREEWASKTCPNCRNIKQFISGVPKTYYCSECLFKFDRDFDAVRSIILEYLPSIQSSGGTSSPPTPGPSPCALACIASPSWIISLHRLNIFVDASGSPGALVSVPHNKAAGKSTSPVRHEINSSPAVYALATTTYFPGGTSAGI

SEQ ID NO: 416 - protein, 214 aa, Torulaspora franciscae
SCNASEPLPEELPGDSRLQGTRSNKYYLVVPMAGEEIARKGPAEKFIFIDPGVRTFLTGYDSSQTVVEIGTGAVVRIEKLKRRRRQLQSKLSKLRKHKKRQNHRKALHRLDGRISHIVQDMHKKSAESYENVFIPKLNYHHCTKLTRKSRSSMATPLGGSTRDLQRTNVRRGQDPPLAIKRSHIYLGMMSFAALKSLSKTEAHFMQVYTLAQPR

SEQ ID NO: 417 - protein, 234 aa, Torulaspora franciscae
TGHQIDEGRQPPWTLLPSPAHLPTAFFLRATCRIKVSRQAAYAAHCFLPVELEPPAVKITCGIAVEQHRLDEKISHIVQDMHKKLALFLCKSYHNIFLPNSNYHECSKLTRKSRSSMSTLAHSSSHDRLTMKAEQFDGASVHEVEEDFTSKTCSSCGNLKDDLGSAKVYSCIKCSSVFNRDFNAAMNIMLKYICEHLMASGGSSTSSAPSGGMVDSPRWVPAPSWILPGEGSWS

SEQ ID NO: 418 - protein, 538 aa, Lipomyces mesembrius
LTCCIDKSQAPPCPGAVGVQNTPNTKIVPKPFWNEDSGRISRTLWLPSINLIEREWTGKLVTEGWGTCVRRSVPDQPITDSLLASTAECGMDDKNERAEKRRKTDKDQQKEQAEKARRFRVYPTTEQKAILRNWIGTARWTYNRCLDAVEKKEVAKNKKELRAAFLNKQAIDSMGQPWVLETPYDIRNAAMDDLLKAYDSAHARYQKDKKVFKIMHRSRRKSCQESIVIHHKHWSRASGKYAFLRKMKSTEPLPHDLKYDSRLVYQRTTGHYYLCVPMPLQVLEGPSSGRLISLDPGVRTFLTGYTPDGEVVELGKMDISHIYRLCHWLDELHSKYSAKDISRAKRWRMKKAAGKLRRRIQNLVSDMHCRIAKYLCSTFNLVLLPSFPVQQMVTRKGGPRRITSKTARAMASWSHYRFQQRLLDKVREYTSCKVVLVSEEYTSKTCGRCGKLNDVGCSKKYACKECLFECDRDVNGARNILVRCMTVDRTVDKYLHRNHERVDDPLLLQQPPPLLRAATFVARIEARSFSGFPELHDP

SEQ ID NO: 419 - protein, 275 aa, Lipomyces mesembrius
EYCRPCQALEVPHWKCRTGKYAFLRRIKCQEELPETLAHDSRLVADWRTGQFHLCIPGAVKVVEGPAKVPRVVSLDPGVRTFMTGYTPDGAVFELGKGDIGHIYRMCHRLDALHSRLSRKGLDHRKKYWLTRAAAVIRRRIRNLVDDLHKRAAKYLCSSYNLVVLPTFPTQQMVGKAHRRIGSKTARAMATWSHYRFQKRLLDKARVHPSCRVVLVSEAHTSKTCGACGHLNNVGGRKEFRCAHCGYVCDRDINGARNILVRYCTKLATGESVTD

SEQ ID NO: 420 - protein, 219 aa, Lipomyces mesembrius
IVASMSAQRPPHSRLPKQHRSLSTLIIRANLLELFTSFGHYKDERPLRWKTYCREQKALHRICMRIKGSKRARKEDVVVAYGDGQFGSTMRGKRAAPVKKLRKHLRRYATVVAVDEHRTSRVCSKHNQQQTERTGLADEEDEGGGTPPDVVHIRGQRNADGAKGPSLHPVLYCNKCHTVWNRDVNAARNIAWIFWWMRVHSGQRPPGFRLGRVDVAGCG

SEQ ID NO: 421 - protein, 271 aa, Lipomyces mesembrius
AWVILYQSVSVLTSYVWSMPSFGDDHGRDFSISSASWHDASYHNSARQVSLKLKREALDGGVDVASVATTIPTSKTAQVAQYLDHARVSLAAFPVLFEHYKDERPLRWKTYCREQKALHSICLRVKGNKRAKKEDVVVAHGDGRFGSTMGGKRAAPVKKLRKHLRRYATVVPVDEFRTSRVCSRHNGEHRERTGLGEEEDEGGGARAPLELVHIRAQRDANGAAGASHHSLYCHKCHTVWNRDVNAARNIGWIFWWMRVHGGGRPPRFGIG

SEQ ID NO: 422 - protein, 662 aa, Lipomyces mesembrius
WRRKSGSAQPIGSVRKWLKSFWSVLSPFPSFKVTRAIVGAIYSWLHKSIMREGALDAQPCLAGKSEEEIRTLFFEHVKAKPNERKKGSRSRSHRAVDLFTTDKHRNAWNEIWNEMFTRFARHILTVLIPFESRNAATGGEDDAGEVVDVEDISASKAKGRDFIACRRAEWLFAILKRLEELQKRAKKRFESEEKASCKQQQQQQQQQQQQQQKRKRHAPVLKMHNLFPLTGNVPGHIQCTEQLLLHAYKAYLKEHGTEREKQQQVVLSDWMKLFGPPPEFWKLKQEEGEVSGETTCRVQLRNKFMTDGISVSLTETTAVLKKTRPKLKTKTKFVPIAAKIRMPYVDKEMIEDLMHHHNVRMVLFADPGLGRMVTGKFLPIERIRDAITRQQQAAAAAATQVDGSEYKQVGFRELFDAPDARNLTKGDAKLSWRQQRKQATGIDFRITAKERAYMCKTKKHQQLRQRLQQEDTGRREEEGRREGDGRPCLFGKEPSLKSTSSDAFTEYLDFMCAANRLHDIFSFYRQPVFRHLRMDSYSAQQRWWVYVQDKMYRVLNDHKIRLQIPRYRRPYAYDDPKHLRANQTPLRLVAKGEQPERRQLKMRTNSRPNRYRKYAPPLTLQHHIQMEVQVTAGFSSCLEMVRFVTICVVMCPLRLRSASFKN

SEQ ID NO: 423 - protein, 270 aa, Lipomyces mesembrius
TCVILYQSVSVLTSYVRSMPSFGDDHGRDVSISSASWHDDAYHNSARQVSLNLKREALDGGVDVASVATTIPTSKTAQVAQYLDHARVSLAAFPVLFEHYKDERPLRWKTYCREQKALHSICLRVKGNKRAKKEDVVVAHGDGRFGSTMGGKRAAPVKKLRKHLRRYATVVPVDEFRTSRVCSRHNGEHRERTGLGEEEDEGGGARAPLELVHIRAQRDANGAAGTSLHSVLYCHKCHTVWNRDVNAARNIGGYFGGCGCMVEGDRHGSG

SEQ ID NO: 424 - protein, 528 aa, Lipomyces sp.
RGIFHSRNNILGLRCETAPPDACSVLHNSPSVPASNPRLLQSLLPLSLDKYRRLSLNLLTLASSSSQSTVSFFVFSIFPTMQQAISQTTSTGNGLPSDPNSRKKFWTEVTRGLSQEWPLVSGTSVSGSSRSVESHSWFSIEVHPQTQSRAPNSRKSFLPSLITSEEQQSAAGDKQQEGEKLRVRKICLFPTNSQKETLRQWFGAQRYIYNKCVALVQGGMKPTQKELRAVLLNSKTNQLNDNEKWLEQYEYDLKDEAIRDFMKNYKSNMAKYKKSKKPFTLKSRSKYAPTQSLSVLKKKWNHKLGFYSSIFSPSNMAAAEQLPKRLATDSRLLRTQSGKYFLITPSRARKHNGNGTTPGDFVFIDPGVRTFLTCYDSNENVVEVGKAAVVRVSKLLHRRRKLQSRLVPLRDHKKRQNLRRAYIRLGERINHLVEDMHKKAAAFLCANYDRVFLPKLNYHKCQKLNRKSKACMVTLGHCAFFDRTTMKAELFERTQVVEVEEQWTSKTCSCCGWVNHNLGRSKVFECKT

SEQ ID NO: 425 - protein, 272 aa, Lipomyces sp.
VVSCFQSVSLLTSYVRSMPSFGDDHRREFSISSASWHDAAYHNSARQVSLRLKREALDRGVDIDSTATTLPTSKTAQVARYLDHARASLAAFPVLFEHYKGERPMRWKTYCREQKALHSVCMRIKGNKRAKKEDVVVAYGDGRFGSTMKGKRAVPVKKLRKHLRRYVTVVPVDEFRTIRECSTHNGEHRERTGLAEEKDEGGGTRQTTPDLVRIHAQRDTNGAKGPSLHSVLYCHKCHTVWNRDVNAARNIAWVFWWMRVHGGGRPPGFGRR

SEQ ID NO: 426 - protein, 204 aa, Lipomyces sp.
TVASMSRQWPPHSHDHARASLAAFPVLFEHYKDERPSRWKTYCREQKALHDICMHIKGSKRAKKEHVVVAYGDGRFGSTMHGKRAAPVKKLRKHLRRYATVVPVNEFRTSRTCSAHNEEQRERMGLGEQEDEGGGTSKRAPDLVHIRAQRHANGAAGPSLHAVVYCHKCHTVWNRDVNAARNIGWIFWWMRVHGGERPPGFGRD

SEQ ID NO: 427 - protein, 515 aa, Lipomyces sp.
NAQQFLYVFTSPLIIKISHRCCYCCYYCCFPSYLYRLEQISFNSSLHTMPELTENQLHPQPFWDANSTRISAQLWLPPSSIPADEWKAIGRGWGTCRTWSSDIEVRHELQIPMNVVEDGPAQGLVAEQGEPALKTRKYRLYPTASEKEILVKWIEAARWTFNKCLRAIKDEGAMKSKKALRARAINDDALESLKVTWLKDTPYDIRDAAMDDLLKAIKAGVARYKKDKKVFKIRYRSRRYSFQQSIVIPRKHWQRRSGKYAFLRQMKSAEKLPNEPPHDSRLVRERQTGYFYLCVPRPLEVVDTAGAEDVPQVVSLDPGVRTFLTGYTPSGDILELGKADIGHIYRLCYRLDGLQSRWSEATVRKNKRQMQRAAALIRRRIKSLVDDLHCRTVHYLCSSYNLVILPKFQTQQMVQNGHRKIRTKTARAMLTLRHFCFQQRLLDKAREYPQCRVVLVSEAHTSKTCGRCGRLNDVGGDKVYRCSPCGFVCDRDVNGARTILVRYCTKIARGESVTD

SEQ ID NO: 428 - protein, 511 aa, Lipomyces arxii
PSCYLDKPQAHCPCGAVDDQNTPNTKIVPKPFWNEDSCRISRTLWLPSLNLIEREWNGEIVTEGWGTCVRLSAPDQPITDSLLASAAESGTDDKNERAGKRRKTDKEQAEKARCFRVYPTTEQKAILRNWFGTARWTYNRCLDAVEKNEVAKNKKDLRAAFLNKEAIDGMGKSWVLETPYDIRDAAMEDLLKAYDSAHARYKNDKKVFKIKHRSRRKCCQESIVLHHKHWSRTRGKYAFLHKMKSAEPLPHDLKYDSRLVYQRTTGHYYLCVPMPLQVLEGPSSGRLISLDPGVRTFLTGYTPDGEVVELGKNDIGHIYRLCHWLDELHSKYSAKDITRAKRWRMKKAAGKLRRRIQNVVSDMHCRIAKYLCSTFNLVVLPSFPVQQMVTRKGGQRRIRSKTARAMATWSHYKFQQRLLDKAREYKSCKVVLVSEECGTCGKLNDVRGSKKYACKECRFECDRDVNGARNILVRWMTVDRTVDKYLHRNVDRVDGPYCNPPALESRHTFTW

SEQ ID NO: 429 - protein, 225 aa, Lipomyces arxii
HRTSKCCSSCGEEMEKAVLAKRPQETRQAQSKGCLKRAVRKATLAARFEAKHGLPDPPPAAAPPPPRADATLPVVRDDGRRRQPPRVDGDAYVARTRFRRGDAFPSPSDAGEYDRSQLLTPSGLKYCSNCNRLWCRDKNATHNFFSRMVFLLAQSTGVVAHAVAESRQDGPGYLCRQVRQEQDDVPAPKSKRVAKRKRDDRAVDVTTLAGKRQQVMHTQAANECV

SEQ ID NO: 430 - protein, 280 aa, Lipomyces arxii
CGGPTVSLCHTLAVCFCSDMVCVRTMPTFGNDRRCDFSVSSASWHDSAYHNCARKMSLSLKRQALDRGIDVHSMATTIPTFKTAQAAQYLHHARVSLSAFPILFEHYKKERPLRWKTYCREQKALHSICLRVKGHKKAKKEDVVVAYGAGQFGSTMKGKRAAPVKKLRKFLQRYVTVVPVDEYRTSRVCSKHNEEHRERTGLGEEEDEGGGTISVAEADLIHIRAQRNANGDKGPSLHPVLFCNKCHTVWNRDVNAARNIAWIFWWLRVHNGGRPPWFRR

SEQ ID NO: 431 - protein, 1113 aa, Brevipalpus yothersi
LFTIISLVLTINMSDNSPSKKKVKIIDSNELNARSNVPVSHSSNTSNLSSRTSFHPDVCSWLCPEVFYFFQPTNYTNGNDSNLPPSSSSSSFGNNTVPALEPIHHDYSGLEIHPPYSSSPETNFVTCPCNSNSLQTSTQSARRTDTSRTNNLAPQVENNNHQILPTKRTKSSSGPNKRQRIHRTIAQSVNFDQTIENAPRNDTFGTNYGHNCEQSTSTIIHEPNLGLITDSDGGARISNNIRNPPSSSDKKNKESPTSTSSLSPSSSSSLSTPISSEGKVSTKQDGGERPKRQRKSNKKQSSSCPTSSSPTTPKRNGGKGCGKGEKVDKKDDNKNKKNTEPEEKDILLYDTITCSIKQFIKKSKISKQMFKKMNEQCLILSDLFVEAARYFQYWLEKRLDPPANCTPEQRANHDPWTSYFSRTDELDAAIIEQNDRINFDYMFNSLTDPKLRRKLEFKLDEDYKQLRTSHNIPLYTILENKLSQQLLYIIDLFAQNFDNNLTLHMKRRVMKVLTFENEKQKMGISRKDIGKTVTYLFSEANDDAEGSNQFTPNESLVNFFTREFKLTDERLQQLKNFEENRFKFVPLLYLIRQYYIKNNVKHPPAISPQASYGRKHLRYDRRSFLELIQPLIPNKEKRPKCITKVHVKEAKPFWNKFTNFDKFETKKRKFNYSFTTDGVKCCLSMVQWQVRKDGSVPDEPPNDPKEKRQTKKSSTLPIWRKFRPGSSGGGGDDGIVGDKIPIDGFSHIVGLDPGMKISFGGSCWSKRFVPNEHEPDGPNKIAERETPIKISSAAYHQKCRVNFNLAKNRRMKNVKNEPKRKLYEETKELYDRTQYDKPDKSDSIEDFLTHFRELQEFHSRRVFAKQKFTRYIVRTRSINWMCKELVDKEIFGKNVNNTIPEEKWKALIFIGGCNNFYSGMKGYRGVPLNDIVDRLKRNWSNKCVVIDNVDEYNTSKKCSQCWKDVKMPPPKRWSQEDEKEVAKKIPKRKRKRRRIKKKRKKRVEEPPDQPAQPAQPVQLAQPAGNSKRRQRLRGHRYVVCQNKECPRYHCATWNRDVNAGRNIATCGLAEYRGEERPEPFRRDGRSKPHNEVPSNAVNDMVPARSPWISHVLP

SEQ ID NO: 432 - protein, 254 aa, Pseudoperonospora humuli
EEEEGSFGLDMRTSATPKRCNKCDIVQVTSKEYRQMAGLKRFTAYNEGLKKLHHKYKKIFAEMPLIATQSTAVLLEQYRVPATIQRIAVASRVEAFWKRMARMAVDAIAKFAASTVRQGDVRSARDWSKCNGIKGHAPSPVKRLKQALHKLCDGGLNGRVHDEQAVTGYCRLFDALPLRTTRSFQKRGRTRAVDPQQKLKQCFGVLRGECAKSSTKYWDRDVKAAINMLPLLKSDLDDEGCIQTFRRAEKRVEA

SEQ ID NO: 433 - protein, 306 aa, Acaulopage tetraceros
FAHYVSTDGVRLSVHMEKPFTPPAVPLDDWGYDAQGQYHQVNTQGMIVGGSDPGRITFHTTTKALMGVEPMQGNIKSCENVHLRELNFATKHTVKKNGWTDREDDGHFREMLTAMPTPCCYTSEAYNQHLNHFLHLRDYFIDFYAEMRWRRYRFKARIRRQQAYHIICKQIIGDDPANTIVAYGGGRFDHASRGNPPTPNKHLFKELKRRCTTILVNEHLTSQICSRCHGVEPLPPGVAGPLPQPQRLLDTRYWQLKQCNTIGCMRLWNRDVNAARNIRHVFLYANEHNGEHPPGFRRVAQAPQGQ

SEQ ID NO: 434 - protein, 776 aa, Nannochloris sp. RS
LIIMGKKKRKRTSKGLFQSKKFKRVDVAKKKSDDRFYSTHTIKCTLGRFCKYKTIQKEIEQCTYWLSRLQIHSHHVMSLWLMRNQGRIPLGDKKEHKSKSLQGFYNKIMRHLANHLQGRKERKDVDAQIRDLCGEYCDKVGLEANWPSGISMGWKSKVIEQLARQSATIHSTHLETNLDIFAVRYLRFLIRSDPEFSAICDLSKKAHGKVFSAICDAFWERKKVTVVAKRRPTTLEMFPIKHDIWKTAQQLVTRLMTLVPKQTSLSKKSEIMYQILTELEPFAADLQQKWLNGEVGKRTFGKSKWTFDLCPQLEWRPKHIQISTTALSKLIKDLAKTHTHFKTIMSGLSEVDDDDICSYEKKYQVWNSIFNLKRVLRGKHLTDHRKLRFGCFMSTDGVSAAAAIQQRKSKDICKAINIGDEIQFIKAKVSLLFCGQWAINCLARAPPKGLIKPMNIREFQIPSHLFVFFYPWLKTLEAKKEKLLKDIKTRNDQTLIHKSVKDIVSKDEDGVYYCDTTVIGLDPGKKSAATWVYHNPKHQRKHQKWKGDEGEHSLVEERYKNGSLGGGEWRFLSGQKQYTSKMNKRMTSFCPQWRNLSSTKTVDSAKLLKAYQEQMALWDKLEKAFFNKDKWYQKERMRKFCRHQKAMEDVVARIAGTKNKEEQKKVVVAYGDGDKNGTLRGTAPIMSSKLFKKVSQSCCVVVINEHKTSKLCSCCHEEMKQFQKQFRMKRCINSECIRSVWDRDINASVNILNLFLELCHSADEDGKGQRLEAFRR

SEQ ID NO: 435 - protein, 238 aa, Haematococcus sp.
TSQESFSSSNYYEKSKVKYSQRLTNRWNIMTKELTDKIQKDGAKTASTDKLLVWLKSYLASLSTLLYHRMKKGYRKMRFLRYTMKQRYVQEVVNVIAPNDQHVVVGFGDWSGGSQSPISRKHCGPIEEIKKELRRRKNVWMRMVDEHGTSKTDSNTLQPLKNMKAFTTVVRIVQGKKERKTFRNSKVHKVLHCQNNGSEQVVARPQTTWNRDVNASRNILKLLQLEVAGLPRPTPFCR

SEQ ID NO: 436 - protein, 273 aa, Chloroidium sp.
LTSPVQENLLFKCAWKLAAHPGQLEWFQRFCALDASFHQKTKRTVHKIQTSTLLCRCKELIKKLRQKARVVLVDEDNTSRRCSSAFDSTDYAGCDQPLQRFSYSWLPHGHADRKTERPYPLKVCQHCSVVSSPACSGSAKSFDLMLLFYLIVRAPGRKSPATAFPQHSALGDLSPGRAKFPPPKEDCSAHHRWGIASEVGPPLSFSHQKSTSARKFSGCALQVWNRETNAARNMLRCVLAKAERKPRPAVLQEAWAAACRSALAEEMAELEGD

SEQ ID NO: 437 - protein, 697 aa, Chloroidium sp.
SGVILECTVFRSVKNTSAFKSQNFVIQQLYVMLCTLNHPAKPPARIKQTPEEVIEDRCLAGARILFGGPMRLEAVNRNEQKKVMDITVVKTTWNRFCRDEGRALAVESVLKDMNRTVCEAYLLANLHVIRICKANKPLPAIDQSFFYNCLKGVSVGNRQKSDIKDPDLKDTADLYASLRPAGYQAPRSDHLAAGLHQNASQQMAINAKNYISMTFYKRLTRYLRHRYQLDGREAYKKIDDIYALQYDGDDAIVKKYRTKIPRRPTVGNLEGTPELYLPMLFEILKYCEKHNPFENGDGQYDSRVKQVRLFTLLPTKQGFECSNVKICGTGLFNILKRQGLEWTEDEFDDAKEEWWRALFRISDFETRNRKFANEILTDGVSVSIVMRRLKPEDQVQREAEIARKRKEDRENPVKKKRGRKKDQPTKKRDHDHDIDLDSYEQVLGLDPGRSFMFVTADGQGKHMQCSTKEFYHDAKYTEGNRKVRKWIDRDSRVSDAICNMPSPKTAEQAKLQAYIEYLLPRLDNLLTFFQQKKFRSQKFKRYIYSKRKLRELGLKLTAGKKTLVGFGDWSNNDTAGVIKRCPAGPVKRFEKELKKFCRVIPIDEYCTSKKCNRCRSEQYNEKKIVNGKDGRTYQVKVHSVLHCHNNGCKGMTVNRDENASKNIRDLLVIAARKESRPACFCRSARSNDPIITVPVCA

SEQ ID NO: 438 - protein, 407 aa, Chloromonas sp.
EGVVGPVLEVVLRVHGPELTQCWSGRKRPDRSTRSTRPPGADGNQTFSDCATGCYRPGKEPRSSSKHVLQCLCNWVSLLDYYEASYFAGQYMTVKDWLSRVPSARDGTVVSKLEQIRNLSNAMYVDIPVVYPAMGDHPTCSIPRRGILGYYLHSSYRQRRLGVYERAMEGTARTLTRGAPRQNTLVFYGNKSCGAGGCISRWLGGAPHKAFRQVLNRHAMVVAVEEHLTSQFCSGCVGASIADQLRAAGMAPQPERRRAATLPPPRGLRQIRQCKAHKVKGGEVRREQHALQGHEVPFVRHGVAAGCQCSAEHNARGLVDPQGAAGVCRSADNDTTVMTLLQPTETVGCWYRVPCDCGQGRLKFLTSCQFVSIEPESQNISHALGQRAANMQVAVKYKFRPGEVCEY

SEQ ID NO: 439 - protein, 268 aa, Chloromonas sp.
GTRSVGPATQTQHGSQHEGMGVHHPLVTLPQRATQVWSIRRMMAYVRYVAWALGRNGILDQYHEPPREWRTGDALNKPHSAAGPAQQTCPASSKRGYRHRRLRVNIQRDRELDAIVNHVTRDCGGQRQDTVCYWGNWHGTVGGPISRQMGGPPVQQLKRRMDCRVLTIETDEHKTSTYCARCIDAYALLAGVPRLPASTRKGAAPAVPQPSNPPQQLLKLRTCNQRLEKCSHCKVVMHHDAVGSANIHHVGRCQARDKPRPVPLQRTS

SEQ ID NO: 440 - protein, 324 aa, Chloromonas sp.
LSERTRPSRGRSAHQEARYWEYGSWAFWKFFMPAVRAASLGHVHHRMVFFSQSLDSYLLFGSTVSSVDMEREDLLMCLLRLPGGCKHFFPFVSVFLLRLLLTGDRGCRKRPFARFAQVKELLSSMPPVRDFGVASKLVRSRYISDALYVSRPVAFGAFAGRSIMVSGILGYYISSNYRQRTLGVYEQRQRAMEGLAHSLTRGAPRESTLIFYGNKSCGGGGCITSWMGGGPHKAFRQVLNRHAMVVTVDEHLTSQFCSGCVGASIAGDLQAAGLQPQPERRRQTATAPPHRGHQIVQQRNEDKLSGLTKFGGRIVKASYKVRAC

SEQ ID NO: 441 - protein, 655 aa, Chlamydomonas sp.
RTTAEAPTMEPGSSTDLAALKKRKRPDVGQKFKQRKEFKETVVKCSLRSGLIGSGEQKDKFVKAIEARVVALSHRVVLGTRALGLLVRRIFDGVQDLQRFELDIDITDQTFLRQLLLGTSGCHKANPRITNLFQAHPELLYDVQNRHASDRNVYSDAARALSVNISNHFKVNLVKVVKKAVYQCAPGTRDEHVEILFRICGWNRKPSEPSKQPSKKPKMTPQAVSLTVEQLAFVETCRGVLGLADGKQIDGRWLKLKTNLPNMLKFFMHTLRLLEALPNAKLINILPLCCRKCHFITIDTSSLHGIARDADLISQGCTMDAFCEFGTSQWDSMLMTDKFQPHGGYFTGTVDTDGVSICIHYKRPCKESSTSPSDKRSVQRPTQEELQAHRVIGIDPGRTNILFAAEVSPSGSVKTWRLTRSQYYREAGIVAAKLQTERWHAQSIRKELQVMSTVTSKGSTVEHFLAFLTVDLAMGVAIWTEHLKRRWAQQRFRLHGGKKRVVDRFFNQIEKAGASVGDDRPIMMAYGASKVAPGGKGEVSVPTSRVFRECSRRYPTHLVDEFRTTRVYHADDSVILEKVAVKKVMGSGALETVAVRGLLWCCSTKQSGGKFINRDLNGALNILRCLMLPQRPVIMDRGKCRGERLNDRIGKFLTK

SEQ ID NO: 442 - protein, 372 aa, Phocoena phocoena
KVKVVKVVKINKAYKFRIYPNENQIEIIEKSFGCSRFIYNHFLNQRNEIYKNEKKCMKYTEQQNQLPSMKKEFIWLKEVDSTSLQMSLRNLDTAFKNFFQGRTDKPKFKSKRDNYKSYTSNYVNNNIDIKKHKIKLPKLKWIKAKVHRYVEGRIINTVVSKTPSGKYFVSICVETEVESLEKATQNIGIDLGLSHFAIFSNGKKIENPKYLKKSLERLVKEQKKLSSKQKGSNTFHKQRIKIAKMHEKITNQRLDFIHKLSKRIISENQVIVLEDLAVKDMMKNDRLAQSIFDVSWYKFVTMLQYKAKWCGRKLYKIDRWYPSSKTCSECGYIMENMPLQIRKWECPKCGSIHDRDINASKNILKQGLLGIA

SEQ ID NO: 443 - protein, 456 aa, Nannochloropsis oceanica
RKPFLSLGESDRLRTQPSHVVSMLPYYEIVHPSHARKFDWFKVIACVPQKRTEAHKVPKASQKRCNFPIHSLKFCQDAVSVKEMWDETFQVGNLRNQRVFHNRVSTDGVSVSVFFHVAKERLKREKAERVRVEKEDEEKEMLERQQGQENLQPVRERRIVAIDPGRVNLVTALDSQTGKIKTLTCRAYYEKGRINECKRKFNSWEDALGDINAAFSRTTMKSCCPDLRSAYRELIVRHYHRLWDARCEKKRARAHMAVYAGKQKVLDVFFAGLTGPGQAKPIIAYGAGIFPHTGKGEVSVPVKRVLRVCERYYRTVYVPEHLTTKVHLDCGQRLNPIARRTEGEGGEGGGGGEGGGGGGGGEGGGGGEGGGGGGGGGGGGGGGGEGGGGRGPGRGGGHGRAIRGLYWCNTCEQFVSRDGNGARNILRVYRRMVRGEARPHDLRFGQPRQDMRTLYV

SEQ ID NO: 444 - protein, 275 aa, Nannochloropsis oceanica
NQSIGWGRYKRHYVDVLRAGFGQKPRCIRCGINWRASPDFTNPYFGWRYSAGVLEKTRARAHMAVYAGKQKVLDGFSAGSTRPGQAKPIIAYGARVFPHTGKGEVSVPVKRVHRVCEKHYRTVYVPEHLTTKVHLDCGQRLNPIARGAGGEQGKGKEEEGKEEDEVDEEEEEEEEEAAEEEEKEEKDEEMEGEKDSKVRKLEEKRKWEGGICGSQCNISTSTNTSSRRRGRKKREKNLGCRSSSSRPDAADHTGGSRRGTSPGSCRRRRRRRGKG

SEQ ID NO: 445 - protein, 887 aa, Nannochloropsis oceanica
GTGGSSEAGSKLCHRLLHSWVGGSTRPSVERGIPRGHRGGVQDKFTNYPIIHRSPGDYQCITMAAQLYVTNIAASTWTSFVGRQLDYMRFWLREHGFESPYVSAKRVQCLINGWIGPRTDIQAGAGGGGGGGGGGGGGGGRGGMAGGGGAGGGGPMGQIPDDVQAFINKKRRLLRLEGSARLVVNEKTPVEGLLLPYLYHILYQYHQKHLAVRAVQEGTRDNPGLQAEHGGNPGYRAFTIAPICSIKRHFMTLDTRALGDLLKNVVRRRPTAMTKEAWSEACPDWLKRLGGMGTKKFCQDAVSVKEMWDETFQVGNLRNQRVFHNRVSTDGVSVSVFFHVAKERLKREKAERVRVEKEDEEKEMLERQQGQENLQPVRERRIVAIDPGRVNLVTALDSQTGKIKTLTRRAYYEKGRINECKRKFSSWEDALGDINAAFSRTTMKSCCPDLRGAHRELIVRHYHRLWDARCEKKRARAHMAVCAGKQKVLDVFFAGLTGPGQAKPIIAYGAGIFPHTGKGEVSVPVKRVLRVCERYYRTVYVPEHLTTKVHLDCGQRLNPIARRTEGEGGGEGGGGGEGGGGGGGGGGGGGGGEGGGGGGEGGGGGGGGGGGREGGGKGGGRGGGGRRRTRAAEAAAAAQRRLTIQMALAEARARAAAGGGRGGGRDSRIDTGRDPGRVGVGGVGAAGAATGGGGERMRGIPTILSLPGEQAARALATIGRIRAALAGGMKKGKRKIVRARRRGGRGGGEGGGGGGGGGGREGGEGGGGGGEGGGGGGGGGGGGGGGGGEGGRGGGRGGGGGREGGRGGGRGGGGGGGGGGGGGEGGRGGGRGGGGGREGGRGGGRGGGGGREGGRGGGGGGGGGGCGGGGGGGGGGGGGGGGGGGGG

SEQ ID NO: 446 - protein, 241 aa, Nannochloropsis oceanica
QSLTAPCLKSPDRHDTSMTVHFIVTKKGKDRQQKRFVRSRKSRSRTEAHALSRSIQVMSLDQRIDPPILRVISSRRRYDSVRLRVQCRNKFDTTWIDRDNSWAFVRLRLFRAMAEFTFLEKVSQQAVSLLMLSIPPSSRYFPRVKVVTFLGLRVNCRLMLTPIIAYGAASFHHTGRGESNVPVKRVYGACHKHYKIMLVNEHLTTKVHHVCGQRLNPIASRAAGGAQEEGAAIRHTTSCGE

SEQ ID NO: 447 - protein, 707 aa, Nannochloropsis oceanica
WGFLSGLQAEHGGNPGYRAFTIAPICSIERHFMTLDTRALGDLLKNVVRRRPTAMTEEAWSEACPDWLKRLGGMDTKKFCQDAVSVKEMWDETFQVGNLRNQRVFHNRVSTDGVSVSVFFHVAKERLKREKAERVRVEKEDEEKEMLERQQGQENLQPVRERRIVAIDPGRVNLVTALDSQTGKIKTLTRRAYYEKGRINECKRKFSSWEDALGDINAAFSRTTMKSCCPDLRGAHRELIVRHYHRLWDARCEKKRARAHMAVYAGKQKVLDVFYAGLTGPGQAKPIIAYGAGIFPHTGKGEVSVPVERVLRVCERYYRTVYVPEHLTTKVHLDCGQRLNPIARRTEGEGGEGGGGGEGGGGGGGGEGGGGREGGGGEGGGGGGEGGGRGGGGEGGGGGGGEGGGRGGGGEGGGGGGGEGGGGGGGGGGGKGGGGGGGEGGGGGGGEGGEGGGGEGGGGGGGRGGGRRGGGGRGGGGRRGKRTRAAEAAAAAQRRLTIQVARAEARARAAAGRGGGGGRDSRMDTGGDPGRVGVGGVGAAGAATGGGGEGMRGIPTILSLPGEQAARALATIGRIRAALAGGMEKGKRKIVRARRRGGRGGGEGGGGGGGGRRRRWWRRRRRGRRRWWRRRRRWWRRRRRRRRRRRRWWRRRWRRRRRRRGRRRRRRGQRSRRRRRRTRRRRRRRRRRRRRRRRRRHRRRRGWRRRN

SEQ ID NO: 448 - protein, 662 aa, Schizochytrium sp.
VRKWGGQGTAKLQTLQVEQTSNTNQQSSFTGSLGSQQAPFGAGPMADACAARASPEASASTPATMLSASLIAVPPAASNAALDVPLSTPECPRPSKRRTSNARLAISSAPTQMLPPSTKTSVAGSISNAKACAPYWTPVTAAESAKLWSCTATDLRESQSTSWNTFSKDKMSNSWYTAKMHMPETQTPSPKTSSESSPSLWHRITENEQRKIDGDDAARKKRARTKARKTIKKEYNLVRTRKVRVYPTKDQRTQLLKWFGVTRRAYNIGVAFHRDMAKGEKEAIKLHQEACIKKDRKTKQVLVDEDGNPQTYGALYGEKKAVRSKEKHDAPEWVLEVPQAIRDSGILDFFKALNSGRAKNEELAVQKKVHEQSFYKFRTKRDESQIFEVNARIWNTEKSKTTNFLKEFRTRKEKFPSQIKNAMRVQMNRLGHVYFCFLREEKKRPMDQAPKAHHSAIALDPGVRSFQTMYDADGRAIEWGTGKDFRTIFYLCRRVDKIQSRIDKAQENKKKTAYDFNTPLKRAFYRAQLKIKNKITEIHRKLALWLCENYRVILLPKFETSKMSRRMERRISKKSVRMMCRWSHFGFRQALIHKAEMFPWCKLVLCQESYTSKTCNECGTLHHKLGASKVFQCPNLKCNHVADRDVHAARGILLRYLSKDMI

SEQ ID NO: 449 - protein, 653 aa, Schizochytrium sp.
VIDKKWRLGKKMGSRGTVKLQTLQVEQTSNTNQQSSFTGSLGSQQAPFGAGPMADACAARASPEESASTPATMLSASLIAVPPAASNATLDVPLSTPECPRPSKRRTSNARLAISSAPTQMLPPSTKTSVVGSISNAKACAPYWTPATAEESAKLWLCTATDLRESQSTSWNTFSKEKMSNSWYTAKMHMPETQTPSPKTSSELSLSLWHRITENEQRKIDGDDAARKKRTRTKARKTTKKEYDLVRARKVRVYPTKDQRTQLLKWFGVTRRAYNTGVAFHRDVAKGEEEAIKLHQEACIKKDSKTKQVLVDEDGNPQTYGALYGEKKAVRSKERNGAPEWVLEVPQAIRDSGILDFFKAINSGRAKNEELAVQKKVHEQSFYKFRTKRDESQIFEVNARTWNLKKSKTSDFLKKFRTRKEKFPDQISNAMRVQMNRLGHVYFCFLREEKKRPMDQAPKAYHGVIALDPGVRSFQTMYDADGRAIEWGTGKDFRTIFYLCRRVDKIQSRIDKAQENNKKTASSDKDNFNTPLKRAFYRAQLKIKNKTTEIHRKLALWLCENYRVILLPKFETSKMSRKMERRISKKSVRMMCRWCHFGFRQALVHKAEMFPWCKLVFFAKRVTLQKHAMSAVPSTINSAHPRFSNALIPSATM

SEQ ID NO: 450 - protein, 682 aa, Schizochytrium sp.
VRKWGGRGTVKLQTLQVEQTSNTNQQSSFTGSLGSQQAPFGAGPMADACAARASPEESASTPATMLSASLISVPPAASNATLDVPLSTPECPRPSKRRTSNARLAISSAPTQMLPPSTKTSVVGSISNAKACAPYWTPATAEESAKLWSCTATDLRESQSTSWNTFSKEKMSNSWYTAKMHMPETQTPSPKTSSELSPSLWHRITENEQRKIDGDDAARKKRTRTKARKTTKKEYDLVRARKVRVYPTKDQCTQLLKWFGVTRRACNTGVAFHRDVAKGEEEAIKLHQEACIKKDSKTKQVLVDEDGNPKTHGALYGEKKAVRSKERNGAPEWVLEVPQAIRDSGILDFFKAINSGRAKNEELAVQKKVHEQSFYKFRTKRDESQIFEVNARTWNLKKSKTSGFLKKIRTRKEKLPDQISNAMRVQMNRLGHVYFCFLREEKKRPMDQAPKAHHGVIALDPGVRSFQTMYDADGRAIEWGTGKDFRTIFYLCRRVDKIQSRIDKAQENNKKTASSDKDNFNTPLKRAFYRAQLKIKNKTTEIHRKLALWLCENYRVILLPKFETSKMSRKMERRISKKSVRMMCRWCHFGFRQALVHKAEMFPWCKLVLCQESYTSKTCNECGTLHHKLGASKVFQCPNPKCNHVADRDVHAARGILLRYLSKDMILKKNHFIESRVSLTSS

SEQ ID NO: 451 - protein, 665 aa, Schizochytrium sp.
NPNNSYIILFLFLLSSSSLSDYLSTLHSSGYSAIGSLGSQQAPFGAGPTADACASRASPEASASMPATMLSASLIAVPPAASNAALDVPLSTPECPRSSKRRTSNARLAISSAPTQMLPPSTKTSVAGSISNAKVCAPYWTPVTAAESAKLWSCTATDLRESQSTSWNTFSKDKMSNSWYTAKMHMPETQTPSPKTSSESSPSLWHRITENEQRKIDGDDAARKKRARTKARKTIKKEYNLVRARKVRVYPNKDQRTQLLKWFGVTRRAYNIGVAFHRDMAKGEKEAIKLHQEACIKKDRKTKQDLVDEDGNPQTHSALYGEKKVVRSKESNGAPKWVREVPQAIRDSGILDFFKAINSGRAKNEELAVQKKVHEQSFYKFRTKRDESQIFEVNARTWNAKKSKTSNFLKEFRTRKEEFPDQISNAMRVQMNRLGHVYFCFLREEKKRPMDQAPKAHHGVIALDPGVRSFQTMYDADGRAIEWGTGKDFRTIFYLCRRVDKIQSSIDKKKTASSDKDNFNTPLKRAFYRAQLKIKNKITEIHRKLALWLCENYRVILLPKFETSKMSRRMERRISKKSIRMMCRWSHFGFRQALIHKAEMFPWCKLVLCQESYTSKTCNECGTLHHNLGASKIFQCPNPKCNHVADRDVHAARGILLRYLSKDMI

SEQ ID NO: 452 - protein, 254 aa, Schizochytrium sp.
STRLEQKDLKNCSFLEKLPYTQEKFPDQVSNAMRVQMNRLGHVYFCFLHEEEMCPMDQAPTAHHSVIALNPDVRSFRTIYDADGRAIDWGTGKDFRTIFYLCRRTDKIQNRIDKAQENKKATSEGNDNFNTPLKRAFYRAQLKIKNKITEIHPKLALWLCENYRVILLPEYETSKMSKKMERRISKRSVRMMCRWRHFSFRQALIFLKAKLFPWCKLALCQESYTSKTCNEWGTLHHKSVHPRFSNALISSATT

SEQ ID NO: 453 - protein, 632 aa, Schizochytrium sp.
NPNNSYIILFLFLLSSSSLSDYLSTLHSSGYSAIGSLGSQQAPFGAGPTADACASRASPEASASMPATMLSASLIAVPPAASNAALDVPLSTPECPRSSKRRTSNARLAISSAPTQMLPPSTKTSVAGSISNAKVCAPYWTPVTAAESAKLWSCTATDLRESQSTSWNTFSKDKMSNSWYTAKMHMPETQTPSPKTSSESSPSLWHRITENEQRKIDGDDAARKKRARTKARKTIKKEYNLVRTRKVRVYPTKDQRTQLLKWFGVTRRAYNIGVAFHRDMAKGEEEAIRLHQEACIKKDRKTKQVLVDEDGNPKTHGALGGELKAVRYKEKNAAPKWVLEVPQAIRDSGILDFFKAINSGRAKNEELAVQKKVHEQSFYKFRTKRDESQIFEVNARTWNAKKSKTSNFLKEFRIRKEKFPDQISNAMRVQMNRLGHVYFCFLREEKKRPMDQAPKAHHGVIALDPGVRSFQTMYDADGRAIEWGTGKDFRTIFYLCRRVDKIQSSIDKKKTASSDKDNFNTPLKRAFYRAQLKIKNKITEIHRKLALWLCENYRVILLPKFETSKMSRRMERRISKKSIRMMCRWSHFGFRQALIHKAEMFPWCKLVLCQESYTSKTCNECGRNKDSVRLVY

SEQ ID NO: 454 - protein, 661 aa, Schizochytrium sp.
IRKWGGRGTDKLQTLQVEQTSNTNQQSSFTGSLGSQQAPFGAGPTADACASRASPEASASMPATMLSASLIAVPPAASNAALDVPLSTPECPRSSKRRTSNARLAISSASTQMLPPSTKTSVAGSISNAKVCAPYWTPVTAAESAKLWSCTATDLRESQSTSWNTFSKEKMSNSWYTAKMHMPETQTPSPKTSSESSPSLWHRITENEQRKIDGDDAARKKRARTKARKTIKKEYNLVRARKVRVYPTKDQRTQLLKWFGVTRRAYNIGVAFHRDMAKGEEEAIKLHQEACIKKDPKTKQDLVDEDGNPQTYGALYGEKKAVRSKERNGAPEWVLEVPQAIRDSGILDFFKAINSGRAKNEELAVQKKVHERSFYKFRSKRDESQIFEVNARTWNAKKSKTSDFLKKFRTRKEKFPDQISNAMRVQMNRLGHVYFCFLREEKKRPMDQAPKAHHGVIALDPGVRSFQTMYDADGRAIEWGTGKDFRTIFYLCRRVDKIQSSIDKKKTASSDKDNFNTPLKRAFYRAQLKIKNKITEIHRKLALWLCENYRVILLPKFETSKMSRRMERRISKKSVRMMCRWSHFGFRQALIHKAEMFPWCKLVLCQESYTSKTCNECGTLHHNLGASKIFQCPNPKCNHVADRDVHAARGILLRYLSKDMI

SEQ ID NO: 455 - protein, 286 aa, Schizochytrium sp.
KFRTKRDESQIFEVNARTWNAKKSKTSNFLKEFRIRKEKFPDQISNAMRVQMNRLGHVYFCFLREEKKRPMDQAPKAHHGVIALDPGVRSFQTMYDADGRAIEWGTGKDFRTIFYLCRRVDKIQSSIDKKKTASSDKDNFNTPLKRAFYRAQLKIKNKITEIHRKLALWLCENYRVILLPKFETSKMSRRMERRISKKSVRMMCRWSHFGFRQALIHKAEMFPWCKLVLCQESYTSKTCNECGTLHHNLGASKIFQCPNPKCNHVADRDVHAARGILLRYLSKDMI

SEQ ID NO: 456 - protein, 662 aa, Schizochytrium sp.
VRKWGGQGTAKLQTLQVEQTSNTNQQSSFTGSLGSQQAPFGAGPMADACAARASPEASASTPATMLSASLIAVPPAASNAALDVPLSTPECPRPSKRRTSNARLAISSAPTQMLPPSTKTSVAGSISNAKACAPYWTPVTAAESAKLWSCTATDLRESQSTSWNTFSKEKMSKSWYTAKMHMPETQTPSPKTSSESSPSLWHRITENEQRKIDGDDAARKKRARTKARKTIKKEYDLVRAKKVRVYPTKDQRTQLLKWFGVTRRAYNTGVAFHRDVAKGDEEAIKLHQEACIKKDSKTKQVLVDEDGNPQTYGALYGEKKAVRSKERHDAPEWVLEVPQAIRDSGILDFFKALNSGRAKNEELAVQKKVHEQSFYKFRTKRDESQIFEVNARIWNTEKSKTTSFLKEFRTRKEKFPSQIKNAMRVQMNRLGHVYFCFLREEEKRPMDQAPKAHHSVIALDPGVRSFQTMYDADGRAIEWGTGKDFRTIFYLCRRVDKIQSRIDKAQENKKKTAYDFNTPLKRAFYRAQLKIKNKITEIHRKLALWLCENYRVILLPKFETSKMSRRMERRISKKSVRMMCRWSHFGFRQALIHKAEMFPWCKLVLCQESYTSKTCNECGTLHHKLGASKVFQCPNLKCNHVADRDVHAARGILLRYLSKDMI

SEQ ID NO: 457 - protein, 662 aa, Schizochytrium sp.
VRKWGGQGTAKLQTLQVEQTSNTNQQSSFTGSLGSQQAPFGAGPMADACAARASPEASASTPATMLSASLIAVPPAASNAALDVPLSTPECPRPSKRRTSNARLAISSAPTQMLPPSTKTSVAGSISNAKACAPYWTPVTAAESAKLWSCTATDLRESQSTSWNTFSKEKMSNSWYTAKMHMPETQTPSPKTSSESSPSLWHRITENEQRKIDGDDAARKKRARTKARKTIKKEYDLVRAKKVRVYPTKDQRTQLLKWFGVTRRAYNTGVAFHRDVAKGEEEAIKLHQEACIKKDSKTKQVLVDEDGNPQTYGALYGEKKAVRSKERHDAPEWVLEVPQAIRDSGILDFFKALNSGRAKNEELAVQKKVHEQSFYKFRTKRDESQIFEVNARIWNTEKSKTTSFLKEFRTRKEKFPSQIKNAMRVQMNRLGHVYFCFLREEEKRPMDQAPKAHHSVIALDPGVRSFQTMYDADGRAIEWGTGKDFRTIFYLCRRVDKIQSRIDKAQENKKKTAYDFNTPLKRAFYRAQLKIKNKITEIHRKLALWLCENYRVILLPKFETSKMSRRMERRISKKSVRMMCRWSHFGFRQALIHKAEMFPWCKLVLCQESYTSKTCNECGTLHHKLGASKVFQCPNLKCNHVADRDVHAARGILLRYLSKDMI

SEQ ID NO: 458 - protein, 665 aa, Schizochytrium sp.
NPNNSYIILFLFLLSSSSLSDYLSTLHSSGYSAIGSLGSQQAPFGAGPTADACASRASPEASASMPATMLSASLIAVPPAASNAALDVPLSTPECPRSSKRRTSNARLAISSAPTQMLPPSTKTSVAGSISNAKVCAPYWTPVTAAESAKLWSCTATDLRESQSTSWNTFSKDKMSNSWYTAKMHMPETQTPSPKTSSESSPSLWHRITENEQRKIDGDDAARKKRARTKARKTIKKEYNLVRARKVRVYPTKDQRTQLLKWFGVTRRAYNIGVAFHRDMAKGEKEAIKLHQEMCIIKDPKTKQVLVDEDGNPKTHGALGGELKAVRYKEKNPTLTWVLDVPQAIRDSGIRDFFKALNSGRAKNEELAAQKKVHEQSFYKFRTKRDESQIFEVNARTWNAKKSKTSNFLKEFRMRKEKFPDQISNAMRVQMNRLGHVYFCFLREEKKRPMDQAPKAHHGVIALDPGVRSFQTMYDADGRAIEWGTGKDFRTIFYLCRRVDKIQSSIDKKKTASSDKDNFNTPLKRAFYRAQLKIKNKITEIHRKLALWLCENYRVILLPKFETSKMSRRMERRISKKSVRMMCRWSHFGFRQALIHKAEMFPWCKLVLCQESYTSKTCNECGTLHHNLGASKIFQCPNPKCNHVADRDVHAARGILLRYLSKDMI

SEQ ID NO: 459 - protein, 661 aa, Schizochytrium sp.
VRKWGGRGTDKLQTLQVEQTSNTNQQSSFTGSLGSQQAPFGAGPTADACASRASPEASASMPATMLSASLIAVPPAASNAALDVPLSTPECPRSSKRRTSNARLAISSAPTQMLPPSTKTSVAGSISNAKVCAPYWTPVTAAESAKLWSCTATDLRESQSTSWNTFSKDKMSNSWYTAKMHMPETQTPSPKTSSESSPSLWHRITENEQRKIDGDDAARKKRARTKARKTTKKEYDLVRARKVRVYPTKDQRTQLLKWFGVTRRAYNTGVAFHRDMAKGEEEAIKLHQEACIKKDRKTKQVLVDEDGNPKTHRALGGELNAVRYKERHDPPKWVVEVPQAIRDSGIRDFFKALNSGRAKNEELAAQKKVHEQSFYKFRTKRDESQIFEVNARTWNAKKSKTSNFLKEFRMRKEKFPDQISNAMRVQMNRLGHVYFCFLREEKKRPMDQAPKGHHGVIALDPGVRSFQTMYDADGRAIEWGTGKDFRTIFYLCRRVDKIQSSIDKKKTASSDKDNFNTPLKRAFYRAQLKIKNKITEIHRKLALWLCENYRVILLPKFETSKMSRRMERRISKKSVRMMCRWRHFGFRQALIHKAEMFPWCKLVLCQESYTSKTCNECGTLHHNLGASKIFQCPNPKCNHVADRDVHAARGILLRYLSKDMI

SEQ ID NO: 460 - protein, 662 aa, Schizochytrium sp.
VRKWGGQGTAKLQTLQVEQTSNTNQQSSFTGSLGSQQAPFGAGPMADACAARASPEASASTPATMLSASLIAVPPAASNAALDVPLSTPECPRPSKRRTSNARLAISSAPTQMLPPSTKTSVAGSISNAKACAPYWTPVTAAESAKLWSCTATDLRESQSTSWNTFSKEKMSKSWYTAKMHMPETQTPSPKTSSELSPSLWHRITENEQRKIDGDDAARKKRARTKARKTTKKEYDLVRARKVRVYPTKDQRTQLLKWFGVTRRAYNTGVAFHRDVAKGEEEAIKLHQEACIKKDSKTKQVLVDGDGNPQTYGALYGEKKAVRSKERHDAPEWVLEVPQAIRDSGILDFFKALNSGRAKNEELAVQKKVHEQSFYKFRTKRDESQIFEVNARIWNTEKSKTTSFLKKFRTHKEKFPSQIKNAMRVQMNRLGHVYFCFLREEEKRPMDQAPKAHHSVIALDPGVRSFQTMYDADGRAIEWGTGKDFRTIFYLCRRVDKIQSRIDKAQENKKKTAYDFNTPLKRAFYRAQLKIKNKITEIHRKLALWLCENYRVILLPKFETSKMSRRMERRISKKSVRMMCRWSHFGFRQALIHKAEMFPWCKLVLCQESYTSKTCNECGTLHHKLGASKVFQCPNPKCNHVADRDVHAARGILLRYLSKDMI

SEQ ID NO: 461 - protein, 662 aa, Schizochytrium sp.
VRKWGGQGTAKLQTLQVEQTSNTNQQSSFTGSLGSQQAPFGAGPMADACAARASPEASASTPATMLGASLIAVPPAASNAALDVPLSTPECPRPSKRRTSNARLAISSAPTQMLPPSTKTSVAGSISNAKACAPYWTPVTAAESAKLWSCTATDLRESQSTSWNTFSKEKMSNSWYTAKMHMPETQTPSPKTSSESSPSLWHRITENEQRKIDGDDAARKKRARTKARKTIKKEYDLVRAKKVRVYPTKDQRTQLLKWFGVTRRAYNTGVAFHRDVAKGEEEAIKLHQEACIKKDSKTKQVLVDEDGNPQTYGALYGEKKAVRSKERHDAPEWVLEVPQAIRDSGILDFFKALNSGRAKNEELAVQKKVHEQSFYKFRTKRDESQIFEVNARIWNTEKSKTTSFLKEFRTRKEKFPSQIKNAMRVQMNRLGHVYFCFLREEEKRPMDQAPKAHHSVIALDPGVRSFQTMYDADGRAIEWGTGKDFRTIFYLCRRVDKIQSRIDKAQENKKKTAYDFNTPLKRAFYRAQLKIKNKITEIHRKLALWLCENYRVILLPKFETSKMSRRMERRISKKSVRMMCRWSHFGFRQALIHKAEMFPWCKLVLCQESYTSKTCNECGTLHHKLGASKVFQCPNPKCNHVADRDVHAARGILLRYLSKDMI

SEQ ID NO: 462 - protein, 290 aa, Schizochytrium sp.
ATFYKFRTKRDESQIFEVNARTWNLKKSKTSNFLKEFRTRKEEFPDQISNAMRVQMNRLGHVYFCFLREEKKRPMDQAPKAHHGVIALDPGVRSFQTMYDADGRAIEWGTGKDFRTIFYLCRRVDKIQSSIDKKKTASSDKDNFNTPLKRAFYRAQLKIKNKITEIHRKLALWLCENYRVILLPKFETSKMSRRMERRISKKSIRMMCRWSHFGFRQALIHKAEMFPWCKLVLCQESYTSKTCNECGTLHHNLGASKIFQCPNPKCNHVADRDIHAARGILLRYLSKDMI

SEQ ID NO: 463 - protein, 615 aa, Schizochytrium sp.
KNLQITSLIVQSVQPATMLSASLIAVPPAASNAALDVPLSTPECPRPSKRRTSNARLAISSAPTQMLPPSTKTSVAGSISNAKACAPYWTPVTAAESAKLWSCTATDLRESQSTSWNTFSKEKMSKSWYTAKMHMPETQTPSPKTSSESSPSLWHRITENEQRKIDGDDAARKKRARTKARKTIKKEYDLVRAKKVRVYPTKDQRTQLLKWFGVTRRAYNTGVAFHRDVAKGEEEAIKLHQEACIKKDSKTKQVLVDEDGNPQTYGALYGEKKAVRSKERHDAPEWVLEVPQAIRDSGILDFFKALNSGRAKNEELAVQKKVHEQSFYKFRTKRDESQIFEVNARTWNAKKSKTSNFLKEFRTRKEKFPSQIKNAMRVQMNRLGHVYFCFLREEEKRPMDQAPKAHHSVIALDPGVRSFQTMYDADGRAIEWGTGKDFRTIFYLCRRVDKIQSRIDKAQENKKKTAYDFNTPLKRAFYRAQLKIKNKITEIHRKLALWLCENYRVILLPKFETSKMSRRMERRISKKSVRMMCRWSHFGFRQALIHKAEMFPWCKLVLCQESYTSKTCNECGTLHHKLGASKVFQCPNPKCNHVADRDVHAARGILLRYLSKDMI

SEQ ID NO: 464 - protein, 661 aa, Schizochytrium sp.
IRKWGGRGTDKLQTLQVEQTSNTNQQSSFTGSLGSRQAPFGAGPMADACASRASPEASASMPATMLSASLIAVPPAASNAALDVPLSTPECPRSSKRRTSNARLAISSAPTQMLPPSTKTSVAGSISNAKVCAPYWTPVTAAESAKLWSCTATDLRESQSTSWNTFSKEKMSNSWYTAKMHMPETQTPSPKTSSESSPSLWHRITENEQRKIDGDDAARKKRARTKARKTIKKEYNLVRARKVRVYPTKDQRTQLLKWFGVTRRAYNIGVAFHRDMAKGEKEAIKLHQEACIKKDRKTKQVLVDEDGNPKTHMALGGELNAVRYKERHDPPKWVVEVPQAIRDSGIRDFFKALNSGRAKNEELAVQKKVHERSFYKFRTKRDESQIFEVNARTWNAKKSKTSNFLKEFRIRKEKFPDQISNAMRVQMNRLGHVYFCFLREEKKRPMDQAPKAHHGVIALDPGVRSFQTMYDADGRAIEWGTGKDFRTIFYLCRRVDKIQSSIDKKKTASSDKDNFNTPLKRAFYRAQLKIKNKITEIHRKLALWLCENYRVILLPKFETSKMSRRMERRISKKSIRMMCRWSHFGFRQALIHKAEMFPWCKLVLCQESYTSKTCNECGTLHHNLGASKIFQCPNPKCNHVADRDVHAARGILLRYLSKDMI

SEQ ID NO: 465 - protein, 236 aa, Schizochytrium sp.
IALGMSTSSSYKKKKSVHWIRRPMRTTVSLPLIQAYVHFKRCMTLMVVPLNGAQRKILEPYSISAAALKIQSRIDKAQENNKKTASSDKDNFNTPLKRALYRAQLKVKNKTTEIHRKLALWLCENYRVILLPKFETSKMSRKMERRISKKSVRMMCRWRHFRFRQTLIHKAEMFPWCKLVLYQESYTSNECGALHHKLGASKVFQCPNSKCKHVADRDVYAAKGILLRYLSKEMIF

SEQ ID NO: 466 - protein, 661 aa, Schizochytrium sp.
VRKWGGQGTAKLQTLQVEQSSNTNQQSSFTGSLGSQQAPFGAGPMADACASRASPEASASMPVTMLSASLIAVPSAASNAALDVPLSTPECPRPSKRRTSNARLAISSAPTQMLPPSTKTSVVGSISNAKACAPYWTPVTAAESAKLWSCTATDLRESQSTSWNTFSKEKMSNSWYTAKMHIPETQTPSPKTFSELSPSLWHRITENEQRKIDGDDAARKKRARMKARKTSKKEYDLVRARKVRVYPTKDQRTQLLKWFGVTRRAYNTGVAFHRDVAKGEKEAIKLHQEACIKKDSKTKQVLVDEDGNPQTYGTLYGEKKAVRSKERNGAPEWVLEVPQAIRDSGILDFFKAINLGRAKNEELAVQKKVHEQSFYKFRTKRDESQIFEVNARTWNLKKSKTSDFLKKFRTRKEKFPDQISNAMRVQMNRLGHVYFCFLREEKKRPMDQAPKAHHGVIALDPGVRSFQTMYDADGRAIEWGTGKDFRTIFYLCRRVDKIQSSIDKKKTASSDKDNFNTPLKRAFYRAQLKIKNKITEIHRKLALWLCENYRVVLLPKFETSKMSRRMERRISKKSVRMMCRWSHFGFRQALIHKAEMFPWCKLVLCQESYTSKTCNECGTLHHNLGASKIFQCPNPKCNHVADRDVHAARGILLRYLSKDMI

SEQ ID NO: 467 - protein, 665 aa, Schizochytrium sp.
NPNNSYIILFLFLLSSSSLSDYLSTLHSSGYSAIGSLGSQQAPFGAGPTADACASRASPEASASMSATMLSASLIAVPPAASNAALDVPLSTPECPQSSKRRTSNARLAISSAPTQMLPPSTKTSVAGSISNAKVCAPYWTPVTAAESAKLWSCTATNLRESQSTSWNTFSKDKMSNSWYTAKMHMPETQTPSPKTSSESSPSLWHRITENEQRKIDGDDAARKKRARTKARKTIKKEYNLVRTRKVRVYPTKDQRTQLLKWFGVTRRAYNIGVAFHRDMAKGEKEAIRLHQEACIKKDRKTKQVLVDEDGNPKTHGALGGELKAVRYKEKNAAPKWVLEVPQAIRDSGILDFFKAINSGRAKNEELAVQKKVHEQSFYKFRTKRDESQIFEVNARTWNLKKSKTSNFLKEFRTRKEEFPDQISNAMRVQMNRLGHVYFCFLREEKKRPMDQAPKAHHGVIALDPGVRSFQTMYDADGRAIEWGTGKDFRTIFYLCRRVDKIQSSIDKKKTASSDKDNFNTPLKRAFYRAQLKIKNKITEIHRKLALWLCENYRVILLPKFETSKMSRRMERRISKKSIRMMCRWSHFGFRQALIHKAEMFPWCKLVLCQESYTSKTCNECGTLHHNLGASKIFQCPNPKCNHVADRDVHAARGILLRYLSKDMI

SEQ ID NO: 468 - protein, 662 aa, Schizochytrium sp.
VRKWGGQGTAKLQTLQVEQTSNTNQQSSFTGSLGSQQAPFGAGPMADACAARASPEASASTPATMLSASLIAVPPAASNAALDVPLSTPECPRPSKRRTSNARLAISSAPTQMLPPSTKTSVAGSISNAKACAPYWTPVTAAESAKLWSCTATDLRESQSTSWNTFSKEKMSKSWYTAKMHMPETQTPSPKTSSESSPSLWHRITENEQRKIDGDDAARKKRARTKARKTIKKEYDLVRAKKVRVYPTKDQRTQLLKWFGVTRRAYNTGVAFHRDVAKGEKEAIKLHQEACIKKDSKTKQVLVDEDGNPQTYGALYGEKKAVRSKERHDAPEWVLEVPQVIRDSGILDFFKALNSGRAKNEELAVQKKVHEQSFYKFRTKRDESQIFEVNARIWNTEKSKTTSFLKEFRTHKEKFPSQIKNAMRVQMNRLGHVYFCFLREEEKRPMDQAPKAHHSVIALDPGVRSFQTMYDADGRAIEWGTGKDFRTIFYLCRRVDKIQSRIDKAQENKKKTAYDFNTPLKRAFYRAQLKIKNKITEIHRKLALWLCENYRVILLPKFETSKMSRRMERRISKKSVRMMCRWSHFGFRQALIHKAEMFPWCKLVLCQESYTSKTCNECGTLHHKLGASKVFQCPNLKCNHVADRDVHAARGILLRYLSKDMI

SEQ ID NO: 469 - protein, 262 aa, Globisporangium splendens
EFETERADSLDCLGGTADLQDQLFQRAHRAAQDAVETFGFLVEFPTNLLFESGVLFQKRFGQMALRNIAARLVLTLNPQVCVALGDWSDPKHIRGNAHGPVKGRFKELAKWATVELVDECCASQRCSSCLQVLEKRNFQTTKEDCVVAYKPSYAVLRCPNPQCRTTWDRDVNAAINMYQLCKRIVFGLPRTAELSWQHALVAKRGPRGFQTRPHGRRSVSETHCPLKWQLRVIALLSNEPNQLTNGSARNRNLATRLLLRND

SEQ ID NO: 470 - protein, 202 aa, Globisporangium splendens
RTCKWLVRLHRRYLGYCSVHYFTCFRSLVNLENETGVRRQLVEQFTFHSLRVATRVHRHLTGVNKARLWLENLKKREPKYVTTATPNPKVRLATGKTRNIYGGTRTVLPVQRLSHELAKRATVVLIDEFCTSTRCLQSLKSRKVLTTQEDGTITHKSSCAVLRCTNSNCRITWDRDVNTAINISQLATRMVFEFPRPPELSR

SEQ ID NO: 471 - protein, 608 aa, Stentor roeselii
SYFDQNGFEGCVTERFNSDKMTNILTYLAREISTNYLNNIKLHFIKYVERFVNVLYGKRSDPARQVSFNQNAARAAKHAILSLGSVPAIVQPHIRFILPQRPFLKDSIKYDLECNPQDYLRCMVYMMKYVESQREKIYSVFPLRTQLSPGYITLDTNSLLTLLGTRQNGYCQTNFRHKGGIKSNKEDIWAAFFETSKACFKKRGYSFNHMIDTDGFACSIIFSKVKNPFEPPQDDLYIESVCRKKLIEKRLVSVDPGVNSPLTFISRRPEKRKKNRESEESDQKEEYKESEESEEREESGESEERKESEESEKSEERKKSEKIDFFDEIEQKYLSLKRTIYPEQRDDCRLIEESEESEEGEESEEEKNSSAKANRKRENYTTFRYTMKQRIHETKRLIYEKRRDDEKSNTRFYGRTVKQWEATLSSHDSKTLNRNSFMQYLIAKNEVNKVLLDFYAKDLFRKLKWYAYINKQRSEAKLIKGFKQKFGGPDEVFVGFGDWEAAAHMRFKHPVKGKGYRTLFKRAGYNICLVDEFKTSSYCSNCQNGDQDSKMSNARDEDGNSIHSLLICKKCRILWNRDINGAINILKCLEMKKAGKKRPKFLRRQSSP

SEQ ID NO: 472 - protein, 1077 aa, Pseudokeronopsis carnea
MEKEVNSINKSQRNQKMRLKLAANEEMRTAIVRVKSDKQLPKLFAMIYDYKHFENMLLILLKQNYDLAQQEKSENDFSLLSSYQVMRAVIRNTNGGKHKELADYIKKKYKDNQLMQSLIAVGQNLKVHNLAMIINRVKGNFKSFFSHLKQNHQEAKPPRPKKLSKVKRFSVPLDVNSWTLKRKDKIGINLSGKMFYLHLKHNKIEEVITSIANIQSVSLQLSNNNIYLYISYRYCKREACEIRAKAAAIDLGINNLAAVFIKDQNSKSLIVSGSAFKHYNSCFNRLLSKINNTIDSLQNDLKKQDDVKVEKRLHFLQRFRSSLHEKRKRYFYDQFHKISTRILEYLQLHGVTQLYSSTNLASLKNNGECKQRKSSKQNFIQIPIIQFLKYLQYKSPDYGIYFYDVDEKYTSKTSSLSANILDVQEKSQSQSISTNDLLGSRVKRGLFRDRVTKQYVNADLNAAVNILKIGIGKNFTINKKLFFKLCNPLKVKSDRNLFCLNKTIPIRIKHPSDGCNVVSLQIFIGLIQRSIEVTIRYVFRIYNGNSMNRIVLHQFANVINCMVFLSSDNVFSHQICNFYLCHRYVPNNSVQLAINKLNIARVYQQTICHNKFSRVKNSSGISLKQNNKTLYAKYKKIQRSFVTMLVVISVNTIPQTVLKIYTRCVASPYQLKCKEKNMKWLCILVLVSMCYAQMDTEIYLFDFKNENGAYKLTNGKNITQRDGYDNQPYFSRDGKYVYYSSIHRENNSDIYRYNLEDQTTQQITTTPEAEYSPTILDEHNNFSTVRVEKDNTQRIWKFTQGKPQLIAEHIDQIGYHCWLDSTTIGIFRIEKMMNLKIISTKTKQMKHVANNIGRALILDPSDNKLLYLSKENPKEFTILKLLDVENIAVQQVAKTIGQGEDFTCTTKGEIVMADTNKVYVYQKGNWNLIFDGKDKFSGVFNRIVLNISNSKICIVYQSKQQFTQKKRTDFVSTLFILSQFLAYFFTFGSDSTVKSSSFSLSSSSISKSNEKGVNNEKLILPLNKSSKDVSSPWNKLLCNAGAYVIVVERSLNTPCIAELLDCIWILCGASNTTTSWN

SEQ ID NO: 473 - protein, 621 aa, Pseudokeronopsis carnea
KNYQNLYQVARQNEQQFLTKIGQCALQVKYQSKCVLLRMQKQWYSMKDQQKNLKKQQWKTFCQFQRCIAQRYMDGDHMSEEKKEKKIKNGQVLAFPIVIENREVAEKLRETLAYVQEKANEYLIFAHENKLYDVFDEDDKKYSYKVLEPIFCKLSKENKIPSRINRGVLEIVGRTMRQTRDRKRLFDLLVKLSKDPKQWTDKLLAKNGLYEKLHYVQNIKEQVINYKRKHKKLPKDFYELQQPPKIKKQILTYAPDDGQAIRVSIDKDKAKLQFKIIEKNNNNIKWKWLETKINLPGFLQEKQVTSPDLRLDCVHGEWLPVLDFKVTLKKPKQQKTTNFITIDWGTRKLITICVFNKKAQQISQPFFLHCSSIQKKLERIREDIDKWKSKRDRLKHKDSLFKKCNREIAKRWRKIRAIDREIAHLAANMIVFIAKYYNCSDVYCEDLRSLKSRDKSRKINRLTNNTVRQAIYNLVDYKARLCGISLREPVHPAGTSSLCPKCSHKGLHYKASDRQQKPRKSNPWFHCPSCHFSADRDYVSCLNIARKVLFGNNLKKCTKTVVYKKTRLPDALFRQDASTTTHCVGRIHYLKGWIHSVSFSSKVVQKSFNSFKGTIFGILRV

SEQ ID NO: 474 - protein, 234 aa, Synchytrium endobioticum
FVQLRDVCTNLHHRLNQVRLLKHPHVQQIMADIPSACTSQHQDYIHRPQYLVRHLETLVGYHDKAKSSRWNRYKRKQRALHEIYMSIRGSGTKDDTVVIWGNGNFTSLGREQGAPTKALKRHARRYTQIITYDEYMTSQRCSHCAQRGVPEAVADDPRLSGYARAQGKSGHVLMAKRSRANRYVLFAESIGLGLKCSRYGIETTMQPGTSCTASCMNAPLLSTLVRSSAYTSVC

SEQ ID NO: 475 - protein, 403 aa, Synchytrium endobioticum
HSVSICFYLLTYSCFSFPEPCLTSYSCRSFQKTVREVAGVDAKATRAATRVAFMKNPSKGRLLDEVFLLPPEMLAKSRYVLDDSPRRYVRTPSFKTNGLVLSLLWIDTTSKPPPPDRKVEDAINLPNIFHNKTLRSTHKDAWVIAIDPGATCIAGAVAFDPNHPDQRRNLAVTTKSLAEPERRYRNWLEADKPEAICTAERECTKSDQETWPVFLERFVRSYDIARAYYSTKRYKRKRWDADKAKRGELDRVLEGIVKMVGESMGHKLSGGKQVIVAIGMGDFSSNKSRHVMFIRYLIRKLRPLGYTIVGVNEYFTSKKCPCCMEFVEMPAMRRLYCRRCNKWYHRDVMAADNMVNIVRGYLEHDERPTYLKPPSKDKNTPMKRKADEGGTSRAGPSKSRKTR

SEQ ID NO: 476 - protein, 243 aa, Chytriomyces confervae
RKAYFKRNQIEYNGSISRVVRDNVGNPLTFVRNTDLGDVTRVVTLETLITMGYAQDYTGSHSSSNLGQFRAYLVKRHRWKHVLSDFFQNQQHRRRKYRAQLGVRSSESKLANNIQSKFKDGDCKLVLCWGNWTPGVGIGRIMARYFKTATVDERYTSSACPHSDSDMGHPLSRPTPDGGTCEIHHLLRCKNETCSRWWQQDVMALANFKRQVLHGLEHGKNHPVFAPKTNAQAGGGRKRKHNE

SEQ ID NO: 477 - protein, 430 aa, Powellomyces hirtus
GSNRRAKRQKKKKLTRSLKIRLYPNSAQKRLMWQWMGCAWLVFNMVVTNYLLRSRATKQFFFRNLLKHKINTTREWSFMKGVPYEVLDHAISSAITARDEVITRNREHIQDGGLLHRLHFLTKKKPRQTITIRAQYCREPLRFYLRLLHNRGMVAAAGPSNHRKKDGPVHRPPFQHEKCRNNNKWPNEEGKVECDSKLTYDKRLRQWTFSWVYEMDGQDGETQAEPTIAAIDPGVVNFATWYSPTLGSGVVGNQDIERIICLCLHLDKLISKTMRVPARKRNSHRRAQAWVCQRIRNLVDEVHKKMVIWLVRTFDVIVLPEFGAKQMSIRRPGRRLGKKTVRKMLTWAHAQFRQRLLNKAEEVGVTVITSVSEAYTSKTCSECGHIHTRLGGSRVFQCAGCGIVMDRDVNGAKGILLRALACGALIAPET

SEQ ID NO: 478 - protein, 601 aa, Powellomyces hirtus
PSPYLNTRATLAMSDLPPFCKKCTDADHSISDTPYHRDARNKLCRFFTPRKKRDRSAEPAAAQVATSMSARRPWWDGDLVDEYQKWWRPHEPQFGMNYPTTTTRHHTPRRCKGLLRDLPPEQYDSWFHHRKYHYPPENSDTLRHLHRTAPLPVQEKPKPKRVSNPETNTDARRSKGGRQRSKRIVPDNHVQRTWTVRVFPTKDQRVTLKLWMNAARVTWNWALGVLRRQYARHGKTFFSPTKFEGLKKAFVTCDENRMPRRIRWIRAAPCSVREATMQELAKSYEAQFKRYHETGNFTAPTFRSVKRPSCSITVPPQNWSKKPGKRWQCYVTLLANEGKLRVRTRDRKRVLAKYPEGPVREVKIVHCAGKWFMKVPIYRSVEPLREEATGHLVALDPGSNPLMTYYSPTHMESGSFGTKEDLNTLNGLQDKIDNISSIMSLGTLSKGQRRRLRQKRLLLHERIKNRVRECSNKMTLFFACRYQFIHASTFATEEMVPCMQNGKRRRINRQTVRDLLTWCHGPFKRALAYKMEEYTGLLVEFSTEEYTTKTCDACGKLQRVDGKEFHCVSVSCKHRVHRDVHGARGHALKNCVGKYAWVTAT

SEQ ID NO: 479 - protein, 252 aa, Powellomyces hirtus
DWPRNYGNSARSSGLPSKVNHEVDTLINQVDSVIEANRLVLNARNTLNALRLRYHGRDSEESYASQPDLRAAANDVASALQQLENTRVQARLRPEIKKLLADIQHLNAGIGRRVKALHRLAIKFVTAFYVILHPKFDKRIHWNRQTGPQSYVKHTFLRLSHSTYLAELRRQLKEQGRDVLIVNESFTTQACCVCGSLCRVGCKKIYYCHVCNTFRLRDRNAACSIGISNCTRILIWCWTDLETVVTLTLHPF

SEQ ID NO: 480 - protein, 202 aa, Dreissena rostriformis
DPGGRTFATVYDPINCNVFQVGIEEDKQYVISKLHNKIDHAHMHLTKEQNKKQQQAVRERIVSLKKLHLKLKTFVEDSHLKLSSHLVKEYQYVALGKINVAPLVKKKHLSKRAKRDLLYWQHYRFRQTLTNRTTNTECILDVQNEAYTSKTCGVCRAIDDNLGKSETFYCNQCKYNTHTDVNGARNILLKSLRMFPFEKQQR

SEQ ID NO: 481 - protein, 223 aa, Dreissena rostriformis
YTRRNASNDMIEMRVCGIDPGGRTFATVYDPIDCNVFQVGIEEDKQYVISKLHNKIDHAHKHLTEAQNKKQQQAVRERIVSLKKTHLKLKTFVEDIHLKLSSHLVKEYKYVALGKINVAQLVKTDRPKPLSPRTKRDLLYWQHYRFRQRLTNLTTNTECILEVQNEAYTSKTCGMCGEMDDNLGKSETFYCNQCNYNTHRDVNGARNILLKSLHMFPFEKKQQ

SEQ ID NO: 482 - protein, 354 aa, Neoporphyra haitanensis
FKSILAKDLAVHRNMTPPVPLRSPGCGGCPTSATSRLHGATRLPRRLVCWHCLHQGNRWFWPLGELALYGDLWGAEGTRGLRTARLHAVLQRGRFAAQVARELTGGRLRRVVDGAVVAVAIGDAATHGGALHLTRRLRHLCWTVDVPERNTSQTCDGCHSRLALVVPSPGSPPRVPRGTRVCGRRRGTRGRRGRPSTAHLAGWQRGAPLRDARRRAACREAGASAAAARAAAHPQPHAGPVFLAHRYSAVWCVKECVEPSCARGMVNRDVTAAANIGWRTWQSIRGRPCYPFRTAAHVRWVRVDWNDRPGGEEAARAAGGQPDCAGRAPADALVAASGEGDDAAADGGGAAPLA

SEQ ID NO: 483 - protein, 392 aa, Neoporphyra haitanensis
LHCGGGVRGCAAWPGRPRTRGDARQSRARCPPPAGAVYTLSRGRYHEACGNGMTARAVAAHRAAAVERITQLGDTAGVRTPEQVTEHASISVADPEAVRVASRAWLAARTQALYGDLWGAEGTRGLRTARLHAVLQRGRFAAQVARELTGGRLRRVVDGAVVAVAIGDAATRGGALHLTRRLRHLCWTVDVPERNTSAACDGCHTRLALVFPTPASPPQVPRGTRVCGRRRGVRGRTGRPSGVQRGWWDRSAPVRYARRRAACRAEAENAATARAAAHPRPHAGPVFRADRKAVVWCVKVCVEPTCARGMVNRDVTAAANLGWRTWQWIRGRPCHPFRTAAHVRWPRIDWNGRTGGAADGRGAGGAAADPLVTASGEGGGAAAAGGGEAPHA

SEQ ID NO: 484 - protein, 226 aa, Neoporphyra haitanensis
KLWRQRAEAAPAARADSDTEVLPPVDEAAAHGTIRTGDREQHLRATREWAALRETAANVERFGAEATRGLRAAALHQTYQQGRFAAAMARDLTGDFLRQVRRGTVVVVAMGDARVRGGDGWVRRYLRRLRWLVDQEEFNMSQACPSCHQKLVLVYPTGNSLPTLPAELFGPPVAAPGRRGRMAAGSRRGQPKRPRPSADHNKRRGSEVDTVRASACATAHAAAVAL

SEQ ID NO: 485 - protein, 609 aa, Neoporphyra haitanensis
AAGRGRARGRRRCRSSSGGGSGGGRGGGGGGDGGDGGGGTVVPLQAPRGRTGKRRTRPRAGEDTGARSPSAQRRRVEEVAGAGGGTTRDGSAAASQATAAARTARSPGSRGSPSAPAAPGAMAVADERHATRRCVRRVRGPARRARRDGRVELCAAVGGLLAATGRRRWRVPRHAAVRVARACLPRSTRGVVAADVDGGRAPLEAYRVDRAGAMEADCTAAEAYAAALRGLAGRVRAATHASRGHGAPPPAGAVYTLSRGRYHEACGNGMTARAVAAHRAAAVERITQLGDTAGVRTPEQVTEHASISVADPEAVRVASRAWLAARTQALYGDLWGAEGTRGLRTARLHAVLQRGRFAAQVARELTGGRLRRVVDGAVVAVAIGDAATRGGALHLTRRLRHLCWTVDVPERNTSAACDGCHTRLALVFPTPASPPQVPRGTRVCGRRRGVRGRTGRPSGVQRGWWDRSAPVRYARRRAACRAEAENAATARAAAHPRPHAGPVFRADRKAVVWCVKVCVEPTCARGMVNRDVTAAANLGWRTWQWIRGRPCHPFRTAAHVRWPRIDWNGRTGGAADGRGAGGAAADPLVAASGEGGGAAAAGGGEAPHA

SEQ ID NO: 486 - protein, 1394 aa, Neoporphyra haitanensis
RYRQRIATWLDRCGLAAQARCWAPLGAACRPPNLDATRDWTYNLTRVLNQHQTVPRSTRPPHPLPTSAALAMEPDEEEPGAGPQDEGPHGHGADADDALPPGDGAASGDDADPREVAELEAAVHLKQGRLRGLLRRMGEARARRPQLPDGAALDAALARMTAAAAAAAGAPHEASPTTDGAVAASGAALEAATTPAVAGATAWVDAHHPLDDDGLLAQRARRAASLIGSTSRGMARRVAEVEDRRGAAPGGRPCARCRQRSHKTGAATCPATAVGGDKNPHAYDRGEDPAASDPYACRATGTSSVMVPVAAVLRTLPASPDGTAHAVVRGGFLATAEHHTQLHFTLTLVWLNTVHTLFGAVKADGWAAALPGPAGWGEYWNWVAYAVCCRGAHGGSLPAGVKCGSCGRARDNTLCGPAARRLSVSYPALMDATRNAMDALASSFDAACHDHLPHGNSHARWRGVVTTIVTHTARTVAVATRRLAWRVATMVVDAADAPASGEEQRGRRRAAVYAAARSCLERGSDAPHAAHAAKLDALPPDVRAAALREIADARVRAQPAPVQGTPPLFPTGGAHVVARRWAEYIPYLLHVQAEGVVDKPFSLVPGKAATLHGYGTVTKARLGPLIRRAWPAHRELYEDVRRRGAAAIAGLLGLETARCTSGADLRSNGEGVVFTLSRPATAAEAEAADVAAVTRKANGSRVQSRVQGSPTTQLEKQGFPIAAVKTLTVVSADPGKATVLTAVSSGPTAAAWGDRPWVRRRRLARSRLVAADALTRAALALDAVVWRAAALAPAEAAAAGAAAAAAAAAAAAAAGGAPPGALTPSPAWRKRKAAPGGAEQRQPPCGNAATTGPPRGGAAGGTAAPAPSVRPPSERTARGPAASLRRGAVRRLRAVAQRLVVATGNGRWRVPRHAAVDVALGCLRRAAAGWVRPRVADGRPDGAAFAACKTAAAAQDVAAAGAFASALDGLTARVADAVGATRGWRAPPPAGAVYTLTRGRYTEAAGNGMTARAAAAEHRREAAQRLAALQLPPATTPEVVAAHDTVRTGDAAAVLAASRQWMESRRQPQYRAVWGAAATAGQRKARVHQVIRRRRLGEAVARELTGGRLRRVVNRSAVVVVVGQAATRGGATWLRRHLRRLCWMVDADEHNSSQACAGCRQQLAVVYASAAAPPPVPRGTLICGRRRGRRGRQGRPRAPPTAGWERTQPVRSAARRAACRAEAAKMAAERAVKHPPPARVVFRAPAAAGVWGVKRCVERACSRQLVNRDVNAAANMGWKALRQIRQLPCHPFMRPQRVRRPRLGGGDDGEAAGAAAADRAGDGACGRPPGAAVVAVATGDAGGEAAVGPDGDGGARTAVVADTHTVATTELARAAETGDGAPAVAGGGRATSVA

SEQ ID NO: 487 - protein, 764 aa, Neoporphyra haitanensis
KRNPSKTIIACEIGEYPPKGRTTIDRSILSIVTGSTRSSSRGRPPPARELSLGSKDRPPAHAFDPITSDLGGGGLAPPVTRPFGPGAPPDPFTGVGERGCDDALGGCGRPWGCGACRPLSRGRPLRAPQAYICHRAPRPRIWAQRLERARLVANDALLRAALAVDAVVTRVTGLSASATAAVEAAADAAAGIAPAVVPLQAPRGRTGKRRTRPRAGEDTGARSPSAQRRRVEEVAGAGGGTTRDGSAAASQATAAARTARSPGSRGSPSAPAAPGAMAVADERHATRRCVRRVRGPARRARRDGRVELCAAVGGLLAATGRRRWRVPRHAAVRVARACLPRSTRGVVAADVDGGRAPLEAYRVDRAGAMEADCTAAEAYAAALRGLAGRVRAATHASRGHGAPPPAGAVYTLSRGRYHEACGNGMTARAVAAHRAAAVERITQLGDTAGVRTPEQVTEHASISVADPEAVRVASRAWLAARTQALYGDLWGAEGTRGLRTARLHAVLQRGRFAAQVARELTGGRLRRVVDGAVVAVAIGDAATRGGALHLTRRLRHLCWTVDVPKRNTSAACDGCHTRLALVFPTPASPPQVPRGTRVCGRRRGVRGRTGRPSGVQRGWWDRSAPVRYARRRAACRAEAENAATARAAAHPRPHAGPVFRADRKAVVWCVKVCVEPTCARGMVNRDVTAAANLGWRTWQWIRGRPCHPFRTAAHVRWPRIDWNGRTGGAADGRGAGGAAADPLVAASGEGGGAAAAGGGEAPHA

SEQ ID NO: 488 - protein, 465 aa, Neoporphyra haitanensis
ATAAARTARSPGSWGSPSAPTAPGAMAVADERHAPRRCVRRVRGPARRARQDGRVELRAAVGGLQAATGRRRWRVPRHAAVRVARAWLPRSTRGVVAADVHGGSAPLEAYRVDRAGAMEADCTAAEAYAAALRGLAGCVRAATHASRGHGASPPAGAVYTLSRGRHHEACGNGMTARAVAAHRAAAVERITQLGDTAGVRTPEQVTEHASISVADAEAVRVASRSWLAVRTQALYGDLWGAEGTRGLRTARLHAVLQRGRFAAQVARELTGGRLRRVVDGAVAAVAIGDAAARGGALHLTRRLRHLCWTVDVPERNTSQACDGCHSRLALVFPSPGSPPRVPRGTRVCGRRRGTRGRRGRPSTAHPAGWQRGAPLRDARRRAACREAGAEAAAARAAAHPRPHAGPVFWAHRYSAVWCVKQCVEPSWARGMVNRDVTAAANIGWRTWQSVRGRPCYPFRTAAHVR

SEQ ID NO: 489 - protein, 1381 aa, Neoporphyra haitanensis
QVRPLSPRGGLPPDAWRPHISGAAPCRPRPPPPLGRQHQTVPRSTRPPHRLPTSAALAMEPDEEEPGAGPQDEGPHGHGADADDALPPGDGAASGDDADPREVAELEAAVHLKQGRLRGLLRRMGEARARRPQLPDGAALDAALARMTAAAAAAAGAPHEASPTTDGAVAASGAALEAATTPAVAGATAWVDAHHPLDDDGLLAQRARRAASLIGSTSRGMARRVAEVEDRRGAAPGGRPCARCRQRSHKTGAATCPATAVGGDKNPHAYDRGEDPAASDPYACRATGTSSVMVPVAAVLRTLPASPDGTAHAVVRGGFLATAEHHTQLHFTLTLVWLNTVHTLFGAVKADGWAAALPGPAGWGEYWNWVAYAVCCRGAHGGSLPAGVKCGSCGRARDNTLCGPAARRLSVSYPALMDATRNAMDALASSFDAACHDHLPHGNSHARWRGVVTTIVTHTARTVAVATRRLAWRVATMVVDAADAPASGEEQRGRRRAAVYAAARSCLERGSDAPHAAHAAKLDALPPDVRAAALREIADARVRAQPAPVQGTPPLFPTGGAHVVARRWAEYIPYLLHVQAEGVVDKPFSLVPGKAATLHGYGTVTKARLGPLIRRAWPAHRELYEDVRRRGAAAIAGLLGLETARCTSGANLRSNGEGVVFTLSRPATAAEAEAADVAAVTRKANGSRVQSRVQGSPTTQLEKQGFPIAAVKTLTVVSADPGKATVLTAVSSGPTAAAWGDRPWVRRRRLARSRLVAADALTRAALALDAVVWRAAALAPAEAAAAGAAAAAAAAAAAAAAGGAPPGALTPSPAWRKRKAAPGGAEQRQPPCGNAATTGPPRGGAAGGTAAPAPSVRPPSERTARGPAASLRRGAVRRLRAVAQRLVVATGNGRWRVPRHAAVDVALGCLRRAAAGWVRPRVADGRPDGAAFAACKTAAAAQDVAAAGAFASALDGLTARVADAVGATRGWRAPPPAGAVYTLTRGRYTEAAGNGMTARAAAAAHRREAAQRLAALQLPPATTPEVVAAHDTVRTGDAAAVLAASRQWMESRRQPQYRAVWGAAATAGQRKARVHQVIRRRRLGEAVARELTGGRLRRVVNRSAVVVVVGQAATRGGATWLRRHLRRLCWMVDADEHNSSQACAGCRQQLAVVYASAAAPPPVPRGTLICGRRRGRRGRQGRPRAPPTAGWERTQPVRSAARRAACRAEAAKMAAERAVKHPPPARVVFRAPAAAGVWGVKRCVERACSRQLVNRDVNAAANMGWKALRQIRQLPCHPFMRPQRVRRPRLGGGDDGEAAGAAAADRAGDGACGRPPGAAVVAVATGDAGGEAAVGPDGDGGARTAVVADTHTVATTELARAAETGDGAPAVAGGGRATSVA

SEQ ID NO: 490 - protein, 1440 aa, Neoporphyra haitanensis
RRSPDPPPPPPPLQPPLPRPPRLRSTWRTHRPPPPPLPFHAKCGCRGVDEIPRYCRARRVASPPAEPARGAPPRRLAPPYKRGRSLPSPPPATTGRQHQTVPRSTRPPHRLPTSAALAMEPDEEEPGAGPQDEGPHGHGADADDALPPGDGAASGDDADPREVAELEAAVHLKQGRLRGLLRRMGEARARRPQLPDGAALDAALARMTAAAAAAAGAPHEASPTTDGAVAASGAALEAATTPAVAGATAWVDAHHPLDDDGLLAQRARRAASLIGSTSRGMARRVAEVEDRRGAAPGGGPCARCRQRSHKTGAATCPATAVGGDKNPHAYDRGEDPAASDPYACRATGTSSVMVPVAAVLRTLPASPDGTAHAVVRGGFLATAEHHTQLHFTLTLVWLNTVHTLFGAVKADGWAAALPGPAGWGEYWNWVAYAVCCRGAHGGSLPAGVKCGSCGRARDNTLCGPAARRLSVSYPALMDATRNAMDALASSFDAACHDHLPHGNSHARWRGVVTTIVTHTARTVAVATRRLAWRVATMVVDAADAPASGEEQRGRRRAAVYAAARSCLERGSDAPHAAHAAKLDALPPDVRAAALREIADARVRAQPAPVQGTPPLFPTGGAHVVARRWAEYIPYLLHVQAEGVVDKPFSLVPGKAATLHGYGTVTKARLGPLIRRAWPAHRELYEDVRRRGAAAIAGLLGLETARCTSGADLRSNGEGVVFTLSRPATAAEAEAADVAAVTRKANGSRVQSRVQGSPTTQLEKQGFPIAAVKTLTVVSADPGKATVLTAVSSGPTAAAWGDRPWVRRRRLARSRLVAADALTRAALALDAVVWRAAALAPAEAAAAGAAAAAAAAAAAAAAGGAPPGALTPSPAWRKRKAAPGGAEQRQPPCGNAATTGPPRGGAAGGTAAPAPSVRPPSERTARGPAASLRRGAVRRLRAVAQRLVVATGNGRWRVPRHAAVDVALGCLRRAAAGWVRPRVADGRPDGAAFAACKTAAAAQDVAAAGAFASALDGLTARVADAVGATRGWRAPPPAGAVYTLTRGRYTEAAGNGMTARAAAAHRREAAQRLAALQLPPATTPEVVAAHDTVRTGDAAAVLAASRQWMESRRQPQYRAVWGAAATAGQRKARVHQVIRRRRLGEAVARELTGGRLRRVVNRSAVVVVVGQAATRGGATWLRRHLRRLCWMVDADEHNSSQACAGCRQQLAVVYASAAAPPPVPRGTLICGRRRGRRGRQGRPRAPPTAGWERTQPVRSAARRAACRAEAAKMAAERAVKHPPPARVVFRAPAAAGVWGVKRCVERACSRQLVNRDVNAAANMGWKALRQIRQLPCHPFMRPQRVRRPRLGGGDDGEAAGAAAADRAGDGACGRPPGAAVVAVATGDAGGEAAVGPDGDGGARTAVVADTHTVATTELARAAETGDGAPAVAGGGRATSVA

SEQ ID NO: 491 - protein, 622 aa, Neoporphyra haitanensis
SPPASSEAGGAAVQPNGLTGGVAATFYVSRPDTPAEAEARAADWARQQSTAGGRRKGGAGVRSAVHAGALTQLERSGLPLGTVRRMQVVGVDPGRSCILTVAPGECISTADLPARPAVDAMRAAWARRLGLDALNRACAALLCSKDDAAGDASATASGHHQQTHVKQGKRAASAVAGGGGRAAKRPQQTGARGTSDPPSAEQTGRTYQTAMPGRSHRRVRRGPNATHRRAGRTKLAAAVRRVLRRTRLHRWTVPRHEAEAVARRVVTHAASSSSALLERVEALPRRKDRRCLAPMPGIRYKVSAAQVREASGGSFKARAWKLWRQRAEAASAARAGSDTEVPPPVDEAAAHGTMRTGDREQHLRATREWAALRETAAYVERFGAEATRGLRAAALHQTIQRGRFAAATARDLTGGLLRQVRGGTVVVVAMGNARVRGGDGWVRRYLRRLCWLVDQDKFNTSQACPSCHEKLVLAYPTGNSPPTLPAELFGPKVADSHNAMDVSSPSSARQPRRPCIRQPWMETRFWLGCSAAAGGPACVPAAEFFLFYNFFPLPHRATNGRWPRWWRWGRRRRQQWCGCGSGVNSSSNGGGRGRVFEDAMVAQDVVRERVQQPNFIVLQKFH

SEQ ID NO: 492 - protein, 622 aa, Neoporphyra haitanensis
SPPASSEAGGAAVQPNGLTGGVAATFYVSRPDTPAEAEARAADWARQQSTAGGRRKGGAGVRSAVHAGALTQLERSGLPLGTVRRMQVVGVDPGRSCILTVAPGECISTADLPARPAVDAMRAAWARRLGLDALNRACAALLCSKDDAAGDASATASGHHQQTHVKQGKRAASAVAGGGGRAAKRPQQTGARGTSDPPSAEQTGRTYQTAMPGRSHRRVRRGPNATHRRAGRTKLAAAVRRVLRRTRLHRWTVPRHEAEAVARRVVTHAASSSSALLERVEALPRRKDRRCLAPMPGIRYKVSAAQVREASGGSFKARAWKLWRQRAEAASAARAGSDTEVPPPVDEAAAHGTMRTGDREQHLRATREWAALRETAAYVERFGAEATRGLRAAALHQTIQRGRFAAATARDLTGGLLRQVRGGTVVVVAMGNARVRGGDGWVRRYLRRLCWLVDQDKFNTSQACPSCHEKLVLAYPTGNSPPTLPAELFGPKVADSHNAMDVSSPSSARQPRRPCIRQPWMETRFWLGCSAAAGGPACVPAAEFFLFYNFFPLPHRATNGRWPRWWRWGRRRRQQWCGCGSGVNSSSNGGGRGRVLEDAMVAQDVVRERVLQPNFIVLQKFH

SEQ ID NO: 493 - protein, 622 aa, Neoporphyra haitanensis
SPPASSKAGGAAVQPNGLTGGVAATFYVSRPDTPAEAEARAADWARQQSTAGGRRKGGAGVRSAVHAGALTQLERSGLPLGTVRRMQVVGVDPGRSCILTVAPGECISTADLPARPAVDAMRAAWARRLGLDALNRACAALLCSKDDAAGDASATASGHHQQTHVKQGKRAASAVAGGGGRAAKRPQQTGARGTSDPPSAEQTGRTYQTAMPGRSHRRVRRGPNATHRRAGRTKLAAAVRRVLRRTRLHRWTVPRHEAEAVARRVVTHAASSSSALLERVEALPRRKDRRCLAPMPGIRYKVSAAQFREASGGSFKARAWKLWRQRAEAASAARAGSDTEVPPPVDEAAAHGTMRTGDREQHLRATREWAALRETAAYVERFGAEATRGLRAAALHQTIQRGRFAAATARDLTGGLLRQVRGGTVVVVAMGNARVRGGDGWVRRYLRRLCWLVDQDKFNTSQACPSCHEKLVLAYPTGNSPPTLPAELFGPKVADSHNAMDVSSPSSARQPRRPCIRQPWMETRFWLGCSAAAGGPACVPAAEFFLFYNFFPLPHRATNGRWPRWWRWGRRRRQQWCGCGSGVNSSSNGGGRGRVLEDAMVAQDVVRERVLQPNFIVLQKFH

SEQ ID NO: 494 - protein, 380 aa, Neoporphyra haitanensis
GTGGASACGDAREPRVARPPPPGAVYSLSRERYHEESGNGMTTRAVADHRAAAVARIAELGDAAGVRTPEQVTERATLCVGDAEAVRVASREWLAARCKPVYEAVWGSAATRGLREARLYGVLQRGRFAARVARELTGGRLRRVVNGSVVAVALGDAATRGGATQLWRRLRHLCWTVDVPERNTSAACDGCHTRLALVFPTPASPPQVPRGTRVCGRRRGVRGRTGRPSGVQRGWWDRSAPVRYARRRAACRAEAENAATARAAAHPRPHAGPVFRADRKAVVWCVKVCVEPTCARGMVNRDVTAAANLGWRTWQWIRGRPCHPFRTAAHVRWPRIDWNGRTGGAADGRGAGGAAADPLVAASGEGGGAAAAGGGEAPHA

SEQ ID NO: 495 - protein, 307 aa, Neoporphyra haitanensis
GLPVCGWCLTEAVARELTGGRLRRVVNRSAVVVVVGQAATRGGATWLRRHLRRLCWMVDADEHNSSQACAGCRQQLAVVYASAAAPPPVPRGTLICGRRRGRRGRQGRPRAPPTAGWERTQPVRSAARRAACRAEAAKMAAERAVKHPPPARVVFRAPAAAGVWGVKRCVERACSRQLVNRDVNAAANMGWKALRQIRQLPCHPFMRPQRVRRPRLGGGDDGEAAGAAAADRAGDGACGRPPGAAVVAVATGDAGGEAAVGPDGDGGARTAVVADTHTVATTELARAAETGDGAPAVAGGGRATSVA

SEQ ID NO: 496 - protein, 380 aa, Neoporphyra haitanensis
GTGGASACGDAREPRVARPPPPGAVYSLSRGRYHEESGNGMTTRAVADHRAAAVARIAELGDAAGVRTPEQVTERATLCVGDAEAVRVASREWLAARCKPVYEAVWGSAATRGLREARLYGVLQRGRFAARVARELTGGRLRRVVNGSVVAVALGDAATRGGATQLWRRLRHLCWTVDVPERNTSAACDGCHTRLALVFPTPASPPQVPRGTRMCGRRRGVRGRTGRPSGVQRGWWDRSAPVRYARRRAACRAEAENAATARAAAHPRPHAGPVFRADRKAVVWCVKVCVEPTCARGMVNRDVTAAANLGWRTWQWIRGRPCHPFRTAAHVRWPRIDWNGRTGGAADGRGAGGAAADPLVAASGEGGGAAAAGGGEAPHA

SEQ ID NO: 497 - protein, 668 aa, Neoporphyra haitanensis
HRRQYVEGCPCVGGASQSGPTAAAWGDRPWVRRRRLARSRLVAADALTRAALALDAVVWRAAALAPAEAAAAGAAAAAAAAAAAAAAAAGGAPPGALTPSPAWRKRKAAPGGAEQRQPPCGNAATTGPPRGGAAGGTAAPAPSVRPPSERTARGPAASLRRGAVRRLRAVAQRLVVATGNGRWRVPRHAAVDVALGCLRRAAAGWVRPRVADGRPDGAAFAACKTAAAAQDVAAAGAFASALDGLTARVADAVGATRGWRAPPPAGAVYTLTRGRYTEAAGNGMTARAAAAHRREAAQRLAALQLPPATTPEVVAAHDTVRTGDAAAVLAASRQWMESRRQPQYRAVWGAAATAGQRKARVHQVIRRRRLGEAVARELTGGRLRRVVNRSAVVVVVGQAATRGGATWLRRHLRRLCWMVDADEHNSSQACAGCRQQLAVVYASAAAPPPVPRGTLICGRRRGRRGRQGRPRAPPTAGWERTQPVRSAARRAACRAEAAKMAAERAVKHPPPARVVFRAPAAAGVWGVKRCVERACSRQLVNRDVNAAANMGWKALRQIRQLPCHPFMRPQRVRRPRLGGGDDGEAAGAAAADRAGDGACGRPPGAAVVAVATGDAGGEAAVGPDGDGGARTAVVADTHTVATTELARAAETGDGAPAVAGGGRATSVA

SEQ ID NO: 498 - protein, 380 aa, Neoporphyra haitanensis
GTGGASACGDAREPRVARPPPPGAVYSLSRGRYHEESGNGMTTRAVADHRAAAVARIAELGDAAGVRTPEQVTERATLCVGDAEAVRVASREWLAARCKPVYEAVWGSAATRGLREARLYGVLQRGRFAARVARELTGGRLRRVVNGSVVAVALGDAATRGGATQLWRRLRHLCWTVDVPERNTSAACDGCHTRLALVFPTPASPPQVPRGTRVCGRRRGVRGRTGRPSGVQRGWWDRSAPVRYARRRAACRAEAENAATARAAAHPRPHAGPVFRADRKAVVWCVKVCVEPTCARGMVNRDVTAAANLGWRTWQWIRGRPCHPFRTAAHVRWPRIDWNGRTGGAADGRGAGGAAADPLVAASGEGGGAAAAGGGEAPHA

SEQ ID NO: 499 - protein, 1380 aa, Neoporphyra haitanensis
QVRPLSPRGGLPPDAWRPHISGAAPCRPRPPPPLGRLHQTVPRSTRPPHRLPTSAALAMEPDEEEPGAGPQDEGPHGHGADADDALPPGDGAASGDDADPREVAELEAAVHLKQGRLRGLLRRMGEARARRPQLPDGAALDAALARMTAAAAAAAGAPHEASPTTDGAVAASGAALEAATTPAVAGATAWVDAHHPLDDDGLLAQRARRAASLIGSTSRGMARRVAEVEDRRGAAPGGRPCARCRQRSHKTGAATCPATAVGGDKNPHAYDRGEDPAASDPYACRATGTSSVMVPVAAVLRTLPASPDGTAHAVVRGGFLATAEHHTQLHFTLTLVWLNTVHTLFGAVKADGWAAALPGPAGWGEYWNWVAYAVCCRGAHGGSLPAGVKCGSCGRARDNTLCGPAARRLSVSYPALMDATRNAMDALASSFDAACHDHLPHGNSHARWRGVVTTIVTHTARTVAVATRRLAWRVATMVVDAADAPASGEEQRGRRRAAVYAAARSCLERGSDAPHAAHAAKLDALPPDVRAAALREIADARVRAQPAPVQGTPPLFPTGGAHVVARRWAEYIPYLLHVQAEGVVDKPFSLVPGKAATLHGYGTVTKARLGPLIRRAWPAHRELYEDVRRRGAAAIAGLLGLETARCTSGADLRSNGEGVVFTLSRPATAAEAEAADVAAVTRKANGSRVQSRVQGSPTTQLEKQGFPIAAVKTLTVVSADPGKATVLTAVSSGPTAAAWGDRPWVRRRRLARSRLVAADALTRAALALDAVVWRAAALAPAEAAAAGAAAAAAAAAAAAAAGGAPPGALTPSPAWRKRKAAPGGAEQRQPPCGNAATTGPPRGGAAGGTAAPAPSVRPPSERTARGPAASLRRGAVRRLRAVAQRLVVATGNGRWRVPRHAAVDVALGCLRRAAAGWVRPRVADGRPDGAAFAACKTAAAAQDVAAAGAFASALDGLTARVADAVGATRGWRAPPPAGAVYTLTRGRYTEAAGNGMTARAAAAHRREAAQRLAALQLPPATTPEVVAAHDTVRTGDAAAVLAASRQWMESRRQPQYRAVWGAAATAGQRKARVHQVIRRRRLGEAVARELTGGRLRRVVNRSAVVVVVGQAATRGGATWLRRHLRRLCWMVDADEHNSSQACAGCRQQLAVVYASAAAPPPVPRGTLICGRRRGRRGRQGRPRAPPTAGWERTQPVRSAARRAACRAEAAKMAAERAVKHPPPARVVFRAPAAAGVWGVKRCVERACSRQLVNRDVNAAANMGWKALRQIRQLPCHPFMRPQRVRRPRLGGGDDGEAAGAAAADRAGDGACGRPPGAAVVAVATGDAGGEAAVGPDGDGGARTAVVADTHTVATTELARAAETGDGAPAVAGGGRATSVA

SEQ ID NO: 500 - protein, 847 aa, Neoporphyra haitanensis
GLPVCGWCLTAQPAPVQGTPPLFPTGGAHVVARRWAEYIPYLLHVQAEGVVDKPFSLVPGKAATLHGYGTVTKARLGPLIRRAWPAHRKLYEDVRRRGAAAIAGLLGLETARCTSGADLRSNGEGVVFTLSRPATAAEAEAADVAAVTRKANGSRVQSRVQGSPTTQLEKQGFPIAAVKTLTVVSADPGKATVLTAVSSGPTAAAWGDRPWVRRRRLARSRLVAADALTRAALALDAVVWRAAALAPAEAAAAGAAAAAAAAAAAAAAGGAPPGALTPSPAWRKRKAAPGGAEKRQPPCGNAATTGPPRGGAAGGTAAPAPSVRPPSERTARGPAASLRRGAVRRLRAVAQRLVVATGNGRWRVPRHAAVDVALGCLRRAAAGWVRPRVAHGRPDGAAFAACKTAAAAQDVAAAGAFASALDGLTARVADAVGATRGWRAPPPAGAVYTLTRGRYTEAAGNGMTARAAAAHRREAAQRLAALQLPPATTPEVVAAHDTVRTGDAAAVLAASRQWMESRRQPQYRAVWGAAATAGQRKARVHQVIRRRRLGEAVARELTGGRLRRVVNRSAVVVVVGQAATRGGATWLRRHLRRLCWMVDADEHNSSQACAGCRQQLAVVYASAAAPPPVPRGTLICGRRRGRRGRQGRPRAPPTAGWERTQPVRSAARRAACRAEAAKMAAERAVKHPPPARVVFRAPAAAGVWGVKRCVERACSRQLVNRDVNAAANMGWKALRQIRQLPCHPFMRPQRVRRPRLGGGDDGEAAGAAAADRAGDGACGRPPGAAVVAVATGDAGGEAAVGPDGDGGARTAVVADTHTVATTELARAAETGDGAPAVAGGGRATSVA

SEQ ID NO: 501 - protein, 426 aa, Neoporphyra haitanensis
DGLTARVADAVGATRGWRAPPPAGAVYTLTRGRYTEAAGNGMTARAAAAHRREAAQRLAALQLPPATTPEVVAAHDTVRTGDAAAVLAASRQWMESRRQPQYRAVWGAAATAGQRKARVHQVIRRRRLGEAVARELTGGRLRRVVNRSAVVVVVGQAATRGGATWLRRHLRRLCWMVDADEHNSSQACAGCRQQLAVVYASAAAPPPVPRGTLICGRRRGRRGRQGRPRAPPTAGWERTQPVRSAARRAACRAEAAKMAAERAVKHPPPARVVFRAPAAAGVWGVKRCVERACSRQLVNRDVNAAANMGWKALRQIRQLPCHPFMRPQRVRRPRLGGGDDGEAAGAAAADRAGDGACGRPPGAAVVAVATGDAGGEAAVGPDGDGGARTAVVADTHTVATTELARAAETGDGAPAVAGGGRATSVA

SEQ ID NO: 502 - protein, 1381 aa, Neoporphyra haitanensis
QVRPLSPRGGLPPDAWRPHISGAAPCRPRPPPPLGRQHQTVPRSTRPPHRLPTSAALAMEPDEEEPGAGPQDEGPHGHGADADDALPPGDGAASGDDADPREVAELEAAVHLKQGRLRGLLRRMGEARARRPQLPDGAALDAALARMTAAAAAAAGAPHEASPTTDGAVAASGAALEAATTPAVAGATAWVDAHHPLDDDGLLAQRARRAASLIGSTSRGMARRVAEVEDRRGAAPGGRPCARCRQRSHKTGAATCPATAVGGDKNPHAYDRGEDPAASDPYACRATGTSSVMVPVAAVLRTLPASPDGTAHAVVRGGFLATAEHHTQLHFTLTLVWLNTVHTLFGAVKADGWAAALPGPAGWGEYWNWVAYAVCCRGAHGGSLPAGVKCGSCGRARDNTLCGPAARRLSVSYPALMDATRNAMDALASSFDAACHDHLPHGNSHARWRGVVTTIVTHTARTVAVATRRLAWRVATMVVDAADAPASGEEQRGRRRAAVYAAARSCLERGSDAPHAAHAAKLDALPPDVRAAALREIADARVRAQPAPVQGTPPLFPTGGAHVVARRWAEYIPYLLHVQAEGVVDKPFSLVPGKAATLHGYGTVTKARLGPLIRRAWPAHRELYEDVRRRGAAAIAGLLGLETARCTSGADIRSNGEGVVFTLSRPATAAEAEAADVAAVTRKANGSRVQSRVQGSPTTQLEKQGFPIAAVKTLTVVSADPGKATVLTAVSSGPTAAAWGDRPWVRRRRLARSRLVAADALTRAALALDAVVWRAAALAPAEAAAAGAAAAAAAAAAAAAAGGAPPGALTPSPAWRKRKAAPGGAEQRQPPCGNAATTGPPRGGAAGGTAAPAPSVRPPSERTARGPAASLRRGAVRRLRAVAQRLVVATGNGRWRVPRHAAVDVALGCLRRAAAGWVRPRVADGRPDGAAFAACKTAAAAQDVAAAGAFASALDGLTARVADAVGATRGWRAPPPAGAVYTLTRGRYTEAAGNGMTARAAAAAHRREAAQRLAALQLPPATTPEVVAAHDTVRTGDAAAVLAASRQWMESRRQPQYRAVWGAAATAGQRKARVHQVIRRRRLGEAVARELTGGRLRRVVNRSAVVVVVGQAATRGGATWLRRHLRRLCWMVDADEHNSSQACAGCRQQLAVVYASAAAPPPVPRGTLICGRRRGRRGRQGRPRAPPTAGWERTQPVRSAARRAACRAEAAKMAAERAVKHPPPARVVFRAPAAAGVWGVKRCVERACSRQLVNRDVNAAANMGWKALRQIRQLPCHPFMRPQRVRRPRLGGGDDGEAAGAAAADRAGDGACGRPPGAAVVAVATGDAGGEAAVGPDGDGGARTAVVADTHTVATTELARAAETGDGAPAVAGGGRATSVA

SEQ ID NO: 503 - protein, 380 aa, Neoporphyra haitanensis
GTGGASACGDAREPRVARPPPPGAVYSLSRGRYHEESGNGMTTRAVADHRAAAVARIAELGDAAGVRTPEQVTERATLCVGDAEAVRVASREWLAARCKPVYEAVWGSAATRGLREARLYGVLQRGRFAARVERELTGGRLRRVVNGSVVAVALGDAATRGGATQLWRRLRHLCWTVDVPERNTSAACDGCHTRLALVFPTPASPPQMPRGTRVCGRRRGVRGRTGRPSGVQRGWWDRSAPVRYARRRAACRAEAENAATARAAAHPRPHAGPVFRADRKAVVWCVKVCVEPTCARGMVNRDVTAAANLGWRTWQWIRGRPCHPFRTAAHVRWPRIDWNGRTGGAADGRGAGGAAADPLVAASGEGGGAAAAGGGEAPHA

SEQ ID NO: 504 - protein, 283 aa, Neoporphyra haitanensis
LIDQDEFNTSQACPSCHQKLVLVYPTGNSPPTLPAELFDPPVAAPGRRVRMAAGSRRGQPKRSRPSADHETRRGSEVDTFRASARATAHAAAVARRAVALASCAVEDRGLYTDRSRSSAWSVKGCITEGGPARPDFVNRDCIAAVNMAWAIARRLTYTNVWPFKRPGRMRWSWCIICPPDRAPVPRQRRERATVRVDAWPPPGTKVGAAGDGGGAGASGGGSGGGACGADRDVPRGGLRCAPRRREAPLGDSPVAVDSAHDGARRTGTVAAEEPRGPVDAAGR

SEQ ID NO: 505 - protein, 768 aa, Saccharina japonica
GVQTSQMSSQLIMVQPSLEGNPRKKKKRKTATHEASPKTVPGFLQTVVRLYPTKCLPASGNLPRSYKGTFCCRLFSKVRFGEQVSQLLRTRTVNVGFQSATTYENRDTFQTKVDEAVDHFSRERVLASLFANFLFMERLRDGSIIPEPDEKFYNSCLSSCIKSAGGGLNEDFDRFSVLTGLARLEPPKKLNLSQIRRYEAISMATSASTRAQHHTEKRRIVITRWFLRGLVSRRDMVYKKYATKLYNLAKKIIVQFDGTIEKEQELRKDALDVDPDTDIASITEFAQKERDFSLRVSGDETCAPTIKHLNWMFKTYVAGSRRRYEEVVSRSHAFSPGEDKASRKQRDEFVKKELGKEDNCAPPRDTAVLPICSSGSVFIRIDTKTLKSWGFWHSDDAWWYNNVLQPFSKAANIKCLKSEENAKYASNQQGYLSSLLESGPAKCPWMVGESFLTDGVQIKMLLLTLRHTRKAFPGSSELNDAGYNKLPRADAPLESLLRVGRGVYNIKSLTESTRLPGDLVVMSADPGQAKVINVCSATCEEWARRDPKVILRTATCVFGDDYRRDTRASCSDEYETSRRRDRPYGKAIDRLRNEKKRTSCLDTFIRYCRSWFINGPVVAKETLVHERKLNRFSRFRATQKTLAKIANRYMGTVGEACRVMLFGKASFRAQKGRASAPRKAMIREMASRGVVLMVGEYNTSKKCPGCLEDTVEDKERRIRSCKNFKVGYPEESCKLHPLTQEFEMDRDDVGSTNIGMRGFGLLLGQKWF

SEQ ID NO: 506 - protein, 633 aa, Saccharina japonica
NIYVLYTNKSARIGLLRAGCSSRLPRPRKGMTSPEPHWHPGETPGRSGSGDLEMEDARENESTTSETSMNGSDPLSNPQNQNTMRAISTPESAHPSRPPTLSDRSRTSREVTRTTRLSRISDPDSTTDARTSRPFWDASTLAMSRRLSCPTGIGSVGTDLNSSNSSVNSTARRSWSTTSQKLRGPSKNSLKISWPSAISSSRETMGGGEAGTQKSVKDVRARKIKLDPSPEWKERLRKWMGTARWTYNRCLDYYKKGNCRINKTDFRSKVVGGWNHGDPKRRTGKKKKKRGLKRGNWSIPKKTFKRECKTSWVLETPFEIRDSAMVDLYNGFVTNLKKREKNPSHTFDMSFRSRRDVQVIKIPGACVKNGYMFKKTCGKSKLKGFEDWTSFAGEIVIQMDRSKNFYACVTKQSDVTPPRVENHEDLKVVALDPGVRTFNTGVDSKGNVTEFAPGDVGRIYRLCHHMDLLQSKAFDKSVKSKKRYRLRKAWHRAIKRVKDLVTDVRNKTVKHLCKNYDVIFLPEFNTKDMVNRAKRNIGNGTARGMMTWSHYKFKELLKTTALREGVKLVIVTEEFTSKTCSCCGHLHHNLGRSKVFSCPSCPVVMDRDENGARNILMKSCVENRLTLTWKERV

SEQ ID NO: 507 - protein, 246 aa, Saccharina japonica
RRNLNYRANLPALPSPKTGRVDIFLEYVRAALESMGQKLEVANSKRVRAVRSTVDSMGGGRQFSRASPIESFVTSSRVTTGTDVVVTYGAASFNCKGIHPGRVKTLRSEVEKRVGIGTGPSGGGGAASGEEVNEDYTSKVCSKCHEVLTSMLDERRGIFNSVRVRYCSTTSCFAPGLPVKSCRERLSQATSGTSSSTRTRTTASDQIYSRGPTTALPRSLNPQHFFVVCLYNLFGGKCHDRQASKA

SEQ ID NO: 508 - protein, 281 aa, Nymphicus hollandicus
RQAEKVGAVQPGEEKAVWRPQSSLVSGSQARILNHKNDFRIGRTTLSYDSDDKYYLSMQLASDTPFVKEKPKTGKKLGVDLNLSVFLADSNGQTINNPRFYQKMTQRLAKAQRKLSRKKVRAIKEKRSLRSAKNYQKQRRLIAKLHEKIKNRRTDFVQKLTTALINSHDLVVAERLQSKNLLKNHALAKSIQDAGWREFLASMEYKAKLYGKSFIMVDPKNTTQRCSQCGFIKEGKDKITLSGNKLHHTKHNEYVCYECGYQADRDINAAKNILAKGLKEW

SEQ ID NO: 509 - protein, 241 aa, Nymphicus hollandicus
LSVIMECDCQTFQKTGQKIGIDLGLHDLMILSNGIKYKKYTTKYLDNEAKQWQRKMAYRKNKATISVRQWNYNHDANHSQELEDYSNWQRAKQIKATYQDKAKRKRNMCLQQITTDLVKNYDVIVMEYLKVKNMMKNDHLADSIAHACWRKIRDMLTYKCQWHGKQLIVINPRNTSRVCHHCHHLQEQFKGMPTNEWLNTRQWYCEKCGILQDRDIALTKGILSNPELEIKTFSPFFNLQE

SEQ ID NO: 510 - protein, 276 aa, Nymphicus hollandicus
SFLTLFVMKNKFKVIVQYKTNKTINYKPDNGKYIGIDPGIDNAFTCVDSTMNHHPLIINGKVIKSINQYYNKRRSQLYRLHAQYNQNYRVIHTKQGLKKVYQESNATQKLTQWRNAKLHQFAHKATKRIIDYALNCGTNTIVIGNNKDWKRFVKMGKKNNQNFVGIPHQKMIDMLTYKANLQGISVITTSEGYTSQTSFLDNEKPCYQNGNASRKAKGLVPFKRRIHRGLFRSNQNILINADVNGAYQIIRKVCPKVISDGIVGTVSCPIKYSPLI

SEQ ID NO: 511 - protein, 518 aa, Neopyropia yezoensis
KQWRACSDTEAGQVAAAVAGLVAAAGDVGGVAGHLPPVDLAAAHDTMRTGDDGKYLQATLELAARRDTAAYGERFSAQATRHLRAALVRMAIQLGHFAASVARDLTSGLLRQVRGGGAVVVAMGTARVRGGDAWLRRHLRRLCWFVDLDEFNTSQACSECHDKMVLIYSTANSPPKIPRELYGPPAGPLPSTRRVRMVAGSRRGRPKRALPSATHVTGRGPDPDAYRAAVRATARAEAVARRAAALAPCAVEDRAVHADPRRLSEWAAKGCYKCSLAAPQGPGHPAPHPPAIRNRDDVAARNMAWVAARRLTGTIVWPFKRPFGMRWAWTTKRPPSGVPVPPVRRTRATTRVDVWPVLAAVDTVVDGGGGGGGGGGGGGGGGGGGGGCGGGGGGGGGGGGGGGGGCGGGGGGGGRGVVDGDATAASCTTRRGAPGGERVVAAGSAMDGVRRAETGATDAPRGLVDTAKRKDSAHLARDPHLPRGASPAPFFADEPIMGNCRPFTSRLDAGFSRGPFPG

SEQ ID NO: 512 - protein, 671 aa, Neopyropia yezoensis
GHNAVNHIATVVFTLTGPATAAEAAAAYVAESTRKADGSRVQQRVAGSPTTQLEKQGFPVAAVKTLTVVSADPGNAAILTAVLSGPTAAAWGDRPWVRCRRLARSQLVAANALTRAALALDAVVWRTASLAPAEAAAAGAAAAAAAGARPGALPPTPGRKKRKAGPGGAEQRQMPCGKAAMSGPPSRDAAGETAANASPARPPSARTVRGPAASLRRGAMRRLQAAAQCLVAATGNGRWQMPRHAAVNVALGCLRRAAAGWVRPLVGDGRPDGAAYAASKTAAVAQDVATAGAFASALDGLTVRVPHAVRATRAWHAPPPAGAVYTPTKGRYTEAAGNGMTSRAATAHRREAAQGLSALRPPPATTPESVAAHETVRTGDAAAVLASSRQWMESRRQSRYRVAWGDAATAGQRKARVHQVIQRRRLDEAVARELTGGRLRRVVNRSAVVPVVGQAATQGGATWLRRHLRRLCWIVNADEHNSSQACAGCRHQLAIVYASAASPPCVPRGTMISGRRGGSRGRQGPPRAPPTAGWERTQPVCSATGRAACRTEGAKLAAERAAKHAPPTGVVFRAPAAAGVWGVKRCVERTCPQMLVIRDVNAAANMGWKALQQIRQLPCHPFVRPQQVRRPRPGGGNGREADTAPTDTLGTAESGDGRPAAAGGGAVASTA

SEQ ID NO: 513 - protein, 997 aa, Neopyropia yezoensis
RGAHGGSLPAGVKCGSCGRARDNTLCGPAARRLLVSYPALMDATRNAMDALASSFDAACRHHEPHGNSLARWRGVVTTIVTHTARTVAVATRRLAWRVATKVVDAADAPACGDEQRGRRRAAVYTAARSCLERERDAPRAAHAAKLEALPSDVRAAALTEIADARARAQLAPAQGIPPLFPTGGAHAVERRWAQNIPYLLHVQVEGVVDKPFSLVPGKVATLHGYSTVTKARLGPLIQRAWLTHRELYDDVRRRGAAATAGLLGLETVRCTASADLRSNGEGVVFTLLRPATAAEAEAADVAAATRKANGSRVQQRVAGSPTTQLEKQGFPAATVETLTVVSADPGKATVLTAVSSGPIAAAWGDRPCVRRRRLARSRLMAADALTRAALALDAVVWWAAALAPADAAAAGAAPAPAAAGARPGALPPLPARRKRKAGPGGAEQRQPPCGKAARTGPPRGGAAGGTASPAPPARPRSARTARGPAASLRRGAVRRLRAAAQRLVATTGNGRWRVPRHAAVEVALGCLRRAAAGLGRPRVEGGQPDGAAFAACKTAAAEQDVAAAGAFAFALDGLTARVADAVGATRGWRAAPPTGAVYTLSRGRYTEAAGNGMTARAAAAHWREAAQRLAELQLPPATTPEVVAAHDTVRTGDAAAVLAASRQWMESRRQPQYRAVWGAAATAGQRKARVHQVIQPRRLGEAVARELTGGRLRRGINRSAVVVVVGQAATRGGATWLRRHIRRLCWMVDADEHNSSQACAGCRQQLAVVYALTAAPPPEPRGTLICGRRRGRRGRQGRPRAPPTAGWERTQPVRSAARRAACRAEGANMAAERAVKHPPPAGVVFRAPDAAGVWGVKRCVERACARRLVNCDVNAAANMGWKALRQMRQLPCHPFVRPQRVRRPVLEGGDDGEAAGATPAGRAVGGDGGRPPGAAVVAGATGDAGREGAVGPGGDGGARAAVVADTHTVASTELSGAAGAGDGAPAVAGGGGATFVA

SEQ ID NO: 514 - protein, 1431 aa, Neopyropia yezoensis
AKAARQPTGARGGASILRSAPCPRRSVGLGVAGGRRREGEERGGGGGRGGGAGGRGAGGGGWGGGGGGGGGEGWEDLDRRHPDGPCSPSPASTARVRQRVRTPARMVPCQTINRAVGGAPWFPIFADPLSHRRQSHPPTLLTVVPTHITRSSASTPPPPPPPGFTMNDDDDGSDEDIGVDGLEGDTTSDEEWDPAPEQAYVQDARNVVTLKRAVLSASLCRLQNVSAPHGGDAASSADWSAAVAQLQQAAKDEEAAGPLDGAGEDLVAAITGAAKAVSVYCGGRAAPSEAEVELAARAKTAAGLLDVAAAGLPRREAATDAPPACKGRTQKCSGCGELGHKVTSCKAPAGAGPAAAAAAAAAAAAAVPAAAAAAASKCRVCLRGGHSSGDAACPVQRRCKGVPAAYDRGVDPDCKDWLQSTGRQTRACTVPVGDLARAVFGDDKDYVDTRAAVETALQAELEDLSGAATKLRFLMLRVLDVALRRLVSTVADAAADDADWTGAVPANWAPVWLWLAYACGCEVVSGSPLQAGTVCAGCGKGRANTRMARARSVVTTSHLLLAEALSYALTEVMAVTAAACNRYLPVSNNTARWEPVATIVATHAGRCVDAACRKLGAKAAKDALAASPAATAAPAGGSAWDMERRLTRWAAARFRAGTADKATPGRRGLDGVRQHLVQALAQRVAVMRAAMPPSVAGLFSATPVKKRRWWAYVPFLLHVLNVGVWSPYALIPGARAVLHGHGTLVPEKMLALLRAVSAATGVGVRGHPSLRACPELRTGGAAVLAAMAAVGGRANRAASQLSTDGVAVTFFLSRPDTAAEAEARAVAWAKKLDGGGRARDRGGKGFASRAGVLTQLERAGLPLARVRWLQMVGGDPGRSAVLSASPGERVATADLPARPVVAAMRAAWSLHMGLDALNRAAVALLRGAGVQDGVAADATVPDGHPPGGSRKRAAAGALAAGAGTGGSRFKRQARRSSPEGSDDDAAAVAPAAAGATTPTEAKTYQTASPGGGHGRVRRGPQASIRRACRTQLATSVRRVLRRTRLSRWTVPSHEAEKVARWLVDPTAAAGDSDSGTTPDAPLQDRVDALPRRKGCRRLAPVPGLRDSLSAAYFREASGGNFSARAWKQWRARSGTGAGPVAAAVARLVAAAVGDGGGVAGHLPPVDLAAAHGTMRTGDDGRHLPATLAWAARWDTAAYGQRFGAQATRHQRTARVRKAIQRGRFAASVARDLTGGLLRQVRGGGAVVVAMGTARVRVEDAWLRRHLRRLCWFVDQDGFNTSQACPECHDKMVLIYSTGNSPPKTSRELYGPPAGPLPSTRRVRMAAGSRRGRPKRALPSATHVTRRGPDPDAYREAVRATARAASVARRAAALAACAVKDRAVYADPRRLSEWAARGCYTCSLATPQGPGHPAPHLPVIRNRDDVAARNIA

SEQ ID NO: 515 - protein, 650 aa, Neopyropia yezoensis
LNRAAVALLRGEGVQDGVAAAASMPEGHLPGGSRKRAAAGAPAAGAGIGGSLSKRHTRRSSPEGSDDDAVAVAPAAAGATTPPEAKTYQTASPGGGHGRVRRGPQASIRRARRTQLATSVRRVLRRTRLSRWTVPRHEAEKVARWLVDPTAAAGDSASGTNPDAPLQDRVDALPRRKRCRRLAPVSGLRYSLSAAHFREASGGNFLARAWKQWRARSGTEAGLVAAAVAGLVAAAGDGGGVTGHLPPVDLAAAHGTMRTGDDGKHLQATLEWAARRDTAAYGQRFGAQATPNLRTERVRKAIQRGRFAASVARDLTGGLLRQLRGGGAVVVAMGTARVRRGDAWLCRQLRRLCWFVDQDEFNTSQACSECHEKMVLIYPTGNSPPKIPRELNGPPAGPLPSTRRVRMAAGSRRGRPMRALPSATHVTRRGPDPDAYHDAVRATARAAAVARRAAALAACAVEDRGIYADPKRLSEWAAKGCYTCSLAAPRGPGHPAPHPPVIRNRDDVAARNIAWVAARRLTGTNVWPFKRPFGMRWAWTTKRPPSGVPVPPVRRTRATTRVDVWPVLAAVDTVVDGRGGGGGDGGGGGGGGGGGRRVVDGGAPAASCTTRRGAPGGEQVAAAGSAMDGVRRAETGATDALRGLVDTARR

SEQ ID NO: 516 - protein, 463 aa, Neopyropia yezoensis
GARSCTEAGPVAAAVAGLVASAGDRGGVAGHLPPVDLAAAHGTTRTGDDGKHLPATLEWGARRDTAAYGQRFGAQATQHLRAARVRKAIQRGRFAASVARDLTDGLLRQIRGGGAVVAAIGTERVRGGDAWLRRHLRRLCWFVDQDEFNTSQACSECHDKMVLIYWTGNSPPKIPRELYGPPAGSPASTRRVRMVAGSRRGRPKRALPSATHVTRRGPDPDAYRAAVRATARAAAVARRAAALATCAVEDRAVHADSRRLSEWAAKGCYTCSLAAPQGPDHPAPHLPVIRSRDDVAARNMAWVAARGLTCTDVWPLKRPFGMRWAWTTKRPPSGVPVPPVRRTRPTTRVDVWPVLAAVDTVVDGGGGGGGGGGGGGGGGGGGGGGGGGGGGGGGGGGGGGGGGGGGGGRGVVDGHATAASCTTRRGAPGGERVAAAGSAMDGVRRAETGATGAPRGLVDTARR

SEQ ID NO: 517 - protein, 489 aa, Neopyropia yezoensis
GPPSRDAAGATAAPASPARPPSARTVRGPAASLRRGAMRRLQAAAQCLVAATGNGRWRVPRHAAVNVALGCLRRAAAGWVRPRVPDGRPDGAAYAASKTAAVAQDVATAGAFASALDGLTVRVAHAVRATRGWHAPPPAGAVYTLTKGRYAEAAGNGMTSRAAAAHRREAAQRLSALQPPPVTTPEAVAAHETVRTGDAAAVLAASRQWMESRRQPRYRAVWGDAATACQRKARVHQVIQRRRLGEAVARELTGGRLRRVVNRSAVVLVVGQAATRGGATWLRRHLRRLCWMVDADEHNSSQACAGCRHQLAIVYASAAAPPRVPRGTMICGRRRGSRGRQGRPRAPPTAGWERTQPVRSATGRAACRAEGAKLAVERAAKHPPPTGVVFRAPAAAGVWGVKRCVERTCPQMLVNRDDNAAANMGWKALQQIRQLPCPPFVRPQQVRRPHPGGGNGREADTAPTDTLGKAESGDGLPAAAGGGAVASTA

SEQ ID NO: 518 - protein, 518 aa, Neopyropia yezoensis
KQWRACSDTEAGQVAAAVAGLVAAAGDVGGVAGHLPPVDLAAAHDTMRTGDDGKYLQATLELAARRDTAAYGERFSAQATRHLRAALVRMAIQLGHFAASVARDLTSGLLRQVRGGGAVVVAMGTARVRGGDAWLRRHLRRLCWFVDLDEFNTSQACSECHDKMVLIYSTANSPPKIPRELYGPPAGPLPSTRRVRMVAGSRRGRPKRALPSATHVTGRGPDPDAYRAAVRATARAEAVARRAAALARCAVEDRAVHADPRRLSEWAAKGCYKCSLAAPQGPGHPAPHPPAIRNRDDVAARNMAWVAARRLTGTIVWPFKRPFGMRWAWTTKRPPSGVPVPPVRRTRATTRVDVWPVLAAVDTVVDGGGGGGGGGGGGGGGGGGGGGCGGGGGGGGGGGGGGGGGCGGGGGGGGRGVVDGDATAASCTTRRGAPGGERVVAAGSAMDGVRRAETGATDAPRGLVDTAKRKDSAHLARDPHLPRGASPAPFFADEPIMGNCRPFTSRLDAGFSRGPFPG

SEQ ID NO: 519 - protein, 498 aa, Neopyropia yezoensis
KQWRACSDTEAGQVAAAVAGLVAAAGDVGGVAGHLPPVDLAAAHDTMRTGDDGKHLQATLELAARRDTAAYGERFSAQATRHLRAALVRMAIQLGHFAASVARDLTSGLLRQVRGGGAVVVAMGTARVRGGDAWLRRHLRRLCWFVDLDEFNTSQACSECHDKMVLIYSTANSPPKIPRELYGPPAGPLPSTRRVRMVAGSRRGRPKRALPSATHVTGRGPDPDAYRAAVRATARAEAVARRAAALAPCAVEDRAVHADPRRLSEWAAKGCYKCSLAAPQGPGHPAPHPPAIRNRDDVAARNMAWVAARRLTGTIVWPFKRPFGMRWAWTTKRPPSGVPVPPVRRTRATTRVDVWPVLAAVDTVVDGGGGGGGGGGGGGGGGGGGCGGGGGGGGRGVVDGDATAASCTTRRGAPGGERVVAAGSAMDGVRRAETGATDAPRGLVDTAKRKDSAHLARDPHLPRGASPAPFFADEPIMGNCRPFTSRLDAGFSRGPFPG

SEQ ID NO: 520 - protein, 587 aa, Neopyropia yezoensis
QARRLRDGNGTKSRGGVTSLEHHAAAMGLPLEGSAKKCVVGVDPGVNDIYTAYSLGLDPDLVVVPSPHVFAYRSERAWTVAAHSLARAARALIRLAAAFASPSQAQAIKTAAEARRAALPPLCVVRRTRKKPKTLPSSAVENDAAATAVAGESVPSVVGPFNVSSNASLAGGVGRGVASASGGAAGGGTVAAAGKVSRGRLRRRSQGKHRGPVATARRVTRADLLKEVREELSQTGSSAWLIDTLCAEAMRSARAEGTAGAHGEGACRRRWQRRRRHPPSRPPTCPPRGATMSVSSAAHAEQSGGEIMARAQASWRAVWEGSRPAGSEATPEDVFEGTSLKQPTLLDWSADALTWAAARSTDDYAGAYGKDALRPLRKARVHRHVQRGRFAAKVARDLSGEYGRRIVDGKAVLVVWGAAATRGGATALRRRVARGCFLATQDEYNSSQTCADCHCRLVLVYPTDLSPDDRRQVINVAQCAAQALGDADGGKRKVAVRRRRAAKGRRGCDDRGGCSSQYLTPRVRAEERDAGEARERLAEILVSGKRSGGYDVLACWSVEKCVNPDCGRLYLNRDRNAARDIAQVAVS

SEQ ID NO: 521 - protein, 540 aa, Neopyropia yezoensis
RARRTQLATSVRRVLRRTRLSRWTVPRHEAEKVARWLVDPTAAAGDSASGTTLDAPLQNRVDALPRRKGCRRLAPVPGLRYSLSAAHFREASGGNFLARAWKQWRARSGTEAGPVAVAVAGLVAAAAGDGGGVAGHLPPVDLAAAHGTMRTGDDGKHLQATLEWAARRDTAAYGQRFGAQATRHLRTARVRKAIQRGRFAASVARDLTGGLLRQVRGGGAVVVAMGTARVRGGDVWLRRHLRRLCWFVDQDEFNTSQACSECHDKMVLIYPTGNSPPKIPRELNGPPAGPLPSTRRVRMAAGSRRGRPKRALPSATHVTRRGPDPDAYREAVRATARAAAVARRAAALAACAVEDRAVYADPRRLSEWAAKGCYTCSLAAPQGPGHPAPHPPVIRNRDDVAARNIAWVAARRLKGTNVWPFKRPFGMRWAWTTKRPPSGVPVPPVRRTRATTRVDVWPVLAAVDTVVDGGGGGGGGGGGGGGGGGRGVVDGDATAASFTTRRGAPGGEQVAAAGSAMDGVRRAETGATDAPRGLVDTARR

SEQ ID NO: 522 - protein, 311 aa, Neopyropia yezoensis
RVFRRTRLHRWTLPRHEAEAVARSLMHSPDSGTDSLLELAEAVTRRKGSRRLATMPDICYWVSAAQSRGASGGNFMARAWRQWRQRAAETASVAGSGSDTDAPPPVDEAAAHGTTRTGDRAAHLQATRQCAALRYTAEYRARFGADHTRGLRSATLHKTIQREHFATAVARDLTGGLLQQVRGGTAVVVSMGKARVRGGDGWLRRYLRRLCWLVDQDEFNTSQACPSCHRKLVLVFPTGDSPPTLPSELFGPPVAASGRRVRMAAGCRRGRPKRPRLSADHKTVRRSAVDTFRAAARATARAAAVARRTTA

SEQ ID NO: 523 - protein, 1152 aa, Neopyropia yezoensis
RRRRLPGAAALWGRASGLRPRRRPRLQGPASEHWTADAGVYRAGGRPGKGGVWGRHGRRPHARGGGDGAASRAGGPLWGGYQAPLPHAPRPRRGIAAPGVDRRGRSRRRRRLDGGRARKLGARLAVVGLRLRLRGCVWQSPAGGHRVCGLWQGADQHADGARPLCGDNEPPAAGRGALLRPDAGDGRHGSCVRPVSSGEQQHGTMGARRHHRGHPRRAVCGRGVSQAGRLGGQGRAGHLPRCHGCSSGRLCLGHGAAADAVGGRALPRGYRGQGNAGPAGPRRRPPAPGPGAGATGGRHAGGHATLCGGPLSSNACEEAPLVGVRSVSSPRPECGCGEPVRPHPWRPSGAPRSRHAGAGQDARPVAGSFGRHWRRGAWPPQSSAMARAANGRCSGAGRHGWCRSPRQPGRIPAVYRRRGGNVFSVSTRHGRRGRGAGGGLGQESGRRWTCAGPRRQRLCVPGGGTDAAVLSAAPGERVATADLPARPVVAAMRAAWSRHMGLDALNRAAVALLRGAGVQDGVAAAATLPEGHPPGGSRKRAAAGAPAAGAGTGGGRSKRQARRSSPDGSDDDAAAVAPAAAGATTPPEAKTYQTASPGGGHGRVRRGPQASIRRARRTQLATSVRRVLRRTRLSRWTVPRHEAENVARWLVDPTAAAGNSASGTTPDAPLLDQVDALPRRKGCRRLAPVPGLRYSLSAAHFREASGGNFLARAWKQWRARSGTEAGPLAVAVAGLVAAAVGDGGGVAGHLPPVDLAAAHGTMRTGDDGKHLQATLEWAARRDTAAYGQRFDAQATRHLRTARVRKAIQRGRFAASVARDLTGGLLRQVRGGGAVIVAMGTARVRGGDAWLRRHLRRLCWFVDQDEFNTSQACSECHDKMVLINSTGNSPPKIPRELYGPPAGPLPSTRRVRMAAGSRRGRPKRALPSATHVTRRGPDPDAYRAAVRATARAAAVARRAAALAACAVEDRAVYADPRRLSEWAAKGCYTCSLAAPQGHGHPAPHPPVIRNRDDVAARNMACVAARRLTGTDVWPFKRPFGMRWAWTAKRPPSGVPVPPVRRTRATTRVDVWPVLAAVDTVGDGGGEGGGGGGGGGGGGRGVVDGDATAASCTTRRGAPGGEQVAAAGSAMDGVRRAETGATDAPRGLVDTAAR

SEQ ID NO: 524 - protein, 1150 aa, Neopyropia yezoensis
KDPLQSTGRQTRACTVPVGVLARAVFGDDKDDADTRAAVETALKAELEDLSGAATKLRFLMLRVLDVALRRLVSTVADAAADDADWTGAVPANWAPVLLWLAYACGCEGVSGSPLQAGTVCAGCGKGRANTRMARARSVVTTSHPLLAEALSYALTQVMAVTAAACDRYLPASNNTARWEPVATIVATHAGRCVDAACRKLGAKAAKDALATSPAATPAPASGSAWDTERRLTRWAAARFRAGTADKATPGRRGLDGVPQHLVQALAQRVAVMRAAMPPSVAGLFPATPVKKRRWWAYVPFLLHVLNVGVGSPYALIPGARAVLHGHSTLVPDKMLALLRAVSAATGVGVRGHPSLRVWPELRTGGAAVLAVMAGVGGRANRAASQLSTDGVAVTFFLSRPDTAAEAEARAVASAKKLDGGGRARDRGGKGFASRAGVLTQLERAGLPLARVRWLQMVGGDPGRSAVLSAAPGERVATADLPARPAVAAMRAAWSRHMGLDALNRAAVALLRGAGVQDGVAAAATVPDGHPPRGSRKRAAAGAPAAGAGTGGSRSKRQARRSSPEGSDDDAAAVAPAAAGATTPPEAKTYQTASPGGGHGRVRRGPQASIRRARRTQLATSVRRVLRRTRLSRWTVPRDEAEKVARWLVDPTAAAGDSDGGTTLDAPLQDRVDALPRRKGCRRLTPVPGLRYSLSAAHFREASGGYFLARAWKQWRACSGTEGVPVAVAVAGLVAAAGDGGGVAGHLPPVDLAAAHGTMRTGDDGKHRQATLEWAARRDTAAYGQRFGAQATRHLRAARVRKAIQRGRFAASVARDLTGGLLRQVRGGGAVVVAMGTARVRGGDAWLRRHLRRLCWFVDQDEFNTSKACSECHDKMVLIYSTGNSPPKIPRELYGPPAGPLPWTRRVRMAAGSRRGRPKRALPSATHVTRRGPDPDAYRAAVRATARAASVARRAAALAACAVEDRAVYADPRRLSEWAAKGCYTCSLAAPQGPGHPAPHPPVIRNRDDVAARNIAWVAARRLTGTNVWPFKRPFGMRWAWTTKRPPSGVPVPPVRRTRATTRVDVWPVLAAVDTVVDGGGGGGGGGGGGGGGGGRGVVDGDATAAPCTTRRGAPGGEQVAAAGSAMDGVRRAETGAIDAPRGLVDTARR

SEQ ID NO: 525 - protein, 1341 aa, Neopyropia yezoensis
VVPRGSPSLPTPSATVDNPTHPPSSQSFPHTQPAHPPPPPPPPPPPPPRPGFTMNEEDDGSDQDIGVDGLDGDTTSDEEWDPAQEQAYVQDARNVVTLKRAVLAANLSRLQGVSAPPGGDAASSADWSAAVAQLQQAAKDEEAAGPLDGAGEDLVAAITGTAQAVSVYCGGRAAASEAEVELAARAKTAAGLIGVAAAGLPRREAATDAPPARKGRTQKCSGCGQPGHKVTSCKAPAGAGPAAAAAAAAVVPAAAAAAASKCRDCLGGGHSSGDAACPVQRHCGGVPAAYDRGVDPDCKDPPQSTGRQTRACTAPVGVLARAVFEDDKDDADTPAAVETALQAELEDLSGAATKLRFLMPRVLDVALRRLVSTVADAAADDADWTGAVPANWAPVWLWLAYACGCEGVSGSPLQAGTVCAGCGKGRANTRMARARSVVTTSHPLLAEALSYALTQVMAVTAAACDRYLPASNNTERWEPVANIVATHAGRCVDAACRKLGAKAAKDALATCLAATAAPAGGSAWDTERRLTRWAAARIRAGTADKAAPGRRGLDGVPQHLVQALAQRVAVMRAAMPPSVAGLFPATPMKKRRWWAYVPYLLHVLNLGVESPYALIPGARAVLNVHGTLVPDRMLALLGAVSAATGVGVRGHPSPRAWPELRTGGAAVLAAMAGVGGRANRASSQLSTDGVAVTFFLSRPDTAAEAEARAVAWAKKLDGGGRARDRSVQGFASRVGVLTQLERAGLPLARVRWLQMVGGDPGRSDVLSAAPGERVATADLPARPVVAAMRAAWSRHMGLDALNRAAVALLRGAGVQDGVAAAATTPGGHLPRGSRKRAAAGAPAAGAGAGGGRSKRQARRSSPEGSDDDAAAVAPAAAGGTMPPKAKTYQTASPGGGHGRVRRGPQASIRRARRTQLATSVRRVLRRTRLSRWTVPRHEAKKVALWLVEPTAAAGNSASSTTPDAPLQDRVDALPRRKGCRRLAPVPGLRYSLSAAHFREASGGNFLARAWKQWRALSGTGAGPVAAAVAGLVAAAGDGGGVAGHLPPVDLAAAHGTMRTGDDGKHLQATLEWAARRDTAAYGQRFGAQATRHLQVARVRKAIQRGRFAASVARDLTGGLLGQVRGGGAVVVAMGTARVRGGDAWLRRHLRRLCWFVNQDEFNTSQACSECHDKMVLIYSTGNSPPKIPRELYGPPAGPLPSTRRVRMAAGSRRGRPKRALPSATHVTRRGPDPDAYRAAVRATARAAAVARRAAALAVCAVEDRAVYADPRRLSEWAAKGCYTCSLAAPQGPGHAAPHPPVIRNRDLVAARNIAWVAVRRLTGTNVWPFKRPLGMRWVWQY

SEQ ID NO: 526 - protein, 510 aa, Neopyropia yezoensis
PESPKYWYRIPAQSLTVAASTRKADGSRVQQRVAGSPTTQLEKQGFPIAAVKTLTVVSADPGNAAILTAVSSGPTAAAWGDRPWVCRRRLARSQLVAADALTRAALALNAVVWRTASLAPAEAAAAGAAAAAAAGARPGALPPTPGRRKRKAGPGGAEQRQMPCGKAARSGPPSRDAAGETAAPASPARPPSARTVRGPAASLRRCAMRQLQAAAQCLVAATGNGRWRVPRHAAVNVALGCLRRAAAGWVGPRVADGRPDGAAYAASKTAAVAQDVATAGAFAAALDGLTVRVAHAVRATRGWHAPPPAGAVYTLTKGRYAEAAGNGMTSRAAAAHRREAAQGLSALQPPPVTTPEAVAAHETVRTGDAAAVLAASRQWMESRRQPRYRAVWGDAATACQRKARVHQVIQRRRLGEAVARELTGGRLRRDVNRSAVVLVVGQAATRGGATWLRRHLRRLCWMVDADEHNSSQACDGCRHQLAIVYASAAAPPRVPRGTMICGRRRGSRGR

SEQ ID NO: 527 - protein, 1002 aa, Neopyropia yezoensis
LSVIVHRKRSAADAADAVPTAIASSGFKSRTSWHRVAAWRRGGVDAACRKLGAKAAKDALATSPAATAAPAGGSAWDTVRRLKRWAAARFRAGTAGKATPGRRGLDGVPQHLVQALAQRVAVMRAAMPPSVEGLLPATPAKKRRWWAYVPFLHHVLNVGVESPYALIPGARAVLHGHGTLVRDKMLALLRAASVATRVGVRGHPSLRAWPELRTGGAAVLAAMAGVGGRANRASSQLSTDGVAVTFFLSRPDTAAEAKARAVAWAKKLDGGGLARDRSGKGFASRMGVLTQLERAGLPLARVRWLQIVGGDPRRSAVLSAAPGERVATADFSARPVVDAMRAAWSRHMGLDALNRAAVALLRGAGVQDGVAAASTMPKRHPPRGSRKRAAAGAPAAGAGRGGGRSKRQARRSSPEGSDDDAAAVAPAAAGATTPPEAKTYQTASPGSGHGRVRRGLQVSIRRARRTQLATSVRRVLRRTRLSRWTVPRHEAEKVARWLVDPTAAAGNSSSSPTPDAPLQDRVDALHRRKGCRRLAPVPGLRYSLSAAHFREASGGNFLARAWQQWRARSGTEAVPVAAAVAGPVVAAGDTGDIAGHLPPVDLAAAHDTMRTGDDGKHLQATLEWAARRDTVAYGQRFGAKATRHLRAARVRKAIQRGRFAASVARDLTGGLLRQVRGGGAVVAAMGTERVRGGDAWLRRHLRRLCWFVDQDEFNTSQACSECHDKMVLIYSTGNSPLKIPGALYGPPASPPPSTRRVRMAAGSRRGRPKRALPSATHVTHRGPDPDAYRAAVRATARADAVARRAAALAACAIEDRAVYADPRRLSEWAAKGCYTCSLAAPQGPGHPAPHPPVIRNRADVAARNMAWVAARRLTGTSVWPFKRPCGMRWAWTTKRPPSGVPVPPVRRTRATTRVDVWPVLAAVDTVGEGGGGGGGGGGGGGGGGGGSRGVVDGDATAASCTTRRGAPGGERVAAAGSSMDGVRRAETGATDAPRGLVDTARC

SEQ ID NO: 528 - protein, 337 aa, Neopyropia yezoensis
QPQVRERFAGTGAHKWVIDTACAELAVAVDAAGAAGATPRPSSLTPVAAAAANAQRRRPPAWPPEGAIYAVSGASFRERSVGGMMSRAQADGASTRDAEADKALHERATATKLKVGSDAAWWAAAQAEVKLLDTAEYLAVGGTDATRPLREAHWHRHVQRKRFARQFALELTGILGRRIVNGQVVLVAWGAAVTGGGAVHLFRRTRRYIYAVRICEHNTSAACAGCNSRVVNVYSTPRSPADRRQVTTERRCKRQGPSRTGRRREPWSWSPGGGPPSSDAAPRVAAAAQTGMRSSGIRPGCSTTCGRRSGSRRLSLSSSGRRAVTVRPRGWPANVSA

SEQ ID NO: 529 - protein, 372 aa, Neopyropia yezoensis
AARRDTAAYGQRFGAQATRHLLTARVRKAIQRGRFAATVAPNLTGGLLRQVRGGGAVVVAMGTARVRGGDAWLRHHLRRLCWFVDQDEFNTSQACSECHDKMVLIYSTGNSPPKIPRELYGPPAGPLPSTRRVRMAAGSRRGRPKRALPSATHMTRRGPDPDAYRAAVRATARAAAVARRAAALAACAVEDRAVYADPRRLSEWAAKGCYTCSLAAPQGPGHPAPHPPVIRNRDDVVARNMAWVAARRLTGTDVWPFKRPFGMRWAWTAKRPPSGVPVPPVRRTRATTRVDVWPVLAAVDTVGDGGGGGGGGGGGGGRGVVDGDATAASCTTRRGAPGGERVAAAGSAMDGVRRAETGATDAPRGLVDTARR

SEQ ID NO: 530 - protein, 1201 aa, Neopyropia yezoensis
TRKTTAATKTLASTGWTATPPETRSGTRRMSRLQGVSAPPAGDAASSAGWSAAEARLQQAAKDEEAAGPLDGAGEDLVAAITGAAQAISVYCGGRAAASEAEVELAARAKTAAGLIGVAAAGLPCREPATDAPPARKGRTQKCSGCGQPGHKVTSCKAPAGAGPAAAAAAAAAVPAEAAAAASKCRDCLGGGHSSGDAACPVQRHCGGVSAAYDRGVDPDCKDPLQSTRRQTRACTVPVGVLARAVFGDDKDDADTRAAVETALQAEREDLSGAATKLRFLMLRVLDVALRRLVSTVADAAADDADWTGAVPANWAPVWLWLAYACGCEGVSGSPLQASTVCAGCGKGRANTRMARARSVVTTSHPLLAEALSHALTQVMAVTAAACDRYLPASNNTARWEPIAIIVAIHAGRCVDAACRKLGAKAAKDALATSPAATAAPAGGAAWDTERRLARWAAARFRAGTADKATPGRRGLDGVPQHLVQALAQRVAVMRAAMPPSVAGLFPTTPVKKRRWWAYVPYLLHVLNVGVESPYALVPGARAVLHGHGGLVPDKMLALLRAVSVATGVGVRGHPSLRTWPELRTGGAAVLAAMAGVGGRANRAASQLSTDGVAVTFFLSRPDTAEEAEARAVAWAKKLDGGGRARDRSGKGFASRVGVLTQLERAGLPLERVRWLQMGGGDPGRSAVLSAAPGERVATADLPARPAVDAMRAAWSRHMGLDALNRAAVALLRGAGVQDGVAAAATTPEGHPPRGSRKRAAAGAPAAGAGTGGGRSKRQARRSSPEGRDDDAAAVAPAATGVTTPPEAKTYQTASPGGGHGRVRRGPQASIRRARRTQLATSVRRVLRRTRLSRWTVPRHKAEKVARWLVDPTAAAGDSASGTTSDAPPQDRVDALPRRRGCRRLAPVPGLRYSLSAAHFREASGGNFLARAWKQWRARSGTEAGPVAAAVAGQVAAAGEGGGVAGHLPPIDLAAAHDTMRPGDDGKLLQATLEWAARRDTAAYGQRFGAQATRHLRVARVRKAIQRGRFAASVARDLTGGLLRQVRGGGAVVVAMGTARVRGGDAWLRRHLRRLCWFVDQDEFNTSQACSECHDKMVLMYSTGNSPPQDSKRAARAAGRPSAVDTACADGGWVASGAAKAAPPLCYPRDAPRARPRRLPGGRPSHCPCCCCGAARGRAGRLCRREPRRLRRPEAAERVGG

SEQ ID NO: 531 - protein, 699 aa, Neopyropia yezoensis
PRCAPRGPATWAWTRSSGRPWRSCVGRASKMGWRQPQPRPRATHPGGLGSGRRRAPRLQGRGQGGAAPSDKRGGRHRRGGDDDAAAVAPAVAGATTPSEAKTYQTASPGGGHGRVRRGPQASIGRACRSQLAFSVRRVLRRTRLSRWTVPRHEAEKVARWLVDPTAAAGNSDSSTTPDTPLQDRVDALPRRKGCRRLAPVSGPRYSLSAAHFREASGGNFLARAWKKWRARRGTEAGPLAAAVAGLVAAAGDGGGVAGHLPPVDLAAAHGTMRTGDDGKHLQATLEWAARRDTAAHGQRFGAQATRHLRTARVRKAIQRGRFAASVARDLTGGLLRQVRGGGAVVVAMGTACVRGGDAWLRRHLRRLCWFVDQDELNTSQACSECHDKMVLIYSTGNSPPNIPRELNGPPAGPRPSTRRVRMAAGSRRGRPKRALPSASHVTRRGPDPDAYRAAVRATARAAAVARRAAALAACAVEDPAVYADPRRLSEWAAKGCYTCSLAAPQGPGHPAPHPPVIRNQDDVAARNIAWVAARRLTGTDVWPFKRPFGMRCAWTTKRPPSGVPVPPVRRTRATTRVDVWPVLAAVDTVGDGGGGGGGGRGGGGGGGGGGRGGGGGGGGGGGGGGGGGGGVGGCGLGGGGCGGCRGAVDGDARAASCTTRRGAASGERVAAAGSAMDGVRRAETGATDAPRGLVDTARR

SEQ ID NO: 532 - protein, 617 aa, Neopyropia yezoensis
KQGFPVAAVKTLTVVSADPGNAAILTAVSSGPTAAAWGDRPWVRRRRLARSQLVAADALTRAALALDAVVWRTASLAPAEAAAVGAAAAAAAGARPGALPPTPGRRKRKAGPGGAEQRQMPCGKAARSGPPSRDAAGATAAPASPARPPSARTVRGPAASLRRGAMRRLQAAAQCLVAATGNGRWRVPRHAAVNVALGCLRRAAAGWVRPRVADGRPDGAAYAASKTAAVAQDVATAGAFASALDGLTVRVAHAVKATRGRRAPPPAGAVYTLTKGRYAEAAGNGMTSRAAAAHRWEAAQRLSALQPPPVTTPEAVAAHETMRTGDAAAVLAASRQWMESRRQPRYRAVWGDAATACQRKARVDQVIQRRRLGETVARELTGGRLRRVVNRSAVVLVVGQAATRGGATWLRRHLRRLCWTVDADEHNSSQACAGCRHQLAIVYASAAAPQRVPRGTMICGRWRGSRGRQGQPRAPPAAGWERTQPVRSATGRAACRAEGAKLAVERAAKHPPPTGVVFRAPAAAGVWGVKRCVERTCPQMLVNRDVNAAANMGWKALQQIRQLPCHPFVRPQQVRRPHPGGGNGREADTAPTDTLGKAESGDGLPAAAGGGAVASTA

SEQ ID NO: 533 - protein, 623 aa, Neopyropia yezoensis
IFVWPGGQVLGWEILSGQILRGPWGDKGRDSGAWSCFPVPMFFLSRPDTAAEAEARAVAWAKKLDGGGRARDRSVKGFASRVGVLTQLERAGLPLARVRWLQMVGGDPGRSAVLSAAPGEHVATADLPARPAVDAMRAAWSRHMGLDALNRAAVALLRGAGVQDGVTAAATMPEGHPPRGSRKRAAAGAPAAGAGRGRGRYKRHARRSSREGSDDDAAAVAPAAAGAMTPPEAKTYQTASPGGGHGRVRRGPQASIRRARRTQLATAVRRVLRRTRLSRWTVPRHEAEKVARWLVDSTAAAGNSASSTTPNAPLQDQVDALPRRKVCRRLAPVSGLRYSLSAAHFREASGGNFLACAWKQWRARSGTEAGPVAAPVAGLVAAAGDEGGVAGHLPPVDLAAALGTMRTSDGRKHLQATLEWAARRDTASYVQRFGAQATRHLRATRVRKAIQRGRFAASVARDLTGGLLRQVRGGGAVVVAMGTARVRGGDAGLRRHFRRLCWFVDQDEFNTSQACSECHDKMVLIYSTGNSLPKVPGELDGPPPGPLPSTRRVRMAAGMRRGRPKRPLPTATHVTRRGPDPDAYRAAVRATARAAAVARRAAALAACAVEDRAIYADPKPLSE

SEQ ID NO: 534 - protein, 285 aa, Neopyropia yezoensis
QSGGEIMALAHASWRAVWEASRPADSEATPEDLFEGKFLKQPTLLDWTAAAFTWAAFGSTADCAGAYGKNALWPLRKARIHRHVQRGRLAASVARDLSGGYGRRIVDGKAVLVVWGAAATRGGAEALRRRVARWRFLATQDEYSYSQICADCHCQLVLVYAADLSPDDRWQVINVAQCAAQALGEADGGKRKVVVRRRRASKGRRGCDGCGGWSPRDVTRRGRAEERDAGEARERWPEILVSGKRSGGYDVLACLSVKKCVNRPLWSAVTQPRQERGAQHRAGGG

SEQ ID NO: 535 - protein, 1612 aa, Neopyropia yezoensis
AQRLCAVCNWATNPITTTAAATPPPPAPPPPPPPPPRHRTLSRQPPSATGTAEMRRTFHFRGGEPRPRDSPQGHVAVRASSALPPAREVASVGGWRGAGGGGGRGGAGGRWEDLDRRPPDGPCSPSPASTARVRHRVRTPARMVPCQTINRAVGGAPRFPIFADPVSHRRQSLPPTLLAVVPTHTTRSSASAPPPPPFPPPPSPPRPKFTMNDDDDGSDQDIGVDGLDGDATSDEEWDPVQEQAYVQDARNVVTLKRAVLAANLSRLQGVSAPHGGDAASSADWYAAVAQVQQAAKDEEAAGPLDGAAGEDLVAAITGAAQAVSVYCGGRAAASEAEVELAARAKTAAGLIGVAAAGLPRREAATDAPPARKGRTQKCGGCGEPGHKVSSCKAPAGAGPAAAAAAGPAAAAVPAAAAAAASKCRDCLGGGHSSGDAACPVQRRCGGVSAAYDRGVNPDCKDPLQSTGRQTRACTVPVGVLARAVFGDDKDDADTRAAVETALQAELEDLSGAATKLRFLMLRVLDVALRRLVSTVADAAADDADWAGAVPANWAPVWLWLAYACGCEGVSGSPLQAGTVCAGCGKGRANTRMARARSVVTTSHPLLAEALSYALTQVMAVTAAACDRYLPASNNTARWEPVATIVATHAGRCVDAACRKLGAKAVKDALATSPAATAAPAGGSAWDTERRLTRWAAARFRAGTADKATPGRRGLDGVPQHLVQALAQRVAVMRAAMPPSVAGLFPATPVKKRRWWAYVPFLLHVLNVGVESPYALIPGARAVLHGHGTLVPDKMLPLLRAVSVATGVGVRGHPSLRAWPELRAGGAAVLAAMAGVGGRANRASSQLSTDGVAVTFFLSRPDTAAEAEARAVAWAKKLDGGGRARDRSGKAFASRVGVLTQLERAGLPLARVRWLQMVGGDPGRSAVLSAAPGERVATADLPARPVVDAMRAAWSRHMGLDALNRAAVALLRGAGVQDGVAAAATVPDGHPPGGSRKRAAAGAPAAGAGTGGGRCKRQARRSSPDGSDDDAAAVAPAAAGATTPPEAKTYQTASPGGGHGRVRRGPQASIRRARRTQLATSVRRVLRRTRLSRWTVPRHEAEKVARWLVDPTAAAGDSASGTTLDAPLQNRVDALPRRKGCRRLAPVPGLCYSLSAAHFREASGGNFLARAWKQWRARSGTGAGPVAVAVAGLVAAAAGDGGGVAGHLPPVDLAAAHGTMRTGDDGKHLQATLEWAARRDTAAYGQRFGAQATRHLRAARVRKAIQRGRFAASVARDLTGGLLRQVRGGGAVVVAMGTARVRGGDAWLRRHLRRLCWLVDQDEFNTSQACSECHDKMVLIYSTGNSPPKIPRELNGPPAGPLPSTRRVRMAAGSRRGRPKRALPSATHVTRRGPDPDAYREAVRATARAAAVARRAAALAACAVEDRAVYADPRRLSEWAAKGCYTCSLAAPQGPGHPAPHPPVIRNRDDVAARNMAWVAARRLTGTNVWPFKRPFGMRWAWTTKRPPSGVPVPPVRRTRATTRVDVWPVLAAVDTVVDGGGGGGGGGGGGGGGGGGGRGVVDGDATAASCTTRRGAPGGEQVAAAGSAMDGVRRAETGATDAPRGLVDTARR

SEQ ID NO: 536 - protein, 364 aa, Neopyropia yezoensis
FGAQATRHLRTARVRKAIQRGRFAASVARDLTGGLLRQVRGGGAVVVAMGTAHVRGGDAWLRRHLRRLCWFVDQDEFNTSQACSECHDKMVLIYSTGNSPPKTPRELYGPPAGPLPSTRRVRMAAGSRRGRPKRALPSATHVTRRGPDPDAYREAVRATARAAAVARRAAALAACAVEDRAVYADPRRLSEWAAKGCYTCSLAAPQGPGHPAPHPPVIRNRDDVAARNIAWVAARRLTGTNVWPFKRPFGMRWAWTTKRPPSGVPVPPVRRTRATTRVDVWPVLAAVDTVVDGGGSGGGGGGGGGGGGGRGVVDGDATAASCTTRRGAPGGEQVAAAGSAMDGVRRAETGATDAPRGLVDTARR

SEQ ID NO: 537 - protein, 1355 aa, Neopyropia yezoensis
PPAPSLLPSFFRPTPTGSLPVPVPRSTRPPHPLLTSAALAMEPDEEQPGAGPQDEGPHGPRADADDALPPGDGAASGDQADPRELAELEAAVHLKQRRLRGLLRHVGEARARRPQLPDGAALDAALAGLTAAAAAAAGAPHEVAPTTDGAVAAAGAALEAATTPAVAGATAWVDAHDPLDDDSLLAQRARRAASLIGSTSRGMARRGVEVEDRRGAAPGGRPCARCRQRSHKTGAATCPATALFGDKNPHAYDRGEDPAASDPYACRATVTSSVMVPVAAVLRALPATPDGTAHAVLRGGFLATAEHHTQLHFTLTLVWLNTVHTLFGAVKADGWAAALPGSAQWGEYWNWVAYAVCCRGAHGGSLPAGVTCGSCGRARDNTLCGPAARRLLVSYPALMDATRNAMDALASSFDAACHDHLPHGNSHARWRGVVTTIVTHTARTVAVATRRLAWRVAAKVVDAAEAPACGDEQRGRRRAAVYAAARSCLERGIDTPHAAHAAKLEALPSDVRAAALTEIADARARAQPAPAQGTPPLFPTGGAHAVERRWAQYIPYLLNVQVEGVVDKPFSLVPGKVATLHGYGTVTKARLGPLIRRAWPRHRELYENVRRRGAAAIAGLLGLETVRCTAGADLRSNGEGVVFTLSRPATAAEAEAADVAAATRKANGTRVQQRVAGSPTTQLEKQGFSAAAVETLTVVSADPGKATVLTAVSSGPFAAAWGDRPYVRRRRLARSRLMAADALTRAALALDGVVWRAAALAPADAAAAGAAAAAAAAGAGPGALPLLPARRKRKAGPGGAEQRQPPCGKAARTGPARGGAAGGTAAPAPPARPPSARTARGPAASLRRGAVRRLRAAAQRLVAATGNDRWRVPRHAAVQVALGCLRRAAAGLFQPRVADGRPDGAAFAVCKTAAAEQDVAAAGAFASALDGLTARVADAVGATRGWRAPPPTGAVYTLSRGRYTEAAGNGMTARAAAAHRREAAQRLAALQQPPATTPEVVAAHDTVRTGDAAAVLAASRQWMESRRQPKYRAVWGAAATAGQRKARVHQVIQRRRLGEAVARELTGGRLRRVVNRSAVVVVVGQAATRGGATWLRRHIRRLCWMVDADEHNSSQACAGCRQQLAVVYASAAAPPPVPRGTLICGRRRGRRGRQGWPRAPPTAGWERTQPVRSAARRAACRAEGAKMAAERAVKHPPPAGVVFRAPNAAGVWGVKRCVEQACARRLVNRDVNAAANMGWKALRQMRQLPCHPFVRPQRVRRPVLDGGDDGEAAGATPAGRAGGGDGGRPPGAAVVAGATGDAGREGAVGPGGAGGARAAVVADTHTVASTELSGAARAGDGAPAVAGGGGATSVA

SEQ ID NO: 538 - protein, 621 aa, Neopyropia yezoensis
CGGGGPAAAGATTPPEAKTYQTAGPGGGHGRVRRAPQESIRRARRTQLATSVRRVLHRTRLSRWTVPRHEAEKVARWLVDPTAAAGDSDSGTTPDAPLQDRGDALTRRKGCRRLAPVPGLRYSLSAVHFREASGGNFLARARKQWQARSGTGAGPVAAAVAGLVAAAGDGGGVAGHLPPVDLAAAHGTMRTGDDGKHLQATLEWAARRDTAAYGQRFGAQATRHLWAARVPKAIQRGRFAASVARDLTGGLLRQVRGGGAVVVAMGTERVRGGDAWLRRHLRRLCWFVDQDEFNTSKAFSKCHDKMVLIYSTGNSPPKIPGELYGPPAGLLPSTRRVRMAAGSRRGRPKRALPSATHVTRRGPDPDANRAAVRATARAEAVTRRAAALAACAVEDRAVYADPRRLSEWAAKGCYTCSLAAPQGPGHPAPHPPVIRNRDDVAARKMAWVAARRLTGTNVWPFKRPFGMRWAWTTKRPPSGVPVPPVRRTRATTRVDVWPVLAAVDTVGDGVGGGGGGGGGGEDGEDGEDGGGGGGGGGGGGGGGGGCGGGGGGGGGGGGGGGGGGGGRGVVDGDATAASCTTQRGAPGGERVAAAGSAMDGVRRAETGATDAPRGLVDTARR

SEQ ID NO: 539 - protein, 332 aa, Neopyropia yezoensis
VERRSMRDAEADKSLHQRVTATTLKVGSYAAWWAAAQAKVKLRDTAESLAVYDTDATRPLREAHLHCYAQRKRFARQFALELTGGLGRRIVNGQVVLVAWGAAVTGGGAVHLYRRARRDMYAVRICEHNTSAAFAGCNNRVVHVYPTPRSSADQRQVTNGATLEEERAQPHEAAVGAKVVEPRRRAAKCRRVTQSRRGGADRDEVKRDKARALDDGWAAERLKAIIAFVKRAAGRDGAAAWMARNRVCVSCLVPYFNRDKNAERNILKAASAQLSGGNKAPFFSGCHVRRPPVGPPPGLDYNWSKGHGQLVGTVVSGGGSHGRGVGGGCPRC

SEQ ID NO: 540 - protein, 252 aa, Neopyropia yezoensis
HRGQPASRLRGHPRGPLSGYVPQAADVAGLGAAALTWAASSSTADYAGAYGKDALRTLRKARVHRHMQRGRFAAKVARDLSGGYGRRIVDGKVVLVVWGAAATRGGAEALRCPVARGCFLATQDEYNSSQTWADCHCRLVIVYPNDLSPDDRRQVINVAQCAAQALGDADGGQRKVVVRRRRTPKGRRGCDGRGGCSPRDVTRRGRAEERDAGEARERLVEILVSGKHSGSFDVLACWSVKKCVTLTVVGCT

SEQ ID NO: 541 - protein, 1463 aa, Neopyropia yezoensis
VVPRGSPSLPTPSATVDNPTHPPSSQSFPHTQPALPPPPPPSPPRPGFTMNDDDDGSDQDIGVDGLDGDTTSDEEWDPAQEQAYVQDARNVVTLKRAVLAANLSRLQGVSAPHGGDAASSADWSAAVAQLQQAAKDEEAAGPLDGAGEDLVAAITGAAEAVSVYCGGRAAPSEAEVELAARAKTAAGLIGVAAAGLPRREAATDAPPARKGRTQKCRGCGEPGHKVTSCKAPAGAGPVAAAVAAAAAAAVPAAAAAAASKCRDCLGGGHSSGDAACPVQRHCGGVSAAYDRGVNPDCKDPLQSTGRQMRACTVPVGVLAGAVFGDDKDDADTRAAVETALQAELEDLSGAATKLRFLMLRVLDVALRRLVSTVADAATDDADWTGAVPANWAPVWLWLAYACGCEGVSGSPLQAGTVCAGCGKGRANKRMARARSVVTTSHPLLAEALSYALTQVMAVTAAACDRYLPASNNTARWEPVATIVATHAGRCVDAACRKLGAKAAKDALATPPAATAAPAGGSAWDTERRLTRWAAARFRAGTADKATPSRRGLDGVPQHLVQALAQRVAVMRAAMPPSVAGLFPATPVKKRRWWAYVPFLLHVLNVGVGSPYALIPGARAVLHGHGTLVPDKMLALLRAVSAATGVGVRGHPSLRAWPELRTGGAAVLAAMAGVGGRANRAASQLSTDGVAVTFFLSRPDTAAEAEARAVAWAKKLDGGGRARDRGGKGFASRAGVLTQLERAGLPLARVRWLQMVGGDPGRSAVLSAAPGERVATADLPARPAVAAMRAAWSRHMGLDALNRAAVALLRGAGVQDGVAAAATVPDGHPPAGSRKRAAAGAPAAGAGTGGSRSKRQARRSSPEGSDDDAAAVAPAEAGATTPPEAKTYQTASPGGGHGRVRRGPQASIRRARRTQLATSVRRVLRRTRLSRWTVPRHEAEKVARWLVDPTAAAGDSASGTTPDAPLLDRVDALPRRKGCRRLAPVPGLRYSLSAAHFREASGGNFLARAWKQWRARNGTGAGPVAAAVAGLVAAAGDGGGVAGHLPPVDLAAAHGTMRTGDDGKHLQATLEWAARRDTVAYGQRFGAQATRHLRAARVRKAIQRGRFAASVARDMTGGLLRQVRGGGAVVVAMGTARVRGGDAWLRRHLRRLCWFVDQDEFNTSKACSECHDKMVLIYSTGNSPPKIPRELYGPPAGPLPSTRRVRMAAGSRRGRPNRALPSATHVTRRGPDPDAYRAAVRATARAAAVARRAAALAACAVEDRAVYVYADQGRLSEWAAKGCYTCSLAAPQGPGHPAPHPPVIRNRDDVAARNMAWVAARRLTGTDVWPFKRPFGMRWAWTTKRPPSGVPVPPVRRTRATTRVDVWPVLAAVDTVGDGGGGGGGGGGGGGGGGGGGGGGGGGGGAGAGRGVVDGDATAASCTTRRGASGGERVAAAGSAMDGVRRAETGATDAPRGLVDTARR

SEQ ID NO: 542 - protein, 560 aa, Neopyropia yezoensis
AADVAAVTRRPNGYRVRDRVLASPATQLEKQGFPMQSLRTVCPVPLDPGDKEILASKSTVLHPANWGDRPCVRRRRWARAKMVALNALKCAAMAVVGVAVAASGSRQEAARVDEAMAAAAGELSPQPRGTKRKSSGPAGGRAHKSTDGGAAGGAPIRGGGGGGGGGGPGGTASASGGTNAAGGASNAARSGQPPAVVKAAEGTPAAPPSPSPPEPSPRERRQHRGRAARLRRDARQALQAALRDMLGNPHRGRWSVPRHKAVDVAFRCLYRAACRRVRLPRNVRPGVAAYAASKADAEAAYLDAAAAYAAAVDRLRAEVVAYATATRGRRSPPPAGTTCTLSRGRYHEMGGGDMVRRAAVAHWAAAVQQIRLAVQSGCVASAGPAAITPEAVAAHDSVRSGDTAVVLAATCQWMRSRRQALYRAVWGSQATAGTRKARVHQVIQRHSMAATVVRELTGGYLRRVIGGTAVVVVMGDAATRGGATWLRKHLRRLCWLVDTPEHNSSQACGRCHKKLAIVFPTAAAAPRVPRGSLICGRRRGTAGRRGHPAASIRGSWIRTT

SEQ ID NO: 543 - protein, 1474 aa, Neopyropia yezoensis
GGRWCPEVPHLCRPHQPPSTIPPTHPPHSRSHTHNPPVPPPPPPPPPPPPPRPGFTMNDDDDGSDQDIGVDGLYGDTTSDEEWDPAQEQAYVQDARNVVTLKRAVLAAGLSRLQGVSAPPGGDAASSAAWSAAVARLQQAAKDEEAAGPLDGAGEDLVAAITDAAHAVSVYCGGRAAASEAEVELAARAKTAAGLIGVAAAGLPRREAATDAPPARKGRTQMCSGCGEPGHKVTSCKAPAGVGPAAAAAAAASAVPGAAAAAAAASKCRDCLGGGHSSGDAACPVQRHCGGVSAAYDRGVDPDCKDPLQSTGRQTRACTVPVGVLARAVFGDDKDDADTRAAVETALQAELEDLSKAATKLRFLMLRVLDVALRRLVSTVADAAADDADWTGAVLANWAPVWLWLAYACGCEGVSGSPLQAGTVCAGCGKGRTNTRMARARSVVTTSHPLLAEALSYALTQVMAVTAAACDRYLPASNNTARWEPVATIVATHAGRCVDAACRKLGAKAAKDALATSPAATAAPAGSSAWDTERRLARWAAARFRAGTADKATPGRRGLDGVPPHLVHALAQRVAVMQAAMPPSVAGLFPATPVKKRRCCAYVPFLLHVLNVGVESPYALIPGARAVLHGHGTPVPDKMLALLRAVSAATGVGVRDHPSLRAWPELRTGGAAVLAAIAGVGGRANRAASQLSTEGVVVTFFLSRPDTAAEAEARAVAWAKKLDGGRRARDRGGEVFSSRGGVLTQLERAGLPLAHVRWLQMVGREPGRSAVLSAAPGERVATADLPARPVVAAMRAAWSRHMGLDALNRAAVALLHGAGVQDGVAAAATALEGHPPGGSRKRAAAGAPAAGAGTSRGRSKRQARRSSPEGSDDNAAAVAPAAAGSTTPPEAKTYQTASPGGGHGRVRRGPQASIRRARRTQLATSVRRVLRRTRLSRWTVPRHEAEKVARWLVDPTAAAGDSASGSTPDAPLQDRVDALPRRKGCRRQAPVPGLRYSLSAAHFREASGRNFLARAWKQWRARRGTEAGPVAAAVAGLVAAAGDGGGVAGHLPPVDLAAANGTMRTGDDGKHLQATLEWAARRDMAAYGQRFGAQATRHLRTARVRKAIQRGGFAASVARDLTGGLLRQVRGGGAVVVAMGTARVRGGDAWLRRHLRRLCWFVHQDEFNTSQACSECHDKMVLIYSTGNSPPKILRELYGPPAGPLPSTRRVRMAAGSRRGRPKRALPSATHVTRREPDPDAYREAVRATARAAAVARRAAALAACAVEDRAVYADPRRLSEWAAKGCYTCSLAAPQGPGHPAPHPPVIRNRDDVAARSIAWVAARRLTGTDVWPFKRPFGMTWARTTKRPPSGVPVPPVRRTRATTRVDVWPVLAAVATVVDGGGGGGGGGGGGGGGGGSGGGGGGGSGGGGGGGGGGGRGVVDGDATAASCTTRRGAPGGERVAAAGSSMDGVRRAETGATDAPRGLVDTARR

SEQ ID NO: 544 - protein, 579 aa, Neopyropia yezoensis
CDGGGSGGGGWDDAREARTYQTASPGGGHGRVRRGPQASIRWARRTQLATSVRRVLRRTRLSRGTVPRHEAEKVARWLVEPTAAAGDSASGTTIDAPLQNRVDALPRRKGCRRLAPVPGLRYSLSAAHFRKASGGNFLARAWKQWRARSGTEAGLVAVAVAGLVAAAAGDGGGVAGHLPPVDLAAAHGTMRTGDDGKHLQATLEWAPRRDTAAYGQRFGAQATRHLRTARVRKAIQRGRFAASVARDLTGGLLRQVRGGGAVVVAMGTARVRGGDAWLRRHLRRLCWFVDQDEFNTSQACSECHDKMVLIYSTGNSPPKIPRELYGPPAGPLPSTRRVRMAAGSRRGRPKRALPSATHVTRRGPDPEPYREAVRATAHAAAVARRAAALAACAVEDRTVYADPRRLSEWAAKGCYTCSLAAPQGPGHPAPHPPVIRNRDDVAARNIAWVAARRLTGTNVWPFKRPFGMRWAWTTKRPPSGVPVAPVRRTRATTRVDVWPVLAAVDTVVDGGGGGGGGGGGGGGGRGVVDGDATAASCTTRRGAPGGEQVAAAGSAMDGVRRAETGATDAPRGLVDTARR

SEQ ID NO: 545 - protein, 438 aa, Neopyropia yezoensis
LFGRAWKQWRARSGTGAGPVAAAVAGLVAAAGDGGGVAGHLPPVDLAAAHGTMRTGDGGKHLQATLEWAARRDTAAYGQRFGAQATRHPRAARVRKAIQRGRFAASVARDLTGGLLRQVRGGGAVVMAMGTERVRGGDAWLRRHLRRLCWFVDQDEFNTSKACSECHDKMVLIYPTGNSPPKIPRELNGPPAGPLPSTRHVRMAAGSRRGRPKRALPSATHVTRRGPDPDAYREAVRATARAAAVARRAAALAACAVEDRAVYADPRWLSEWAAKGCYTCSLAAPQGPGHPAPHPPVIRNRDDVATRNIAWVAARRLTGTNVWPFKRPFGMRWAWTTKRPPSGVPVPPVRRTRATTRVDVWPVLAAVDTVVDGGGGGGGGGGGRGVVDGDATAASCTTRRGAPGGEQVAAVGSAMDGVRRAETGATDAPRGLVDTARR

SEQ ID NO: 546 - protein, 1463 aa, Neopyropia yezoensis
GGRWCPVVPNLCRPHQPPSTIPPAHPPHSRSHTHNPLFRLHPPPPPPPPPPPPPPPPPPRPGFTMNEEDDGSEQDIGVDGLDGDTTSDEEWDPAQEQAYVQDARNVVTLKRAVLAANLSRLRSVSAPHGGDAASSADWSAAIAQLQQAAKDEEAEGPLDGAGQDLVAAITDAAEAVSVYCGGRAAPSEAEVELAARAKTAAGLIGVAAAGLPRREAATDAPPARKGWTQRCSGCGEPGHKVTSRKAPAGAGPAAAAATAAAAAAVPAAAAAAASKCRDCLGGGHSSGDAACPVQRHCGGVSAAYDRGVDPDCKDPLQSTGRQTRACTVPVGVLARAVFGDDKDDADTRAAVDTALQAELEDLSWAATKLRFLMLRVLDVALRRLVSTVADAAADDADWTGTVPANWAPVWLWLAYACGCEGVSGSPLQAGTVCAGCGKGRTNTRMARARSVVTTSHPLLAEALSYALTQVMAVTAAACDRYLPASKNTARWEPVATIVATHAGRCFDAACRKLGAKAAKDALATSPAATAAPAGGSAWDTERRLTRWAAARFRAGTADKATPGRRGLDGVPQHLVQALAQRVAVMRAAMPPSVAGLFPATPVKKRRWWAYVPFLLHLLNVGVGSPYALIPGARAVLHGHGTLVPEKMLALLRAVSAATGVGVRGHPSLRAWPELRTGGAAVLAAMAGVGGRANRATSQLSTDGVAVTFFLSRPDTAAEAEARAVAWAKKLDGGGRARDRGGKGFASRAGVLTQLERAGLPLARVRWLQMVGGDPGRSAVLSAAPGERVATADLPARSVVAAMRAAWSRHMGLDALNRAAVALLRGAGVQDGVAAAATTPEGHPPGGSRKRAAAGAPAAGAGTGGGRSKLQARRSSPDGSDDDAAAVAPAAAGATTPPEAKTYQTASPGGGHGRVRRGPQASIRRARRTQLATSVRRVLRRTRLSRWTVPRHEAEKVARWLVDPTAAASNSASGTTPDAPLLDRVDALPRRKGCRRLAPVPGLRYSLSAAHFREASGGNFLARAWKQWRARSGTEAGPVVVAVAGLVAAAAGDGGGVAGHLPPVDLAAAHGTMRTGDDGKHLQATLEGAARRDTAAYGQRFGAQATRHLRTARVRKAIQRGRFAASVARDLTGGLLRQVRGGGAVLVAMGTARVRGGDAWLRRHLRRLCWFVDQDEFNTSQACPECHDKMVLIYSTGNSPPKIPRELYGPPAGPLPSTRRVRMAAGSRRGRPKRALPSATHVTRRGPDPDAYREAVRATARAAAVARRTAALAACAVEDRAVYADPRRLSEWAAKGCYTCSFAAPQGPGHPAPHPPVIRHRDDVAARNIAWVAARRLTGTNVWPFKRPYGMRWAWTTKRPPSGVPVPPVRRTRATTRVDVWPVLAAVDTVVDGGGGGGGGGGGGGGGGGRGVVDGDATAASCTTRRGAPGGEQVAAAGSAMDGVRRAETGATDALRGLVDSARR

SEQ ID NO: 547 - protein, 1466 aa, Neopyropia yezoensis
VVPRGSPSLPTPSATVDNPSHPPSSQSFPHTQPAHPPPPPPPPRPPPPPPPPPPPPPPRPGFTMNDDDDGSDQDIGVDGLDGDTTSDEEWDPAQEQAYVQDARNVVTLKRAVLAANLSLLQGVSAPHGGDAASSAGWSAAVARLQQAAKDEEAAGPLDGAGEDLVAAITGAAQAVSVYCGGRAAPSEAEVELAARAKTAAGLIGVAAAGLPRREAATDAPPARKGRTQKCSGCGEPGHKVTSCKAPAGAGPAAAAAAAAAAAAAAAAAAVPAAAAAAASKCRDCLGGGHSSGDAACPVQRHCGGVPAAYDRSVNPDCKDPLQSTGRQTRACTVPVGVLARAVFGDDKDDADTRAAVETALQAELEDLSGAATKLRFLMLRVLDVALRRLVSTVADAAADDADWAEAVPANWAPVWLWLAYACGCEGVSGSPLQAGTVCAGCGRGRANTRMARARSVVTTSHPLLAEALSYALTQVMAVTAAACDRYLPASNNTARWEPVATIVATHAGRCVDAACRKLGAKAAKDALATPPDATAAPAGGSAWDTERRLMRWAAARFRAGTADKATPGQRGLDGVPQHLVQALAQRVAVMRAAMPPSVAGLFPATPVKKRRWWAYVPFLLHVLNVGVGSPYALIPVARAGFHGHGTLVPDKMLALLRAVSAATGVGVRGHPSLRAWPELRTGGAAVLAAMAGVGGRANQAACQLSTDGVAVTFFLSRPDTAAEAEARAVAWAKKLDGGGRARDRGGKGFASRAGVLTQLERAGLPLARVRWLQMVGGDPGRSAVLSAAPGERVATADLPARPAVAAMRAAWSRHMGLDALNRAAVALLRGAGVQDGVAASAITPEGHPPGGSRKRAAAGAPAAGAGTGGGRSKRQARRSSPEGSDDDAAAVAPAAAGATTPPEARTYQTASPGGGHGRVRRGPQASIRRARRTQLATSVRRVLRRTRLSRWTVPRHEAEKVARWLVDPTAAAGDSASGTTLDAPLQIRVDALPRRKGCRRLAPVPGLRYSLSAAHFREASGGSFLARAWKQWRARSGTEAGPVAVAVAVAGLVAAAAGDGGGVAGHLPPVDLAAAHGTMRTGDDGKHLQATLEWAARRDTAAYGQRFGAQATRHLRTARVRKAIQRGRFAASVARDLTGGLLRQVRGGGAVVVAMGTARVRGGDAWLRRHLRRLCWFVDQDEFNTSQACSECHDKMVLIYPTGNSPPKIPRELNGPPAGPLPSTRRVRMAAGSRRGRPKRALPSATHVTRRGPDPDAYRAAVRATARAAAVARRAAALAACAVEDRAVYADPRRLSEWAAKGCYTCSLAAPQGPGHPAPHAPVIRNRDDVAARNIAWVAARRLTGTNVWPFKRPLGMRWAWTTKRPPSGVPVPPVRRTRATTRADVWPVLAAVDTVVDGGGGGGGGGGGGGRGVVNGDATAASCTTRRGAPGGEQVAAAGSAMDGVRRAETGATRAPRGLVDTARR

SEQ ID NO: 548 - protein, 615 aa, Neopyropia yezoensis
ARHMGLDELNRAAVALLRGAGVQDGVAAAAIVPEGLPPRGFRKRAAAGAPAAGAGTGGGRSKRQARRSSPEGSDDDAAAVAPVAAGATTLPEAKTYQTASPGGGHGRVRREPQASIRRARRSQLASSVRRVLRRTRLSRWTVPRHEAEKVARLLVDPNAAAGDSARSTTPDAPLQDQVVALPRRKGCRRLAPVPGLRYSLSAAHCREASGGNFFARAWKQWRARSGLEAGPVAAAVAGLVAAVGDVGGVAGHRPPVDLAAAHGTTRTGDDGEHLQATLEWAARRDTAAYGQRFGAQATRHLRAARVRKAIQRGRFAASVAQDLTGGLHRQVRGGKAVVVAMAAARVRGADTWLRHHLRRLGWFVDQDEFNTSKACSECHDKTVLINSTGNPYPKIPRELNGPPAGPLPSTRCVRMAAGLRRGRPKRALPSATHVTRRGPDPDAYRAAVRATARAAAVARRAAALAACAVEDRAVYTDQRRLSEWAAKGCYTCSLGAPRGRGNPAPHLPVIRNRDDVAARNMAWVAARCLSGTNVWLFKRTFGMRWAWTTKRPPSGVPVPPGGRKRATTRVDVSPALAAVDTVVDGGGGGGGGSGSGGCGSGGGGGGCGGLPHLSD

SEQ ID NO: 549 - protein, 1021 aa, Neopyropia yezoensis
DRGPPTPGCTRRESLPLSPAAPPNVAKTTCTHDTQVGAVYKCCLPCRGNRRKCKSHTLYPCCGAIPPRTNKRMVCGPTVSWSGRGSRAKPRCPSPYPPRVPSESRHSESPTPAPAHRATRKFKTISAENPPIQVGFSTKLTIPNFGNVDPNAGGGTDQASGLPPLTWHVLPPYLGVNTATPDKMLALLRAVSVATGVGVRGHPSLRAWPELRTGGPAVLAAMAGVGGRASRAASQLSTDGVAVTFSLCRPDTAAEAEARAVAWAKKLDGGGRARDRSGKGFASRVGVLTQLERAGLPLARVRWLQTVGGDPGRSAVLSAAPGERVATADLPARPVVAAMRAAWSRHMILDVLNRAAVALLRGAGLQDGVAAAATMPKGHPPRGSRKRAAAGAPAAGVGTGGGRSKRQARRSSPEGSDDDAAAVAPAAAGATTPPEAMTYQTASPGGGHGRVRRGPQASIRQARRTQLATSVRRVLRRTRLSRWTVPRHEAEKVARWLVDPTAAAGDSASGTTPDAPLQDRVDALPRRKGCRRLAPVPGLRYSLSAAHFREASGGNFLALAWKQWRARSGTGVGPVAAAGDGGGVAGHLPPVDLAVVHGTMRTGDDGKQLQSTLEWAARLDTAAYGQRFGAQATRHLRVARVRKAIQRGRFAASVARDLTGGLLRQVRGGSAVVVAMGTARVRGGDAWLRRHLRRLCWFVDQDEFNTSKACSECHDKMVPIYSTGNSPPKIPRELYGPPAGPLPSTRRVRMVAGSRRGRPKRALPSAPHVTRRGPDPDAYRAAVRATARGAAVARRAAALAASAVEDRAVYADPRRLSEWAAKGCYTCSLAAPQGPGHPAPHPPVIRNRDDVAARNMAWVAARRLTGTKVWPFKRPCGMRWAWTIKRPPSGVPVPPVRRTRATTRVDVWPVLAAVDTVVDGGGGGGGGGGGGGGGGGGGGGGVGGGGGGGRGVVDGGGGGGGGGGGGRGVVDGDATAASCTTRRGAPGGERVAAAGSAMDGVRRAETGATDAHRGLVDTARR

SEQ ID NO: 550 - protein, 1132 aa, Neopyropia yezoensis
ASSRGRCLGTTRTTPTRARRWRRRCKQSWRTSLGRLPSSASSCSASSTWHCGAWCRPSRTQPPTTPTGRGPCPQSGRPSGCGWPTPAAARVCMAVPCRRAPCVCGVWQGADQHADGARPLCGDDEPPAAGRGALLRPDAGDGRHGSCVRPVSSGEQQHGTMGARRHHRGHPRRAVCGRGVSQAGRQGGQGRAGHLPRCHGCSSGRLCLGHGAAADAVGGRALPHRYRGQGNAGPTGPRRRPPAPGPGAGATGSRHAGGHANLCGGPLSSNACEEAPLVGVRAVSLPLPECGCGEPVRPHPWRPSGAPRARHAGAGKDARPVPGSFSRHWRGGAWPPQYSGMARAANGRCSGAGRHGLCRWPRQPGRLPAVHRRRVGNFSSVSTRHGRRGRGAGGGLGQEAGRRWTCAGPRRQRLCVPGRVMTQLERAGLPLARVRWLQMVGGDPGRSAVLSAAPGERVATADLPARPAVAAMRAAGSRHMGLDALNRAAVALLRGAGVQDGVAAAATTPEGHPSGGPRKRAAAGAPAAGAGTGGGRSKRQARRSSPEGSDDDAAAVAPAAAGGTTPPEARTYQTASPGGGHGRVRRGPQASIRRARRTQLATSVRRVLRRTCLSRWTVPRHEAEKVARWLVDPTAAADDSASGTTLDAPLQNRVDALPRRKGCRRLAPVPGLRYSLSAAHFREASGGNFLARAWKQWRARSGTEAGPVAVAVAGLVAAAAGDGGGVAGNLPPVDLAAAHGTMRTGDDGAHLQATLEWAARRDTAAYGQRFGAQATRHLRTARVRKAIQRGRFAASVARDLTGGLLRQVRGGGAVVPAIGTARVRGGDAWIRRHLRRLCWFVDQDEFNTSKGCSECHDKMVLIYSTGNSPPKIPRELNGPPVGPLPSTRRVRMAAGSRRKRPKRALPSATHVTRRGPDPDAYRAAVRATARAAAVARRAAALAACAVEDRAVHADARRLSEWAAKGCYTCSLAAPQGPGHPAPHAPVIRNRDDDADRNMVWVAARRLTGTEVWPFKRPFGMRWAWAAKRPPSGVPVPPVRRTRATTRVDVWPVLAAVDTVGDGGGGGGGGGGGGGGGGRGVVDGDATAASCTTRRGAPGGEQVAAVGIAMDGVRRAETGATDAPRGLVDTARR

SEQ ID NO: 551 - protein, 219 aa, Neopyropia yezoensis
QGRRQHSPSRPPTCPPRGAALSVSSAAYAEQSGGVIMARAQASWPAVWDASRPAGSKATSEDLFEGTSLKQRTLLDWAAAALTWAIFRGTADYASAYDKQALRPLRKARVHRHVQRGRFAAKVARDLSGGYGRRIVDCKAVFVVWVAAATRGGAEALRRRVARGCFLATQDEYTSSQTCADCHCQLVLVYPTDLSPDDGRKVINVAHCAAQALDDADGG

SEQ ID NO: 552 - protein, 269 aa, Neopyropia yezoensis
RARRTQLATSVRRVLRCTRLSWWTVPRHEAEKVARWLVDPTAAAGDSASGTTLDAPLQNRVDALPRRKGCRRLAPVPGFRYSLSAAHFREASGGNFLARAWKQWRARSGTEAGPVAVAVAGLVAAAVGDGGGVAGHLPPVDLAAAHGTMRTGDDGKHLQATLEWAARRDTAAYGQRFGAQATRHLRTARVRKAIQRGRFAASVARDLTGGLLRQVRGGGAVVVAMGTARVRGGDAWLRRRLRRLCWFVDQDEFNTSQACSECHDKMVLI

SEQ ID NO: 553 - protein, 348 aa, Neopyropia yezoensis
ATRHLRTARVRKAIQRGRFAASVAPDLTGGLLRQVRGGGAVVVAMGTERVRGRDAWLRRHLRRLCWFVDQDEFNTSQACSECHDKMVLIYPTGNSPPKTPGELYGPPAGPLPSTRRVRMAAGSRRGRPKRALPSATHVTRRGPHPVAYRAAVRATARAAAVARRAAALAACVVEDRAVYADQRRLSEWAAKGCYTCSLAAPQGPGYPAPHPPVIRNWDDVAARNMAWVAARRLTGTDVWPFKHPFGMRWAWTTKRPPNGVPVPPVRRTRATTRVDVWPVLAAVDTVGDGGGGGGGGGGGGGGGGCGGGGGGGGGGGGRGVVDGDATAASCATRRGAPGGERVADTARR

SEQ ID NO: 554 - protein, 402 aa, Neopyropia yezoensis
KRGERTRGHPAVVLTRPLKTPAVFAMTPPVHGRTPPASATTTLLDWAAASLTWAAARSTADYAGAYGKDALRPLRTARVHRHVQCERFAAKVARDLSGGYGRRIVDGKAVLVVWGAAATRGGATALKRHVARGCFLATQDEYNSSQACADCHFRLVFVYPTDLSPDDRRQVINMAQCAAQALGDEDGNKRKVLVRRRRAAKERRRCDGRGGCSSQDLTRRGRAEEGDAGEAREWLAEILVSGKRSGGYDMPACWSVKTCVNPECGRLYLNRDKDAARNIAQVAVSSLLGRSRFPFFRNCLPRRPLAATAQWCRDTASEWHPPWFVSDSAGGGGGGSGGGGGEGGGGGGGGGGRGGGGGGTTSSVWATTKLVSVRALDGATAYSRTATSPAGDGGGNCRTVHQ

SEQ ID NO: 555 - protein, 626 aa, Neopyropia yezoensis
IFVWPGGQVLGWEILSGEILRGPWGDKGRDSGAWPCVPVPTKKLLDHTPSSCLSVGGLPHNRDRVCGTCTSSGSPDTGGSPCTPPQLGCRVCKWFLPQGCRRLAPVPGLRYSLSAAHFREASGGNFLARAWKQWRARSGTGAGPVAAAVAGLVAAAGDGGGVAGHLPPVDLAAVHGTMRTGDDGKHLQATLEWAARRDTAAYGQRFGAQATRHLRAARVRKAIQRGRFAASVARDLTGGLLRRVRGGGAVVVAMGTERVRGGDAWLRRHLRRLCWFVDQDEFNTSQACSECHDKMVLIYSTGNSPPKIPRELYGPPAGSPASTRRVRMAAGSRRGRPKRALPSATHVTRRGPDPDAYRAAVRATARAAAVARRAAALAACAVEDRAVYADPRRLSEWAAKGCYTCSLAAPQGPGHPAPHPPVIRNRDDVAARNIAWVAARRLTGTHMWPFKRPFGMRWAWTTKRPPSGVPVPHVRRTRATTRVDVWPVLAAVDTVVDGGGGGGGGGGGGGGGGGGGGGGGGGGGGGGGGGGGGGGGGGGGGGGGGGGGGGGGGGGGGGGGGGGGGGGGGGGRGVVDGDATAASCTTRRGAPGGERVAAAGSAMDGVRRAETGATDAPRGLVDTARR

SEQ ID NO: 556 - protein, 721 aa, Neopyropia yezoensis
RSSSGLDCRWRASGGLQMVGGDPGRSAVLSATPGERVATADPPAGPAVAAMRAAWSRHMGLDALNRAAVALLRGAGVQDGVAAAATTPEGHPPGGSRKRAAAGAPAAGAGTGGGRSKRQARRSSPEGSDDDAAAVAPAAAGGTTPPEARTYQTASPGGGHGRVRRGPQASIRRARRTQLATSVRRVLRRTRLSRWTVPRHEAEEVALWLVDPTAAAGNSASGTTPDAPLLDRVDALPRRKGCRRLAPVPGLRYSLSAAHFREASGGNFLARAWKQWRARCGTEAGPVAVAVAGLVAAAAGDGGGVAGHLPPVDLAAAHGTMRTGDDGKHLQATLEWAARRDTAAYGQRFGAQATRHLRTARVRKAIHRGRFAASVARDLTGGLLRQVRGGGAVVVAMGTARVRGGDAWLRRHLRRLCWFVDQDEFNTSQACSECHDKMVLIYPTGNSPPKIPRELNGPPAGPLPSTRRVRMAAGSRRGRPKRALPSATHVTRRGPDPDAYRAAVRATARAAAVARRAAALAACAVEDRAVYADPRRLSEWAAKGCYTCSLAAPQGPGHPAPHPPVIRNRDDVAARNIAWVAARRLTGTNVWPFKRPFGMRWAWTTKRPPSGVPVPPMRRTRATTRVDVWPVLAAVDTVGDGGGGGGGGGGGGGGGGGGGGGGRGVVDGGVLYDATRCSWWGTGGGGRQCDGRGTSGGDGGDRRAPWSGGHCKTLRQRTSCP

SEQ ID NO: 557 - protein, 328 aa, Neopyropia yezoensis
AAAQAEVKLRDTAEYLAVHGTDATRPLRKAHLHCHAQRKGLARQFSLELTGGLGRRIVKVALVAWGAAVTGGGALHLYRRARRYMYAVRIREHNTSAACAGCNNRVVNVYPTPRSPADRRRVTNGAALEEARSQTYGAAVGAKVVELRRRVAKCRRGTQSRRGGADRDAVERGKDRALDDAWATERLRAIIALVKRAAGRDGAAAWMAHNCVCVSFLVTYFNRDKHAARNILKAASAQLSGGNKSPFFPGCYVRRTPAGPPPGPNYNWSRDTANSWAPRCRWGQPRAGRRRRAPQMLTTTVTTRTSRTSRTRRTRPGLTTSWCRSLCR

SEQ ID NO: 558 - protein, 312 aa, Neopyropia yezoensis
DLRPPQQVGGVWSCPGPSHGPCQEECTSLFWAQSGVGWEILSGEILRGPWGDKGRDRRLGHASPSRPRNCWTTHHLLVCQWGDCPTTGIECVRLALLPVLPTREAALVHRPNLGAACARGFCHRGDACLRRHLRRLCWFVDQDEFNTSQACSECHDKMVLIYSTGNSPPKIPGELYGPPAGPLPSARRVRMAAGSRRGRPKRALPSATHVTRRGPDPDAYRAAVRATARAAAVARRAAALAACAVEDRAVYADPRRLSEWAAKGCYTCSLAAPQGPGHPAPHPPVIRNRDDVAARNMAWVAARRLTGTHMWP

SEQ ID NO: 559 - protein, 1758 aa, Neopyropia yezoensis
CIANGRGLPEAPKGWVPASRHAAPHAPWRAGSAEGGFNCSVAIAPQHGGGHSPNTCHREGGEEGGGAGGEGGKGGGGEGRSLAMVGRAARMLACQSAQMPQCMRCTPSRTHRRATGGCHESVLCAVCNWATNSITTTAAATPPPPAPPPPPPPPPPPRHRTLSRQPPSATGAAEMRRTFHFWGGELRPRDFPQGHVAVRASSALPPAGEVASVGGWRGAGGGGERGGVGGGWEDLDRRPPDGPCSPSPASTARVRHRVRTLARMVPCQTINRAVGGAPRFPIFANPVSHRRQSLPPTLLTVVPTHTTRSSASAPPPPPPPPPPPPPLPPPPPPPPPPPPPPRPGFTMNDDDDGSDQDIGVDGLDGDTTTDEEWDPAQEQAYVQDARNVVTLKRAVLAANLSHLQGVSAPHGGDAASSADWSAAVAQLQQAAKDEEAAGPLDGAGEDLVAAITGAAQAVSVYCGGRAAASEAEVELAARAQTAAGLIGVAAAGLPRREAATDAPPARKGRTQKCGGCGEPGHKVTSCKAPAGAGPAAAAAAAAAAAAVPAAAAAAASKCRDCLGGGHSSGDAACPVQRHCGGVPAAYDRGVNPDCKDPLQSTGRQTRACTVPVGVLARAVFGDDKDDADTRAAVETALQAELEDLSGAATKLRFLMLRVLDVALRRLVSTVADAAADDADWAGAVPANWAPVWLWLAYACGCEGVSGSPLQAGTVCEGCGKGRANTRMARARSVVTTSHPLLAEALSYALTQVMAVTAAACDRYLPASNNTARWEPVATVVATHAGRCVDAACRKLGAKAAKDALATPPAAKAAPAGGSAWDTERRLTRWAAARFRAGTADKATPGRRGLDGVPQHLVQALAQRVAVMRAAMPPSVAGLFPATPVKKRRWWAYVPFLLHVLNVGVGSPYALIPGARAVLHGHGTLVPDRMLPLLRAVSAATGVGVRGHPSLRAWPELRTGGEAVLAAMAGVGSRANRASSQLSTDGVAVTFFLSRPDTAAEAEARAVAWAKKLDGGGRARDRSGKGFASRVGVLTQLERAGLPLARVRWLQMVGGDPGRSAVLSAAPGERVATADLPARPVVAAMRAAWSRHMGLDALNRAAVALLRGAGVQEGVAAAASTPKGHPPPRGSRKRAVAGAPAAGAGTGGGRSKRQARRSSPDGSDDDAAAVALAAAGATTPPEAKTYQTASPGGGHGRVRRGPQASIRRARRTQLATSVRRVLRRTRLSRWTVPRHEAEKVARWLVDPTAAAGDSDSGTTPDAPLLDRVDALPRRKGCRRLAPVPGLRYSLSAAHFREASGGNFLARAWKQWRARSGTEAGPVAVAVAGLVAAAAGDGGGVAGHLPPVDLAAAHGTMRTGDGAKHLQATLEWAARRDTAAYGQRFGAQATRHLRTARVRKAIQRGRFAASVARDLTGGLLCQVRGGGAVVVAMGTARVRGGDAWLRRHLRRLCWFVDQDEFNTSKACSECHDKMVLIYSTGNSPPKIPRELYGPPAGPLPSTRRVRMAAGSRRGRPKRALPSATHVTRRGPDPDAYRAAVRATARAAAVARRAAALAACAVEDRAVYADPRRLSEWAAKGCYTCSLAAPQGPGHPAPHPPVIRNRDGVAARNMAWVAARRLTGTDVWPFKRPFGMRWAWTAKRPPSGVPVLPVRRTRATTRVDVWPVLAAVDTVGDGGGGAGGGGGGGGGGGGGGGGGGGGGGGGRGVVDGDATAPSSVMRRGAPGGEQVAAAGSAMDGVRRAETGATDAPRGLVDTARR

SEQ ID NO: 560 - protein, 643 aa, Neopyropia yezoensis
HFSLTVAAALLRGAGVQDGVAAAATTPEGHPPRGSRKRAAAGAPAAGAGTGGGRSKRQARRSSPEGSDDDAAAVAPAAAGGTTPPEAKTYQTASPGGGHGRVRRGPQASIRRARRTQLATSVRRVLRRTRVSRWTVPRHEAEKVARWLVDPTAAAGDSASGTTPDAPLQDRVDALPRRKGCRRLAPVSGLRYSPSAAYFREASGGNFLARAWKQWRARRGTEAGPVAAAVAGLVAAAGDGGGVAGHLPPVDLAAAHGTMRTGDDGKHLQATLEWAARRDTAAYGQRFGAQATRHLRAARVHKSIQRGRFAASVARDLTGGLLRQVRGGGAVVVAMGTARVRGGDAWLRRHLRRLCWFVDQDEFNTSKACSECHDKMVLIYSTGNSPPKIPGELYGPPAGPLPSTRRVRMAAGSRRGRPKRALPSATHVTRRGPDPDAYRAAVRATARAAAVARRAAALAACAVEDRAVYADPRRLSVWAAKGCYTCSLAAPQGRGHPAPHPPVIRNRDDVAARNMAWVAARRLTGTNVWPFKRPFGMRWAWTAKRPPSGVPVPPVRRTRATTRVDVWPVLAAVDTVVDGGGGGGGGGGRGAVDGDATAASCTTGRGAPGGERVAAAGSSMDGVRRAEAGATDAPRGLVDTARR

SEQ ID NO: 561 - protein, 737 aa, Neopyropia yezoensis
RAGLPLARVRWLQMVGGDPGRSAVLSAAPGERVATADLPARPAVAAMRAAWSRHMGLDALNRAAVALLRGAGVQDGVAAAATMPQGHPPRWSRKRAAAGAPAAGAGTGGRRSKRQARRSSSEGSDDDAAAVAPAAAGATTPPEAKTYQTASPGGGHGRVRRGPQASIRRARRTQLATSVRCVLRRTRLSRWTVPRHEAEKVARWLVDPTAAAGNSDSSTTPDAPPQDRVGALPRRKGCRRLAPVPGLRYSLSAAHFREASGGNFLARAWKQWRARSGTGAGPVAAAVAGLVAAAGDVGGVAGHLAPVDLAAAHGTMRTGDDGKHLQATLEWAARRDTAAYGQRFGAQATRHLRTARVRKAIQRGRFAASMARDLTGGLLRQVRGGGAVVVAMGTERVRGGDAWLRRHLRRLCWFVDQDEFNTSQACSECHDKMVLIYSTGNPPFKIPRELYGPPAGPLPSTRRVRMAAGSRRGRPKRALPSATHVTRRGPDPDAYRAAVRATARAAAVARRAAALAACAVEDRAVYADPRRLSEWAAKGCYTCSLAAPQGPGHPAPHPPVIRNRDDVAARNMAWVAARRLMGTNVWPFKRPFGMRWAWTTKRPPSGVPVPPVRRTRATTRVDVWPVLAAVDTAGDGGGGGGGGGGGGVEDGEDGEDGGGGGDGGGGGGGGGGGSGGGGGGGGRGVVDGDATAASCTTRRGAPGGERVAAAGSAMDGVRRAETGATDAPRGLVDTARR

SEQ ID NO: 562 - protein, 287 aa, Andalucia godoyi
MHLRFRMAASLLLLASPSLHSPPLRRSIGTTIRGCRESGTEGSTATRCGISRESAKPTWRTASSSVLRRSCVAMSSHPFPQTAKTDGVLVSFGPEYETMCRPRAADDEMVPREPHPRRRRAAAGRDDQQQQPRQVPAGMTLVGIDPGRANILTAFDGTAVRSEMRNQWYHATGANAERRWMGQRSGRVCEILDELSALPRTNQEADWFPHLHFYRAHVNALWSHFTNHQGLRHCATVNCPSDRRCVGRDANAAMNIRQCWLSRPRFLCRNPRSIPSASELESRVGHS

SEQ ID NO: 563 - protein, 232 aa, Andalucia godoyi
GEAASPCLRIHRIHSRRRRAADDEMVSREPNPRRRRGAAGREDQQQQPRQVPAGMTLVGIDPGRANILTAFDGTAVRSEMRNQWYHATGANAERKWMEQRNGRVCEILDELSALLRISQEADWLPHLHFYRTHVNALWSHFTNHQGLRHCATVNCPSDRRCVGRDANATMNIRQCWLSRPRFLCRNPRGIPSASELESSREALMKIEHVWFCRTFHASRSNFRLRQVESKLL

SEQ ID NO: 564 - protein, 235 aa, Andalucia godoyi
GCVPILSCSITVRISLMDNLDDCFLSFSSSALHPDTLLSSELRMHGKRERENRQAPVVPSTTTHRVFAGFASIKAEQKDAAAVNTGRHQHVLFHRHSCLRALGQNSTGDTGSAFSTLLNAASVAIYSIIRWFHFLQRLFHKATEYRERHVAIVTEEHTSKTCGRCGEIHARRGGSKVFACPACSSQIDRDWERSAEHLSEECREACWGPIRFPTTGCKIEYACLFVGMQHVQCIV

SEQ ID NO: 565 - protein, 265 aa, Andalucia godoyi
NTNKGAQKESATRRRKSERKREKNRLQSPQKGHLCLLSYPYTSPRTLFSSHTSIAEASQKLWLPTATDCVATVSSFASGSFRKLGQNSWFSTTLHRQDPTKNLPTTSSPSSTCLWHGATGSVRPQTGSDAAERPKKIRKLSSASKKDRRRKLRSKTARQMVTWSHYRFRQHLLHKASQYGREVLIVTEEYTSKTCGRCGNTHWKLGSNKHFFVPKLSLHHRPRLEWSAEHLSQKYESSRLTGRRWGLSRLCWFLGPTDCNINDHD

SEQ ID NO: 566 - protein, 235 aa, Taenaris catops
KAERVKAIHAKIKHTRQDLIHKFTTQLVKDNALIVVGDIQSNQFNSKKGKLAKSVYDAGWFELKRQLTYKCENAGCRFEIVNERYTTQRCSCCGEITANSPKGRKSLGIREWICASCGTWHDRDINASKNILAVGLDILFACKIKSSFCLNVFKGKFKKSFLSFKEEKTEKRSAGGRKEKEETKEEEYNKSLLLVSLCAHDIWRRKVRNGEEKEEEREEEKEEQNGGDKNEGVEE

SEQ ID NO: 567 - protein, 255 aa, Actias luna
NVTISKKSGHWYVSFGTERALSENPTHPSKSAIGIDLGITKLITTSDGQYIKPKNSFKANQIKLAKLQRQLSKKVKFSENWKRQNRKIQKLHNHIANIRHDYLHKITTAISKNHAMIACEDLKAANMSRSASGTMEKKGRHVKAKSALNKSILDQGWGMMVNMFEYKQQWQGGLLIKVNPRYTSQTCFECKHIAKENRRTQANFECVECRYVTNADVNAARNILAAGHAVLSAEGGCVKGRPLKQKTCDLREKVT

SEQ ID NO: 568 - protein, 263 aa, Actias luna
DRKITWPGRSSHYVYTTIIPNKESFMLYAYPNTENSPVQFREKYDNFINGEWVAPFDGEYFDNPSPIDGKIICQVARSKEADITGIDLGCRDSATTSNGEVLKTKVTQRYAKKLGTAQRAKNKQRVKAIHAKIKHTRQDLIHKFTTNLTKTNKIIIIGKLQSKSFTKGKLAKSVYDARWFEIKRQLTYKCENAGCYYDEVNESYTTQTCSCCGSRQNSPKGRANLGIREWLCECGVTHDRDINAAKNILALGLERLVVGIPSL

SEQ ID NO: 569 - protein, 206 aa, Actias luna
HIKPKNSFKANQIKLAALQRQLSRKALFSQNWKKQKNKIQKLHHHIANIRHDYLHKITTNISKNHAMIACEDLKVANMSKSASGSATQHGRNVKAKSGLNKSILDQGWGMMVDMIEYKQHWTGGLLVKVNPQYTSQACFECKHIAKENRRTQAKFECVKCGHKANADVNAAKNILAAGHAVLSAEGGCGKGRPLKQKTCDIREKVA

SEQ ID NO: 570 - protein, 391 aa, Psitteuteles goldiei
KMIKTQVVKIKPNSHMYSEIKSLFGYRRYCWNKALELWTNMYDESTIVGDVSLRPSGRKVRDTLVAFKEDWENYLSSRVLQQTVISLEKAWKNYFNKSMPNHKKPKFKSRKNYQLTFTTDSARIKDGKLVLERPKLVEKTDWYPIRMHEKIRFEGELKTCTITEKADGLYASLTFETSQEPSIPVKQDVAGVDVNVRRFNYNDGVVWIYPNTLEHYYEKIKYYQRILARKREANKNNYKTKRYAKVRAKLRRLYQKVYNLQNDIIQKFTTQLISKYSEIHIEDLNVHGMMMSKRMGKNLHRSMFARFSEVLKYKAEWNNRELILVDRFYASTQICSECGFQKTDDCYGGKQTLTGDSIHHDHQTYHCYECGAVLDRDANAVQNIINFKVAG

SEQ ID NO: 571 - protein, 391 aa, Psitteuteles goldiei
KMIKTQVVEIEPNSHMRSEIKSLFDYRRYSWNKALESWNEMYDESIIVDDVSLRPSGRKVRDTLVALKEDWEYYLSSRVLQQTVISLEKAWKNCFNKAMPNHKRPKFKSRKNYQPTFTTDRARVKDGKLILERPKLVKKTNWFPIRMHEKIRFEGELKTCTITEKADGLYASLTFETSHEVSIPVKQDIAGVDVNVRRFNYNDGIVWIYPNNLKHYYEKIKYYQRILARKRETNNHNYKTKRYAEVRTKLRRLYQKVYNLQNNIVQKFTTQLISEYSEIHIEDLNVHGMMMSKRMGKNLHRSMFGRFSEVLKYKAEWNNRELILVDRFYASTQICSECAFQKTDNCYGGKHTLTGDNIYHDHQTYRCYECGAVLDRDANAVQNIINFKVAG

SEQ ID NO: 572 - protein, 221 aa, Psitteuteles goldiei
DVAGGVAAVGGPGARDGSKYDNPSHFAKHYRNLKRQQKKLSRKQKGSHNRIKAKVKVAKVHSKIAHCREDFLHKLSRKIVNENQVIAVENLNVKGMVRNPKLAKAISDVGWGMFTTMLKYKAEWEGKTYIEVDRFFASSKTCHVCLNRVDSLSLDIRQWQCQHCGTCHERDVNAAQNIRNEALRILSLGTSDTAWVGSVRQPGKTSVLLDAVPVESGSPML

SEQ ID NO: 573 - protein, 259 aa, Psitteuteles goldiei
QKQKRKIQRLHSHIANIRKDYLHKTTTKISKNHAMIAIEDLKVSNMSKSAKGTAEQHGRNVKAKSGLNRAILDQGWHEMRRQLEYKQLWRGGQVLAVPPAYTSQRCACCGHTAKENRLSQSKFECLECGYTENADINGARNILAAGHAVLAHKPTPHPANRLLSSWLAGFPLTLLQSKKAKVLALPHGQTLSQPQTAEQLSGWEGGNQGRATKETAGKRCKASTVGSQTQARLYLHKRPSRAGIQLSMNTPLVGGIAQI

SEQ ID NO: 574 - protein, 278 aa, Psitteuteles goldiei
ISGVSSLIKIVSSNSRQLWCKTSFLVGYDGESITEFATNDISKINRLCYHVDVLMSQISQCQIKRKRYRMRKASHRMRERIRKLVDDLHKKVAHVLVNHYKLIFLPTFNSSEMVLKSRRKLNSKSARHLLTWSHYIFSKRLMQQAERKGVLVVRCNESYTSKTCPHCGKIHEKLGGSKVFKCPNCGNSVYDYPLHPYTKALLSAVPIPDPEIEAKRERIILKGDVPSFLLPSCGCRFYSRCPSANLVGNRCRVEEPQLREINPGHFVSCHLWDSQNPP

SEQ ID NO: 575 - protein, 405 aa, Carybdea marsupialis
LTMLQAVKVRLYPEPLQQEALSKSMGCARWYWNFALNACIQHYQETGQTLKLSVYKGMLPQLKKEYPWLKTDCYSAVLQCVAINLNKAYKNFFEGKAKFPRFKSKRRKQSIQYPQNVIVANNCLKVPKIGKIKAVFHREIVGKIKTVTISQAPSGKYYASLLLEEEAALTPHPYAKEKVAGIDLGLKDFAIVNDGEKTEKYSNPKHIAKHEKNLKRKQKKLSRKVKGSKSRDKARKLVARVHERVSNSRQDFLHKLSRKLVDENQVIVVESLNIKGMVKNHCLAKAISDVGWGTFVNFLEYKLAKAGKVLVEIDRWFPSSKICSECGHQMDAMPLDVREWTCPKCQTLHDRDENASKNIRSEGIRQLRALGISASAGGGDVRLVINNVDEKQCPVNPEAAHLSIG

SEQ ID NO: 576 - protein, 306 aa, Picochlorum sp.
SHKRTFYRNERLKTKTRQSSQKGSKGWLAYAKMTMVYITQIVSLSVWTQVKSQRPRGFFMIRKSKRSMQSGMQKMVVIQRWKTDIKVILWGQENGSSYLVRNSIQPKKKRMSEYCPAWVSVPTYKTVDLEKIFESYRFQVSMWPQLQQAFFDDKKWYQKQKMRKFCKEKSAMEDVVARICGTRNKEAQKRVIVAYGDGDNNGTMRGTAPIMSTKLFNKVSECATVVLVNEFNTSKLCSCCHEAMEQYNKQFRMKRCHNNECIRNVWDRDVNASINIKDLFLEKCHNGSRIKAFKRTRKRQRTSTRQ

SEQ ID NO: 577 - protein, 769 aa, Picochlorum sp.
KKKRKVSATPSKKVKKKKFTRLDVAIKKDKDRFFNKTVVKCTLQPFCKFKVVQREIEECVFYLSRLQIHVHHVMHLLLLRNGGAFRDHKDETLYELYNKIYRHLANHLQQKKERKDVDTNLRDLCKEYCEETGLRTDWPQGCLSSWRGKTMEQMAQQSSVMHTTHLETNLNVYALRYLRYLLFRDDTDFDQIKNLSKKKFGQVFSAITQAFWERTKVSDIVERRPSLTEFASDVSVWDEAQRALDIICSLVPKTTTLSEKSRICFFILGHLEPFVESLQQRFRNGEFEGKKSILGRQKWTFCLCPQMAWKPKHIHISSTAVKTMVEQLAKKYPYIRKIVDDCPALDDYTNKYYYWKSIFNMKRVLKKKHMKDQTKLRFGCSICTDGVSVSAVIDTVKSDLECKIIHLQDDMNYVKAKLWATYCGMFATNIIAKKIRYDPLRILLGDISTIHYVLLKPLLHTLKSQKDVLQKRKAKNKDKTVITERIKRLAGIRKDDHSIYHTDCIIVGLDPGKKSAATWVFHDSEKQKIHAKWNAENGRHTEVEDKYKSDSLGSGEWIFLSSQKQYTAKMKKRMSEYCPAWMSVPTYKTVDLEKIFESYRFQVSMWPQLQQAFFDDKKWYQKQKMRKFCKEKSAMEDVVARICGTRNKEAQKRVIVAYGDGDNNGTMRGTAPIMSTKLFNKVSECATVVLVNEFNTSKLCSCCHEAMEQYNKQFRMKRCHNNECIRNVWDRDVNASINIKDLFLEKCHNGARIKAFKRTRKRQRTSTRQ

SEQ ID NO: 578 - protein, 801 aa, Picochlorum sp.
HLVHLTLVNPNLLEPWIGMKSSRHRQPCHFKMKKKRKVSATPSKQVKKKKFTRLDVAIKKDKDRFFNKTVVKCTLQPFCKFKVVQREIEECVFYLSRLQIHVHHVMHLLLLRNGGAFRDHKDETLYELYNKIYRHLANHLQQKKERKDVDTNLRDLCKEYCEETGLKTDWPQGCLSSWRGKTMEQMAQQSSVMHTTHLETNLNVYALRYLRYLLFRDDTDFDQIKNLSKKKFGQVFSAITQAFWERTKVSDIVERRPSLTEFASDVSVWDEAQRALDIICSLVPKTTTLSEKSRICFFILGHLEPFVESLQQRFRNGEFEGKKSILGRQKWTFCLCPQMAWKPKHIHISSTAVKTMVEQLAKKYPYIRKIVDDCPALDDYTNKYYYWKSIFNMKRVLKKKHMKDQTKLRFGCSICTDGVSVSAVIDTVKSDLECKIIHLQDDTNYVKAKLWATYCGMFATNIIAKKIRYDPLRILLGDISTIHYVLLKPLLHTLKSQKDVLQKRKAKNKDKTVITERIKRLAGIRKDDHGIYHTDCIIVGLDPGKKSAATWVFHDSEKQKIHAKWNAENGRHTEVEDRYKSDSLGSGEWIFLSSQKQYTAKMKKRMSEYCPAWMSVPTYKTVDLEKIFESYRFQVSMWPQLQQAFFDDKKWYQKQKMRKFCKEKSAMEDVVARICGTRNKEAQKRVIVAYGDGDNNGTMRGTAPIMSTKLFNKVSECATVVLVNEFNTSKLCSCCHEAMEQYNKQFRMKRCHNNECIRNVWDRDVNASINIKDLFLEKCHNGARIKAFKRTRKRQRTSTRQ

SEQ ID NO: 579 - protein, 862 aa, Picochlorum sp.
HEIGVMRTWLTFLPYPATEKDSCTNHHNHLAKYDVYLSRFIHYCLQSEDSFLGEHLYLFEGLTRKQYNFVSGRIMALLREEKASNNANDDDDEKENESNNTKNDEQEKKSIHKMLEGTSPRSREGIPEKVWDTLECFMSDFLLPNYYNKKIVDFDYQERSVKLYQMLQVLAPHGREMQRLALENRKRMGQRETISAAEADNLFAMPKFRSLGGDTDWRGTDGNRFRALYDNKQIEDLYAEMRKKKEIDGDRLSRVERIAYNVINGFVRRRNAMTRKTPRMRRQQKWAFDLCPQASYRAKYMPLTNTGLQQLLKFIAKRDEKVKESRRRVQELQEEDVAFMMEEGIDKDSSLAKHLLSFRYWDECFNLKTVMKDKYPEDPRSFLLMCYQHPDQIPKAKRFGNFISTDGYGTTASLEKLKEGIDKDICKLGKQIATLKDKKGKTKKEKEDLETLKEQRKQMWLDQKKQQYNIPEESGFTVTHILRQEDMDTVESLLDRWIKESGDISKECGDMVVTMKREFMTVFEQVRQGDPDRSRGRDTMDFNARLLHDLAKEWIEKDMSVEWKERDMSEETRSQFQKMGKELMSLLEKVQIYETNRKVIGIDMGKSNVATAVYHDTSLQRVHMSNEKTNKEDRFKTLSITNKAWRNKSGQMAYTFLMNKRITKFVPEMNSRPTTRTTNTDSIMESYRFMNTQWKNGTGAESGGGLEKAFFTGSYRKRKMFQGFKRQKAIADFVMLVLQGGDEEASFCRKQAKEVIVAYGDACPRHNTKGVAPAPNMPFYRKFKELATCVLVDEHRSSMNCSGCIQEMKDGCVFRLKCCRNNTCVRTTWNRDTNAGINMFNLLLWKILYGDRPRTFSRTKKK

SEQ ID NO: 580 - protein, 801 aa, Picochlorum sp.
HLVHLTLVNPNLLEPWIGMKSSRHRQPCHFKMKKKRKVSATPSKKVKKKKFTRLDVAIKKDKDRFFNKTVVKCTLQPFCKFKVVQREIEECVFYLSRLQIHVHHVMHLLLLRNGGAFRDHKDETLYELYNKIYRHLANHLQQKKERKDVDTNLRDLCKEYCEETGLKTDWPQGCLSSWRGKTMEQMAQQSSVMHTTHLETNLNVYALRYLRYLLFRDDTDFDQIKNLSKKKFGQVFSAITQAFWERTKVSDIVERRPSLTEFASDVSVWDEAQRALDIICSLVPKTTTLSEKSRICFFILGHLEPFVESLQQRFRNGEFEGKKSILGRQKWTFCLCPQMAWKPKHIHISSTAVKTMVEQLAKKYPYIRKIVDDCPALDDYTNKYYYWKSIFNMKRVLKKKHMKDQTKLRFGCSICTDGVSVSAVIDTVKSDLECKIIHLQDDMNYVKAKLWATYCGMFATNIIAKKIRYDPLRILLGDISTIHYVLLKPLLHTLKSQKDVLQKRKAKNKDKTVITERIKRLAGIRKDDHGIYHTDCIIVGLDPGKKSAATWVFHDSEKQKIHAKWNAENGRHAEVEDRYKSDSLGSGEWIFLSSQKQYTAKMKKRMSEYCPAWVSVPTCKTVDFEKIFESYRFQVSMWPQLQQAFFDDKKWYQKQKMRKFCKEKSAMEDVVARICGTRNKEAQKRVIVAYGDGDNNGTMRGTAPIMSTKLFNKVSECATVVLVNEFNTSKLCSCCHEAMEQYNKQFRMKRCHNNECIRNVWDRDVNASINIKDLFLEKCHNGSRIKAFKRTRKRQRTSTRQ

SEQ ID NO: 581 - protein, 801 aa, Picochlorum sp.
HLVHLTLVNPNLLEPWIGMKSSRHRQPCHFKMKKKRKVSATPSKKVKKKKFTRLDVAIKKDKDRFFNKTVVKCTLQPFCKFKVVQREIEECVFYLSRLQIHVHHVMHLLLLRNGGAFRDHKDETLYELYNKIYRHLANHLQQKKERKDVDTNLRDLCKEYCEETGLKTDWPQGCLSSWRGKTMEQMAQQSSVMHTTHLETNLNVYALRYLRYLLFRDDTDFDQIKNLSKKKFGQVFSAITQAFWERTKVSDIVERRPSLTEFASDVSVWDEAQRALDIICSLVPKTTTLSEKSRICFFILGHLEPFVESLQQRFRNGEFEGKKSILGRQKWTFCLCPQMAWKPKHIHISSTAVKTMVEQLAKKYPYIRKIVDDCPALDDYTNKYYYWKSIFNMKRVLKKKHMKDQTKLRFGCSICTDGVSVSAVIDTVKSDLECKIIHLQDDMNYVKAKLWATYCGMFATNIIAKKIRYDPLRILLGDISTIHYVLLKPLLHTLKSQKDVLQKRKAKNKDKTVITERIKRLAGIRKDDHGIYHTDCIIVGLDPGKKSAATWVFHDSEKQKIHAKWNAENGRHTEVEDRYKSDSLGSGEWIFLSSQKQYTAKIKKRMSEYCPAWVSVPTYKTVDLEKIFESYRFQVSMWPQLQQAFFDDKKWYQKQKMRKFCKEKSAMEDVVARICGTRNKEAQKRVIVAYGDGDNNGTMRGTAPIMSTKLFNKVSECATVVLVNEFNTSKLCSCCHEAMEQYNKQFRMKRCHNNECIRNVWDRDVNASINIKDLFLEKCHNGSRIKAFKRTRKRQRTSTRQ

SEQ ID NO: 582 - protein, 808 aa, Picochlorum sp.
NLFIICIYLYNVLYFIPNLLEPWIGMKSSRHRQPCHFKMKKKRKVSATPSKKVKKKKFTRLDVAIKKDKDRFFNKTVVKCTLQPFCKFKVVQREIEECVFYLSRLQIHAHHVMHLLLLRNGGAFRDDKDESLYELYNKIYRHLANHLQQKKERKDVDTNLRDLCKEYCEETGLKTDWPQGCLSSWRGKTMEQMAQQSSVMHTTHLETNLNVYALRYLRYLLFRDDTDFDQIKNLSKKKFGQVFSAITQAFWERTKVSDIVERRPSLTEFASDVSVWDEAQRALDIICSLVPKTTTLSEKSRICFFILGHLEPFVESLQQRFRNGEFEGKKSILGRQKWTFCLCPQMAWRPKHIHISSTAVKTMVEQLAKKYPYIRKIVDDCPALDDYTNKYYYWKSIFNMKRVLKKKHMKDQTKLRFGCSICTDGVSVSAVIDTVKSDLECKIIHLQDDMNYVKAKLWATYCGMFATNIIAKKIRYDPLRILLGDISTIHYVLLKPLLHTLKSQKDVLQKRKAKNKDKTVITERIKRLAGIRKDDHGIYHTDCIIVGLDPGKKSAATWVFHDSEKQKIHAKWNAENGRHTEVEDRYKSDSLGSGEWIFLSSQKQYTAKMKKRMSEYCPAWVSVPTYKTVDLEKIFESYRFQVSMWPQLQQAFFDDKKWYQKQKMRKFCKEKSAMEDVVARICGTRNKEAQKRVIVAYGDGDNNGTMRGTAPIMSTKLFNKVSECATVVLVNEFNTSKLCSCCHEAMEQYNKQFRMKRCQNNECIRNVWDRDVNASINIKDLFLEKCHNGSRIKAFKRTRKRQRTSTRQ

SEQ ID NO: 583 - protein, 1020 aa, Picochlorum sp.
STASVSLATGNNVGFESHHINEDFYNYQACMMATADGEVQAYVQDTSPKLGLYRKPSGKQTQYENLVIKVIKPGSLGGYQNHSRETKGQWRGVARSPRLKNLLFDTATMLGHISFEATQAAHYHVYRCLENGIDLGPMDFNGFWYKIFDAIKDLRYGGGLHHIDTHLYDSLREYEENAPLRRDDHHIDADEPFGIWDLPGHRVWRHACLKAAAKTKEQNLGVILQTNAYHNLGKVIKVRIAEYFGDTYADNFRSLVSAIAKCIWDDQPLEKVKEGYKRLSDLTQEEIRDIACHVIDPIREKFPDETGRKDNSKMIQFVYFVMGEVIEYNRVRSRQRGAQIVKFVNVCVGQQLANDIEREMGDLSKKKFVLFMKHALDIFRQCSGSDTSSVCRDIGIRCSQRVSMNGKYRSYILRRLSERILYQTENSMLKDELVLDQHQTMWIDRITAQLQLPSSLSEFESKKDLFVKYLREYIVPKLRESNLCVAQRDHQNGNNKIPWGRKIVVPSILPLAKKRACHVSIPNDAITSLAKFLAEEDKDIEQKITAMQIILSEAKERKMAIEKEIDERMLQEQTDEEYEMVCQIERNKIASEKRFRAIPTGKIHKYKMRPEETAFSMDRKKRKEEYLSSSEEFKQAEKEWERAKLLYQECCWMALFNIKVKRRHDAHEWLFGGELSTDGVDVSMQYYRIKTDEEFEAGQKEKKESGKKALQRKTKRTGKKPAGSGSALTADKSDDISSQADWRRAKDVLKDDLSNVCVFDPGPSGHVGIRMDRSKFDTLKENRKHGDYDPFKTIHLSNHEMRARSGKLKRMKLKAIWSESKPKIRAWNATAPSRKVATKAEILDFCRNTNSQLHDVYGFYSQNCFRRQRFSVYSRTQHMLDMMVEKICGTSERKVQEKTVVVFGNAAINSGECRTGRICLGELKRLLRQRCCYIEVDEFRSSQYCCACQTKLEPPPRVGLHKRWKVRRCMNNECERAFWQRDVNAAINLAKFFLWEVHGEDKDKVFRRPCRLDEDDVPDV

SEQ ID NO: 584 - protein, 801 aa, Picochlorum sp.
HLVHLTLVNPNLLEPWIGMKSSRHRQPCHFKMKKKRKVSATPSKKVKKKKFTRLDVAIKKDKDRFFNKTVVKCTLQPFCKFKVVQREIEECVFYLSRLQIHAHHVMHLLLLRNGGAFRDHKDESLYELYNKIYRHLANHLQQKKERKDVDTNLRDLCKEYCEETGLKTDWPQGCLSSWRDKTMEQMAQQSSVMHTTHLETNLNVYALRYLRYLLFRDDTDFDQIKNLSKKKFGQVFSAITQAFWERTKVSDIVERRPSLTEFASDVSVWDEAQRALDIICSLVPKTTTLSEKSRICFFILGHLEPFVESLQQRFRNGEFEGKKSILGRQKWTFCLCPQMAWKPKHIHISSTAVKTMVEQLAKKYPYIRKIVDDCPALDDYTNKYYYWKSIFNMKRVLKKKHMKDQTKLRFGCSICTDGVSVSAVIDTVKSDLECKIIHLQDDMNYVKAKLWATYCGMFATNIIAKKIRYDPLRILLGDISTIHYVLLKPLLHTLKSQKDVLQKRKAKNKDKTVITERIKRLAGIRKDDHGIYHTDCIIVGLDPGKKSAATWVFHDSEKQKIHAKWNAENGRHTEVEDRYKSDSLGSGEWIFLSSQKQYTAKIKKRMSEYCPAWVSVPTYKTVDLEKIFESYRFQVSMWPQLQQAFFDDKKWYQKQKMRKFCKEKSAMEDVVARICGTRNKEAQKRVIVAYGDGDNNGTMRGTAPIMSTKLFNKVSECATVVLVNEFNTSKLCSCCHEAMEQYNKQFRMKRCHNNECIRNVWDRDVNASINIKDLFLEKCHNGSRIKAFKRTRKRQRTSTRQ

SEQ ID NO: 585 - protein, 801 aa, Picochlorum sp.
HLVHLTLVNPNLLEPWIGMKSSRHRQPCHFKMKKKRKVSATPSKKVKKKKFTRLDVAIKKDKDRFFNKTVVKCTLQPFCKFKVVQREIEECVFYLSRLQIHAHHVMHLLLLRNGGAFRDDKDESLYELYNKIYRHLANHLQQKKERKDVDTNLRDLCKEYCDEVALERDWPQGCVSGWRDRTIEQMAQQSSVMHTTHLETNLNVYTLRYLRYLLFRDDTDFDQIKNLSKKKFGQVFSAITQAFWERTKVSDIVERRPSLTEFASDVSVWDEAQRALDIICSLVPKTTTLSEKSRICFFILGHLEPFVESLQQRFRNGEFEGKKSILGRQKWTFCLCPQMAWKPKHIHISSTAVKTMVEQLAKKYPYIRKIVDDCPALDDYTNKYYYWKSIFNMKRVLKKKHMKDQKKLRFGCSICTDGVSVSAVIDTVKSDLECTIIHLQDDMNYVKAKLWATYCGMFATNIIAKKIRYDPLRILLGDISTIHYVLLKPLLHTLKSQKDVLQKRKAKNKDKTVITERIKRLAGIRKDDHGIYHTDCIIVGLDPGKKSAATWVFHDSEKQKIHAKWNAENGRHTEVEDRYKSDSLGSGEWIFVSSQKQYTAKMKKRMSEYCPAWVSVPTCKTVDLEKIFESYRFQVSMWPQLQQAFFDDKKWYQKQKMRKFCKEKSAMEDVVARICGTRNKEAQKRVIVAYGDGDNNGTMRGTAPIMSTKLFNKVSECATVVLVNEFNTSKLCSCCHEAMEQYNKQFRMKRCHNNECIRNVWDRDVNASINIKDLFLEKCYNGSRIKAFKRTRKRQRTSTRQ

SEQ ID NO: 586 - protein, 801 aa, Picochlorum sp.
HLVHLTLVNPNLLEPWIGMKSSRHRQPCHFKMKKKRKVSATPSKKVKKKKFTRLDVAIKKDKDRFFNKTVVKCTLQPFCKFKVVQREIEECVFYLSRLQIHAHHVMHLLLLRNGGAFRDDKDESLYELYNKIYRHLANHLQQKKERKDVDTNLRDLCKEYCEETGLKTDWPQGCLSSWRGKTMEQMAQQSSVMHTTHLETNLNVYALRYLRYLLFRDDTDFDQIKNLSKKKFGQVFSAITQAFWERTKVSDIVERRPSLTEFASDVSVWDEAQRALDIICSLVPKTTTLSEKSRICFFILGHLEPFVESLQQRFRNGEFEGKKSILGRQKWTFCLCPQMAWRPKHIHISSTAVKTMVEQLAKKYPYIRKIVDDCPALDDYTNKYYYWKSIFNMKRVLKKKHMKDQTKLRFGCSICTDGVSVSAVIDTVKSDLECKIIHLQDDMNYVKAKLWATYCGMFATNIIAKKIRYDPLRILLGDISTIHYVLLKPLLHTLKSQKDVLQKRKAKNKDKTVITERIKRLAGIRKDDHGIYHTDCIIVGLDPGKKSAATWVFHDSEKQKIHAKWNAENGRHTEVEDRYKSDSLGSGEWIFLSSQKQYTAKMKKRMSEYCPAWVSVPTYKTVDLEKIFESYRFQVSMWPQLQQAFFDDKKWYQKQKMRKFCKEKSAMEDVVARICGTRNKEAQKRVIVAYGDGDNNGTMRGTAPIMSTKLFNKVSECATVVLVNEFNTSKLCSCCHEAMEQYNKQFRMKRCQNNECIRNVWDRDVNASINIKDLFLEKCHNGSRIKAFKRTRKRQRTSTRQ

SEQ ID NO: 587 - protein, 811 aa, Picochlorum sp.
NSMGKKRKEKNTETSSSNSKKKQKAVNRPDVAAKKNNDRFYHTTVIKCTMNPLCRYKVVQNEIDDCVFWMSRLQIHTSHIMNLFLLQNCGRLPLGEKKKDKAKNLPGLYNKMMRQMANHLQSNTEKKGVDTELRDLVTWYCENVGLKPDWPSGCVSSGWRADILNEAARRMATMHDNHIQVNLETRFSMRYLKMLLRSKEEYISIRELPKKIYAKVFSTIRDAFYEGKKVLKIAKRRPSVIKLCPLDSHVWGVAQDLTTRLRNFIPSKGASLSRKSQTMFDIMMEVEPFSDDLQQRFLNGEASNGKFGKQTWKFNMCPQLSWRPKHIHISTTAVVHLLEDMAGKHSHFGRLLRDLEGITKEKYLSYEKKLRLWSALFKLKKTVLRQRHVNNQNDCRFGCFISTDGVSVAATIQRRKSKAHCDVIRLNDDIAYLIGKTKTVGKGVLNSYAYGKWCLEVCQMRGKKGMGDDATALLPKLKDLIGEVTLPVDFLVLFSRIYPLIDGLQRKRMNLLAGINKRNDQTLIHEDIKDLMQLEKVDGIYYAKCKVVGLDPGKKSAATWVYHDPLKQTKHKKWKGDEGEKTMKEERYDSGSIGGGEWRYLSGQKQYTAKMNKRMTAFCPSWRSLSSTKTVDIERTLAAYRKQVELWPQINNAFFHGSKWFQKQRMRKFCKRQKAMEDVVAKIAGTKNKEEQKKVIIAYGDGDKNGTLRGTAPMMSTKLFKKVSENCRVVVTNEFRTSKLCSCCHGIMSQLRKQFRMKRCLQNDCIRTVWDRDINASINILNLFLHYCYSVKDNGKGERLSPFKRKRGCDE

SEQ ID NO: 588 - protein, 1025 aa, Picochlorum sp.
RVCRFLCAGYSNTISKSKKRKRATKPTTSSGEENLLHGDHIWNTQSIKCSFGGFCKIESLRDALRKQNHWFSQQDVHVHNVMTIYISENEGQMFPGGVIDENTGKEKKCTTGDLVKVWDVAYATVLQCLRNQKIRKTKNEQTLARKKAFYDLCARYCADTGIARDWSNEDLANFSAVIQQQRRTAVTNHHNHLAKYDVYLSRFIHYCLQSEDSFLGEHLYLFEGLTRKQYNFVFGRIMALLREEKASNNANDDDDEKENESNNTKNDEQEKKSIHKMLEGTSPRSREGIPEKVWDTLECFMSDFLLPNYYNKKIVDFDYQERSVKLYQMLQVLAPHGREMQRLALENRKRMGQRETISAAEADNLFAMPKFRSLGGDTDWRGTDGNRFRALYDNKQIEDLYAEMRKKKEIDGDRLSRVERIAYNVINGFVRRRNAMTRKTPRMRRQQKWAFDLCPQASYRAKYMPLTNTGLQQLLKFIAKRDEKVKESRRRVQELQEEDVAFMMEEGIDKDSSLAKHLLSFRYWDECFNLKTVMKDKYPEDPRSFLLMCYQHPDQIPKAKRFGNFISTDGYGTTASLEKLKEGIDKDICKLGKQIATLKDKKGKTKKEKEDLETLKEQRKQMWLDQKKQQYNIPEESGFTVTHILRQEDMDTVESLLDRWIKESGDISKECGDMVVTMKREFMTVFEQVRQGDPDRSRGRDTMDFNARLLHDLAKEWIEKDMSVEWKERDMSEETRSQFQKMGKELMSLLEKVQIYETNRKVIGIDMGKSNVATAVYHDTSLQRVHMSNEKTNKEDRFKTLSITNKAWRNKSGQMAYTFLMNKRITKFVPEMNSRPTTRTTNTDSIMESYRFMNTQWKNGTGAESGGGLEKAFFTGSYRKRKMFQGFKRQKAIADFVMLVLQGGDEEASFCRKQAKEVIVAYGDACPRHNTKGVAPAPNMPFYRKFKELATCVLVDEHRSSMNCSGCIQEMKDGCVFRLKCCRNNTCVRTTWNRDTNAGINMFNLLLWKILYGDRPRTFSRTKKK

SEQ ID NO: 589 - protein, 801 aa, Picochlorum sp.
HLVHLTLVNPNLLEPWIGMKSSRHRQPCHFKMKKKRKVSATPSKKVKKKKFTRLDVAIKKDKDRFFNKTVVKCTLQPFCKFKVVQREIEECVFYLSRLQIHVHHVMHLLLLRNGGAFRDHKDETLYELYNKIYRHLANHLQQKKERKDVDTNLRDLCKEYCEETGLRTDWPQGCLSSWRGKTMEQMAQQSSVMHTTHLETNLNVYALRYLRYLLFRDDTDFDQIKNLSKKKFGQVFSAITQAFWERTKVSDIVERRPSLTEFASDVSVWDEAQRALDIICSLVPKTTTLSEKSRICFFILGHLEPFVESLQQRFRNGEFEGKKSILGRQKWTFCLCPQMAWKPKHIHISSTAVKTMVEQLAKKYPYIRKIVDDCPALDDYTNKYYYWKSIFNMKRVLKKKHMKDQTKLRFGCSICTDGVSVSAVIDTVKSDLECKIIHLQDDMNYVKAKLWATYCGMFATNIIAKKIRYDPLRILLGDISTIHYVLLKPLLHTLKSQKDVLQKRKAKNKDKTVITERIKRLAGIRKDDHSIYHTDCIIVGLDPGKKSAATWVFHDSEKQKIHAKWNAENGRHTEVEDKYKSDSLGSGEWIFLSSQKQYTAKMKKRMSEYCPAWMSVPTYKTVDLEKIFESYRFQVSMWPQLQQAFFDDKKWYQKQKMRKFCKEKSAMEDVVARICGTRNKEAQKRVIVAYGDGDNNGTMRGTAPIMSTKLFNKVSECATVVLVNEFNTSKLCSCCHEAMEQYNKQFRMKRCHNNECIRNVWDRDVNASINIKDLFLEKCHNGARIKAFKRTRKRQRTSTRQ

SEQ ID NO: 590 - protein, 801 aa, Picochlorum sp.
HLVHLTLVNPNLLEPWIGMKSSRHRQPCHFKMKKKRKVSATPSKKVKKKKFTRLDVAIKKDKDRFFNKTVVKCTLQPFCKFKVVQREIEECVFYLSRLQIHAHHVMHLLLLRNGGAFRDHKDESLYELYNKIYRHLANHLQQKKERKDVDTNLRDLCKEYCEETGLKTDWPQGCLSSWRDKTMEQMAQQSSVMHTTHLETNLNVYALRYLRYLLFRDDTDFDQIKNLSKKKFGQVFSAITQAFWERTKVSDIVERRPSLTEFASDVSVWDEAQRALDIICSLVPKTTTLSEKSRICFFILGHLEPFVESLQQRFRNGEFEGKKSILGRQKWTFCLCPQMAWKPKHIHISSTAVKTMVEQLAKKYPYIRKIVDDCPALDDYTNKYYYWKSIFNMKRVLKKKHMKDQTKLRFGCSICTDGVSVSAVIDTVKSDLECKIIHLQDDMNYVKAKLWATYCGMFATNIIAKKIRYDPLRILLGDISTIHYVLLKPLLHTLKSQKDVLQKRKAKNKDKTVITKRIKRLAGIRKDDHGIYHTDCIIVGLDPGKKSAATWVFHDSEKQKIHAKWNAENGRHTEVEDRYKSDSLGSGEWIFLSSQKQYTAKIKKRMSEYCPAWVSVPTYKTVDLEKIFESYRFQVSMWPQLQQAFFDDKKWYQKQKMRKFCKEKSAMEDVVARICGTRNKEAQKRVIVAYGDGDNNGTMRGTAPIMSTKLFNKVSECATVVLVNEFNTSKLCSCCHEAMEQYNKQFRMKRCHNNECIRNVWDRDVNASINIKDLFLEKCHNGSRIKAFKRTRKRQRTSTRQ

SEQ ID NO: 591 - protein, 418 aa, Picochlorum sp.
VLLLEIDIQHEASIEKKHMKDQTKLRFGCSICTDGVSVSAVIDTVKSDLECKIIHLQDDTNYVKAKLWATYCGMFATNIIAKKIRYDPLRILLGDISTIHYVLLKPLLHTLKSQKDVLQKRKAKNKDKTVITERIKRLAGIRKDDHGIYHTDCIIVGLDPGKKSAATWVFHDSEKQKIHAKWNAENGRHTEVEDRYKSDSLGSGEWIFLSSQKQYTAKMKKRMSEYCPAWMSVPTYKTVDLEKIFESYRFQVSMWPQLQQAFFDDKKWYQKQKMRKFCKEKSAMEDVVARICGTRNKEAQKRVIVAYGDGDNNGTMRGTAPIMSTKLFNKVSECATVVLVNEFNTSKLCSCCHEAMEQYNKQFRMKRCHNNECIRNVWDRDVNASINIKDLFLEKCHNGARIKAFKRTRKRQRTSTRQ

SEQ ID NO: 592 - protein, 762 aa, Picochlorum costavermella
TNNNKKEKESIHRMLEGTSQHSREGIPEKVWDILEYFMSDFLLPGYYNKKIVDFDCQERSVKLYQMLQVLAPYGQEMQRLALESRERRRQRETISAEDVGILFAMPKFRNLGGDTDWKGTDGNRFRALYDNKQIEDLYAEMRKKKEKHGNRLSRVEKIAYNFINRFVRRRNATSRKTTRMRRQHKWAFDLCPQASYRPKYMPISNTGLQMLLPSFAKRDEKVKESIRRVQKLQEEDVVFLTKEGIDTKSSLAKHLRDFRYWDEFFNLKTVMKDKYPEDPRSFLLMCYQHPDQIPNAKRFGNSIFTDGYGTTALLEKLKEGIDKDLCKLGKRIATLKDKKGRTEKESEDLKSLEEQRKQMSLDQKKQQYNIPQKSGFTVMHILRQEDMDTLESRLDGWIKESRDISAECHDMVVTMQREFMTVFEQVRQGDPDQSRGRETMDFNAQLLHDLAKKWIERDMSVEWKERDMSGETRSQFRKMGKELMSLIEKVQIYETNLKVIDIDMGKSNIATAVYHDTSLQRVHMSNVKTNKEDRFKTLGITNKAWRHKSGQMAYTFLMKKRIRKFVPKLDSRPTTKTTNTERIMESYRFMNNQWENGTDAESRGGLKEAFFTGSYRKRKMFQNSRRQKAIANFVMLVLKGGDEKAKLSRKQAKEIIVAYGDACPRHHIKGVAPAPNMPFYRKFKELATCVLVDEHRSSMNCSGCIQEMKDGRVFRLKCCRNNSCVRTTWNRDTNAGINMFNLLLWKTLYEDRPTPFSRTKKK

SEQ ID NO: 593 - protein, 216 aa, Picochlorum costavermella
IECMVMRLEFLQHMTRCHQCDGITTMYSILGIYLMDILPFSCDGRGRRCIHTYIHTGGGLKEAFFTGSYRKRKMFQNSRRQKAIAHFVMLVLKGGDEKAKLSRKQAKEIIVAYGDACPRHHIKGVAPAPNMPFYRKFKELATCVLVDDHRSSMNCSGCIQEMKDGRVFRLKCCRNNSCVRTTWNRDTNAGINIFNLLLWKTLYEDRPTTFSRTKKK

SEQ ID NO: 594 - protein, 1015 aa, Picochlorum costavermella
NTRNTMSESKKRQRATRPTTSSGEENLLHGNYIWNTQSIKCSFGGFCKIESMRDALREQNHWFSQLDVHVHNVMTIYISENEGQMIPGGVINPKTGEEEKFTKGLLEKVWDTAYSTALTCLRKKDIRKTKDEQSRALKESLYDVCERYYADSGVARDWSNTVLANFSAVNQSQRRISATNHHSHLAKYDVYLSRFIHYCLQSQDSFLGEHLYLFEGLTRKQYNFVFGRIMALLREEKESINATTNNKKEKKSSNATNSNKKEKESIHRMLEGTSQHSREGIPEKVWDILEYFMSDFLLPGYYNKKIVDFDCQERSVKLYQMLQVLAPYGQEMQRLALESRERRRQRETISAEDVGILFAMPKFRNLGGDTDWKGTDGNRFRALYDNKQIEDLYAEMRKKKEKHGNRLSRVEKIAYNFINRFVRRRNATSRKTTRMRRQHKWAFDLCPQASYRPKYMPISNTGLQMLLPSFAKRDEKVKESIRRVQKLQEEDVVFLTKEGIDTKSSLAKHLRDFRYWDEFFNLKTVMKDKYPEDPRSFLLMCYQHPDQIPNAKRFGNSIFTDGYGTTALLEKLKEGIDKDLCKLGNRIATLKDKKGRTEKESEDLKSLEEQRKQMSLDQKKQQYNIPQKSGFTVMHILRQEDMDTLESRLDGWIKESRDISAECHDMVVTMQREFMTVFEQVRQGDPDQSGGRETMDFNAQLLHDLAKKWIERDMSVEWKERDMSGETRSQFRKMGKELMSLIEKVQIYETNLKVIGIDMGKSNIATAVYHDTSLQRVHMSNVKTNKKDRFKTLGITNKAWRHKSGQMAYTFLMKKRIRKFVPKLDSRPTTKTTNTERIMESYRFMNNQWENGTDAESRGGLKEAFFTGSYRKRKMFQNSRRQKAIANFVMLVLKGGDEKAKLSRKQAKEIIVAYGDACPRHHIKGVAPAPNMPFYRKFKELATCVLVDEHRSSMNCSGCIQEMKDGRVFRLKCCRNNSCVRTTWNRDTNAGINMFNLLLWKTLYEDRPTTFSRTN

SEQ ID NO: 595 - protein, 381 aa, Androctonus mauritanicus
SDYIYTGFDKNKRGGMIYIIEQNRNKIKETTTVKFKIEPNKSQEEMIRTASIEYIKQINILVAEMVENKKITSKTTKHIQAPLNSNVKNQLIRDAKSVFKKAKKNNFEKIPIMKKAIIIYNNKNYKYYENAIRIPFMIDGKSKQVMIKANITEYEWQKLESAEKIGTMRITTKNGNYIAQIAIENEIEQKVSTKVMGVDLGIKVPSVCVTDENEVKFLGNGRYNKYIRRYHNQRRKKLGKAKKLNAIRKSKNKEQRWLQDQDHKISRGIITFAVENNVGIIRLEKLANIRKKTSKSRKNNLSLSNWSFYRLSSYIEYKARLLGIRVEYVDPKYTSQKCPRCEKKNKAKDRKYVCNYCNYVAHRDVIGAKNIIKAPVLNGKS

SEQ ID NO: 596 - protein, 341 aa, Androctonus mauritanicus
IIGECIMFVDMILTCKIKHNQNFDIDLAKARQIAIVAKKTKTRSSKDVKHIGLPSAISNQILRKYSSNKKLKRINSVKLTIPSQGIKLEENTIKVSCVKLNLDFPKRTAKIHQIELDNTYAYVSYAVEEKKEIQCQSWLGVDLNTTGHCVVAANPTTKKVWKLGKIANHIHKKYKNLRRKLQKRKRRKALKKIKNKESRIIRDLNHKISKKIVSEALQNNSGIVLEELKGIRKTAKTSKKFRYALNSWSFYQLKIFIRYKAKLLGIPVAEIDPKYTSQQCSRCGLLGERKAKNFKCSCGHVENADVNASFVISLRHQGILQSPVDRDIGEGQLASPKRQVA

SEQ ID NO: 597 - protein, 320 aa, Androctonus mauritanicus
FRSVAYQSEGFNVNHTTGRDFGTLTLSKIGDIRVRAHRDLPDTKNIKRAVLKKERTGAWFACFVVEVDEPEKPNPAEIDPAECVGVDLGILSYIHTSDDCSVGCVDLKTEYEQYAREQRSLKRKERGSANWEKQRQNVARAKRRIRWKVLDFQHKLSTWLVREYDVVAVEDLDVKPMLETSQSAKNKQDAAWSRFLDLLEYKGDLYGTHVVRVDARGTTKECNQCGVETSKPLWVREHSCPACGHTEDRDLNAAKNILSRGMKQIGAGRSESTSSETLRVSDGLRKSHSDFRTPVQTVLPTFTSFQVDAKHVVEAGSPAP

SEQ ID NO: 598 - protein, 249 aa, Androctonus mauritanicus
GKKKKKKKKKLQLTGRKEISKLLSTGEVLANPKHLEAAQRELRRLQRQAARQQGPDPRTGQKPSNRWRKTQDRIARLHTAIANARLDGLHQLSTRLVDEFDVVVLENLHVAGMVRNRTLARAVSGVGMGELRRQVTYKCAWSHRELIVADRWYPSSKTCSDCHAVKATLRLSARVFTCDHCGHTADRDLNAARNLAGLVETAGSTSSQSCGATQNEPAGNPRKTTTPPGVQGIGYRHGKTAPPGAAKAA

SEQ ID NO: 599 - protein, 237 aa, Androctonus mauritanicus
PAPTGRPHSRRGPWNQQHRRRVVRRRDATVPRWVAQRVQALLQARRVRVRRRERLSRCARNAKRTLKDRRRHFHHTLSKRIITECVERGVGHLYVGDLGGIRAEDDGTGRDWGRHGNKMLHGWAFGKLTTMLEYKGEAAGIEVIVDSERDTSKTCAVCGHKNGGQRVERGLYHCKNCGRTANADANGAENIRQTLLPNPDAFDRLDRDNGCLAQPAVCSFDATDGRFHPQERAHCEP

SEQ ID NO: 600 - protein, 383 aa, Androctonus mauritanicus
RGEVVDRFHRRGGRVGGMGQRVVVIGGGLAGLATAHHLLHARPDLDLTLLDGADRPGGKVRQQSVGGVRVDVGAESVVASSIAARELFAELGLAGQVVHPEPVPASFWSRGARHAIPGRTFMGVPGPQTDLTGLLDEGEVARAAQPAPFALESDDVTIADAVGTVYGRAVVDRVVEPLLGGVYAGRVDHLSLRSTMPALWAAMASGRSRAAAVASLLPPPTSTPRARVMAWSVGSACSSRPCAAVWSTPVDARTPLEPRRPAQRLEGHRPRGHRSRLRGDRLRRLTNIRDRMDNGNDRIKRQMHNWAFRELREMLAYKAAEYGIRVEDVNPAFTSQTCSRCGHQSSTNRDSSTGWFECNECETEYDGDYNAVVGLHPTGSKVA

SEQ ID NO: 601 - protein, 450 aa, Androctonus mauritanicus
SGAGWDRSAHVDVCPVVRASGGEASEGGDAGGGGAAEVSSVIQAYRFVLDPTEVQAAALSSHCGGQRTAFNWGLGRVKANLAQRAAERSYDVPEDQLTPSLNWSAYSLRKDWNVAKHEVAPWWAENSKEVYASGLANLATALDNWNSSRKGQRAGRKLGFPRFRSKCSTWSCRFTTGSFGLTSHDRRHVQLPRIGVVRTHESTRKLARHVERGTARIRSATVSFRRGRWQVSLSVEVERREPKPATRGGTVGVDLGVKHLAVLSTGEVLANPKHLEAAQRELRRLQRQAARQQGPDTRTGQKPSNRWRATQARITQLHTAIANARVEGLHKLSTWLIDEFDAVVLEDLHVAGMLRNRKLARAISGVGMGELRRQVTYKTTWSGRQLVVADRFYPSSKTCNACGVVKAKLRLRQRTFTCDHCGMSMNRDLNAARNLANLVETAGTITSSQS

SEQ ID NO: 602 - protein, 246 aa, Androctonus mauritanicus
NYRTYQVMLRIRGTDQLEGYELANARLVRKPSGYHLLITAFKNKNEIKEKEFVKGSRIGIDMGVKTHLTLSNGVKHNVLIEETERLKRLQRKLSRQIKGSNNYGKTRYLINKQYEKMSNKKNDATNKIIHDMLNNYETIYMQDENLKAWVKKNGYVKAGRKLHHSILGRVKAKLVAHDRVVVLKKWVPTTQLCGGATCGALNKHSLNDRVYECSCGYVFDRDTHAALNMIRLIEEYAMKKKKKKVL

SEQ ID NO: 603 - protein, 240 aa, Androctonus mauritanicus
GQVNPNLKSDFSFKRLVHAPTDQAVGVDTGLDSLATLSTGEKITNPKHEKRDRKKLAKAQRELSRKQPGSNNRAKARREVARVYARITDRRRDHLHQVTTGLVRENQTVVIEDLQVRNMLRNGKLARAISDASWSQFRSMLEYKAHWYGREVIAVDRWFPSSKTCSACGRLTAKMPLHIRPWTCAGCGTTHDRDVNAAKNILAAGLAVSACGAGVRPQRETSRTGQSARKQEPSGASPKI

SEQ ID NO: 604 - protein, 249 aa, Androctonus mauritanicus
GSPKSYLKNLLLMTDLKVIKKLNWFQNYEKTISFSLLTNDTSDSHPRLGSPLADESAALDIGANNIVACTTTTGKQFLYGGRDLFGRFRETAREIARLQSLLEDGRYSSMRIRRLYRKRTSRRDYAMDALVRDLIERLYDDGISTVYVGALTDVLDTHWSVQANAKTHNFWAFRAFIDRLETTAEEYGITVEERSEAWTSQECPNCGSTEDTTRHRDTLTCLCGFEGHADLAASATFLRRHDDVTRLPS

SEQ ID NO: 605 - protein, 300 aa, Androctonus mauritanicus
SIKKIFLTLLKSFEISRILLMGPETESTIESRARDRLDLAAELLEQYPDRIHTPRDIAIERDGERVEVSVDELPVDEPALDVGQRTIDAYTDVFETAGTVILNGAFIEYKARRAGVPVTAVDPRNTSKECFACGCIDKRNRKTQSEFRCVECGHSNNADHNAAGNIARRAAVTEPLFAHECVPCAVESGFRRRRRSATSGSFRFRFERKRFQRRLFLLGLLPELDNFRRLLEAHSAMAVLRGLVEVHHVGGFGLDRVVIGGASRGTVVLCFRMFSYYSSTGDITFIQKKHIRFQTAKQML

SEQ ID NO: 606 - protein, 405 aa, Babylonia areolata
PKKVLKNLLAASNLAWNWTKWLIEERGVSKKDKKTIQTVVARKDIESIFVKTLVPDFVYLNKSLLKKTTTVRLTGMHAYLAALKSSTSLHKGCLNKFNIDYLDLYPASGTFGVQKLFVRKFAVSMLPKKYKGEPLSDRRMSILPESFGTKAQPQERFLKIAKGRSFSKMPPIDHDCKIHLRSDKMWMLLIPCKRSYLRRDNTKDQPKNEGVALDPGVRTFQTSYDPFKKEIREYGGDNIKSKIKFYKTKSQRHEHLARHSKTEQLRRDHKNRARMFWHKHETLRDQVHRKLACNLVKDNKVVIVGDFSSSKAASKKNGSKLTKGTRSEMYSWAHYKFKQRLMERARGTDTKVIFQDEAWTSKTCGKCGHIKMDLGGNKQYDCEKCGLSIDRDVNGARNIFAKALM

SEQ ID NO: 607 - protein, 406 aa, Catotricha subobsoleta
RWWTFYPFFAKLQSWFTSYRYINKYGVECRLKSFPLCPKKKFGASHIMYSNSGMAELLVKYKFITTPHKEIIKDSLPIWNNHFGIVKLSRNGKLDFAESFSTNGINVSVKFKREKQQEEITKDDFHFEHVKRLYTANEFNNYLGIDPGYRLMIGAVETDKDGNETNFKLSSKQFHYATGKNERKVKLDKWTKNFEDSMERLRKYEEKCTKVEISNKNSNFRQYTKYQLKYLNAQQKKKNTLKITRLSWDKCIRTRIFLDNITNQVLPEGRNTLVAYGDGSQSSNSPIKKYVRTPQIGLYNAFKRKRHKCTVLSTDEFRTTKLCSKCYNLVWTPHRFQFCQNCDTVWNRDVNAARNILFRAKCHLEEAALPYNCTRNTSSDSTIRFSFVKTESNRDSDVVWNGLLSL

SEQ ID NO: 608 - protein, 247 aa, Catotricha subobsoleta
SAIMIEQLKKIDCLKLKKQAIERLIQVRHSNDENDDVNDDSINEDFVDDESIYEPTDETAANRILDIRTFVAEISVKSTEYELFTTFKLKHHLAECNTKICPRTARIKWDAKIGKRQLIDKVANEIIGKPLPGKKTLVRFGDGTPGPIIRGYRKVPLNGLYAALARQKERCTVFRTDEFRTTLLCSGCHRSAPPSELPKHRFQVCKLCKVVWHRDVNAGRNILYVSLQKIQGLPVDSNFLRSTMPAT

SEQ ID NO: 609 - protein, 247 aa, Catotricha subobsoleta
EIYTINPIFNESNFLQNALYEWKRFFNIEQFESVKSSKTFGLSVSTNGVDVSVHMLRPKNDNRNKLVENTENEICTDYNNANFNRFIGIDTGLRCLYGAVQIENKEKNLLLRNGSFLKRTNHFKRKMELIKRTYQQQNTVRVNREIFLKNNNIEISKKNMNYVEYTDFMLAHMTQTYSSNKPKNVLRINWDSKIQRQKPIDKLANELIGDIDKRHPNKKTLIMFGNVKVSNAVKGYVRTPLLKLYTA

SEQ ID NO: 610 - protein, 278 aa, Callirhytis sp.
DPDPSPRTMDPDATGRNTSSDSSLPKHRKCSSREINLSHKNQIALKEWKGTTWSMLIQVDVPSACRGSFRWRDDHCPFAGAREPRAGQRDFLTKSSDNLSDSGEEEFEKERDVKETPCFVLIRKTDIPAWIRGHASTRVRLMEKRLKERAKFYGPEKLKITDTSEFYATQLYITCNEQCFVSKTKHRYVICQKGRIMWERDVFAARNILNSGSIQGIPLHEAPSLLRRKKRSNHINPETRSRCLSLNGIRLYYVQNSTPRPNNRGYFLTLIKDTTSKY

SEQ ID NO: 611 - protein, 216 aa, Heteractis magnifica
LHDLIKLGTSLKQAYKEVEKYRLPEPKQGQVGIDLGIGTLFATSSDEPTFGKEGKDDPNRNPKPYKKYESKLKQLQKRLTKKQKRSSNWKKQHRKIARIHEKIANIRIDFVQKKTTELVRDNQVICIEGLNAQGMARNRKLAKHIYDSNFGRARTLLIDKARRYGRSIIKVDTFFPSSKTCKVCNHKYDQPEKFTLEIRAWTCSKCKGFGKKQLKL

SEQ ID NO: 612 - protein, 494 aa, Isoetes engelmannii
VCVPLQSPNFWLSWDAVLPAFATSRHHQTRDLSGHHSTGLRNHWFGLVELSGFPMNVYSLKAFKFQLRAKPAAEQSLNRWGGQLRWIWNKALAEQQRRHAAGEKFASYEDMTKWLTTWRNAPETTWLAEGPSQSQQQVLKRLEDAYKRFFKAVKTGDTHRVKPPRFKRRGDDPGIRFPNPKALELDQMNGRIKLPKLGWVRIRQSCVVTGDLRNVSLTRKLNKWHVSIQVRVPEVLPAADPQPTLGIDLGLVNFATLSNGEQVQPLKALACKQVRLRRYQKSVSRKVKGSANRKKAVKKLARAHQRVANCRSDWTHKLTTELANRHVVIAIEDLKVSNMSASAKGTAAAPGRNVKQKAGLNKAILDVSWAEFRRQLEYKLTARGGRLIAVDPAYTSQTCHECGHVDKANRTSQSTFTCVACGHTDHADVNAARNILARAKALADLEHAASVQTEKEGPDMARIACGEDISRARPARAKHAASMKQEPAERLACA

SEQ ID NO: 613 - protein, 1456 aa, Ostreococcus mediterraneus
ANIPASLARNHGKGVTATMAKKGRGSKPKKVDQRAAKKRGGYIADARRTVFGKIGTMLEYPTLTSCDKGVNISAHRRILNSVRPEIKEIKAKAVGLSRAARMGCHVQDVVDVATGAYGSQATNPEIFKAKVKMVSDLFERRNGKPSKPEYSRDWLEKELIAMAESSVVIVQRAFDDEAMEYIRKRKKRIKASMDEDEKWQGVAAGLKDAEQLMKESSMRLPKTCKREVFLCATGFAYDLQNLKRHVGKYVRAGAAKKRKLFSGIEVVHETARQRAQTMAKVATRMKMTALVLPFATQLATQCIDELSDGASDIDDSKRRFIWLDSKPEAFVTLVLKVIARCIAYAPQSSGHLSRADQTERNVQAIKVQLERAEVVASAVAHFARVLEECADEFHAYVKMAIAREHAVDDVDAFFGGYPGAHHNTIATIADRLVQNSKTALVSNAKYRFRDMARAIVASWQKPTEDAAIEMSGLLRHRRSRLALLGWLQYNFVYKTVTEDRPSESGFRVGMLPYRDVCEKMLEKRPLAKHSPRPAVRKALELFGVKKSLSALQNIFEAQVERYLHGFSSEDTWIVAIATWFKRIPCAKVVKMPFSALAAFTVWSKKYSAEGTVLLNATFELPSSLAAIDDANALRRYVIEESVSFIWNTNLKNKFAAAQLELASERHRRILKASIKTMWLRAIKGALLTASFATGIVEDENADTVASEVAENASTMVVFEWSAGGLEFTRSTSVQVCSSVIAFLQQCKGQAPARKEFVYLDLIKMLQSHTSALGAAVTEHINELGEATKRLLTHLPHVTAATSQARDSTREETKDDAWFERANQRAIKKKMLEVISNEVALLSRGVEPSDSAAPSDTPSDSASVDTGSIARAHIWVPPPIRAKCRAFCMASETPHEVYVDRTMVTTLFRRFARDWSSSSSSSSSSPPPPPPFDLDTGSSVVEPGNLIFNTLLNRRVMQRRRQDDQSSDLETPWEFSGSITLNRIRVSVSCTRQVFKLGAEAQKAADVENQLPPPIKDSRELILIGADPGVNTPLTSVTLYRRETQQGQSAIVASRKSRRNEAVQESQVNVEYVNRYVPNNFSAMGARLFRKRQRRILNARRKAEKSFEAQGFPSARAAIADVKARSTSMNVAFRATSRKTAKMFKCAKTFVADAYAYWARAGNVREPNDKPTILMLVGEQGVRVNRGWSQAPVSRSSRGGNAAMFMDMVTAMKHEKLHTRYVNEFATSRDCPCCCQALVPARSGRPSFASESKRRIITPNKRNGRICVNAKCEFALECDNRDVYASINMIKVYRAYCEENGEQSGFVGIMDSFLHECFGLQNMHMNKRPVDALGEEGEGDGEDEDDGEDVESDDEEDIAVDVLRTLSMKPQVDDPATAASYALAMLTGRPHPRHGSNSPGSSPDRDANLRRRFSSPTDPDSNSPTPGASTQSRPRAERNLSRAFANVADQSEPDSRP

SEQ ID NO: 614 - protein, 217 aa, Brettanomyces custersianus
FLHPDSNGNHIWYDESVEGMNSAMMASLKALKRRVFTSSDATRKAKRLKISMIRARNRIIERIQRKKVNNERWMCNYLLRNYGTIIIPQFVDPNESWISRLLNEPGFIQRLIYEAPHYNRPTTILVVSESNTTKTCSSCGSEYNPRDAEIYSCPNAKCCMTADRDQNGAANIMIRTMFLLEAYNKGIHIQSINGNYLRGRQHAREREDLTFVPYVFR

SEQ ID NO: 615 - protein, 491 aa, Phytophthora chlamydospora
VLSTDPKTSLCSRCRARKRNKKPLVKDCTSCKKLKEIVEEIRPTIPRKQNKKIAWRSTEILKLFAKYLTEVEKFNNDHAADPDVIPERAYTVLPSKRGFRCSYFEVSSTGLGDLLRRSRDRMDRDMLDMTVVTSEGGVISLEDSLRGDAWKPAIAALWWRKLFNVEELEFIDRQGTKRLRFYDRVATDGKSVSVIFEKSVTKPTASSKRYRLEDYDKVKGSDPGYTDMFVACTYDTHTEQISNDFISYPSSKFYSNSGYTSSNRYTQRKINRSSDVKTIMHHMPSSKTASLNKLRAYVQYTIPHLQKLLQFFMRSNYRGMRFRRYMLAERNLSRACRELAGPPGQRTLVVTGDLDISNKSGAIKKKTPGSVKRLLRKLSEYCDVMIVDEYKTSKIHHDCQSPENMENQQVQRRFRRDRKLHTVCVHKVLHCKKANGGCGATVNRDVNASLNILEVGLTQLREGGDARPERLRRSANDNQEAAQAAVRPRTD

SEQ ID NO: 616 - protein, 725 aa, Phytophthora chlamydospora
RKASSARCSGALSPGRLRTGSKPLLSKKLSRAHMPRAPRRRRAAAQRAEPEWRSRLGTAVSDAYRTLGRLLFIIIDQERDVIMLRKQLRIFRPRIALLALGRMSSRRRLQQLPPLEECTAKVRELLASERRMLRVSPVATISFWMQAVLSDLLVHVLVGDADADRPLAQKIGWQRTRSMDRLFGQPYLTALQEGMRPGALMPVVGRLPQSFPQFARRPSVPAQTDMAALRQLGPPARWVVDPTEHEARRQAFLHRQERAQEEHTLRSAIERSYSYEKEASLPAAALIIAQDREAIKAQLKPLQEADRLLLVRAQKHRLFPTESQARQLRSYMAAARWTYNQCVAFARRPTMAVNLSNLMVHCVTRSTALRRNFPEGMGAPPAWVFETPASVRNNVVQQFLAARKAAITNLHRGNIRHFTMHFKSVRTHRYFTIKEDQRRVHMDASSEAGRRLLSITGVTGISVRMPADTEIAGAVTIAYQHGYWYAVVPTVVEPAELSPQGGCTAGDPGVKCFLTTIDLEGNVVHYGRRPREQDERHPDKLARLSERISRAQAAMSNFQNIEGRRHTSREWRAYNLSKREFHRCWALLGYQVDELHHKVIAQLVQTADVILIPEFRSQSMLLPSAPRTHTFNRNLLSLKHYKFRQRLQAVCERTGKTLVVCSEMYTSMSCPNCTLLYENLGTQDVYACPHCAFTAGRDETAAFNILRFTSAGSLNVKKINGKEIQ

SEQ ID NO: 617 - protein, 291 aa, Phytophthora chlamydospora
FENLELSYPRYAEYITRMPSFKTASSMKLLAHYEHVWSSINIMLEFCALKGFRKWRFTVSRFKRKTVAALAKRVVPTLDPGVCVALGKWSSQTHLAGHMHVPLKRFAAELSRRATLIMVDEFRTSLLCSDRFQPMTGMPFKIAGTTNTKLSRNARRCRNEACQATCWVRDVNAAKNMWQLGQLQVAGQRRPRQFVQGVRPVVSQTQFMRGNGAPERETQTRAHSVRQNAIFVFFCPVRTYIFFEITPMNKLQCRVLIGGRWIKIGGFNYLFKSISYIQISLPHTLTPRSGG

SEQ ID NO: 618 - protein, 591 aa, Triparma laevis
IYIFRKYTMKRKKKETDTDPPGSIGKCKGISLQSKHVNFTASQMRRYVDGMQNVLSVCIGHLPDEGATLRSAMRSVATMVLMMSKRGASITIEYPRTPRKMISTVKSCVRDTSSLTTQLFRMWVRETTGVAVALRPFWNRRCEENSEKLWLPTETDSVGSHTNSSSLFSNSIPSNSWFSIKQHVHQKQNSHRISCPSSTFSHAGKWGDAVTKSSVMGMKKVRFVPTKDQQVLLKEWMGASRFMYNRTVHVIEKEKQKVNFFGIRDRLVPKKKLKERDAWLLQTPKNVRAASVKDVITAYKSAFTNMRQGHIKRFHMRFRSKKHETSEWLNIPKSSIAPTEDGKAVYMFKRRMKSPLTLKGDTLKSVDHDCKIHHNKETNRWYLLIPVKHSVAENQGTRKPIVSIDPGVKTFLTLYDPTGTVTKFAHDDMKAVIVPHYLKTDGLISAATKCKSKKTKRNLKLRIAIRREKVKNRVHDMHTRAAKHLVTNYDTVLIPDMGTSHMVKRMFGKTNRRTLLGWSHYQFIQRLTYYGQKHGCNVQVVTEEYTSKTCGACGTLHPTLGNGDMYCCKKCGTCIDRDTNGARNILLKNME

SEQ ID NO: 619 - protein, 231 aa, Phytophthora syringae
VPAPGRFQPLSSMERESEAKVSRVQERDWHKTASYEQYLKRLEYFWQHAAFLLRFSAERPYVKWRFFQKRMARVAVDTLARRIVPTVSRLTCVAYGDWSRRDGIKGHAPSPVKGLKEALRKRAVVVSMDEFRTSKLCSQCHQSLSSVQYPTPVFPENVKKPKRKKVKGKVLPRDWSQAEIKSRHCHAVLLCENTDCQARYWDRDVNAAINMLEILKSEVQGRGRMEPFRRS

SEQ ID NO: 620 - protein, 382 aa, Phytophthora syringae
NAESQALASFFNFRRAAQVMEPQEEPPPHRRHRPPWWDAEVQRLAEDAWLPVIDDFCARSGQAASSILRQLKGKALFGLRGCTDLRLHRRTPPRDDVAAAIGDDEDDINSTFRVERQQFVNRDPRSRHSSLRLQESPVLHDLPWVGIRNGQGNPYQGRLRAAHSICALTVYSWWQVFLCIPRHKTFVPSTNTRVCAIDPGVRDFISLYDPDGLAVAVHDRDNRIYLRCLAIDHLKSLLSQEHRKRKRYRLHRTIYFTFQKMKRMVHDMHHKVSKWLSVHYEQVLMPALPVAEMVRRHNRPDRRCRRNGSKTARQMLTWSHFKFRKMLSYKMTRPLMQFVSTTRVIWCTPRKHIWNYTNPRRISVMFGLPTSIVFSAFRDHSY

SEQ ID NO: 621 - protein, 233 aa, Phytophthora syringae
RNLGNRSWAHGLHHGYEPRGQVGAISDIRLRRASGYSRSNRKSKRRIDRSPHVRQLLQNTPTKKTASLTELGNAIEWTFEHLAELLTFFMDPFFRKFKFRRYTLRTAQLDRACFVIAGSTGTRTIVGFGDSGTAGEGMIKKSPAGPVKAFARKLARYCEVVVVAEFRTSRVHNDRHASADLTNQRVERVCRDGVRRKVPVHKVLHCLTKEGGCGKTVDRDVNAAKNILNVLQN

SEQ ID NO: 622 - protein, 784 aa, Phytophthora syringae
SNALVHTKSKYTSRWPGGIFMAPWNLHDYSFIRAMERKLKKFEYPGDWNVVEESEDSDDTRPPFETVSETQDIWDLSQEPFQLTVAEARGRREKKPKRNEPKKVTPKSKSIQTRTVQRTKSSGTILEKAFRKGKGYLSVVCRLFSICSDSLLVEEIKRTAGVMKQIQMETWHLVNLHTLRCLESGLSLPDYGNTFFDHCCAGVAPTSKTYLIAEKNPSLWTSIQIYRAGRQRAGLEEIPNMTGFSELKKDMRQTMVTNAGVMIREHFRKRLRVYVEIAFGGSETDKLPTKEKKARKERLRNILNACYNTDDTDLLEALQMRDVLTPDGVEWSEQWIPWPNHMEENDMDFYVRRIWEFQYVVEARMDEIPNEKGVRAFALFPVSSAFVKAHITINGSTLAGFYSRIPDYMWYLPTITTSCISFERNRWTVMRRAFDIGRFETRRPDCPLTKPKFALLSVKEKYQHARHLFANQVTTDGYSASILLIRPKTEDEKLHDNSGPAAVVPPGFVPNVMIGLDPGMRSVCTAVREVFRPEYQQGNRRRRRRRKRGHQRGKRKKKDRPRWITRPKPPRHRNDRDIVQVTTREYRHMAGFNRFRAWNEGQKRQHPEYKKIIAEMPSFKTASFDKYLDGWRTSGDMPRICSTSPVRDHFSSGNSSGGAWCAWRWTKSPGESSPSQSIDVRGLRRLEQAERHAPSPVKGLKQALRKRATVVSMDEFRTSSSARSSTKRFRRSSIALTPISRRGGSGRAWSCRGTEPRCSSRTRRATECCTAATPTATPASGIGT

SEQ ID NO: 623 - protein, 447 aa, Phytophthora syringae
GPNEKGVRAFALFPVSSAFVKAHITINGSTLAGFYSCIPDYMWDLPTITTSCISFERNRWTVMRLAFDIGRFETRRPDCPLTKPKFALLSVKEKYQHARHLFANQVTTDGYSASILLIRPKTEDEKLHDNSGPAAVVPPGFVPNVMIGLDPGMRSVCTAVREVFRPEYQQGNRRRRRRRKRGHQRGKRKKKDRPRWITRPKPPRHRNDRDIIQVTTREYRHMAGFNRFRAWNEGQKRQHPEYKKIIAEMPSFKTASFDKHLERLAYFWRHAAYLLDFSRSRPFLKWKFFRKRKARVAVDEIARRIVPQASRSTCVAFGDWSRRKGIKGHAPSPVKGLKQALRKRSTVVSMDEFRTSKLCSQCHQTLAQVKYRVDTKLPKRRKRKGVVLPRNRAEVQFEDKTCYGVLHCGYADCDASFWDRDVNAAINMLELLKSEVLGRGRMEQFRR

SEQ ID NO: 624 - protein, 323 aa, Phytophthora syringae
VHMNRPTRGKVQKKKEGQEGKTEKTQDKNISDALGFPLPKTSIGRTEYYDVIWGIDPGHTDFITATNHEGKSVRFRTSDFRRASGYSRSNRKSKRRIDRSPRVRQLLQNTPTKKTASLTELENAIEWTFEHLAELLTFFMDPFFRKLKFRRYSLRTAQLDQACFKITGSTGSRTIVGFGDSGTAGEDMIKKSPAGPVKAFARRLARDCEVVVVDEFRTRRVHNDCHASADITNQRVERVCRDGVRRKVPVHNVLHCLTKEGGCGKTVDRDVNAAKNILNVLQNQLAGIDKRPRWLRRAAKTKLPTNSQSIHRVAQFFWGRLLE

SEQ ID NO: 625 - protein, 294 aa, Phytophthora syringae
KRSMTRTRKTKQIRQERVYSILPTKQGVTSSYFSMTSTGLRHLLRRSRNDLNLDMTVGTSDVGLISLQDSLKNNANWTPAVADLWWRKLFHVRELERENVRTNLKFHHRIATDGKGVSVWLHKEKQKPTEPQTRRIEAYDHIKGVDPGYNEMVVACTYNTKEKKFSEDFYSYPSKLFYNNSGYTASNRRIHRKIHRNEKVKAVFSDMPTSKTTSRIKLQAYTENVTPKREMLFSFFMTRNFRNLRFRRQMLSERNLRFACQELAGPSGQRTLVAFGNMPMSNKNGVIKRRHPDP

SEQ ID NO: 626 - protein, 581 aa, Undaria pinnatifida
HNNTVSIMSPDRSFQRSTESPKLPRDDGESQDSCDQFRHQEGTIDTCLMTSSRSDTEQPPDEESHIAGSARQNKKMTCAGRSNPSKKHIPNTRSSRTSDQGSSSKEKAFCECLTPSSKDVSKKLLSRTGIDCVDSLSTFSNGSARGGTHESWFKTRSYFLPSKSSQKISWPSSMCFPASCTEAGGTRTKARKIRLKPQKEQEKVLRERINSARQNYNEALRLVKAKKAKPNLLMNKLVVTSRETDKNSRLESMKSTPADVRKSATRDLVKNFKSARAAYKARLQKVRSGRVRMKKMRKSGKFNGRRRYKKRKPFEVKFKARRLTPDSIEVEKKSISFESNMVSFFGTSKKHSLEVQMSEVFSEESGRHKPSQSYRIAYCFGRWYIIIPEQVQVDKATIDTSTEPRVIGIDPGLRTAFTCSSSSGEVLEVGIETRNRFEREQSKKNSITKKMKDAACSERKRKLRKAWYRCQARAKHLVADLHWKTIKHLLDRYDVIVVGKIGTQSLVSKTGQSASNKRMFSYLSHFSFRQRLKYKAGLVSKVVVEQDESYTSQACFRCGHLKKNLGPAKTYCCRAVESVDL

SEQ ID NO: 627 - protein, 317 aa, Undaria pinnatifida
GSRRCASRGSSTGDAGRKPFEVKFKARRLTSDSIELEKKSISLESNMVSFFGTSKKHSLEVQMSEVFSEESGRHKPSQSCRIAYCFGRWYIIIPEQVQVDKATIDTSTEPRVIGIDPGLRTAFTCSSSSGEVQEVGIETRNRFEREQSKKNSITKKMKDAACSKRKRKLRKAWYRCQARAKHLVADLHWKTIKHLLDRYDVIVVGKIGTQSLVSKTGQSASNKRMFSYLSHFSFRQRLKYKAGLVSKVVVEQDESYTSQACFRCGHLKKNLGPAKTYCCRECGLVMDRDANSGYNIMVRCASEHHATESIVLGKRKS

SEQ ID NO: 628 - protein, 581 aa, Undaria pinnatifida
HNNTVSIMSPDRSFQRSTESPKLPRDDGESQDSCDQFRHQEGTIDTCLMTSSRSDTEQPPDEESHIAGSARQNKKMTCAGRSNPSKKHIPNTRSSRTSDQGSTSKEKAFCECLTPFSKDVSKKLLSRTGIDCVDSLSTFSNGSARGGIHESWFKTRSFVLPSKSSQKISWPSSMCFPASCTEAGGTRTKARKIRLKPQKEQEKVLRERINSARQNYNEALRLVKAKKAKPNLLINKLVVTSRETDKNSRLESMKSTPADVRKSATRDLVKNFKSARAAYKARLQKVRSGRVRIKKMRKSGKFNGRRRYKKRKPFEVKFKARRLTPDSIEVEKKSISFESNMVSFFGTSKKHSLEVQMSEVFSEESGRHKPSQSCRIAYCFGRWYIIIPEQVQVDKATIDTSTEPRVIGIDPGLKTAFTCSSSSGEVLEVGIETRNRFEREQSKKNSITKKMKDAACSKRKRKLRKAWYRCQARAKHLVADLHWKTIKHLLDRYDVIVVRKIGTQSLVSKTGQSASNKRMFSYLSHFTFRQRLKYKAGLVSKVVVEQDESYTSQACFRCGHLKKNVGPAKTYCCRAVESVDL

SEQ ID NO: 629 - protein, 605 aa, Undaria pinnatifida
IMSPDRSFQRSTESPKLPRDDGESQDSCDQFRHQEGTIDTCLMTSSRSDTEQPPDEESHIAGSARQNKKMTCAGRSNPSKKHIPNTRSSRTSDQGSTSKEKAFCEWLTPFSKDVSKKLLSRTGIDCVDSLSTFSNGSARGGIHESWFKTRSYVLPSKSSQKISWPSSMCFPASCTEAGGTRTKARKIRLKPQKEQKKVLRKWMNSARQTYNEALRLVKAKKAKPNLPLNKLVVTSRETDKNSRLESMKSTPADVRKSATRDLVNNFKSARAAYKDRLQKVRSGRVRIEKMRKWGKFNGRRRYKKRKPFEVKFKARRLTSDSIEVEKKSISFESNMVSFFGTSKKHSREVQMSEVFSEESGRHKPSQSCRIAYCFGRWYIIIPEQVQVDKATIDTSTEPRVIGIDPGLRTAFTCSSGSGEVLEVGIETRNRFEREQSKKNSITKKMKDAACSKRKRKLRKAWYRCQARAKHLVADLHWKTIKNLLDRYDVIVVEKIGTQSLVSKAGQSASNKRMFSHLSHFCFRQRLKYKAGLVSKVVVEQDESYTSQACFRCGHLKKNLGPAKTYCCRECGLVIDRDVNAGYNIMVHCASEHHATESIVLGKRKS

SEQ ID NO: 630 - protein, 616 aa, Undaria pinnatifida
IMSPDRSFQRSTESPKLPRDDGESQDSCDQFRHQEGTIDTCLMTSSRSDTEQPPDEESHIAGSARQNKKMTCAGRSNPSDKHIPNTRSSRTSDQGSTSKEKAFCECLTPFSKDVSKKLLSRTGIDCVDSLSTFSNGSARGGIHESWFKTRSYVLPSKSSQKISWPSSMCFPASCTEAGGTTTKARKIRLKPQKEQEKVLRKWTNSARQTYNEALRLVKAKKAKPNLLMNKLVVTSRETDKNSRLESMKSTPADVRKSATRDLVKNFKSARAAYKARLQKVRSGRVRIKKMRKSGKFNGRRRYKKRKPFEVKFKARRLTPDSIEVEKKSISFESNMVSFFGTSKKHSLEVQMSEVFSEESGRHKPSQSCRIAYCFGRWYIIIPEQVQVDKATIDTFTEPRVIGIDPGLRTAFTCSSSSGEVLEVGIETRNRFEREQSKNSITKKMKDAACSKRKGKLRKAWYRCQARAKHLVADLHWKTIKHLLDRYDVIVVGKIGTQSLVSKTGQSASNKRMFSYLSHFSFRQRLKYKAGLVSKVVVEQDESYTSQACFRCGHLKKNLGPAKTYCCRECGLVIDRDVNADTTSWCAVHPSTMQRKASFSASASLRCANTQGLVYAL

SEQ ID NO: 631 - protein, 327 aa, Undaria pinnatifida
NRHRLMCGMATRDLVKNFKSARAAYKARLQKVRSGRVRMKKMRKSGKFNGRRRYKKRKPFEVKFKARRLTPDSIEVEKKSIFFESNMVSFFGTSKKHSLEVQMSEVFSEESGRHKPSQSYRIAYCFGRWYIIIPEQVQVDKATIDTSTEPRVIGIDPGLRTAFTCSSSSGEVLEVGIETRNRFEREQSKKNSITKKMKDAACSKRKRKLRKAWYRCHARAKHLVADLHWKTIKHLLDRYDVIVVRKIGTQSLVSKTGQSASNKRMFSYLSHFSFRQRLKYKAGLVSKVVVEQDESYTSQACFRCGHLKKNLGPAKTYCCRAVESVDL

SEQ ID NO: 632 - protein, 496 aa, Undaria pinnatifida
RQSTTQEIRYGLFGTSRALYSPPTSPGLLLSAKKSTTSILKWRIRFSIKTFLNTQGNNIKISSEEISNLAPPGNQQLTRSTKIKLKPSKIWLRTLNRWFGTSRWTYNRCLSLFKEGKCKISRKDFRSKVIGSHNHGVPKKRSGKARKKRGKNRGNWSNKATQTKTPSKTSWVLETTMEIRDGAMDDLVKAFESNMAKKKINPDHHFDLSFRSKKDVQTIKVPGRCMKGGKFFKSFVGSSATLRSHEDFKDFQGEIKIQKDRTGDLYMIVLKKVTSVERQVNSNDLKVAALDPGVRTFNTSIDSDGGVLEFSPGDISRIHRLCHYNDVLQSKAFDKNTYRSRSRYRMRKAWHRSIKRIKDLVSDVHRKSVNLLCCKCDVIFLPKFETSTMCNRAGRRISKKTARAMMTWSHFRFKELLESKALERDGSIVVDVTEAYTSKTCSCCGIINTKLGSSKVFKCRNCSTTMDRDVNGARNILFKSCCSNKMDISFPVVVHQ

SEQ ID NO: 633 - protein, 672 aa, Thraustochytrium aureum
HRFFLTNYQRQNCEASRKNCQAGNLGSACRDSGRPLTPMGKRKAKREGESLPLDQRTRDSTVAVPASQKKCKVPGLMDLIREVVPEANAAAYYAVLLANMFVTMLLVNAIPVPALDRPFFELCIRRVSSSCTEPTKQRCRDTGIEHAYRYIWGDREKLVKTIYHGNIVGNAATEMATAAELYNTRALYHHMVQYVRSKYNVSKGHAKFICGQIRKKEDQDPLDYESIPDKLDIQESDLHDIILSERDIYLEAVANERIVEYRFMLMTEIQALSTPEKRLKSFTIIPERHPGNQFMTLDQETLSRLWKRRQPSRSDAEAWTRWNDVLETYKSIGDWFKLPKRGSSWDNGASLKTNGFEFHFTFDKNKTRHPVTKRAKKPKSAMTIEEDDWNPERVFTNKAGVDIRDPTNFVAADVGNYNILTCVSPTRETHPTGSPKMDVRNYRKIRYNHESKRTKVNDKVRLLQKDVGIRAYQNVLSQHSMKTTNLESLKDAVLARCKVYHVLYAHYSNRQFLKLKMEARMAERRAIDKMLNWVTYGKTKPLGIGDCSRTTGIKGTSPGGPTKKIKRHAIKSGYELVLVNESYTSKRSACCQGHDLVPAQRRDADGRLEDIHGLRICSKCGNTWDRDVSAAINIFDVFYNSVVLGGPRPPHLLKKCDTGLLGRTWHSHLIRG

SEQ ID NO: 634 - protein, 530 aa, Parietichytrium sp. I65-24A
NFLQTPNSRGWKRSSGPGSWFTKGVKLSRERVNAQMATKTLPKILSQSPRSLWQVIMDVEQRKKEEEERREKEEQLERKRRKESNDKSDDDVIDEKEGEGDDLTPVDDDAIQPPKECTRKVRVFPDEQLRRTIDSWLHNCRFVYNKLVEKYPDVKQSVTISTLRDYVVNTLRVKYPFIEEVPKDLLDNTVVRSFVKARKAEKAKRARLKFKTKKDKQQSFSIRSTDWVRKSGVFAPFRHIAPAINEVIPQNVQHEVKVIRTRLGEYYMCFTGTIERGAWNRKVCGKMNAETDEVRLRDNQAPRESLHSVISLDPGVRTMMTGYSVDEGMCIEFGKNDYSRIFRLCKHVDKLRSSIQQLKNKNKVEKEAGVKMRQRRHFSRRIKSRTTALYRAIRRIRNIIDEFHKKVACALCNTYRVILIPNFQTSQMVKDKLRRKIGSKTARMMCNWAHYRFRQRLISRANLNDWSNVIVCDEVYTSKTCGMCGSIDHRLEGSETFDCKECDNVSGRDANGARNILLRYLTLNREFLDV

SEQ ID NO: 635 - protein, 637 aa, Parietichytrium sp. I65-24A
MSETSGGESRCSSMENMHQEDSDLSCKQSVDSEIAAVLEQLLHQVATDGTAQSPLRNTSKREREEIVTNNELPVKKKRKLPRQESVRLIKKTTSSDRKSPYEETFQSIESYQTSPQESILKGRGFRPFWNLQCKEISKKLWLPTKTDLQDSASISLSGSSVGTAGGFELSLNLKKEEDKASLLQKLNSQKISSQSQRCLTVKCKGEDDTLNESTVRALRMMKVKIYPTKTQRKWLVETQHKLRALRNAAIDEVNSGRIKVSEIRQQMLKSENGDKTINSVAQRLPDDPEQRQKHEAKWKSIDSAPYTLRKNCLRKLEEQYEECFKRVKTGVIKRFKMRFSTKKDKLGRVNIHVEGRTFPKTAYDADYIFLYPRTQIGQDKDGKPIYFKRLKYKMQGSKKRRKPLPDPRLHDCQIVYEHPNRWYMLIPYDVEIEKTQAPFDDITMDPGECTFQTFYSNDAKMTGGIDLQNRRNEIGKLLIKIRLAQSLRDKAKCRGQAQYWSNRFLMLWRKLKDKKLDLHRKTTAFLVSNFNNIRVGDFGSKFVMQSKKMNNDVKSQFSFLSHYEFRQRLLSYSAVRNITVVAESYTSKTCCNCGKIHKNLKAQRVFNCPSCKSEFGRDDNGAVCIYIKDLSGQGTEV

SEQ ID NO: 636 - protein, 279 aa, Parietichytrium sp. I65-24A
SLVVPGGPSGTRTGFPYMAHTSRGKVESDALAEGTVALDPGLCTFQTCYDDSGIVTEWGHNDKVNVLRQLRYADALKARVDCASKLMDAADDRKERAWLRMKRMRLRAACRKMAWRLKNKVTEFHRMLCAFLVRKYKVIILPEFQASKISKRASRNISNRDVRTMLTWRHYGFRQMLINKAKATPGCTLIITDEAYTSMTCGGCGFLHRDLGRSREFHCPSCKTFSIPRDVNGARNIMLRFMQRLGVTPSGEILSSSASGASARLGRSSDKDEMHYTRC

SEQ ID NO: 637 - protein, 375 aa, Daphnia sinensis
KYYFCTMKLMKTYKFKLNPSKAQKETFESWVNTSRFLYNLALNERIMVYEMRKKSVSKYDQYNQLPELKKLYPWIGEVYSDTIQEVLDRLDKTYQNFFRGAGFPKFSKKGEYNSFTFKRSFKVNEKTIKLPKIGEVKYFNSRDIVGKQKTATIIKEDNNWFICITAEYETPFETIEVDNQNPIAFDMGGVRFLALSNNTFIDSPEFMKPFENELRILQRKLARQKKGSKSREETKQKIRKIYKKISNQRLDFLHKVSTNLSNKYSALYMEDLKLQKMQQNGFSNVNKMMSDKSFGNFKLLLSYKFKERGKHLGLVNPAYTSQTCNSCGTVDKKSRMSQSEFVCTSCGTVDNSDVNASKNILREGISKGTKRKALV

SEQ ID NO: 638 - protein, 210 aa, Cyclotella cryptica
FYGTQGNFGVSRKEMTKQKYTVNCARSIVKKKKFFSKKMNALVKKAIDFDGCGSYPLVFYGGAQIRSSMKGIRGGGVPTATMQKLFEDHFDCKVSDEFYTSQICCDYKACLARCANKDRHKVSGFRKEIRGVRYCKNCPPRNRFKSRDGNAARNILAKGQYFLEHGENDPNYEKHNGRMVDKWIKYFPTDLICPMMQMKTREGPCRHHPH

SEQ ID NO: 639 - protein, 240 aa, Cyclotella cryptica
MLVVLQSTLQGYTNFLKHKHFNLVNEPITQVVNSVQLYGTQGNFGVFQKEMTKQKYIVNRARSTIKKNNFFSKKMNALVKNVVNYTRGGSYPLGFYGGAQICSTMKGIRGGGVPRVAMQKLFKDHFDCKMVDEFHTSQICCDCKACLERCVNKEIQGVRYCKNCTPRSLFMSRDGNAARNIMAKGQYFLQHGENDSNYAKQNGRMADDKMVKHYPMDPNRPKLQMKTQEGPRCIIIIESE

SEQ ID NO: 640 - protein, 743 aa, Paralithodes platypus
GYNGHIRPLDSAMKRDGTTTVNKKYKNVKCSLNKILLDPDGSGPLIEKRCLAVSRMAVKASQLCNSVIRDLLAKEDGVSPVATEWTDFTKLNTFVQLFTQGCEAKKRRKPNPAISDTWERWFISTSYQTQPRYHSDYNLINYCAKTYQTCFNNNLALNFVSRQRHAIRFYLKNDQTGEKTTPTAPLVYALQTLVNGWKYVARTYSANQLAELKDWHSAFIDRHVTYLGKPALSGGPVAYLRYYGFLKREYSESTKLRNVPLAPTNAVKAHYVDFDAVGEKGLCRELGIPSGELKETEGWGFIFDLKRRRRMGGNENWTFDRCVSTDGMACSIRYYRYKKNDPGTGTGHKRKKKNDGTVAFPMGMTEVINNNTTTVVSLKGKRIIGVDPGRKNIAFCVELDPETRKITKKTRLTSKQYYCDSGMTEAKRRISSWLAHPEYKKAQEELSRADSEGEGKGSAYLNKYIEHYKTLWQTKTAKKWRRVKFRKYCLGQKTLDAFVNKTLFGGGGGENSSPFHVAYGSAKFSSTGKGEHYSSPKGKLAKLMRERAGTRNFTAVDEWNTSKVCHRCKGPLSPVGFVQVQTEDKGETEEEPKVTDKFIYLRGLRRCSAAPSNNFNEVDTQRRKRQTRIGGSVSSQQSSKKCPIGGAFLDRDSNAAANIAQKLFLDSSKLSSLSTLQRGVKVEKKRVFWLNKVHCKKKKYHTVHTRDGGVSSTALNKKGSYITPKRPNNTDPYHIWIGESFAR

SEQ ID NO: 641 - protein, 315 aa, Paralithodes platypus
QYYCDSGITEAKRRISSWMAHPEYKKAHEDLSRSDSEDVGEGKRSAYLKKYFHPYKTLWQTKTAKKWRRVKFRKYCLGQKTLDAFVNKTLFGGNNRSPFHVAYGSAKFSSTGKGEHYSSPNGKLAKLIRERAGTGNFTAVDEWNTSKVCHRCKGPLSPVGFVKVENDDNEGEMEAEPKVTERLIYLRGLRRCSAQSDNFNDVDTQRRKRQRRIGGNNNDNPVSSQQSKCPIGGAFLDRDSNAAANIAQKLFLDSSKLSSSTLQRGVKMETKRVFWLDKVYCKKSYHTMHTRDGGVSSTALNKKRVVYNPEAAKQY

SEQ ID NO: 642 - protein, 330 aa, Paralithodes platypus
EEWEGTRSGRSTFDRCVSTDGVACSIRYYRYKKNDPGTGTAHKRTKKNDGTVAFPRSTAEVINNNSSTTVVSLEGKRIIGVDPGRKNIAFCVEMGPETRNITKKTRLTSKQYYCDSGMTEAKRRISSWMAHPEYKKAQEELSRADSKNEGEEGKGSPYLKKYIEHYKTLWQTKTAKKWRRVKFRKYCLGQKTLDAFVNKTLFGGGGGENRSPFHVAYGSAKFSSTGKGEHYSSPNGKLAKLMRERAGAGNFTAVDEWNTSKVCHRCKGPLSPVGFVQVQNEDKGETEEEPKVTDKLIYLRGLRRCSAPSNNFNEVDTQRRKRQTRIGGSV

SEQ ID NO: 643 - protein, 529 aa, Paralithodes platypus
RKLPDPTPVSFGLQSLQLLRQDLPDVFQQQPRAKLRIPSEARYTFLPQKRPRGEKTTPTAPFVYALQTLVNGWKYVGRTYSANQLAELKDRHSAFVNRHAMYLGKPALSGPVAYLRYYGFLKREYSESTKLRNVPLAPTNEVKAHYVDFDAVGVKGLCRELDIPSGELKETEGWGFIFDLKRIRRMGGNEKWTFDRCVSTDGVACSIRYYRYQQNDPGTGTAHKRKKKNDGTVSFPKGTAEVINNTTVISLEGKRIIGVDPGRKNIAFCVELDPETRKITKKTRLTSKQYYCDSGMTEAKRRISSWMAHPEYKKTQEELSRADSEDEGEGEEGKGSAYIKKYIEHYKTLWHTKTAKKWRRVKFRKYCLGQKTLDAFVNNTLFGGSENRSPFHVAYGSAKFLSTGKGEHYSSPNGKLAKLIRERAVAGNFTAVDEWNTSKLCHRCKGPLSPVGFVQVQNEDKGETEEEPKVTDKLIYLRGLRRCSAQNNYFNEVDTQRRKRQTRIGDSANPVSSQQSKCPIGGSLSRQRQ

SEQ ID NO: 644 - protein, 396 aa, Paralithodes platypus
EEWEGMRSGRSIGACRPTVWPVLSDTTGIKKKKTGTGTAHKRKKKNDGTIAFPKGTAEVINNNTTIVSLEGKRIIGVDPGRKNIAFCVELDPETRKITKKTRLTSKQYYCDSVMTEAKRRISSWMAHPEYKKAQEELSRANSEDEGEGKGSAYLNKYIEHYKTLWQTKTAKKWRRVKFQKYCLGQKTLDAFVNKTLFGGGENHSPFHVAYGSAKFSSTGKGEHYSSPNGKLAKLMRERAGAENFTAVDEWNTSKVCHRCKGPLSPVGFMQVQNEDKGETEDEPKVTDKLIYLRGLRRCSAPSNNFNEVDTQRRKRQTRIGGSANPVSSHQQSKCPIGGAFLDRDSNAATNIAQKLCLDSSTLSLSTLQRGVKVEKKRIFWLKKVYCKKNIPHRAHT

SEQ ID NO: 645 - protein, 562 aa, Paralithodes platypus
CLAVSRMAVKASQLCNSVIRDLLAKEERTSGVSPVATEWPDFTKMNTFVQLFTQGCEAKKRRKPNPAISDTRERRFVSASYLTQPRYHSDYNLINYCAKTYQTCFNNNLALNFISRQRHAIRFYLKNVRGEKTTPTAPLVYALQTLVNGWKYVGRTYSANQLAELKDRHSVFIDRHATYLGKPALSGQVAYLRYYGFLKWEYSESTKLRNVPLAPTNAVKAHYVDFDAVGVKGLCRELGIPSGELKETEGWGFIFDLKRIRRMGGNEKWTFDRCVSTDGVACSIRYYRYKKKDPGTGTAHKRKKKNDGTVAFPKGTAEVINNNTTVVSLVGKRIIGVDPGRKNIAFCVELDPETRKITKKTRLTSKQYYCDSGMTEAKSRISSWMAHPEYKKAQEELSRADSEDEGEGEEGKGSAYLNKYIEHYKTLWQTKTAKKWRRVKFRKYCLGQKTLDAFVNKTLFSGGGENCSPFHVAYGSAKFSSTGKGEHYSSPNGKLAKLMRERAGAENFTAVDEWNTSKVCHRCKGPLSLVGFVQVQNEDKGETEEEPKVTDKLIYLRGLRRC

SEQ ID NO: 646 - protein, 282 aa, Paralithodes platypus
RRKRSAYLKKYIEHYNTLWQTKTAKKWRRVKFRKYCLGQKTLDAFVKKTLFGGGGENRSPFHVAYGSAKFSSTGKGEHYSSPNGKLAKLMRERAGAENFTAVDEWNTSKVCHRCKGPLSPVGFVQVQNEDKGETEEEPKVTDKLIYLRGLRRCSAPSNNFNEVDTQRRKRQTRIGGSPNPVSSQQQSKCPIGGAFLDRDSNAATNIAQKLCLDSSTLSLSTLQREVKVEKKRVFWLNKVYCKKNHTVHTRDGGVSSTALNKKRVVYNPKAAKQYLLTLTTFG

SEQ ID NO: 647 - protein, 284 aa, Paralithodes platypus
EKWEGTRSGRSIGACRPTPWPVRSDTTGIKKNDPGTGTAHKRKKKNDGTVAFPKGTAEVINNNTTVVSLEGKRIIGVDPGRKNIAFCVELDPETRKITKKTRLTSKQYYCDSGMTEAKRRISSWMAHPEYKKAQEELSRADSEDEGEGEEGKGSAYLNKYIEHYKTLWQTKTAKRWRRVKFRKYCLGQKTLDAFVNKTLFGGGGENRSPFHVAYGSAKFSSTGKGEHYSSPNGKLAKLMRDRAGAENVTAVDEWNTSKVCHRCKGPLCPVGFVQVQNEDNGKME

SEQ ID NO: 648 - protein, 600 aa, Paralithodes platypus
DTWERRFVSASYPTQPRYHSDYNLINYCAKTYQTCFNNNLALNFVSHQRHAIRFYLKNDQMGEKTTPTAPLVYALQTLVNGWKYVGRTYSANQLAELKDRHSAFIEQHATYLGKPALSGPVAYLRYYGFLKREYFESTKLRNVPLALTNAVKAHYVDFDAVGVKGLCRELGIPSGELKETEEEWGFIFDLKRIRRMGGNEKWTFDRCVSTDGVACSIRYYRYKKNDPGTGSAHKRKKKNDGTVAFPRGTAEVINNNSNTTVVSLEGKRIISVDPGRKNIAFCVELDPETRKITKKTSLTSKQYYCDSRMTEAKRRISSWMAHPEYKKAQEELSRADSEDEGEGGKGSTYLNKYIEHYKTLWQTKTAKKWRRVKFRKYCLSQKTLDAFVNKTLFGGGGGDGENSSPFHVAYGSAKFSSTGKGEHYSSPNGKLAKLMRERAGAGNFTAVDEGNTSKVCHRCKGPLSPVGFVQVQNEDKGETEEEPKVTDKLIYLRGLRRCSAPSNNFNEVDTQRRKRQTRIGGSVSSQQQSSKCPIGGAFLDRDSNAAANIAQKLFLDSSTLSSLSTLQRGVKVEKKRVFWLNKVYCKKKSYHTVHTHVTEV

SEQ ID NO: 649 - protein, 276 aa, Paralithodes platypus
KKPKKGGGFIFDLKRIRRMGGNEKWTFDRCVSTDGVACSIRYYRYKKNDPGTGTGHKRKKKNDGTVAFPRGMTEVINNNTTTVEGKRIIGVDVDPGRKNIAFCVELDPETRKITKKTRLTSKQYYCDSGMTEAKRRISSWMAHPEYKKAKEELSRADSEDEGEGKGSAYLNKYIEHYKTLWQTKTAKKWRRVKFRKYCLGQKTLDAFVNKTLFGGGGENRSPFHVAYGSAKFSSTGKGEHYSSPNGKLAKLMRERAGTGNFHRRGRVEHLQSVSSL

SEQ ID NO: 650 - protein, 362 aa, Paralithodes platypus
TTPTAPLVYALQTLVNGWKYVGRTYSVNQLAELKDRHSAFIDRHATYLGKPALSGGPVSYLRYYGFLKREYSESTKLRNVPLAPTNAVKAHYVDFDAVGVKGLCRELGIPSRELKETKEGWGFIFDLKRIRRMGGNEKWTFDRCVSTDGVACSIRYYRYKKNDPGTGTGHKRKKKNDGTVAFPRGMTEVINNNTTTVEGKRIIGVDPGRKNIAFCIELDPETRKITKKTRLTSKQYYCDSGMTEAKRRISSWMAHPEYKKAQEELSRANSEDEGEGKGSAYLNKYIEHYKTLWQTKTTKKWRRVKFRKYCLGQKTLDAFVNKTLFGGGGENRSPFHVAYGSAKFSSTGKGGTTRPPMGSWPN

SEQ ID NO: 651 - protein, 605 aa, Paralithodes platypus
GCEAKKRRKPNPAISDTWERRFISASYPTQPRYHSDYNLINYCAKTYQTCFNNNLALNFVSRQRHVIHFYLKNDQTGEKTTPTAPLVYALQTLVNGWKYVGRTYSANQLAELKDRHSAFIDRHATYLGKPTLSGGPVTYLRYYGFLKREYSESTKLRNVSLAPTNAVKAHYVDFDAVGVKGLCRELGIPSRELKETKEGWGFIFDLKRIRRMGGNEKWTFDRCVSTDGVACSIRYYRYKKNDPGTGTGHKRKKKNYGTVVFPRGMTEVINNNTTTVEGKRIIGVDPGRKNIAFCVELDPETRKITKKTRLTSKQYYCDSGMTEAKRRISSWMAHPEYKKAQEELSRADSEDEGEGKGSAYLNKYIEHYKTLWQTKTAKKWRRVKFRKYCLGQKTLDAFVNKTLFGGGGGENCSPFHVAYGSAKFSSTGKGEHYSSPNGKLAKLMRERAGTGNFNAVDEWNTSKVCHRCKGPLSPVGFVQVQNEDKGETEEEPKVTDKFIYLRGLRHCSAAPSNKFNEVETQRRKRQTRIGGSQQSSKKCPIGGAFLDRDSNAAANIAQKLFLDSSKSSTLQRGVKVEKKRVLFSVQGCRKVICPLKGCLNDVLQK

SEQ ID NO: 652 - protein, 513 aa, Paralithodes platypus
RTLPDRTPVSLGLQSRQLLRQDLPDVFQQQPRAKLRVPSETRHTFLPQKRSREDDTHRSARVRPANSRERLEVRRKDLLREPMGGTERSALSVCRPARNISMEAAVNYLRYYGFLKRKYSESTKLRNVPLAPTNEVKAHYVDFDAVGVKGLCRELGIPSGELKETEGWGFIFDLKRIRRMGGNEKWTFDRCVSTDGVACSIRYYKYKKNDPGNGTASAVTRPHLHKRKKKNDGTVAFPKGTAEVAVVSLEGKRIIGVDPGRKNIAFCVELDPETRKITKKTRLTSKQYYCDSGINEAKRQISSWMAHPEYKKVQEELSRADSEKEEDEGGGVGKRSGYLKKYVQHYKTLWQSKTAKKWRRVKFRTYYLGQKTLDAFVNKTLFGGDNRYPFHVAYGSAKFSSTGKGEHYSSPNGKLAKLMRERAGGENFTAVDEWNTSKVCHHCKGPLSPVGFVKVENEDKGETEEPKVTERLIYLRGLRHCSAQSDNFNDVDTQRRKRQRRIGGSAINLESTQ

SEQ ID NO: 653 - protein, 499 aa, Paralithodes platypus
CLAVSRMAVKASQLCNSVIRDLLAKEERTSGVSPVATEWPDFTKMNTFVQLFTQGCEAKKRRKPNPAISDTWERRFVSASYPTHPRYHSDYNLINYCAKTYQTCFNNNLALNFVSRQRQAIRFYLKNDHREKTTPTAPLVYALQAQVNGWKYVGRTYSANQLTELKDWHSAFIDRHATYLGKPALSGPVAYLRYYGFLNREYSESTKLRNVPLAPTNAVKAHYVDFDAVGVKGLCRELGIPSGELKETEGWGFIFDLKRIRRMGGNEKWTFDRCVSTDGVACSIRYYRYKKNDPGIGTAHKRKKKNDGTVAFPRGTAEVISNNTTVVSLEGKRIIGVDPGQKNIAFCVELDPETRKITKKTRLTSKQYYCDSGMTEAKRLISSRMAHPEYKKAQEELSRADSEDEGEGEEGKGSAYLNKYIEHYKTLWQTKTAKKWRRVKFRKYCLGQKTLTRSSTKLCSAAAAAAKIAPRFTSRTGRPSFLPRVRGSTTRPPTGSWPN

SEQ ID NO: 654 - protein, 722 aa, Thraustochytrium sp.
LTKRDDVDWLPRRARWLPVGEWPPARAWWPPARAWWPPARAWWLELYLASADPQRSGLECMASSMSTRTLSSPPEPPPSFSVCTQPQSVGTRIRATLAPQGLPQATADCAFATSCSATASQAGSVKRKRCPSDASATRASPAKRKKTTCSAKSRGSESTSRATTSSATSRRASTSSARALVPFWNAQCEAISPRLWLPNPDDCVAPSTSSTGLLLPTVAQFGLSIQTAKSMQADPRKSSLKTSSPSSPGDLRVMKVRVMPTKRQRMILAKIHNALRALWNLAVEHIKAKKVRPTYPALKAYFLGSRRIALDRSDPAQRALDDELESIPYAPRGDTLRRLDSAYKSGMSNYRNGNLRHFELHFQSRKKKRGFVEIPIQKPRKKADEKTAEKSGEEEVVVESEAGRSKAMANAKTRKKTKRKKTKRKSKRCPDGHFGLWPRLKWHLKDADGERNVRFGPLRFKRQGSKRRGRKVPPFVKDRKLIYEEPGRWYMVVPYTKTRRETQPAFRDVTLDPGGRTFQTFYSNDAKMTGTINPMLRTIRSRSNGTVKQYSIGGLLNKIDSTRSAAAMTLATRPELDSETRRKILAKSKYAEQMLWAKIKNKVKDTHDKTLRFLVDNFREVRVGAIDIKSVMRSRHINKKSKRALAMLSHCRFRDRLIKDHGQARTTLAVPEEYTSKTCTKCGEIKTDLGSAEIYNCTRCGLQLGRDVNGARNIYLKSIANG

SEQ ID NO: 655 - protein, 479 aa, Thraustochytrium sp.
ADPRKSSSKTSSPSSPSLAAACTVPEAAAPSDLRVMKVRVLPTKRQRMILAKIHHALRALWNLAVEHVNANKVKPTYPALKKFFAGPSRAALDRSDPAQRALDDELESIPYHLRGDTLRRLASAHKSGMSNLKNRNIHRFQLHFQSRKKKRGFIEIPMQKCHFSKKMRCTDDHFNLWPQRKFPIKDADGEREVGFGPLRYKRQGSKRRRRKLPALKKDCKLIYEEPGRWYMIVPYMKPRRANRPAFKDVTLDPGGRTFQTFYSDDAKLAGAINPLLRTVGSRAKGTAKQYSIGGLLNKIDTTRSAAAMGLATHADPATRRRVTSFKHKEQMLWAKIKNKVKDTHDKTLRFLVDNFQNRVGAIDIKSVLKSRHINKKSKRALAMLSHCRFRDRLIKDHGQSRTTLAVPEEYTSKTCTWCGNIKDDLGSAEIYNCTRCGLQLGRDINGARNIYISPSSMVNVGEWTVLFGQFIASYGITSD

SEQ ID NO: 656 - protein, 412 aa, Thraustochytrium sp.
PSPKPSSSRTTSRPRTTSCPSPCCGPKPSRRSGVAREMCPGNIRHFELHFQSRKKKRGFVEIPIQKPYAKKKADEKTAEKSGEEEVVVESEAGRSKAMANAKTRKKTKRKKTKRKSKRCPDGHFGLWSRLKWHLKDADGERNVRFGPLRFKRQGSKRRGRKVPPFVKDRKLIYEEPGRWYMVVPYTKTRRETQPAFRDVTLDPGGRTFQTFYSNDAKMTGTINPMLRTIRSRSNGTVKQYSIGGLLNKIDSTRSAAAMTLATRPELDSETRRKILAKSKYAEQMLWAKIKNKVKDTHDKTLRFLVDNFREVRVGAIDIKSVVRSRNINKKSKRALAMLSHCRFRDRLIKDHGQARTTLAVPEEYTSKTCTKCGEIKTDLGSAEIYNCTRCGLQLGRDVNGARNIYLKSITNG

SEQ ID NO: 657 - protein, 200 aa, Hypothenemus hampei
MNIKIKVHKDRKCFPFSTNGVDASLLMKKFSGRQQDDGEKENQQMYGWKTVTRLKFNSWKWHRKATNDLGNELLFPPGRMERNKKVLVCFEDDILEPGISYGRNLKPAVVELKKAFHKRGDKCDVRDVNEFRTSRRCSRCYKELRMPPRLADLLSNEERRRRCHGHHSVVSVYQNCPTMYNRNTNAARNIVLVATGLMKL

SEQ ID NO: 658 - protein, 389 aa, Hypothenemus hampei
NCIVVHFFFRIVRYYSAKYPQSKRKWEWRVVVVFEKLFSSKHSTARTLQVSEFLEDFGFPQNTKFVNLEKNWWSLITFSYRLAQQFPSHELKSFSLFPIFQPGRKHIRYNCLALYQLLHACDLELNVTQEQCSESSPLFWWRYFNLNRTRYGELDELNIKIRVHKDRRCFALSFSTNGIDASLLMNKFSGHQQEDEEEISPLPRRGRLRKGSLPSISSSSSENFDYYLGLDPGVVNYVGACLRHEPSGKEIKSIVKSEHFKQSLCRERLRTKRRKRKTRGFENMLLRDRVEIEIEVNVKLHARVSHNYRDNLEYIQCRLVHLEASQEMCGRKTICRLKFDSWKCHRKATDDLVNKLLFPPERVERDKKVLVCFGDGTLEPGISNSILWT

SEQ ID NO: 659 - protein, 231 aa, Chlamydomonas sp.
YVGKQKTIEKVCDLIAPKAQKKTIEEKVCDVIAPKAKKTVVGFGNWSNQGYGISRSCSGPVKEIRKCLSRRQNVLFKNVDELNTSCTCHGCFQKLVNMKADSVVWRRVQNEPSALIDGAPTTTTTTTFEKQKTVVKNVKVHKVLHCRNSVKSASSNVRCGATWNRDVNAAKNLLLLLTTWMDGKERPAAFCVPSSSPTPKTPVSGEANVGAQPTDPPGSVSSLQLLSSGPS

SEQ ID NO: 660 - protein, 801 aa, Chlamydomonas sp.
PRMEHVCDVCIKSSVMYKLCKMATKPPTVAKLKELLKLAEVAYSSKDKKDDIVRLCEDNGLIARPPPEYKTVEKMCVVKCALKKAMSLDDEEFGKFREHVDQLVNVVSRMLRRSSLVLTFHVTRLMEGDLPIPNMYDMKDTYWKDWLRIGVDGVFPDEESRISYESVKDVIGKVLGSDDPDYINSYPIYFDQVLNYAGHTLSTVVSNNAWVPLVPRLTRLTKATLNALEAPKTIRVYDVMRVIQQEIQEMESWPESVQEYVREVRVRLKVPDGSRLYDDYGKDMDFPTMVRFNYWMQTRLEAIGARRIRLMPIFNVQRAHVRLDMKTLVNLFRHVFPKDPNIVELSKWKDVKDPDRFMLPLKPAFKKKKSCGPGEWEAYKLAQQKYDADVNDIKDTDEYRHAKGRYDTLVNARKTVAGSFFKKPPVKTGWVFDCSICTDGVSLSMQYSKTVQVHVSDLKKKSKRSCDDEGMSVSEQYDHKLKTTLPDMGIVVLGVDPGRSNIATVTYLADDKSKTWKLTRGAFYHKSGIKKQKKQQEKRFSDMIPRWESLRENGAALSTSRTDDISAYLKNYDTFSDEWWRMALLRRESRDNFQRYIGKRKAMDSFWAGIKRNMKLDHPDLRVRVAYGSAITTLKATGPGEVAVPTGSMFASCKRLFKEDVHVTDEFKTTLMSWETGAKKECVYKIPSVQITTEGQIRLGYELLGHTPLKETPKVSYRDQLAVRVYCTRKQIQEKHRRGGLAPSLVDNNSIKRYPEVRGLRFSPETSTYSDRDRSSALTIARLHCMELLGQGRPLPFCRDA

SEQ ID NO: 661 - protein, 813 aa, Chlamydomonas sp.
PRMEHVCDVCIKSSVMYKLCKMATKPPTVAKLKELLKLAEVAYSSKDKKDDIVRLCEDNGLIARPPPEYKTVEKMCIVKCALKKAMSLDDEEFGKFREHVDQLVNVVSRMLRRSSLVLTFHITSLLEKGLDIPDLYNMKDTYWKDWLRIGVDGIFPDEESKISYEAVKDSIGDVIGNDDADYIKSYPIYFDQVLNYAGHTLSTVVSNNAWVPLIPRLARLTSTTLNKLNAPKTLDTSKIIRGYDVMQAIQQEVQNMEGWPESVQEYVNEVREMLSVPDGSRVYDNYGKDMDFPTMVRFNYWIQTRLEDMDARRIRLMPIFNVQRVHVRLDLKTLVNLFRHMFPNDQNIVELSKWEHVKNPESFMLPQRPAQKKKKSCGPGEWDAYKSVLKQYDDDVKDIKATDEYRHAKGLYDTLVNARKTVAGSFFRKPPVKNGWVFDCSICTDGVSLSMQYSKTVQVLVSDLKKTCKKPRKEEGIKIAEKYDGSLKTILPDMGIVVLGVDPGRSNIATVTYLADDKNKTWKLTRGAFYHKSGIKKQTRQKELRFADMIPMWESLRENGAALSTSRTDKISAYLSNYAKFSDEWWRLALRRRESRDNLQRYIGKRKVKDSFWAGIKRCMMKELPGMKVCVAYGSAITKLKPTGPGEVAVPTGAMFASCKRIFKEDVSVTDEFKTTLMSWETGKEKERVYKIPSVCSADVNLRLGGERFGHTKSKTMPKVADCDHLGVRLYNKRKGAQEKHRRGGFATSLVDSQKSIERYPEVRGLRFSPETCIYSDRDRSSALTIARLHCMELMGLGRPLPFAHSSSVVVDE

SEQ ID NO: 662 - protein, 496 aa, Chlamydomonas sp.
QPSGNTFASRAHMTLPLYHKILSETIEEKRKTKNEKHRTFSLLPYKSGFTLSHIPISKMAFFYMVNECHFDSCKADVASKNHQGIWERFANLKKVETVSRKFGYRIVTDGFAVSILMNKPTCLTCSMPADAFSTRAHEYVTTDEGGIVSFLNNVVVAAVDPGVTDIVTVTGLNGGTRSYSSAQYYRKGLIFKSQRQTDVWNLETADIVGGIIPDRDSSSSEQIGAYARFYMGAAPILLAHRASRGYRNLRFRRYCKKQKLIVEIADFVAPREKSAKVLVGFGDWKGLGATPISRRTCGPLQAIRFELRSRENVIMEDIDEFRTSQRCSCCENHLCNMVALTHRKKQDGTGWECTEGRKRIHKILHCKSSQRGAPRQQSGGMLHCGKTWDRDVNASRNILMLTLHQVFGRERPLAFRRDAPRSSSTTPPPDTDMGTQTVERFTKEATRNIFENLFNLLHPPTLPKATICSLDEYNVCPTLFENNCNQVCLSRWVLNR

SEQ ID NO: 663 - protein, 801 aa, Chlamydomonas sp.
PRMEHVCDVCIKSSVMYKLCKMATKPPTVAKLKELLKLAEVAYSSKDKKDDIVRLCEDNGLIARPPPEYKTVEKMCVVKCALKKAMSLDDEEFGKFREHVDQLVNVVSRMLRRSSLVLTFHVTRLMEGDLPIPNMYDMKDTYWKDWLRIGVDGVFPDEESRISYEAVKDVIGKVLGSDDPDYINSYPIYFDQVLNYAGHTLSTVVSNNAWVPLVPRLTRLTKATLNALKAPKTIRVYDVMRVIQQEIQEMESWPESVQEYVREVRVRLKVPDGSRLYDDYGKDMDFPTMVRFNYWMQTRLEAIGARRIRLMPIFNVQRAHVRLDMKTLVNLFRHVFPKDPNIVELSKWKDVKDPDRFMLPLKPAVKKKKSCGPGEWEAYKLAQQKYDADVNDIKDTDEYRHAKGRYDTLVNARKTVAGSFFKKPPVKTGWVFDCSICTDGVSLSMQYSKTVQVRVSDLKKTSKRSRDDEGMSVSEQYDHKLKTTLPDMGIVVLGVDPGRSNIATVTYLADDKSKTWKLTRGAFYHKSGIKKQKKQQEKRFSDMIPRWESLRENGAALSTSRTDDISAYLKNYDTFSDEWWRMALLRRESRDNFQRYIGKRKAMDSFWAGIKRNMKLDHPDLRVRVAYGSAITTLKATGPGEVAVPTGSMFASCKRLFKEEVHVTDEFKTTLMSWETGAKKECVYKIPSVQITTEGQIRLGYELLGHTPLKETPNVSYRDQLAVRVYCTRKQIQEKHRRGGLAPSLVDNNSIKRYPEVRGLRFSPETSTYSDRDRSSALTIARLHCMELLGQGRPLPFCRDA

SEQ ID NO: 664 - protein, 634 aa, Chlamydomonas sp.
RIQSMVLLINHAVAEAYLFANLHITRCLDDGDFDVKQLPHLDRNFYYRCLLAVSTSNVRKDTLGQSFNDTMVAFDALRPAGYVKVDVRPWGQVIADVSIQMATMACNSVWANVDRVVIKYLRLKHPSLKKHFKKIVKAVVQYPESKIDTIIPEGLVHAIHIKEVVSHLRALFPLPRGKQFNTRAHLTMRLFHHVLTELGEVGRVDPKDKKTRKSHPRLFSILPRKNGFTISYVPISSMTFMKLLSMGDSPLESVSGDGRYENHTMLWRKYFNVQGLETKRSRFDNRILSDGKGVSVQMKQKGKEEVVEEGENAGYPKDANIVECKDAVGALRVGVDPGMTDIVTVASSAGRIESFSLARFSEVAGYNTSKRRTYKWKDETQDLVKSIPSPNTSNMVDLQDHVRAYLEALPILLQHRANKGYRSMRFFRYVGKQKTIEKVCDVIAPRAQTTVVGFGNWSNQGYGISRSCSGPIKEIRRCLSRRKNVLFKNVDERNTSCKCHGCFQRLVNMKADSVVWRGVCKESPIDGSITVEKQKMVVKNVKVFKVLHCRDSVKSASSNVRCGATWNRDVNAAKNLLLLLTTWMDGRERPEAFCVPSPPPKTAVSIEASVSAKPTDPPGFVSSLPCYPLGQLKC

SEQ ID NO: 665 - protein, 437 aa, Chlamydomonas sp.
EEKSCGPGEWEAYKLAQQKYDADVKDIKATDEYRHAKGRYDTLVNARKTVAGSFFKKPPVKTGWVFDCSICTDGVSLSMQYSKTVQVRVSDLKKTSKRSRDDEGMSVSEQYDHKLKTTLPDMGIVVLGVDPGRSNIATVTYLADDKSKTWKLTRGAFYHKSGIKKQKKQQEKRLSDMIPRWEYLRENGAALSTSRKDDISAYLKNYATFSDEWWRMALRRRESRDNFQRCIGKRKAMDSFWAGIKRNMKLDHPDLRVRVAYGSAITMLKATGPGEVAVPTGSMFASCKRLFKEEVHVTDEFKTTLMSWETGAKKEYVYKIPSVQITTEGQIRLGYELLGHTPLKETPKVSYRDQLAVRVYCTRKQIQEKHRRGGLTPSLVDNNSIKRYPEVRGLRFSPETSTYSDRDRSSALTIARLHCMELLGQGRPLPFCRDACC

SEQ ID NO: 666 - protein, 209 aa, Chlamydomonas sp.
FFRYVGKQKTIEKVCDVIAPRARTTVVGFGNWSNQGYGISRSCSGPIKEIRRCLSRRKNVLFKNVDERNTSCKCHGCFQRLVNMKADSVVWRGVCKESPIDGSITVEKQKMVVKNVKVHKVLHCRDSVKSASSNVRCGATWNRDVNAAKNLLLLLTTWMDGRERPEAFCVPSPPPKTTVSIEASVSAKPTDPPGFVSRLPCYPLGQLKC

SEQ ID NO: 667 - protein, 209 aa, Chlamydomonas sp.
FFRYVGKQKTIEKVCDVIAPRAQTTVVGLGNWSNQGYGISRSCSGPIKEIRRYLSRRKNVLFKNVDERNTSCKCHGCFQRLVNMKADSVVWRGVCKESPINGSITVEKQKMVVKNVKVHKVLHCRDSVKSASSNVRCGATWNRDVNAAKNLLLLLTTWMDGRERPEAFCVPSPPPKTPVSIEASVSAKPTDPPGFVSSLPCYPLGQLKC

SEQ ID NO: 668 - protein, 302 aa, Chlamydomonas sp.
YRDGGTRSYSSAQYYRKGLIFKSQRQTDVWNLETADIVGDIIPDRDSSRYEQIGAYARFYMGAAPILLAHRASRGYRNLRFRRYCKKQKLIVEIADFVAPMENSAKVLVVFGDCKGLGATPISRRTCGPLQAIRFELRSRGNVIMEDVDEFITSQRCSCCENRLCNMVALTHRKKQDCTGWECTEGRKRIHKILHCKSSQSGAPRQQSGGKLHCGKTWDGDVNASRNILMLTLHQVFGRERPIAFRRDAPRSSSKTPAPPDTVMGTQTVERFTKEATRNIFENLFNLLHPPTLPKRNDLQSG

SEQ ID NO: 669 - protein, 688 aa, Chlamydomonas sp.
GNVGAILYHQKKKNTHPLLMGVVQDKGDDDINISVVKKTLNSLCMDVSRHQISSRIQSMVLLINHAVAEAYLFANFHITRCLNDGDFDVKQLPHLDRNFYYRCLLAVSTSNVRKDTLGQSFNDTMVAFDALRPAGYVKVDVRPWGQVIADVSIQMATMACSSVWANVDRVVIKYLRLKHPSLKKHFKKIVKAVVQYPESKIDTIIPGGLVHAIHIKEVVSHLRALFPLPRGKQFNTRAHLTMRLFHHVLTELGEVGRVDPKDKKTKKSHPRLFSILPRKNGFTTSYVPISSMTFMKLLSMGDSPLESVSGDGRYENHTMLWRKYFNVQGLETKRSRFDNRILSDGKGVSVQMKQKGKEEFVEEGENAGYPKDANIVECKDAVGALRVGVDPGMTDIVTVASSAGRIESFSSARFSEVAGYNTSKRRTYKWNDETQDLVKSIPSPNTSNMVDLQDHVRAYLKALPILLQHRANKGYRSMRFFRYVGKQKTIEKVCDVIAPRAQTTVVGFGNWSNQGYGISRSCSGPIKEIRRCLSRRKNVLFKNVDERNTSCKCHGCFQRLVNMKADSIVWRGVCKESPIDGSITVEKQKMVVKNVKVHKVLHCRDSVKSASSNVRCGATWNRDVNAAKNLLLLLTTWMDGRERPEAFCVPSPPPKTTVSIEASVSAKPTDPPGFVSSLPCYPLGQLKC

SEQ ID NO: 670 - protein, 462 aa, Chlamydomonas sp.
PCLCTTRYCRRPSKKNEKHCTFSLLPGFTLSHIPISKMAFFYMVNECHFDSCKADVASKNHQGIWERFANLKKVETVSRKFGYRIVTDGFAVSILMNKPTCLTCSMPADAFSTRAHEYVTTDEGGIVSFLDNVVVAAVDPGVTDIVTVKGLNGGTRSYSSAQYYRKGLIFKSQRQTDVWNLETADIVGGIIPDRDSSSSEQIGAYARFYMGAAPILLAHRASRGYRNLRFRRYCKKQKLIVEIADFVAPREKSAKVLVGFGDWKGLGETPISRRTCGPLQAIRFELRSRENVIMEDIDEFRTSQRCSCCENHLCNMVALTHRKKQDGTAWECTEGRKRIHKILHCKSSQRGAPRQQSGGMLHCGKTWDRDVNASRNILMLTLHQVFGRERPLAFRRDAPRSSSTTPPHPHPLILIWGHRRLNGLPKRLLGISSRTSSTCCTPQRCPKATICSLDDYKVSHFI

SEQ ID NO: 671 - protein, 340 aa, Chlamydomonas sp.
RRRYQDRRKYDGSLKTILPDMGIVVLGVDPGRSNIATVTYLADDKNKTWTLTRGAFYHKSGIKKQTRQKELRFADMIPMWESLRENGAALSTSRTDKISAYLSNYAKFSDEWWRLALRRRESRDNLQRYIGKRKVKDSFWAGIKRCMMKELPDMKVCVAYGSAITKLKPTGPGEVAVPTGAMFASCKRIFKEDVSVTDEFKTTLMSWETGKEKERVYKIPSVCSADVKLRLGGERFGHTKSKTMPKVADCDHLGVRLYNKRKGAQEKHRRGGFATSLVDSQKSIERYPEVRGLRFSPETCIYSDRDRSSALTIARLHCMELMGLGRPLPFAHSSSVVVDE

SEQ ID NO: 672 - protein, 225 aa, Chlamydomonas sp.
SSSLSVKLTFGTSRRLISSVVSFRIDSSSSEQIGAYARFYMGAAPILLAHRASRGYRNLRFRRYCKKQKLIVEIADFVAPREKSAKVLVGFGDWKGLGATPISRRTCGPLQAIRFELRSRENVIMEDIDEFRTSQRCSCCENHLCNMVALTHRKKQDGTGWERPLAFRRDTPRSSSTTPPPPPDTDMGTQTVERFTKEATRNIFENLFNLLHPPTLPKSNDLQSG

SEQ ID NO: 673 - protein, 686 aa, Chlamydomonas sp.
METIVNKEPPDKRTRPDRAAKIKDRKNGEENVVKCTLSRIIADKDNKDVITKVIKERVDSVSKRTYLAGVAVNRILKEVFEGVPDAQLHTVSVPSVDQNFIRQLMVGSRQAHMETRDATVERFFHNNYWFREKIEGREVIVKKKKQYVGAIARYDGDRNLYSHASKKYLTNFNNHYRVHLSTWIKKFVYSKENRILAKEFKDEHGIDETVFHRYLLYDIHSWGVKEDLIAIHSLLPERTKMLLKIQHSIIGRDEINRQWLKSVSNSAKMIRYNVFINRYLEATEDEGYAKLVNIAPIPTVKHAFITIDTDGLLGVLKDVGLVESLKKTLTNKEHWESVFDVENIRSTGKGVFTCTIDTDGVMACTHFLRAEKKKISIKDDGTAIKKQTNTLREFSESDPNVVVVANDPGRCNIAFLTWKKNKVEEKDKGGRKRKRHCEFGSKRLTRERYYVESGVFKSRGPTKKWLSNIQDCLDDLKDNSPKRTSLESFDAYVTVMVNHWDSRWGERSKSRWGAQRLRLYGGKKRVLARFFNEVQADVGERKTIVIAYGSSKFAPGGKGELSVPTTSAFNAFSDRFKGRVAVIDEFRTTKIWHKDSTTVLQSVQSEKEGRTVRGLLWCSSTMENSKLFVNRDLNAAINIHNCFTMYPTRPGILARPKKYCKLEVVVGRTIDYKLTGSLQNAVSSEV

SEQ ID NO: 674 - protein, 686 aa, Chlamydomonas sp.
METIVNKEPPDKRTRPDRASKIKDRRNGEVNVVKCTLSRIIADKDNKDVIIKVIKERVDSVSKRTYLAGVAVNRILKEVFEGVPDAQLHTVSVPSVDQNFIRQLMVGSRQANMETRDATVERFFHNNYWFREKIEGREVIVKKKKQYAGAIARYDGDRNLYSHASKKYLTNFNNHYRVHLSTWIKKFVYSKENRILAKEFKDEHGIDETVFQRYLLYDIHSWGVKEDLIAIHSLLPERTKMLLKIQHSIIGRDEINRQWLKSVSNSAKMSRYNVFINRYLEATEDEGYAKLVNIAPIPTVKHAFITIDTDGLLGVLKDVGLVESLEKTLTNKEHWESVFDVENIRSTGKGVFTCTIDTDGVMACTHFLRAEKKKISIKDDGTAIKKQTNTLREFSESDPNVVVVANDPGRCNIAFLTWKKNKVEEKDKGGRKRKRHCEFGSKRLTRERYYVESGVFKSRGPTKKWLSNIQDCLDDLKDNSPKRTSLESFDAYVTVMVNHWDSRWGEMSKSRWGAQRLRLYGGKKRVLARFFNEVQADVGERKTIVIAYGSSKFAPGGKGELSVPTTSAFNAFSDRFKGRVAVINEFRTTKIWHKDSTTVLQSVQSEKEGRTVRGLLWCSSTMENSKLFVNRDLNAAINIHNCFTMYPTRPGILARPKKYCKLEVVVGRTIDYKLTGSLQNAVSSEV

SEQ ID NO: 675 - protein, 304 aa, Chlamydomonas sp.
EQHRYSHVSGRRQKQDMEAYTRSFLPQVWYQETEKTARKRFSDMIPRWESLRENGAALSTSRKDDISAYLKNYATFSDEWWRMALRRRESRDNFQRYIGKRKAMDSFWAGIKRNMKLDHPDLRVRVAYGSAITKLKATGPGEVAVPTGSMFASCKRLFKEEVHVTDEFKTTLMSWETGAKKECVYKIPSVQITTEGQIRLGYELLGHTPLKETPKVSYRDQLAVRVYCTRKKIQEKHRRGGLAPSLVDNNSIKRYPEVRGLRFSPETSTYSDRDRSSALTIARLHCMELLGQGRPLPFCRDACC

SEQ ID NO: 676 - protein, 615 aa, Chlamydomonas sp.
QCIRNLHVLNIRMPCMATNASVKLARPPMPVVSQGPSSVNGRIMARSGLQATNVSLTQAASKATSSSRKKKPAVVKSFYTHVCPHTNNNPTCSDSNCSCKPIFLTNIPDVSKSRTSDQGSTSSAQDFYEYWDSSRQDLYRQLLWLPKTGTQGLVSSSFNGFAHSTPTRSSFSITKTEPLKTSLEKTSCPSFKYIVTDGTVEDATKSNAKPKLRTLKLKLNPTKAQKSMLAEFAGCSRFMYNKAVAARLGVGSTHKSVFRIRDRYVTNKVRGEGKMPNPYFKNRQWLLQCPKSVRQSAIKAALANIKACFSNLKAGNIKQFSAPFRRKKTELERGWAIEMDQKNVSKDGDKLFIFKDILGNMRYFGSKQLHKLMPEENPTHDPKVHKSRFGEYFLVLSVAATDRRAERKPVHPDKVATASIDPGVRKTMVTYSPENEESFMLGQGQASDLVKLLLVHDKLQSRLDTEKTLRSKERMKIKKHMIRIRKRIFYLKKEFRDQTTNFLAARYDVLLVPQLETAKMTISAERELTTKVARQMLTLSHSVLFNRLKEKCAEYGTVFLHVLEHYTSQTCPMCGFLNKCGETYTCKNCQFTCDRDIVGAAGIFLKAVRTENPCS

SEQ ID NO: 677 - protein, 617 aa, Chlamydomonas sp.
GKHLKAYEAVKDSIGDVIGNDDADYIKSYPIYFDQVLNYAGHTLSTVVSNNAWVPLIPRLARLTSTTLNKLNAPKTLDTSKIIQGYDVMQAIQQEVQNMEGWPESVQEYVNEVREMLSVPDGSRFYDNYGKDMDFPTMVRFNYWIQTRLEDMDARRIRLMPIFNVQRVHVRLDLKTLVNLFRHMFPNDQNIVELSKWEHVKNPDTFMLPQRPAQKKKKSCGPGEWEAYKSVLKQYDDDVKDIKATDEYRHAKGLYDTLVNAQKTVAGSFFRKPPVKNGWVFDCSVCTDGVSLSMQYSKTVQVLVSDLKKTCKNPRKEEGIKIAEKYDGSLKTILPDMGIVVLGVDPGRSNIATVTYLADDKKKTWTLTRGAFYHKSGIKKQTRQKELRFADMIPMWESLRENGAALSTSRTDKISAYLSNYAKFSEEWWRLALRRRESRDNLQRYIGKRKVKDSFWAGIKRCMMKELPDMKVCVAYGSAITKLKPTGPGEVAVPTGAMFASCKRIFKEDVSVTDEFKTTLMSWETGKEKERVYKIPSVCSADVKLRLGGERFGHTKSKTMPKVADCDHLGVRLYNKRKGAQEKHRRGGFSTSLVDSQKSIERYPEVRGLRFSPETCI

SEQ ID NO: 678 - protein, 608 aa, Chlamydomonas sp.
CMYVCRCILAVSTSNVRKDTLGQSLKDSMVAFDALRHAGYLKVDVRQWGQVIADVSIQMATMACNSVWANVDRVVIKYLRLKHPWLKKHFNKIVKAVVQYPESDIDKIIPASLVHANLIKDVVRRLRDLLPLPRGKQFNTRAHLTMRLFHHVLTELGADLKEKTTKKRPRLFSILPRKSGFTISYVPISSMTLMKLLSMGDSPLESFRGDGRHENHTMLWRKYFNVQGLETKGSRFDNRILSDSKGVSVQMKHQASEDVAVDNAGYPKDAILEDCQDASLRVGVDPGMTDIVTVAFSDGRVESFSSARFSEAAGYNTSNRRTNKWNVDTQDLVKSIPSPTTSSMHDMQDHVRGYLSALPTLLQHRASRGYRSMRFFRYVGKQKTIEKVCDLIAPKAQKKTIEEKVCDVIAPRAQTTVVGFGNWSNQGYGISRSCSGPIKEIRRCLSRCKNVLFKNVDERNTSCTCHGCFQKLVNMKADSVVWRRVQNEPPSLINGAPTTTTTTTIEKQKTVVKNVKVHKVLHCRNSVKSASSKVRCGATWNRDVNAAKNLLLLLTTWMDGKERPATFCVPSSSPTPKTTVSGEANVGAQPTDPLGSVSSLQLLSSGPA

SEQ ID NO: 679 - protein, 304 aa, Chlamydomonas sp.
RSRRSTHFAVCLSCDRSPFTDASVCGQPAVTRSDPTRVSASPQLNSHAPRSEQIGAYARFYMGAAPILLAHRASRGYRNLRFRRYCKKQKLIVEIADFVAPRKKSAKVLVGFGDWKGLGATPISRRTCGPLQAIRFELRSRENVIMEDIDEFRTSQRCSCCENHLCNMVALTHRKKQDGTGWECTEGRKRIHKILHCKSSQSGAPRQQSGGMLHCGKTWDRDVNASRNILMLTLHQVFGRERPLAFRRDAPRSSSTTPPPPPDTDMGTQTVERFTKEATRNIFENLFNLLHPPTLPKSNDLQSG

SEQ ID NO: 680 - protein, 453 aa, Chlamydomonas sp.
HVCFRRSQACRLLKGGRSSMGTCNCRRLNTNGDDGMQQRLMKLLSMGDSPLESFRGDGRHENHSMLWRKYFNVQGLETKGSRFDNRILSDGKGVSVQMKHQASEDVAVDNAGYPKDAILEDCQDASLRVGVDPGMTDIVTVASSDGRVESFSSARFSEAAGYNTSNRRTNKWNVDTQDLVKSIPSPTTSSMHDMQDHVRGYLSALPTLLQHRASRGYRSMRFFRYVGKQKTIEKVCDLIAPKAQKKTIEEKVCDVIAPRAQTTVVGFGNWSNQGYGISRSCSGPIKEIRRCLSRRKNVLFKNVDERNTSCTCHGCFQKLVNMKADSVVWRRVQNEPPSLINGAPTTTTTIEKQKTVVKNVKVHKVLHCRNSVKSASSKVRCGATWNRDVNAAKNLLLLLTTWMDGKERPATFCVPSSSPTPKTTVSGEANVGAQPTDPLGSVSSLQLLSSGPA

SEQ ID NO: 681 - protein, 624 aa, Chlamydomonas sp.
RTRSLQTCLFSWPQWPSNHLWTNLERRITTYLKWKYPQIAKRLRSDIVAALIKCPTKNLDVIFKMSPHTTKLPTKLPTSRLRSAKSAVALAKKRVGRKEPEGSPLRVRLTKLQERLEKLSEGWLSSKNLRVDADNAKLFFAREVAFCLRGVLPLPSGNTFASRAHMTLPLYHKILSETIEEKRKLKTKNIAHSRCCLTNLDSLCRTFRFLKWPFSIWSTSATFDSCKADIASKNHQGIWERFANLKKVETVSRKFGYRIVTDGFAVSILMNKPTCLTCSMPADAFSTRAHEYVTTDEGGIVSFLDNVVVAAVDPGVTDIVTVTGLNGGTRSYSSAKYYRKGLIFKSQRQTDVWNLETADIVGGIIPDRDSSSSEQIGAYARFYMGAAPILLAHRASRGYRNLRFRRYCKKQKLIVEIADFVAPRKKSAKVLVGFGDWKGLGATPISRRTCGPLQAIRFELRSRENVIMEDIDEFRTSQRCSCCENHLCNMVALTHRKKQDGTGWECTEGRKRIHKILHCKSSQSGAPRQQSGGMLHCGKTWDRDVNASRNILMLTLHQVFGRERPLAFRRDAPRSSSTTPPPDTDMGTQTVERFTKEATRNIFENLFNLLHPPTLPKSNDLQSG

SEQ ID NO: 682 - protein, 686 aa, Chlamydomonas sp.
METIVNKEPPDKRTRPDRAAKIKDRKNGEENVVKCTLSRIIADKDNKDVITKVIKERVDSVSKRTYLAGVAVNRTLKEVFEGVPDAQLHTVSVPSVDQNFIRQLMVGSRQAHMETRDATVERFFHNNYWFREKIEGREVIVKNKKQYVGAIARYDGDRNLYSHASKKYLTNFNNHYRVHLSTWIKKFVYSKENRILAKEFKDEHGIDETVFHRYLLYDIHSWGVKEDLIAINSLLPERTKMLLKIQHSIIGRDEINRQWLKSVSNSAKMIRYNVFINRYLEATEDEGYAKLVNIAPIPTVKHSFITIDTDGLLGVLKDVGLVESLEKTLTNKEHWESVFDVENIRSTGKGVFTCTIDTDGVMACTHFLRAEKKKISIKDDGTAMKKQTKTLREFSESDPNVVVVANDPGRCNIAFLTWKKNKVEEKDKGGRKRKRHCEFGSKRLTRERYYVESGVFKSRGPTKKWLSNIQDCLDDLKDNSPKRTSLESFDAYVTVMVNHWDSRWGEMSKSRWGAQRLRLYGGKKRVLARFFNEVQADVGERKTIVIAYGSSKFAPGGKGELSVPTTSAFNAFSDRFKGRVAVVDEFRTTKIWHKDSTTVLQSVQSEKEGRTVRGLLWCSSTMENSKLFVNRDLNAAINIHNCFTMYPTRPGILARPKKYCKLEVVVGRTIDYKLTGSLQNAVSSEV

SEQ ID NO: 683 - protein, 615 aa, Chlamydomonas sp.
QCIRNLHVLNIRMPCMATNASVKLARSPMPVVSPGPSSVDGRIMARSGLQATNVSLTQAASQATSSSRKKKPAVVKSFSTHVCPHTNNNPTCSDSNCSCKPIFLTNIPDASKSRTSDQGSTSSSLDFYEYWDSSRQDLYRQLLWLPKTGTQGLVSSSFNGFAHSTPTRSSFSITKTEPLKTSLEKTSCPSFKYIVTDGTVEDATKSNAKPKLRTLKLKLNPTKAQKSMLAEFAGCSRFMYNKAVAARLGVGSTHKSVFRIRDRYVTNKVRGKGKMPNPYFKNRQWLLQCPKSVRQSAIKSALANIKACFSNLKAGNIKQFSSPFRRKKTELERGWVIEMDQKNVSKDGDKLFIFKEILGNMRYFGSKQLHKLMPEENPTHDPKVQKSRFGEYFLVFSVAARDRRAERKPVNPDKVATASIDPGVRKTMVTYSPENEESFMLGQGQASDLVKLLLVHDKLQSRLDTEKTLRSKERMKIKKLMIRIRKTIFYLKKEFRDQTTNFLAARYDVLLVPQLETAKMTISAERELTTKVARQMLTLSHSVLFNRLKEKCEEYGTVFLHVLEHYTSQTCPMCGFLNKCGETYTCKNCQFTCDRDIVGAAGIFLKAVRTENPCS

SEQ ID NO: 684 - protein, 498 aa, Chlamydomonas sp.
EMRQYMGMVLYHVRSSRGLRVRCTRMPCWKARVPVKGSVPLQLLPPSTGKQFNTRAHLTMRLFHSVLAELVSSSSSEPNRRAPRLFSLLPRKIGFTISYIPISSMTFMKILSMGNTPLEKIRGDGRLEDHDRLWRKYFNIGSVETKASRFDCRIITDGKGVSIQMRRELGQCLMETSGYPKDSSIGECLNATTHRNARCVGVDPGMTDIATVAFSSGGGTQSFSSSHFSHTAGYKTSKRRTDKWNVETSELVQSIPTSMTTSMDGLERHVQAYLGALPKLLQHRTNKGYRSMRFFRYVGKQKAIEEVCDMIALRDTPTIVGFGNWSNQGNGISRPCYGPVKEIRKKLSQRGNVLFKNIDERNTSCTCHGCFERLVNMKANSVRWRRGQIGQLGVSVKEKVMVKNVKVHKILHCCNSVGSAPSERCGTTWNRDVNASKNILLLLKTWVAGKERPAAFCVPYKNKITTSREATEMLRPVDPSLGSIGHTRLLSSEHQLKC

SEQ ID NO: 685 - protein, 212 aa, Chlamydomonas sp.
SMRFFRYVGKQKTIEKVCDVIAPRAQTTVVGFGNWSNQGYGISRSCSGPIKEIRRCLSRRKNVLFKNVDERNTSCKCHGCFQRLVNMKADSVVWRGVCKESPIDGSITVEKQKMVVKNVKVHKVLHCRDSVKSASSNVRCGATWNRDVNAAKNLLLLLTTWMDGRERPEAFCVPSPPPKTTVSIEASVSAKPTDPPRFVSSFPCYPLGKLKC

SEQ ID NO: 686 - protein, 700 aa, Chlamydomonas sp.
YQDKERTLPPSISMGVVTNNGDDDDDLDIMVVKKTLNSLCMDVSRQQICSRIQSMVLVINHAVAEAYLFANFHITRCLDDVDFDVKQLPHLDRNFYYRCILAVSTSNVRKDTLGQSLKDSMVAFDALRPAGYLKVDVRQWGQVIADVSIQMATMACNSVWANVDRVVIKYLRLKHPSLKKHFNKIVKAVVQYPESDIDKIIPASLVHANLIKDVVRRLRDLLPLPRGKQFNTRAHLTMRLFHHVLTELGADLKEKTTKKRPRLFSILPRKSGFTISYVPISSMTLMKLLSMGDSPLESFRGDGRHENHSMLWRKYFNVQGLETKGSRFDNRILSDGKGVSVQMKHQGSEDVDVEGGDNAGYPKDAILEDCQDASLRVGVDPGMTDIVTVASSAGRVESFSSARFSEAAGYNTSNRRTKKWNVDTQDLVKSIPSPTTSSMHDMQDHVRGYLSALPTLLQHRASRGYRSMRFFRYVGKQKTIEKVCDLIAPKAQKKTIEEKVCDVIAPRAQTTVVGFGNWSNQGYGISRSCSGPIKVIRRCLSRRKNVLFKNVDERNTSCTCHGCFQKLVNMKGDSVVWRRVQNEPPSLINGAPTTTTIEKQKTVVKNVKVHKVLHCRNSVKSASSNVRCGATWNRDVNAAKNLLLLLTTWMDGKERPATFCVPSSSPTPKTTVSGEANVGAQPTDPPGSVSNLQLLSSGPA

SEQ ID NO: 687 - protein, 648 aa, Chlamydomonas sp.
KMATKPPTVAKLKELLKLAEVPYSSKSNKDDLVRLCEDNGLIARPPPEYKTVEKMCVVKCALKKAMSLDDEEFGKFREHVDQLVNVVSRMLRRSSLVLTFHITSLLEKGLDIPDLYNMKDTYWKDWLRIGVDGIFPDEESKISYEAVKDSIGDVIGNDDADYIKSYPIYFDQVLNYAGHTLSTVVSNNAWVPLIPRLARLTSTTLNKLNAPKTLDTSKIIRGYDVMQAIQQEVQNMEGWPESVQEYVNEVREMLSVPDGSRVYDNYGKDMDFPTMVRFNYWIQTRLEDMDARRIRLMPIFNVQRVHVRLDLKTLVNLFRHMFPNDQNIVELSKWEHVKNPDSFMFPQRPAQKKKKSCGPGEWEAYKSVLKKYDDDVKDIKATDEYRHAKGLYDTLVNARKTVAGSFFRKPPVKNGWVFDCSICTDGVSLSMQYSKTVQVLVSDLKKTCKKPRKEEGIKIAEKYDGSLKTILPDMGIVVLGVDPGRSNIATVTYLADDKNKTWTLTRGAFYHKSGIKKQTRQKELRFADMIPMWESLRENGAALSTSRTDKISAYLSNYTKFSDEWWRLALRRRESRDNLQRYIGKRKVKDSFWAGIKRCMMKELPDMKVCVAYGSAITKLKPTGPGEVAVPTGAMFASCKEFSKRTFL

SEQ ID NO: 688 - protein, 293 aa, Chlamydomonas sp.
CVFSASPFILVWFSNNKWNVDTQDLVKSIPSPTTSSMHDMQDHVRGYLSALPTLLQHRASRGYRSMRFFRYVGKQKTIEKVCDLIAPKAQKKTIEEKVCDVIAPRAQTTVVGFGNWSNQGYGISRSCSGPIKEIRRCLSRRKNVLFKNVDERNTSCTCHGCFQKLVNMKADSVVWRGVCKESLIDGSITVEKQKMVVKNVNVHKVLHCRNSVKSASSNVRCGATWNRDVNAAKNLLLLLTTWMDGKERPATFCVPSSSPTPKTTVSGEANVGAQPTDPPGSVSSLQLLSSGPA

SEQ ID NO: 689 - protein, 700 aa, Chlamydomonas sp.
YQDKKRTLPPSISMGVVTNNGDDDDDLDIMVVKKTLNSLCMDVSRQQICSRIQSMVLVINHAVAEAYLFANFHITRCLDDVDFDVKQLPHLDRNFYYRCILAVSTSNVRKDTLGQSLKDSMVAFDALRPAGYLKVDVRQWGQVIADVSIQMATMACNSVWANVDRVVIKYLRLKHPSLKKHFNKIVKAVVQYPESDIDKIIPASLVHANLIKDVVRRLRDLLPLPRGKQFNTRAHLTMRLFHHVLTELGADLKEKTTKKRPRLFSILPRKSGFTISYVPISSMTLMKLLSMGDSPLESFRGDGRHENHSMLWRKYFNVQGLETKGSRFDNRILSDGKEVSVQMKHQASEDVAVDNAGYPKDAILEDCQDASLQVGVDPGMTDIVTVASSAGRVESFSSARFSEAAGYNTSNRRTNKWNVDTQDLVKSIPSPTTSSMHDMQDHVRGYLSALPTLLQHRASRGYRSMRFFRYMGKQKTIEKVCDLIAPKAQKKTIKEKVCDVIAPRAQTTVVGFGNWSNQGYGISRSCSGPIKEIRRCLSRRKNVLFKNVDERNTSCTCHGCFQKLVNMKADSVVWRRVQNEPPSLINGAPTTTTTTTIEKQKTVVKNVKVHKVLHCRNSVKSASSKVRCGATWNRDVNAAKNLLLLLTTWMDGKERPATFCVPSSSPTPKTTVSGEANVGAQPTDPPGSVSSLQLLSSGPA

SEQ ID NO: 690 - protein, 793 aa, Chlamydomonas sp.
KMATKPPTVAKLKELLKLAEVPYSSKSNKDDLVRLCEDNGLIARPPPEYKTVEKMCVVKCALKKAMSLDDEEFGKFREHVDQLVNVVSRMLRRSSLVLTFHITSLLEKGLDIPDLYNMKDTYWKDWLRIGVDGIFPDEESKISYEAVKDSIGDVIGNDDADYIKSYPIYFDQVLNYAGHTLSTVVSNNAWVPLIPRLARLTSTTLNKLNAPKTLDTSKIIRGYDVMQAIQQEVQNMEGWPESVQEYVNEVREMLSVPDGSRVYDNYGKDMDFPTMVRYNYWIQTRLEDMDARRIRLMPIFNVQRVHVRLDLKTLVNLFRHMFPNDQNIVELSKWEHVKNPDSFMFPQRPAQKKKKSCGPGEWEAYKSVLKQYDDDVKDIKATDEYRHAKGLYDTLVNARKTVAGSFFRKPPVKNGWVFDCSICTDGVSLSMQYSKTVQVLVSDLKKTCKKPRKEEGIKIAEKYDGSLKTILPDMGIVVLGVDPGRSNIATVTYLADDKNKTWTLTRGAFYHKSGIKKQTRQKELRFADMIPMWESLRENGAALSTSRTDKISAYLSNYAKFSDEWWRLALRRRESRDNLQRYIGKRKVKDSFWAGIKRCMMKELPDMKVCVAYGSAITKLKPTGPGEVAVPTGAMFASCKRIFKEDVSVTDEFKTTLMSWETGKEKERVYKIPSVCSADVKLRLGGERFGHTKSKTMPKVADCDHLGVRLYNKRKGAQEKHRRGGFATSLVDSQKSIERYPEVRGLRFSPETCIYSDRDRSSALTIARLHCMELMGLGRPLPFSHSSSVVVDE

SEQ ID NO: 691 - protein, 390 aa, Chlamydomonas sp.
MISPETRYRSVVHYKYFLRSLRKVCNIYKVSKSSLHRWVNADQAGKSKRLKRKRKELSMLLRSTISNNIADVVVAAVDPGVTDIVTVTGLNGSTNSYSSAQYYRKGLIFKSQRQTDVWNLETADIFGDVIPDRDSPRSEQIGAYARFYMGAAPILLAHRALRGYRNLRFRRYCKKQKLIVEIAHFVAPREKSTKVLVGFGDWKGLGATPISRRTCGPLQAIRFELLSRENVIMEDVDEFRTSQRCSCCETRLCNMVALTHRKRQDGTGWECTEGRKRIHKILHFKSSQSGAPRQHSGGRLHCGKTWDRDVNASRNILMLTLHQVFGRERPLAFRRDAPRSSSKTPPTPDTDLGTQTVERFTKEATRNIFENLFNLLHPPTLPKSNDLQSG

SEQ ID NO: 692 - protein, 1094 aa, Chlamydomonas sp.
MYDIAVRKLALRMVADLGVLKNSVFTNISRSTLWRWKRFGVNRKRREFVSKLFETNKDLLKLFLLSTQCTTARGVVAFFKSNHNLRLSTKTVYRFIKLIGFTRKRSKLRGQCKGDLVPLVTEFSSRYKDTIYAGKILVSVDECGFSERLKPHYGYSPVGKPVIVKTTGGWVHHSLLMAVFSDGSKEFVVKKGSVKKTDFAAFIDSLSLCNNSVVIMDNASIHKNLVLRSPVNICYTPPYSPEFNAIELCFAKVKKDFRRLNYIPNDTKTHVSDMISLAFSNLTDKIIMGYFDHVWNTCDVCIKSSVMYKLCKMATKPPTVAKLKELLKLADVAYSSKDKKDDIVRLCEDNGLIARPPPEYKTVEKMCVVKCALKKAMSLDDEEFGKFRGNVDQLVNVVSRMLRRSSLVLTFHVTRLMEGDLPIPNMYDMKDTYWKDWLRIGVDGVFPDEESIISYEAVKDVIGKVLGSDDPDYINSYPIYFDQVLNYAGHTLSTVVSNNAWVPLVPRLTRLTKATLKALGAPKTIRVYDVMRVIQQEIQEMESWPESVQEYVREVRVRLKVPDGSRLYDDYGKDMDFPTIVRFNYWMQTRLEAMGARCIRLMPIFNVQRAHVRLDMKTLVNLFRHVFPKDPNIVELSKWENVKDPDRFMLPLNPAVKKKKSCGPGEWEAYKLAQQKYDADVKDIKATDEYRHAKGRYDTLVNARKTVAGSFFKKPPVKTGWVFDCSICTDGVSLSMQYSKTVQVRVSDLKKTSKRSRDEEGMSVAEQYDHKLKTTLPDMGIVVLGVDPGRSNIATVTYLADDKSKTWKHTRGAFYHKSGIKKQKKQQEKRFSDMIPRWESLRENGAALSTSRKDDISAYLKNYATFSDEWWRMALRRRESGDNFQRYIGKRKAMDSFWAGIKRNMKLDHPDLRVRVAYGSAITKLKATGPGEVAVPTGSMFASCKRLFKEEVHVTDEFKTTLMSWETGAKKECVYKIPSVQITTEGQIRLGYELLGHTPLKETPKVSYRDQLAVREYCTRKKIQEKHRRGGLAPSLVDNKSIKRYPEVRGLRFSPETSTYSDRDRSSALTIARLHCMELLGQGRPLPFCRDACC

SEQ ID NO: 693 - protein, 527 aa, Chlamydomonas sp.
SDSNCSCKPIFLTNIPDASKSLKSRTSDQGSTSSAQDFYEYWDSSRQDLHRQLLWFPKTGSQGLVSSSLNGFARSTPARSSFSITKTEPLKTSLEKTSCPSFKYIVADGTVEDATKSNAKPKLRTLKLKLNPNKAQKSMLAEFAGCSRFMYNKAVAARLGVGSTHKSVFRIRDRFVTNKVRRKGKMPNPYFKNRQWLLQCPKSVRQSAIKAALANIKACFSNLKAGNIKQFSAPFRRKKTELERGWAIEMDQKNVSKDGDKLFIFKDILGNMRYFGSKQLHKLMPEENPTHDPKVQKSRFGEYFLVLSVAARDRRAERKPVHPDKVATASIDPGVRKTMVTYSPENEESFMLGQGQASDLVKLLQVHDKLQSRLDTEKTLQSKERMKIKKQMIRIRKRIFYLKKEFRDQTTNFLAARYDVLLVPQLETAKMTISAERELTTKVARQMLTLSHSVLFNRLKEKCEEYGTVFLHVLEHYTSQTCPMCGFLNKCGGETYTCKNCQFTCDRDIVGAAGIFLKAVRPENPCS

SEQ ID NO: 694 - protein, 249 aa, Chlamydomonas sp.
GWHLSFRDNVVVAAVDPGVTDIVTVTGLDGSTNSYSSAKYYRKGLIFKSQRQTDVWNLETADIFGDVIPDRDSPMSQQIGAYARFYMGAAPILLAHRASRGYRNLRFRRYCKKQKLIVEIADFVAPREKSTKVLVGFGDWKGLGRHQSLGGLVALSKLFVSSFVAAKTLSWRTSRSSEHLNDAAAVRPDFATWLHSLIVRSKTVLGNVRKDASGFTRFSTAKAVKAERHANRAAVGSTAGRLRRYLVLL

SEQ ID NO: 695 - protein, 308 aa, Chlamydomonas sp.
HKILSETIEEKRKTKNEKLRTFSLLPYKSGFTLSHIPISKMALFYMVNECHFDSCKADVASKNHQGIWERFANLKKVETVSQKFGYRIVTDGFAVSILMNKPTCLTCSMPADAFSTRVHEYVTTDEGGIVSFLDNVVVAAVDPGVTDIVTVTGLDGGTRSYSSAQYYRKGLIFKSQRQTDVWNLETADIVGGIIPDRDSSRSEQIGAYARFYMDAAPILLAHRASRGYRNLCFRRYCKKQKLIVEIADFVAPREKSTKVLVGFGDWKGLGATPISRRTCGPLQAIRFELRSRENVIMEDVDEFRTSQR

SEQ ID NO: 696 - protein, 543 aa, Chlamydomonas sp.
SLEYVPDGSRVYDNYGKDMDFPTMVRFNYWIQTRLEDMDARRIRLMPIFNVQRVHVRLDLKTLVNLFRHMFPNDQNIVELSKWEHVKNPDSFMLSQRPAQKKKKSCGPGEWEAYKSVLKQYDDDVKDIKATDEYRHAKGLYDTLLNARKTVAGSFFRKPPVKNGWVFDCSICTDGVSLSMQYSKTVQVLVSDLKKTCKNPRKEEGIKIAEKYDGSLKTILPDMGIVVLGVDPGRSNIATVTYLADDKNKTWKLTRGAFYHKSGIKKQTRQKELRFADMIPMWESLRENGAALSTSRTDKISAYLSNYAKFSDEWWRLALRRRESRDNLQRYIGKRKKVKDSFWAGIKRCMMKELPDMKVCVAYGSAITKLKPTGPGEVAVPTGAMFASCKRIFKEDVSVTDEFKTTLMSWETGKEKERVYKIPSVCSADVKLRLGGERFGHTKSKTMPKVADCDHLGVRLYNKRKGAQEKHRRGGFATSLVDSQKSIERYPEVRGLRFSPETCIYSDRDRSSALTIARLHCMELMGLGRPLPFAHSSSVVVDE

SEQ ID NO: 697 - protein, 794 aa, Chlamydomonas sp.
KMAKKPPTVAKLKELLKLAEVPYSSKSNKDDLVRLCEDNGLIARPPPEYKTVEKMCVVKCALKKAMSLDDEEFGKFREHVDQLVNVVSRMLRRSSLVLTFHITSLLEKGLDIPDLYNMKDTYWKDWLRIGVDGIFPDEESKISYEAVKDSIGDVIGNDDADYIKSYPIYFDQVLNYAGHTLSTVVSNNAWVPLIPRLARLTSTTLNKLNSPKTLDTSKIIRGYDVMQAIQQEVQHMEGWPESVQEYVNEVREMLSVPDGSRVYDNYGKDMDFPTMVRFNYWIQTRLEDMDARRIRLMPIFNVQRVHVRLDLKTLVNLFRHMFPNDQNIVELSKWEHVKNPDSFMLPQRPAQKKKKSCGPGEWEAYKSVLKQYDDDVKDIKATDEYRHAKGLYDTLLNARKTVAGSFFRKPPVKNGWVFDCSICTDGVSLSMQYSKTVQVLVSDLKKTCKNPRKEEGIKIAEKYDGSLKTILPDMGIVVLGVDPGRSNIATVTYLADDKNKTWTLTRGAFYHKSGIKKQTRQKELRFADMIPMWESLRENGAALSTSRTDKISAYLSNYAKFSDEWWRLALRRRESRDNLQRYIGKRKKVKDSFWAGIKRCMMKELPDMKVCVAYGSAITKLKPTGPGEVAVPTGAMFASCKRIFKEDVSVTDEFKTTLMSWETGKEKERVYKIPSVCSADVKLRLGGERFGHTKSKTMPKVADCDHLGVRLYNKRKGAQEKHRRGGFATSLVDSQKSIERYPEVRGLRFSPETCIYSDRDRSSALTIARLHCMELMGLGRPLPFAHSSSVVVDE

SEQ ID NO: 698 - protein, 686 aa, Chlamydomonas sp.
METIVNKEPPDKRTRPGRAAKIKDRKNGEENVVKCTLSRIIADKDNKDVITKVIKERVDSVSKRTYLAGVAVNRILKEVFEGVPDAQLHTVSVPSVDQNFIRQLMVGSRQAHMETRDATVERFFHNNYWFREKIEGREVIVKKKKQYVGAIARYDGGRNLYSHASKKYLTNFNNHYRVHLSTWIKKFVYSKENRILAKEFKDEHGIDETVFHRYLLYDIHSWGVKEDLIAIHSLLPERTKMLLKIQHSIIGRDEINRQWLKSVSNSAKMIRYNVFINRYLEATEDEGYAKLVNIAPIPTVKHSFITIDTDGLLGVLKDVGLVESLEKTLTNNEHWESVFDVENIRSTGKGVFTCTIDTDGVMACTHFLRAEKKKISIKDDGTAMKKQTKTLREFSESDPNVVVVANDPGRCNIAFLTWKKNKVEEKDKGGRKRKRHCEFGSKSLTRERYYVESGVFKSRGPTKKWLSNIQDCLDDLKDNSPKRTSLESFDAYVTVMVNHWDSRWGEMSKSRWGAQRLRLYGGKKRVLARFFNEVQADVGERKTIVIAYGSSKFAPGGKGELSVPTTSAFNAFSDRFKGRVAVIDEFRTTKIWHKDSTTVLQSVQSEKKGRTVRGLLWCSSTMENSKLFVNRDLNAAINIHNCFTMYPTRPGILARPKKYCKLEVVVGRTIDYKLTGSLQNAVSSEV

SEQ ID NO: 699 - protein, 284 aa, Chlamydomonas sp.
EEKSCGPGEWEAYKLAQQKYDTDVNDIKATDEYRHAKGRYDTLVNARKTVAGSFFKKPPVKTGWVFDCSICTDGVSLSMQYSKTVHVRVSDLKKTSKKSRDDEGMSVSEQYDHKLKTTLPDMGIVVLGVDPGRSNIATVTYLADDKSKTWKLTRGAFYHKSGIKKQKKQQEKRFSDMIPRWESLRENGAALSTSRKDDISAYLKNYATFSDEWWRMALRRRESRDNFQRYIGKRNMKLDHPDLRVRVAYGSAITTLKATGPGEVAVPTGSMFASCKRLFKEVFM

SEQ ID NO: 700 - protein, 425 aa, Chlamydomonas sp.
SFSAWAILRSRASVAMDVTRIIPCCGESTSMSKDLRRKGLVLTTESSATAKGSRVSVQMKHQVGKDIAGEGGGDNAGYPKDASIEDCQDASLRQGALRVGIDPGMTDIVTIASSDGRVESFSSARFSEAAGYNTSNRRTNKWNVDTQDLVKSIPSPTSSSMHDMQDHVRGYLSALLTLLQHRANRGYRSMRFFRYVGKQKTIEKVCDLIAPKAQKKTIEEKVCDVIAPKAKKTVVGFGNWSNQGYGISRSCSGPVKEIRKCLSRRQNVLFKNVDERNTSCTCHGCFQKLVNMKADSVVWRRVKNEPSALIDGAPTTTTTTTFEKQKTVVKNVKVHKVLHCRNSVKSASSNVRCGATWNRDMNAAKNLLLLLTTWMDGKERPATFCVPSSSPTPKTTVSGEANVGAQPTNPPGSVSSLQLLSSGPA

SEQ ID NO: 701 - protein, 547 aa, Chlamydomonas sp.
GNCQLVWYHQNNNHSLSMGVVTNNGDDDDLDIMVVKKTLNSLCMDVSRQQICSRIQSMVLVINHAVAEAYLFANFHITRCLDDGDFDVKQLPHLDWNFYYRCILAVSISNVRNDTLDQSLKDSMVAFDALRPAGYVKVDVRPWGQVIADVSIQMATMACNSVWANVDRVVIKYLRLKHPSLKKHFKKIVKAVVQYPDSDIDKIIPAGLVHANLIKDVVRRLRDLLPLPRGKQFNTQAHLTMRLFHHVLTELGADLKEKTTKKRPRLFSILPRKSGFTISYVPISSMTLMKLLSMGDSPLESVRGDGRHENHSMLWRKYFNVQGLETKGSRFDNRILSDGKGVSVQMEHQVGKDIAGEGGGDNAGYPKDASIEDCQDASLRQGALRVGIDPGMTDIVTIASFDGRVESFSSARFSEAAGYNTSNRRTNKWNADTQDLVKSIPSPTTSSMRDMQDHVRGYLSALPTLLQHRANRGYRSMRFFRYVGKQKTIEKVCDLIAPKAQKKTIEEKVCDVIAPKAKKTVVGFGNWSNQGYGICRSCSGPVKVIRK

SEQ ID NO: 702 - protein, 204 aa, Chlamydomonas sp.
LRGSRARRYSSGLVIEGLGATPISRRTCGPLQAIRFELRSRENVIMEDVDEFRTSQRCSCCETRLCNMDALTHRKKQDGTWECTEGRKRIHKILHCKSSQSGAPRQQSGGRLHCGKTWDRDVNASRNILMLTLHQVFGRERPLAFRRDAPRGSSKNPPTPETDMGTQTVERFTTETTRNIFENLFNLLHPPTLPKRNDLQFFRV

SEQ ID NO: 703 - protein, 315 aa, Chlamydomonas sp.
RIYPNAKGGSFCTPLLIAPDLMRLNKYYRKGLIFKSQRQTDVWNLETADIVGGIIPDRDSSRSEQIGAYARFYMGAAPILLAHRASRGYRNLRFRGYCKKQKLIVEIADFVAPREKSTKVLVGFGDWKGLGATPISRRTCGPLQAIRFELRSREKIIMEDVDKFRTSQRCSCCETRLCNMVALTHRKRQDGTGWECTEGRKRIHKILHCKISQSGAPRQQSGGRLHCGKTWDRDLNASRNILMLTLHQVFGRERPLVFRRDAPRSSSKPPPTPDTDLGTQTVERFTKEATRNLFENLFNLLHPPTLPKSNDLQSG

SEQ ID NO: 704 - protein, 699 aa, Chlamydomonas sp.
YQLTNVGLVSVSSHIMDIPDLYNMKDTYWKDWLRIGVDGIFPDEESKISYEAVKDSIGDVIGNDDADYIKSYPIYFDQVLNYAGHTLSTVVSNNAWVPLIPRLARLTSTTLNRLNAPKTLDTSKIIRGYDVMQAIQQEVQNMEGWPESVQEYVNEVREMLSVPDGSRVYDNYGKDMDFPTMVRFNYWIQTRLEDMDARRIRLMPIFNVQRVHVRLDLKTLVNLFRHMFPNDQNIVELSKWEHVKNPESFMLPQRPAQKKKKSCGPGEWEAYKSVLKQYDDDVKDIKATDEYRHAKGLYDTLVNARKTVAGSFFRKPPVKNGWVFDCSICTDGVSLSMQYSKTVQVLVSDLKKTCKKPRKEEGIKIAEKYDGSLKTILPDMGIVVLGVDPGRSNIATVTYLADDKNKTWKLTRGAFYHKSGIKKQTRQKELRFADMIPMWESLRENGAALSTSRTDNISAYLSNYAKFSDEWWRLALRRRESRDNLQRYIGKRKVKDSFWAGIKRCMMKELPDMKVCVAYGSAITKLKPTGPGEVAVPTGAMFASCKRIFKEDVSVTDEFKTTLMLWETGKEKERVYKIPSVCSADVKLRLGGERFGHTKSKTMPKVADCDHLGVRLYNKRKGAQEKHRRGGFATSLVDSQKSIERYPEVRGLRFSPETCIYSDRDRSSALTIARLHCMELMGLGRPLPFAHSSSVVVDE

SEQ ID NO: 705 - protein, 688 aa, Chlamydomonas sp.
RNVGATLYHQKKKNTHPLLMGVVQDKGDDDINISVVKKTLNSLCMDVSRHQISSRIQSMVLLINHAVAEAYLFANFHITRCLDDGDFDVKQLPHLDRNFYYRCLLAVSTSNVRKDTLGQSFNDTMVAFDALRPAGYVKVDVRPWGQVIADVSIQMATMACNSAWANVDRVVIKYLRLKHPSLKKHFKKIVKAVVQYPESKIDTIIPEGLVYAIHIKEVVSHLRALFPLPRGKQFNTRAHLTMRLFHHVLTELGEVGRVDPKDKKTRKSHPRLFSILPRKNGFTISYVPISSMTFMKLLSMGDSPLESVSGDGRYENHTMLWRKYFNVQGLETKRSRFDNRILSDGKGVSVQMKQKGKEEVVEEGENAGYPKDANIVECKDAVGALRVGVDPGMTDIVTVASSAGRIESFSSARFSEVAGYNTSKRRTYKWNDETQDLVKSIPSPNTSNMSDLQDHVRAYLKALPILLQHRANKGYRSMRFFRYVGKQKTIEKVCDVIAPRAQTTVVGFGNWSNQGYGISRSCSGPIKEIRRCLSRRKNVLFKNVDERNTSCKCHGCFQRLVNMKADSVVWRGVCKESPIDGSITVEKQKMVVKNVKVHKVLHCRDSVKSASSNVRCGATWNRDVNAAKNLLLLLTTWMDWRERLEAFCVPSPPPKTTVSIEASVSAKPTDPPGFVSSLPCYPLGQLKC

SEQ ID NO: 706 - protein, 975 aa, Chlamydomonas sp.
RGRLLAVIRFTLVRITQRFVRRAQQFEKLLSSIPLAVRRCCPFVRMPFQSCLPVCSPNLLCRCSVCCHPQQFIVAADHDGLRWAFIDVYSCSQIKSKRLKRKRKELSMLLRSTISNNIAENPFITCKDLVGIICKSCNVRLSISTASRHIKQCGFSRKKAFPTVLYGHSKENVEMFCDKYRESSNVVCIDEAGFYAGEHSKYGYSKIGSRLTTKTMSNLRRVKFTLLLAISSQGIIDYQLLEHNCKKEDFIKFFKTLVIPNNTTIVMDNIRFHHSSEIKDISECKGWKLLYTPPYCPRANAIEQIFESMKRDYRASCPLTSTCNFDYLMQICCVLEMWRYKDFSKYMINTRDWVRNVRESLSADPDYIKTFSGVQFVMENGIGESSSLVHEADQHDDVAELVDYEGEEDEECAPGRAICVVKMKLSTFIPHDWLRKKIDTLVLDMNKLLGEGYIFANFHIARLFENGIAVPPVNRNFFYRCLIAVSTNKCKGSTLGKDFESSRLLFDLLREPGQSKVDIRGKVKNQIIADLSILMATMASNHLWTNLERRITTYLKWKYPQIAKRLRSDIVAAVIKCPTKNLDVIFKMSPHTTKLPTKLPTTRLRSAKSAVALAKKRVGRKEPEGSPLRVRLTKLQERLEKLSEAWLSSKNLRVDADNAKRFFARDVAFCLRGVLPLPSGNTFASAHDPASAPQDIVGDHRRKTKNEKRKTSHILVVALQIWIHSAAHSDRFYMGAAPILLAHRASRGYRNLRFRRYCKKQKLIVEIADFVAPREKSAKVLVGFGDWKGLGATPISRRTCGPLQAIRFELRSRENVIMEDIDEFRTSQRCSCCENHLCNMVALTHRKKQDGTGWECTEGRKRIHKILHCKSSQSGAPRQQSGGMLHCGKTWDRDVNASRNILMLTLHQVFGRERPLAFRRDAPRSSSTTPPPPPDTDMGTQTERFTKEATRNIFENLFNLLHPPTLPKSNDLQSG

SEQ ID NO: 707 - protein, 621 aa, Chlamydomonas sp.
QCIRNLHVLNIRMPCMATNVSVKLARPPMPLVSPGPSSVDGQIMARSERSGLQATNVSLTQAASKATSSSRKKNPAVVKSFSTHVCPHTNNNPTCSDSNCSCKPIFLTNIPDASKSLKSRTSDQGSTSSAQDFYEYWDSSRQDLYRQLLWLPKTGSQGLVSSSLNGFARSTPARSSFSITKTEPLKMSLEKTSCPSFKYIVADGTVEDATKSNAKPKLMTLKLKLNPTKAQKSMLAEFAGCSRFMYNKAVAARLGVGSTHKSVFRIRDRYVTNKVRGEGKMPNPYFKNRQWLLQCPKSVRQSAIKAALANIKACFSNLKAGNIKQFSAPFRRKKTELERGWAIEMDQKNVSKDGDKLFIFKDILGNMRYFGSKQLHKLMPEVNPTHDPKVHKSRFGEYFLVLSVAARDRRAERKPVHPDKVATASIDPGVRKTMVTYSPENEESFMLGQGQASDLVKLLLVHDKLQSRLNTEKTLRSKERMKIKMQMIRIRKRIFYLKKEFRDQTTNFLAARYDVLLVPQLETAKMTISAERELTTKVARQMLTLSHSVLFDRLKEKCEEYGTVFLHVLEHYTSQTCPMCGFLNKCGETYTCKNCQFTCDRDIVGAAGIFLKAVRTENPCS

SEQ ID NO: 708 - protein, 688 aa, Chlamydomonas sp.
RNVGATLYHQKKNNTHPLLMGVVQDKGDDDINISVVKKTLNSLCMDVSRHQISSRIQSMVLFIKYAVAEAYLFANFHITRCLDDGDFDVKQLPHLDRNFYYRCLLAVSTSNVRKNTLGQSFNDTMVAFDALRPVGYVKVDVRPWGQVIADVSIQMATMACNSIWANVDRVVLKYLRLKHPSLKKHFKKIVKSVVQYPESKIDTIIPEGLVHAIHIKEVVSHLRALFPLPRGKQFNTRAHLTMRLFHHVLTELGEVGRVDPKDKKTRKSHPRLFSILPRKNGFTISYVPISSMTFMKLLSMGDSPLESVSGDGRYENHTMLWRKYFNVQGLETKRSRFDNRILSDGKGVSVQMKQKGKEEVVEEGENAGYPKDANIVECNDAVGALRVGVDPGMTDIVTVASSAGRIESFSSARFSEVAGYNTSKRRTYKWNDETQDLVKSIPSPNTSNMSDLQDHVRAYLKALPILLQHRANKGYRSMRFFRYVGKQKTIEKVCDVIAPRAQTTVVGFGNWSNQGYGISRSCSGPIKEIRRCLSRRKNVLFKNVDERNTSCKCHGCFQRLVNMKADSVVWRGVCKESPIDGSITVEKQKMVVKNVKVHKVLHCRDSVKSASSNVRCGATWNRDVNAAKNLLLLLTTWMDGRERPEAFCVPSPPPKTTVSIEASVSAKPTDPPGFVSSLPCYPLGQLKC

SEQ ID NO: 709 - protein, 310 aa, Chlamydomonas sp.
SARTQWVRVGVDPGMTDIVTVASSAGRIESFSSARFSEVAGYNASKRRTYKWNDETQDLVKSIPSPNTSNMSDLQDHVRAYLKALPILLQHRANKGYRSMQFFRYVGKQKTIEKVCDVIAPRAQTTVVGFGNWSNQGYGISRSCSGPIKEIRRCLSRRKNVLFKNVDERNTSCKCHGCFQRLVNMKADSVVWRGVCKESPIDGSITVEKQKMVVKNVKVHKVLHCRDSVKSASSNVRCGATWNRDVNAAKNLLLLLTTWMDGRERPEAFCVPSPPPKTTVSIEASVSAKPTDPPGFVSSLPCYPLGQLKC

SEQ ID NO: 710 - protein, 603 aa, Chlamydomonas sp.
FPLIPRLARLTSTTLNKLNAPKTLDTSKIIRGYDVMRAIQQEVQNMEGWPESVQEYVNEVREMLSVPDGSRVYDNYGKDMDLPTMVRFNYWIQTRLEDMDARRIRLMPIFNVQRVHVRLDLKTLVNLFRHMFPNDQNIVELSKWEHVKNPDSFMLPQRPAQKKKKSCGPGEWEAYKSVLKQYDDDVKDIKATDEYRHAKGLYDTLVNARKTVAGSFFRKPPVKNGWVFDSSICTDGVSLSMQYSKTVHVLVSDLKKTCKKPRKEEGIKIAEKYDGSLKTILPDMGIVVLGVDPGRSNIATVTYLADDKNKTWTLTRGASYHKSGIKKQTRQKELRFSDMIPMWESLRENGAALSTSRTDKISAYLSNYAKFSDEWWRLALRRRESRDNLQRYIGKRKVKDSFWAGIKRCMMKELPDMKVCVAYGSAITKLKPTGPGEVAVPTGAMFASCKRIFKEDVSVTDEFKTTLMSWETGKEKERVYKIPSVCSADVKLRLGGERFGHTKSKTMPKVADCDHSGVRLYNKRKGAQEKHRRGGFATSLVDSQKSIERYPEVRGLRFSPETCIYSDRDRSSALTIARLHCMELMGLGRPLPFAHNSSVVVDE

SEQ ID NO: 711 - protein, 631 aa, Chlamydomonas sp.
SGKVLGSDDPDYINSYPIYFDQVLNYAGHTLSTVVSNNAWVPLVPRLTRLTKATLNALEAPKTIRVYDVMRVIQQEIQEMESWPESVQEYVREVRVRLKVPDGSRLYDDYGKDMDFPTMVRFNYWMQTRLEAIGARRIRLMPIFNVQRAHVRLDMKTLVNLFRHVFPKDPNIVELSKWKDVKDPDRFMLPLKPAFKKKKSCGPGEWEAYKLAQQKYDADVNDIKDTDEYRHAKGRYDTLVNARKTVAGSFFKKPPVKTVWVFDCSICTDGVSLSMQYSKTVQVRVSDLKKTSKRSRDDEGMSVSEQYDHKLKTTLPDMGIVVLGVDPGRSNIATVTYLADDKSKTWKLTRGAFYHKSGIKKQKKQQEKRFSDMIPRWESLRENGAALSTSRTDDISAYLKNYDTFSDEWWRMALLRRESRDNFQRYIGKRKAMDSFWAGIKRNMKLDHPDLRVRVAYGSAITTLKATGPGEVAVPTGSMFASCKRLFKEEVHVTDEFKTTLMSWETGAKKECVYKIPSVQITTEGQIRLGYELLGHTPLKETPKVSYRDQLAVRVYCTRKQIQEKHRRGGLAPSLVDNNSIKRYPEVRGLRFSPETSTYSDRDRSSALTIARLHCMELLGQGRPLPFCRDA

SEQ ID NO: 712 - protein, 455 aa, Chlamydomonas sp.
KPQHVGIRPRRVPFSAKTQSRSDYSGNMETREYKPELCCVPTQTLERIQYIPYTAHVNKSKKNHQGIWERFANLKKVETVSRKFGYRIVTDGFAVSILMNKPTCLTCSMPADAFYTRAHEYVTTDEGGIVSFLDNVVVAAVDPGVTDIVIVTGLNGGTRSYSSAQYYRKGLIFKSQRQTDVWNLETADIVGGIIPDRDSSSSEQIGAYARFYMGAAPILLSHRASRGYRNLRFRRYCKKQKLIVEIADFVAPRKKSAKVLVGFGDWKGLGATPISRRTCGPLQAIRFELRSRENVIMEDIDEFRTSQRCSCCENHHCNMVALTHRKKQDGTGWECTEGRKRIHKILHCKSSQSGAPRQQSGGMLHCGKTWDRDVNASRNILMLTLHQVFGRERPLAFRRDAPRSSSTTPPPPIDTDMGTQTVERFTKEATRNIFENLFNLLHPPKLPKSNDLQSG

SEQ ID NO: 713 - protein, 795 aa, Chlamydomonas sp.
LWKMATKPPTVAKLKELLKLAEVPYSSKSNKDDLVRLCEDNGLIARPPPEYKSVEKMCVVKCALKKAMSLDDEEFGKFREHVDQLVNVMSRMLRRSSLVLTFHITSLLEKGLEIPDLYNMKDTYWKDWLRIGVDGIFPDEESKISYEAVEDSIGDVIGNDDADYIKSYPIYFDQVLNYAGHTLSTVVSNNAWVPLIPRLARLTSTTLNKLNAPKTLDTSKIIRGYEVMQAIQQEVQNMEGWPESVQEYVNEVREMLSVPDGSRVYDNYGKDMDFPTMVRFNYWIQTRLEDMDARRIRLMPIFNVQRVHVRLDLKTLVNLFRHIFPNDQNIVELSKWEHVKNPDSFMLSQRPAQKKKKLCGPGEWEAYKSVMKQYDDDVKDIKATDEYRHAKGLYDTLVNARKTVAGSFFRKPPVKNGWVFDCSICTDGVSLSMQYSKTVQVLVSDLKKTCKKPRKEEGIKIAEKYDGSLKTILPDMGIVVLGVDPGRSNIATVTYLADDKNKTWKLTRGAFYHKSGIKKQTRQKELRFADMIPMWESLRENGAALSTSRTDKISAYLSNYAKFSEEWWRLALRRRESRDNLQRYIGKRKVKDSFWAGIKRCMMKELPDMKVCVAYGSAITKLKPTGPGEVAVPTGAMFASCKRIFKEDVSVTDEFKTTLMSWETGKEKERVYKIPSVCSADVKLRLDGERFGHTKSKTMPKVADCDHLGVRLYNKRKGAQEKHRRGGFAASLVDSQKSIERYPEVRGLRFSPETCIYSDRDRSSALTIARLHCMELMGLGRPLPFAHSSSVVVDE

SEQ ID NO: 714 - protein, 474 aa, Chlamydomonas sp.
DCFITCLQSWERILKRKQQKKRPRLFSILPRKSGFTISYVPISSMTLMKLLSMGDSPLESVRGDGRHENHSMLWRKYFNVQGLETKGSRFDNRILSDGKGVSVQMKHQVGKDIAGEGGGDNAGYPKDASIEDCQDASLRQGALRVGIDPGMTDIVTIASSDGGVESFSSARFSEAAGYNTSNRRTNKWNADTQDLVKSIPSPTTSSMHDMQDHVRGYLSALPTLLQHRANRGYRSMRFFRYVGKQKTIEKVCDLIAPKAQKKTIEEKVCDVIAPKAKKTVVGFGNWSNQGYGISRSCSGPVKEIRKCLSRRQNVLFKNVDERNTSCTCHGCFQKLVNMKADSVVWRRVQNEPSALIDGAPTTTTTTTTTTFEKQKTVVKNVKVHKVLHCRNSVKSASSNVRCGATWNRDVNAAKNLLLLLTTWMDGKERPAAFCVPSSSPTPKTTVSGEANVGAQPTDPPGSVSSLQLLSSGPA

SEQ ID NO: 715 - protein, 328 aa, Chlamydomonas sp.
YCIVSFRDNVVVAAVDPGVTDIVTVTGLDGGTRPYSSAQYYRKGLIFKSQRQTDVWNLETADIVGGIIPDRDSSRSEQIGAYARFYMGAAPILLAHRASRGYRNLRFRRYCKKQKLIVEIADFVAPREKSTKVLVGFGDWKGLGATPISRRTCGPLQAIRFELRSRENVIMEDVDEFRKSQRCSCCETRLCNMVALTHRKRQDGTGWECTEGRKQIHKILHCKSSQSGAPRQQSGGRLHCGKTWDRDVNASRNILMLTLHQVFGRERPLAFRRDAPRSSSKTPPTPDTDLGTQTVERFTKEATRNIFENLFNLLHPPTLPKSNDLQSG

SEQ ID NO: 716 - protein, 515 aa, Chlamydomonas sp.
YLRLKHPSLKKHFKKIVKAVVQYPESKIDTIIPEGLVHAIHIKEVVSHLRALFPLPRGKQFNTRAHLTMRLFHHVLTELGEVGRVDPKDKKTRKSHPRLFSILPRKNGFTISYVPISSMTFMKLLSMGDSPLESVSGDGRYENHTMLWRKYFNVQGLETKRSRFDNRILSDGKGVSVQMKQKGKEEVVEEGENAGYPKDANIVECKDAVGALRVGVDPRMTDIVTIASSAGRIESFSSARFSEVAGYNTSKRRTYKWNDETQDLVKSIPSPNTSNLSDLQDHVRAYLKALPILLQHRANKGYRSMRFFRYVGKQKTIEKVCDVIAPRAQTTVVGFGNWSNQGYGISRSCSGPIKEIRRCLSRRKNVLFKNVDERNTSCKCHGCFQRLVNMKADSVVWRGVCKESPIDGSITVEKQKMVVKNVKVHKVLHCRDSVKSASSNVRCGATWNRDVNAAKNLLLLLTTWMDGRERPEAFCVPSPPPKTTVSIEASVSAKPTDPPGFVSSLPCYPLGQLKC

SEQ ID NO: 717 - protein, 448 aa, Chlamydomonas sp.
QCDCSITCLQSWERVGRVDPKDKKTRKSHPRLFSILPRKNGFTILYVPISSMTFMKLLSMGDSPLESVSGDGRYENHTCCGDSTLMSKVLETKRSRFDNRILSDGKGVSVQMKQKGKEEVVEEGENAGYPKDANIVECKDAVGALRVGVDPGMTDIVTVASSAGRIESFSSARFSEVAGYNTSKRRTYKWNDETQDLVKSIPSPNTSNMSDLQDHVRAYLKALPILLQHRANKGYRSMRFFQYVGKQKTIEKVCDVIAPRAQTTVVGFGNWSNQGYGISRSCSGPIKEIRRCLSRRKNVLFKNVDERNTSCKCHGCFQRLVNMKADSVVWRGVCKESPIDGSITVDKQKMVVKNVKVHKVLHCRDSVKSASSNVRCGAIWNRDVNAAKNLLLLLTTWMDGRERPEAFCVPSPPPKTTVSIEASVSAKPTDPHGFVSSLPCYPLGQLKC

SEQ ID NO: 718 - protein, 658 aa, Chlamydomonas sp.
PRMEHVCDVCIKSSVMYKLCKMATKPPTVAKLKELLKLAEVAYSSKDKKDDIVRLCEDNGLIARPPPEYKTVEKMCVVKCALKKAMSLNDEEFGKFRGHVDQLVNVVSRMLRRSSLVLTFHVTRLMEGDLPIPNMYDMKDTYWKDWLRIGVDGVFPDEESRISYEAVKDVIGKVLGSDDPDYINSYPIYFDQVLNSAGHTLSTVVSNNAWVPLVPRLTRLTKATLKALGDPKTIRVYDVMRVIQQEIQEMESWPESVQEYVREVRVRLKVPDGSRLYDDYGKDMDFPTMVRFNYWMQTRLEAMGARRIRLMPIFNVQRAHVRLDMKTLVNLFRHVFPKDPNIVELSKWENVKDPDRFMLPLKPAVKKKKSCGPGEWEAYKLAQQKYDADVKDIKATDEYRHAKGRYDMLVNARKTVAGSFFKKPPVKTGWVFDCSICTDGVSLSMQYSKTVQVRVSDLKKTSKRSRDEEGMSVSEQYDHKLKTTLPDMGIVVLGVDPGRSNIATVTYLADDKSKTWKLTRGAFYHKSGIKKQKKQQEKRFSDMIPRWESLRENGAALSTSRKDDISAYLKNCATFSDEWWRMALRRRESRDNFQRYIGKRKAMDSFWAGIKRNMKLDHPDLRVRVAYGSAITKLKATGPGEVAVPTGSMFASCKRLFK

SEQ ID NO: 719 - protein, 730 aa, Chlamydomonas sp.
VQGACGSARQCGEPRVTAFQSGADFPCHEAHDGDLPIPNMYDMKDTYRKDWLRIGVDGVFPDEESRISYEAVKDVIGKVLGSDDPDYINSYPIYFDQVLNYAGHTLSTVVSNNAWVPLVPRLTRLTKATLKALGAPKTIRVYDVMRVIQQEIQEMESWPESVQEYVREVRVRLKVPDGSRLYDDYGKDMDFPTMVRFNYWMQTRLEDIGARRIRLMPIFNVQRAHVRLDMKTLVNLFRHVFPKDPNIVELSKWENVKDPDRFMLPLKPAVKTKKSCGLGEWEAYKLAQQKYDADVKDIKATDEYRHAKGRYDTLVNARKTVAGSFFKKPPVKTGWVFDCSICTDGVSLSMQYSKTVQVRVSDLKKTSKRSRDEEGMSVSEQYDHKLKTTLSDMGIVVLGVDPGRSNIATVTYLAEDKSKTWKLTRGAFYHKSGIKKQKKQQEKRFSDMIPRWESLRENGAALSTSRKDDISAYLKNYATFSDEWWRMALRRRESRDNFQRYIGKRKAMDSFWAGIKRNMKLDHPDLRVHVAYGSAITKLKATGPGEVAVPTGSMFASCKRLFKEEVHVTDEFKTTLMSWETGAKKECVYKIPSVQITTEGRIRLGYELLGYTPLKETPKVSYRDQLAVRVYCTRKKIQEKHRTGGLAPSLVDNNSIKRYPEVRGLRFSPETSTYSDRDRSSALTIARLHCMELLGQGRPLPFCRDACCWATKKHDGVPLQCGLLHHKVTP

SEQ ID NO: 720 - protein, 421 aa, Chlamydomonas sp.
RETLLCTRRGLLSQGGSPFTIHDSCKADVASKNHQGIWERFANLKIVELVSRKFGYRIVTDGFAVSILMNKPTCLTCSMPADAFSTRAHEYMTTDEGGIVSFCDNVGVEAVDPGVTDIVTVTGLNGVTRSYSSAQYYRKGLIFKSQRQTNVWNLDTADIVGVIIPDRDSSRSEQIGAYARFYMDAAPILLAHRASRGYRNLRFRRNCKKQKLIVEIADFVAPREKSTKVLVGFGDWKGLGATPISGRTCGPLQAIRFELRSRENVIMEDVDEFRTSQRCSCCETRLCNMVALTHRKKQDGTGWECTEGRKRIYKILHCKSSQSGAPRQQSGGRLHCGKTWDRDVNASRNILMLTVFGRERPLAFRQDAPRSSSKTPPTPDTDLGTQAVERFTKEATRNIFENLFNLLHPPTLPKSNDLQSG

SEQ ID NO: 721 - protein, 224 aa, Chlamydomonas sp.
TQGPHRTQVRCAHGSNVPARQRWCVTSIQRNTSHDLVLPRIRRERRTLQSAEQASDLVKLLLVHDKLQSRLDTEKTLRSKERMKMKKQMIRIRKRFFYLKKEFRDQTTNFLAARYDVLLVPQLETAKMTISAERELTTKVARQMLTLSHSVLFNRLKEKCEEYGTVFLHVLEHYTSQTCPLCGFLNKCGGDTYTCKNCQFTCDRDIVGAAGIFLKAVRTENPCS

SEQ ID NO: 722 - protein, 293 aa, Chlamydomonas sp.
LPIKSKTWKLTRGAFYHKSGIKKQKKQQEKRFSDMIPGWESLRENGAALSTSRKDDISAYLKNYATFSDEWWRLALRRRESRDNLQRYIGKRKVMDSFWAGIKRNMKLDHPDLRVRVAYGSAIKTMKATGPGEVAVPTGSMFASCKRLFKEEVRVTDEFKTTLMSWETGAKKECVYKIPSVQITTEGQIRIGYELLGHTPLKETPKVSDRDQLAVRVYCTRKKIQEKHRRGGLAPSLVDNKSIERYPEVRGLRFSPETSTYSDRDRSSALTIARLHCMELLGQGRPLPFCRDA

SEQ ID NO: 723 - protein, 618 aa, Chlamydomonas sp.
QCIRNLHVLNIRMPCMATNASVKLARPPMPLVSPGPSSVDGRIMARSERSGLRATNVSLTQAASKATSSSRKKNPAVVTSFSTHVCPHTNNNPTCSDSNCSCKPIFLTNIPDACKSMTSDQGSTSSAQDFYEYWDSSRQDLYRQLLWLPKKGSQGLVSSSLNGFARSNPVRSSFSITKTEPLKTSLENTSCPSFKYIVADGTVEDATKSNAKPKLRTLKLKLNPTKAQKSMLAEFAGCSRFMYNKAVAARLGVGSTHKSVFRIRDRYVTNKVKGEGKMPNPYFKNRQWLLQCPKSVRQSAIKAALANIKACFSNLKAGNIKQFSAPFRRKKTELERGWAIEMDQHNISKDGDKLFIFKDTLGNMRYFGRKQLQKLMPEKIPTHDPKVQKSGFGEYFLVLSVAARDRREERKPVHPGKVATASIDPGVRKTMVTYSPENEESFMLGKGQASDLVKLLLVHDKLHSRLDTEKTLRSKERMKIKMQMIRIRKRIFYLKKEFRDQTTNFLAARYDVLLVPQLETAKMTISAERELTTKVARQMLTLSHSVLFNRLKEKCEEYGTVFLHVLEHYTSQTCPMCGFLNKCGETYTCKNCQFTCDKDIVGAAGIFLKAVRTENPCS

SEQ ID NO: 724 - protein, 391 aa, Chlamydomonas sp.
MYDIAGSFFKKPPVKTGWVFDCSICTDEVSLSMQYSKTVQVRVSDLKKTSKRSRDEEGMSVSEQYDHKLKTTLPDMGIVVLGVDPGRSNIATVTYLADDKSKTWKLTRGAFYHKSGIKKQKKQQEKRFSDMIPRWESLRENGAALSTSRKDDISAYLKNYATFSDEWWRMALRRRESRDNFQRYIGKRNAMDSFWAGIKRNMKLDHPDLRVRVAYGSAITKLKATGPGEVAVPTGSMFASCKRLFKEEVRVTDEFKTNLMSWETGAKKECVYKIPSVQITTEGQIRLGYELLGHTPLKETPKVSYRDQLAVRVYCTRKKIQEKHRRGGLAPSLVENNSVKGYPEVRGLRFSPETSTYSDRDRSSALTIARLHCMELLGQGRPLPFCRDACC

SEQ ID NO: 725 - protein, 549 aa, Chlamydomonas sp.
EYVNEVREMLSVPDGSRVYDNYGKDMDFPTMVRFNYWIQTRLEDMDARRIRLMPIFNVQRVHVRLDLKTLVNLFRHMFPNDQNIVELSKWEHVKNPDSFMLPQRPAQKKKKSCGPGEWEAYKSVLKQYDDDVKDIKATDEYRHAKGLYDTLVNARKTVAGSFFRKPPVKNGWVFDCSICTDGVSLSMQYSKTVQVLVSDLKKTCKNLRKEEGIKIAEKYDGSLKTILPDMGIVVLGVDPGRSNIATVTYLADDKNKTWTLTRGAFYHKSGIKKQTRQKELRFADMIPMWESLRENGAALSTSRTDKISAYLSNYAKFSEEWWRLALRRRESRDNLQRYIGKRKVKDSFWAGIKRCMMKELPDMKVCVAYGSAITKLKPTGPGEVAVPTGAMFASCKRIFKEDVSVTDEFKTTLMSWETGKEKERVYKIPSVCSADVKLRLGGERFGHTKSKTMPKVVDCDHLGVRLYNKRKGAQEKHRRGGFATSLVDSQKSIERYPEVRGLRFSPETCIYSDRDRSSALTIARLHCMELMGLGRPLPFAHSSSVVVDE

SEQ ID NO: 726 - protein, 620 aa, Chlamydomonas sp.
QCIRNLHVLNIRMPCMATTSVKLARPPMPLVSPGPSSVDGRIMARSERSGLQATNVSLTQAASKATSSSRKKNPAVVKSFSTHVCPHTNNNPTCSDSNCSCKPIFLTNIPDASKSLKSRTSDQGSTSSAQDFYEYWDSSRQDLYRQLLWLPKTGSQGLVSSSLNGFARSTPARSSFSITKTEPLKTSLEKTSCPSFKYIVADGTVKDATKSNAKPKLRTLKLKLNPTKAQKSMLAEFAGCSRFMYNKAVAARLGVGSTHKSVFRIRDRYVTNKVRGEGKMPNPYFKNRQWLLQCPKSVRQSAIKAALANIKACFSNLKAGNIKQFSAPFRRKKTELERGWAIEMDQKNVSKDGDKLFIFKDILGNMRYFGSKQLHKLMPEENPTHDPKVQKSRFGEYFLVLSVAARDRRAERKPVHPDKVATASIDPGVRKTMVTYSPENEESFMLGQGQASDLVKLLLVHDKLQSRLDTEKTLRSKERMKIKMQMIRIRKRIFYLKKEFRDQTTNFLAARYDVLLVPQLETAKMTISAERELTTKVARQMLTLSHSVLFNRLKEKCEEYGTVFLHVLEHYTSQTCPMCGFLNKCGETYTCKNCQFTCDRDIVGAAGIFLKAVRTENPCS

SEQ ID NO: 727 - protein, 703 aa, Chlamydomonas sp.
GNCPLVWYHQNNNHSLSMGVVTNNGDDDDLDIMVVKKTLNSLCMDVSRQQICSRIQSMVLVINHAVAEAYLFANFHITRCLDDLSGLGTSTTGAYLRVSISNVRNDTLDQSLKDSMVAFDALRPAGYVKVDVRPWGQVIADVSIQMATMACNSVWANVDRVVIKYLRLKHPSLKKHFKKIVKAVVQYPDSDIDKIIPAGLVHANLIKDVVRRLRDLLPLPRGKQFNTRAHLTMRLFHHVLTELGADLKEKTTKKRPRLFSILPRKSGFTISYVPISSMTLMKLLSMGDSPLESVRGDGRHENHSMLWRKYFNVQGLETKGSRFDNRILSDGKGVSVQMKHQVGKDIAGEGGGDNAGYPKDASIEDCQDAYLRQGALRVGIDPGMTDIVTIASSDGRVESFSSARFSEAAGYNTSNRRTNKWNADTQDLVKSIPSPTTSSMHDMQDHVRGYLSALPTLLQHQANRGYRSMRFFRYVGKQKTIEKVCDLIAPKAQKKTIEEKVCDVIAPKAKKTVVGFGNWSNQGYGISRSCSGPVKEIRKCLSRRQNVLFKNVDERNTSCTCHGCFQKLVNMKADSVVWRRIQNEPSALIVGAPTTTTTTFEKQKTVVKNVKVHKVLHCRNSVKSASSNVLCGATWNRDVNAAKNLLLLLTTWMDGKERPAAFCVPSSSPTPKTTVSGEANVGAQPTDPPGSVSSLQWLSSGPA

SEQ ID NO: 728 - protein, 350 aa, Chlamydomonas sp.
WTTPVSIRTWSSGDDEGMSVSEQYDHKLKTTLPDMGIVVLGVDPGRSNIATVTYLADDKSKTWKLTRGAFYHKSGIKKQKKQQEKRFSDMIPRWESLRENGAALSTSRTDDISAYLKNYATFSDEWWRMALLRRESRDNFQRYIGKRKDMDSFWAGIKRNMKLDHPDLRVRVAYGSAITTLKATGPGEVAVPTGSMFASCKRLFKEEVHVTDEFKTTLMSWETGAKKECVYKIPSVQITTEGQIRLGYELLGHTPLKETPKVSYRDQLAVRVYCTRKQIQEKHRRGGLAPSLVDNNSIKRYPEVRGLRFSPETSTYSDRDRSSALTIARLHCMELLGQGRPLPFCRDACC

SEQ ID NO: 729 - protein, 224 aa, Chlamydomonas sp.
VETTNVCVFLISLKNPMLSTHANYRKGLIFKSQRQTDVWNLETADIVGGIIPDRDSSSSEQIGAYARFYMGAAPILLAHRASRGYRNLRFRRYCKKQKLIVEIADFVAPRKKSAKVLVGFGDWKGLGATPISRRTCGPLQAIRFELRSRDNVIMEDIDEFITSQRCSCYENHLCNMVAKVVQVGNVQKDASGFIRFSTAKAVKAERHANRAVVCFTAGRLGTAM

SEQ ID NO: 730 - protein, 526 aa, Chlamydomonas sp.
RNISVKAVVQYPDSDIDKIIPAGLVHANLIKDVVRRLRDLLPLPRGKQFNTRAHLTMRLFHHVLTELGADLKEKTTKKRPRLFSILPRKSGFTISYVPISSMTLMKLLSMGDSPLESVRGDGRHENHSMLWRKYFNVQGLETKGSRFDNRILSDGKGVSVQMKHQVGKDIAGEGGGDNAGYPKDASIEDCQDASLRQGALRVGIDPGMTDIVTIASSDGRVESFSSARFSEAAGYNTSNRRTNKWNADTQDLVKSIPSPTTSSMHDMQDHVRGYLSALPTLLQHRANRGYRSMRFFRYVGKQKTIEKVCDLIAPKAQKKTIEEKVCDVIAPKAKKTVVGFGNWSNQGYGISRSCSGPVKEIRKCLSRRQNVLFKNVDERNTSCTCHGCFQKLVNMKADSVVWRRVQNEPSALIDGAPTTTTTFEKQKTVVKNVKVHKVLHCRNSVKSASSNVRCGATWNRDVNAAKNLLLLLTTWMDGKERPAAFCVPSSSPTPKTTVSGEANVGAQPTDPPGSVSSLQLLSSGPA

SEQ ID NO: 731 - protein, 688 aa, Chlamydomonas sp.
GNVGAILYHQKKKNTHPLLMGVVQDKGDDDINISVVKKTLNSLCMDVSRHQISSRIQSMVLIINHAVAEAYLFANFHITRCLDDGDFDVKQLPHLDRNFYYRCLLAVSTSNVRKDTLDQSFNDTMVAFDALRPAGYVKVDVRPWGQVIADVSIQMATMACNSVWANVDRVVIKYLRLKHLSLKKHFKKIVKAVVQYPESKIDTIIPEGLVHAIHIKEVVSHLRALFPLPRGNQFNTRAHLTMRLFHHVLTELGEVGRVDPKDKKTKKSHPRLFSILPRKNGFTISYVPISSMTFMKLLSMGDSPLESVSGDGRYENHTMLWRKYFNVQGLETKRSRFYNRILSDGKGVSVQMKQKGKEEVVEEGENAGYPKDANIVECKDAVGALRVGVDPGMTDIVTVASSAGRIESFSSSRFSEVAGYNTSKRRTYKWNDETQDLVKSIPSPNTSNMVDLQDHVRAYLKALPILLQHRANKGYRSMRFFRYVGKQKTIEKVCDVIAPRAQTTVVGFGNWSNQGYGISRSCSGPIKEIRRCLSRRKNVLFKNVDERNTSCKCHGCFQRLVNMKADSVVWRGVCKESPIDGSITFEKQKMVVKNVKVHKVLHCRDSVKSASSNVRCGATWNRDVNAAKNLLLLLITWMDGRERPEAFCVPSPPPKTTVSIEASVSAKPTDPPGFVSSLPCYPLGQLKC

SEQ ID NO: 732 - protein, 753 aa, Chlamydomonas sp.
PRMEHVCDVCIKSSVMYKLCKMATKPPTVAKLKELLKLAEVAYSSKDKKDDIVRLCEDNGLIARPPPEYKTVEKMCVVKCALKKAMSLDDEEFGKFRGHVDQLVNVVSRMLRRSSLLLTFHVTRLMEGDLPIPNMYDMKDTYWKDWLRIGVDGVFPDEESRISYESVKDVIGKVLGSDDPDHINSYPIYFDQVLNYAGHTLSTVVSNNAWVSLVPRLTRLTKATLNALGAPKTIRVYDVMRVIQQEIQEMESWPESVQEYVREVRVKLKVPDGSRLYDDYGKDMDFPTMVRFNYWMQTRLEAIGARRIRLMPIFNVQRAHVRLDMKTLVNIFRHVFPKDPNIVELSKWKNVKDPTRFMLPLKPAIKKKKSCGPGEWEAYKLAQQKYDSDVNDIKASDEYRHAKGRYDTLVNARKTVACSFFKKPPVKNGWVFDCSICTDGVSLSMQYSKTVQVRVSDLKKTSKRSRDDEGMSVSEQYDHKLKTTLPDMGIVVLGVDPGRSNIATVTYLADDKSKTWKLTRGAFYHKSGIKKQKKQQEKRFSDMIPRWESLRENGAALSTSRTDDISAYLKNYATFSDEWWRMALRRRESRDNFQRYIGKRKAMDSFWAGIKRNMKLDHPDLRVRVAYGSAITTLKATGPGEVAVPTGSMFASCKRLFKEEVHVTDEFKTTLMSWETGAKKECVYKSPSVQITTEGQIRLGYELLGHTPLKETPKVSYRDQFAVRVYCTRKQIKEKHRRGGLAPSLVENNSIKP

SEQ ID NO: 733 - protein, 590 aa, Chlamydomonas sp.
HQKKKNTHPLLMGVVQDKGDDDINISVVKKTLNSLCMDVSRHQISSRIQSMVLLINHAVAEAYLFANFHITRCLDDGDFDVKQLPHLDRNFYYRCLLAVSTSNVRKDTLGQSFNDTMVAFDVLRPAGYVKVDVRPWGQVIADVSIQMATMACNSVWANVDRVVIKYLRLKHPSLKKHFKKIVKAVVQYPESKIDTIIPEGLVHAIHIKEVVSHLRALFPLPRGKQFNTRAHLTMRLFHHVLTELGEVGRVDPKDKKTRKSHPRLFSILPRKNGFTISYVPISSMTFMKLLSMGDSPLESVSGDGRYENHTMLWRKYFNVQGLETKRSRFDNRILSDGKGVSVQMKQKGKEEVVEEGENAGYPKDANIVECKDAVGALRVGVDPGMTDIVTVASSAGRIESFSSARFSEVAGYNTSKRRTYKWNDETQDLVKSIPSPNTSNMVDLQDHVRAYLKALPILLQHRANKGYRSMRFFRYVGKQKTIEKVCDVIAPRAQTTVVGFGNWSNQGYGISRSCSGPIKEIRRCLSRRKNVLFKNVDERNTSCKCHGCFQRLVNMKADSVVWRGVCKESPIDGSITVEKQKMVVKNVKVH

SEQ ID NO: 734 - protein, 687 aa, Chlamydomonas sp.
GNCQLVWYHQNNNHSLSMGVVTNNGDDDDLNIMVVKKTFNSLCMDVSRQQICSRIQSMVLVINHAVAEAYLFANFHITRCLDDGDFDVKQLPHLDRNFYYRCILAVSISNVRNDTLDQSLKDSMVAFDALRPAGYVKVDVRPWGQVIADVSIQMATMACNSVWANVDRVVIKYLRLKHPSLKKHFKKIVKAVVQYPDSDIDKIIPAGLVHANLIKDVVRRLRDLLPLPRGKQFNTRAHLTMRLFHHVLTELGADLKEKTTKKRPRLFSILPRKSGFTISYVPISSMTLMKLLSMGDSPLESVRGDGRHENHSMLWRKYFNVQGLETKGSRFDNRILSDGKGVSVQMKHQVGKDIAGEGGGDNAGYPKDASIEDCQDASLRQGALRVGIDPGMTDIVTIASSDGRVESFSSARFSEAAGYKTSNRRTNKWNADTQDLVKSIPSPTTSSMHDMQDHVRGYLSALPTLLQQRANRGYRSMRFFRYVGKQKTIEKVCDLIAPKAQKKTIEEKVCDVIAPKAKKTVVGFGNWSNQGYGISRSCSGPVKEIRKCLSRRQNVLFKNVDERNTSCTCHGCFQKLVNMKADSVVWRRVQNEPSALIDGASTTTTTTTTFEKQKTVVKNVKVHKVLHCRNSVKSASSNVRCGATWNRDVNAAKNLLLLLTTWMDGKERPAAFCVPSSSPTPKTTVSG

SEQ ID NO: 735 - protein, 347 aa, Chlamydomonas sp.
KRKQQKKRPRLFSILPRKSGFTISYVPISSMTLMKLLSMGDSPLESVRGDGRHENHSMLWRKYFNVQGLETKGSRFDNRILSDGKGVSVQMKHQVGKDIAGEGGGDNAGYPKDASIEDCQDASLRQGALRVGIDPGMTDIVTIASSDGRVESFSSARFREAAGYNTSNRRTNKWNADTQDLVKSIPSPTTSSMHDMQDHVRGYLSALPTLLQQRANRGYRSMRFFRYVGKQKTIEKVCDLIAPKAQKTTIEKVCDVIAPKAKKTVVGFGNWSNQGYGISRSCSGPVKEIRKCLSRRQNVLFKNVDERNTSCTCHGCFQKLVNMKADSVVWRRVQNEPSALIDNNNNV

SEQ ID NO: 736 - protein, 535 aa, Chlamydomonas sp.
PCLCTTRYCRRPSKKNEKHRTFSLLPGFTLSHIPISKMAFFYMVNECHFDSCKADVASKNHQGMWERFANLKKVETVSRKFGYRIVTDGFAVSILMNKPACLTCSMPADEGGIVSFLDNVVVASVDPGVTDIVTVTGLNGGTRSYSSAQYYRKGLIFKSQRQTDVWNLETADIVGGIIPDRDSSSSEQIGAYARFYMGAAPILLAHRASWGYRNLRFRRYCKKQKLIVEIADFVAPREKSAKVLIVFGDWKGLGATPISRRTCGPLQAIRFELRSRENVIMEDIDEFRTSQRCSCCENHLYNMVALTHRKKQDGTAWECTEGRKRIHKILHCKSSQSGAPRQQSGGMLHCGKTWDRDVNASRNILMLTLHQVFGRERPLAFRRDAPRSSSTTPPPPPDTDMGTQTVERFTKEATRNIFENLFNLLHPPNVAQKQRSAVWMIIRCPTLFENNCTTNDNHVFILATGLAFRRLGLNCLPQRRLGISSRTSSTCCPPQRCQKATICSLDDYKVCPTLFENNCTVCCQICFAPLFYNRV

SEQ ID NO: 737 - protein, 238 aa, Chlamydomonas sp.
VVMRRSRLVQRWLEAIVAMRIDRSAMIWFFTSPRMSTLDCPGSLNKSNRSRLLSIKALPILLQHRANKGYRSMRFFRYVGKQKTIEKVCDVIAPRAQTTVVGFGNWSNQGYGISRSCSGPIKEIRRCLSRRKNVLFKNVDERNTSCKCHGCFQRLVNMKADSVVWRGVCKESPIDGSITVEKQKMVVKNVKVHKVLHCRDCQKRIIQCALWCNLEPRRERCQEPSSASDNVDGRERAT

SEQ ID NO: 738 - protein, 686 aa, Chlamydomonas sp.
METIINKEPPDKRTRPDRAAKIKDRKNGEENVVKCTLSWIIADKDNKDVITKVIKERVDSVSKRTYLAGVAGNRILKEVFEGVPDAQLHTVSVPSVDQNFIRQLMVGSRQAHMETRDATVERFFHNNYWFREKIEGREVIVKKKKQYVGAIARYDGDRNLYSHASKKYLTNFNNHYRVHLSTWIKKFVYSKENRILAKEFKDEHGIDETVFHRYLLYDIHSWGVKEDLIAIHSLLPERTKMLLKIQHSIIGRDEINRQWLKSVSNSAKMIRYNVFINRYLEATEDEGYAKLVNIAPIPTVKHSFITIDTDSLLGVLKDVGLVESLEKTLTNKEHWESVFDVENIRSTGKGVFTCTIDTDGVMACTHFLRAEKKKISIKDDGTAIKKQTNTLREFSESDPNVVVVANDPGRCNIAFLTWKKNKVEEKDKGGRKRKRHCEFGSKRLTRERYYVESGVFKSRGPTKKWLSNIQDCLDDLKDNSPKRTSLESFDAYVTVMVNHWDSRWGEMSKSRWGTQRLRLYGGKKRVLARFFNEVQADVGERKTIVIAYGSSKFAPGGKGELSVPTTSAFNAFRDRFKGRVAVIDEFRTTKIWHKDSTTVLQSVQSEKEGRTVRGLLWCSSTMENSKLFVNRDLNAAINIHNCFTMYPTRPGILARPKKYCKLEVVVGRTIDYKLTGSLQNAVSSEV

SEQ ID NO: 739 - protein, 803 aa, Chlamydomonas sp.
PRMEHVCDVCIKSSVMYKLCKMATKPPTVAKLKELLKLAEVAYSSKDKKDDIVRLCEDNGLIARPPPEYKTVENMCVVKCALKKAMSLDDEEFGKFREHVDQLVNVVSRMLRRSSLVLTFHVTRLMEGDLPIPNMYDMKDTYWKDWLRIGVDGVFPDEESRISYESVKDVIGKVLGSDDPDYINSYPIYFDQVLNYAGHTLSTVVSNNAWVPLVPRLTRLTKATLNALGAPKTIRVYDVMRVIQQEIQEMESWPESVQEYVRDVRVRLKVPDGSRLYDDYGNDMDFPTMVRFNYWMQTRLEAIGARRIRLMPIFNVQRAHVRLDMKTLVNLFRHVFPKDPNIVELSKWKNVKDPDRFMLPLKPAVKKKKSCGPGEWEAYKLAQQKYDADVNDIKDTDEYRHAKGRYDTLVNARKTVAGSFFKKPPVKTGWVFDCSICTDIVSLSMQYSKTVQVRVSDLKKTSKRSRDDEGMSVSEQYDHKLKTTLPDMGIVVLGVDPGRSNIATVTYLADDKSKTWKLTRGSFYHKSGIKKQKKQQEKRFSDMIPRWESLRENGAALSTSRTDDISAYLKNYATFSDEWWRMALLRRESRDNFQRYIGKRKAMDSFWAGIKRNMKLDHPDLRVRVAYGSAITTLKATGPGEVAVPTGSMFASCKRLFKEEVHVTDEFKTTLMSWETGAKKECVYKIPSVQITTEGQIRLGYELLGHTPLKETPKVSYRDQLAVRVYCTRKQIQEKHRRGGLAPSLVDNNSIKRYPEVRGLRFSPETSTYSDRDRSSALTIARLHCMELLGQGRPLPFCRDACC

SEQ ID NO: 740 - protein, 794 aa, Chlamydomonas sp.
ECSREPVCRSRLHQNVFGVQFVMENGIGESSSLVHEADQHDDVAELVDYEGEEDEECAPGRAICVVKMKLSTFIPHDWLRNKIDTLVLDMNKLLGEGYIFANFHIARLFENCIAVPPVNRNFFYRCLIAVSTNKCKGSTLGEDFESSRLLFDLLREPGQSKFDIRGNVKNQIIADLSILMATMASNHLWTNLERRITTYLKWKYPQIAKRLWSDIVAALIKCPTKNLDVIFKMSPHTTKLPTKLPTSRLRSAKSAVALAKKRVGRKEPEGSPLRVRLTKLQERLEKLSEAWLSSKNLRVDADNAKRFFAREVAFCLRGVLPLPSGNTFASRAHMTLPLYHKILSETIEEKRKTKNEKHRTFSLLPYKSGFTLSHIPISKMAFFYMVNECHFDSCKADVASKNHQGIWERFANLKKVETVSRKFGYRIVTDGFAVSILMNKPTCLTCSMPANAFSTRAHEYVTTDEGGIVSFLDNVVVAAVDPGVTDIVTVTGLNGGTRSYSSAQYYRKGLIFKSQRQTDVWNLETADIVGGIIPDRDSSSSEQIGAYARFYMGAAPILLAHRASRGYRNLRFRRYCKKQKLIVEIADFVAPREKSAKVLVGFGGWKGLGATPISRRTCGPLQAIRFELRSRENVIMEDIDEFRTSQRCSCCENHLCNMVALTHRKKQDGTGWECTEGRKRIHKILHCKSSQSGAPRQQSGGMLHCGKTWDRDVNASRNILMLTLHQVFGRERPLAFRRDAPRSSSTTPPTHPDTDMGTQTVERFTKEATRNIFENLFNLLHPPTLPKSNDLQSG

SEQ ID NO: 741 - protein, 200 aa, Chlamydomonas sp.
CSKSKEDRVVGFGNWSNQGYGISRLCSGPVKEIRKCLSRRQNVLFKNVDERNTSCTCHGCFQKLVNMKADSVVWRRVQNEPSALIDGAPTTTTTTTFEKQKTVVKNVKVHKVLHCRNSVKSASSNVRCGATWNRDVNAAKNLLLLLTTWMDGKERPAAFCVPSSSPTPKTTVSGEANVGAQPTDPPGSVSSLQLLSSGPA

SEQ ID NO: 742 - protein, 415 aa, Chlamydomonas sp.
HSATSLIKLLWVVLNTLVNAQKTVAGSFFRKPPVKNGWVFDCSICTDGVSLSMQYSKTVQVLVSDLKKTCKKPRKEEGIKIAEKYDGSLKTILPDMGIVVLGVDPGRSNIATVTYLADDKNKTWTLTRGAFYHKSGIKKQTRQKELRFADMIPMWESLRENGAALSTSRTDKISAYLSNYAKFSDEWWRLALRRRESRDNLQRYIGKRKVKDSFWAGIKRCMMKELPDMKVCVAYGSAITKLKPTGPGEVAVPTGAMFASCKRIFKEDVSVTDEFKTTLMSWETGKEKERVYKIPSVCSADVKLRLGGERFGHTKSKTMPKVADCDHLGVRLYNKRKGAQEKHRRGGFATSLVDSQKSIERYPEVRGLRFSPETCIYSDRDRSSALTIARLHCMELMGLGRPLPFAHSSSVVVDE

SEQ ID NO: 743 - protein, 760 aa, Chlamydomonas sp.
HTHQRTRRTILSVYAKTMVSSPDPPPEYKTVEKMCVVKCALKKAMSLDDEEFGKFREHVDQLVNVVSRMLRRSSLVLTFHVTRLMEGDLPIPNMYDMKDTYWKDWLRIGVDGVFPDEESRISYESVKDVIGKVLGSDDPDYINSYPIYFDQVLNYAGHTLSTVVSNNAWVPLVPRLTRLTKATLNALKAPKTIRVYDVMRVIQQEIQEMESWPESVQEYVREVRVRLKVPDGSRLYDDYGKDMDFPTMVRFNYWMQTRLESIGARRIRLMPIFNVQRAHVRLDMKTLVNLFRHVFPKDPNIVELSKWKDVKDPDRFMLPLKPAVKKKKSCGPGEWEAYKLAQQKYDADVNDIKDTDEYRHAKGRYDTLVNARKTVAGSFFKKPPVKTGWVFDCSICTDGVSLSMQYSKTVQVRVSDLKKTSKRSRDDEGMTVSEQYDHKLKTTLPDMGIVVLGVDPGRSNIATVTYLADDKSKTWKLTRGAFYHKSGIKKQKKQQEKRFSDMIPRWESLRENGAALSTSRTDDISAYLKNYDTFSDEWWRMALLRRESRDNFQRYIGKRKAMDSFWAGIKRKMKLDHPDLRVRVAYGSAITTLKATGPGEVAVPTGSMFASCKRLFKEEVHVTDEFKTTLMSWETGAKKECVYKIPSVQITTEGQIRLGYELLGHTPLKETPKVSYRDQLAVRVYCTRKQIQEKHRRGGLAPSLVDNNSIKRYPEVRGLRFSPETSTYSDRDRSSALTIARLHCMELLGQGRPLPFCRDA

SEQ ID NO: 744 - protein, 454 aa, Chlamydomonas sp.
GDAEFPDGSRVYDNYGKDMDFPTMVRFNYWIQTRLEDMDARRIRLMPIFNVQRVHVRLDLKTLVNLFRHMFPNDQNIVELSKWEHVKNPDSFMFPQRPAQKKKKSCGPGEWEAYKSVLKQYDDDVKDIKATDEYRHAKGLYDTLVNARKTVAGSFFRKPPVKNGWVFDCSICTDGVSLSMQYSKTVQVLVSDLKKTCKKPRKEEGIKIAEKYDGSLKTILPDMGIVVLGVDPGRSNIATVTYLADDKNKTWKLTRGAFYHKSGIKKQTRQKELRFADMIPMWESLRENGAALSTSRTDKISAYLSNYAKFSDEWWRLALRRRESRDNLQRYIGKRKVKDSFWAGIKRCMMKELPDMKVCVAYGSAITKMKPTGPGEVAVPTGAMFASCKRIFKEDVSVTDEFKTTLMSWETGKEKERVYKIPSVCSADVKLRLGGERFGHTKSKRCQRSLIATT

SEQ ID NO: 745 - protein, 268 aa, Chlamydomonas sp.
QEKRFSNMIPRWESLRENGAALSTSRKDDISAYLKNYATFSDEWWRMALRRRESRDNFQRYIGKRKAMDSFWAGIKRNMKLDHPDLRVRVAYGSAITKLKATGPGEVAVPTGSMFASCKRLFKEEVHVTDEFKTTLMSWETGAKKECVYKIPSVQITTEGQIRLGYELLGHTPLKETPKVSYRDQLAVRVYCTRKKIQEKHRRGGLAPSLVDNKSIKRYPEVRGLRFSPETSTYSDRDRSSALTIARLHCMELLGQGRPLPFSRDACC

SEQ ID NO: 746 - protein, 716 aa, Chlamydomonas sp.
GACGPARQCVSRMLRRSSLVLTFHITSLLEKGLEIPDLYNMKDTYWKDWLRIGVDGIFPDEESKISYEAVKDSIGDVIVNNDADYIKSYPIYFDQVLNYAGHTLSTVVSNNAWVPLIPRLARLTSTTLNKLNAPKTLDTSKIIRGYDVMQAIQQEVQNMEGWPESVQEYVNEVREMLSVPDGSRVYDNYGKDMDFPTMVRFNYWIQTRLEDMDARRIRLMPIFNVQRVHVRLDLKTLVNLFRHMFPNDQNIVELSKCIHVKNPDSFMLPQRPAQKKKKSCGPGEWEAYKSVLKQYDDDVKDIKATDEYRHAKGLYDTLVNARKTVAGSFFRKPPVKNGWVFDCSICTDGVSLSMQYSKKVQVLVSDLKKFCKNPRKEEGIKIAEKYDGSLKTILPDMGIVVLGVDPGRSNIATVTYLADDKNKKWTLTRGAFYHKSGIKKQTRQKELRFADMIPMWESLRENGAALSTSRTDKISAYLSNYAKFSEEWWRLALRRRESRDNLQRYIGKRKVKDSFWAGIKRCMMKELPDMKVCVAYGSAITKLKPTGPGEVAVPIGAMFASCKRIFKEDVSVTDEFKTTLMSWETGKEKERVYKIPSVCSADVKLRLGGERFGHTKSKTMPKVADCDHLGVRLYNKRKGAQEKHRRGGFATSLVDSQKSIERYPEVRGLRFSPETCIYSDRDRSSALTIARLHCMELMGLGRPLPFAHSSSVVVDE

SEQ ID NO: 747 - protein, 686 aa, Chlamydomonas sp.
METIVNKEPPDKRTRPDRAAKIKDRKNGEENVVKCTLSRIIADKDNKDVITKVIKERVDSVSKRTYLAGVAVNRILKEVFEGVPDAQLHTVSVPSVDQNFIRQLMVGSRQAHMETRDATVERFFHNNYWFREKIEGREVIVKKKKQYVGAIARYDGDRNLYSHASKKYLTNFNNHYRVHLSTWIKKFVYSKENRILAKEFKDEHGIDETVFHRYLLYDIHSWGVKEDLIAIHSLLPERTKMLLKIQHSIIGQDEINRQWLKSVSNSAKMIRYNVFINRYLEATEDEGYAKLVNIAPIPTVKHSFITIDTDGLLGVLKDVGLVESLEKTLTNKEHWESVFDVENIRSTGKGVFTCTIDTDSVMACTHFLRAEKKKISIKDDGTAIKKQTKTLREFSESDPNVVVVANDPGRCNIAFLTWKKNKVEEKDNGGRKRKRHCEFGSKRLTRERYYVESGVFKSRGPTKKWLSNIQDCLDDLKDNSPKRTSLESFDAYVTVMVNHWDSRWGEMSKSRWGAQRLRLYGGKKRVLARFFNEVQADVGERKTIVIAYGSSKFAPGGKGELSVPTTSAFNAFRDRFKGRVAVIDEFRTTKIWHKDSTTVLQSVQSEKKGRTVRGLLWCSSTMENSKLFVNRDLNAAINIHNCFTMYPTRPGILARPKKYCKLEVVVGRTIDYKLTGSLQNAVSSEV

SEQ ID NO: 748 - protein, 792 aa, Chlamydomonas sp.
KMATKPPTVAKLKELLKLAEVPYSSKSNKDDLVRLCEDNGLIARPPPEYKTVEKMCVVKCALKKAMSLDDEEFGKFREHVDQLVNVVSRMLRRSSLVLTFHITSLLEKGLEIPDLYNMKDTYWKDWLRIGVDGIFPDEESKISYEAVKDSIGDVIGNDDADYIKSYPIYFDQVLNYAGHTLSTVVSNNAWVPLIPRLARLTSTTLNKLNAPKTLDTSKIIRGYDVMQAIQQEVQNMEGWPESVQEYVNEVREMLSVPDGSRVYDNYGKDMDFPTMVRFNYWIQTRLEDMDARRIRLMPIFNVQRVHVRLDLKTLVNLFRHMFPNDQNIVELSKWEHVKNPESFMLPQRPAQKKKKSCGPGEWEAYKSVLKQYDDDVKDIKATDEYRHAKGLYDTLVNARKTVAGSFFRKPPVKNGWVFDCSICTDGVSLSMQYSKTVHVLVSDLKKTCKKPRKEEGIKIAEKYDGSLKTILPDMGIVVLGVDPGRSNIATVTYLADDKNKTWKLTRGAFYHKSGIKKQTRQKELRFADMIPMWESLRENGAALRTSRTDKISAYLSNYAKFSDEWWRLALRRRESRDNLQRYIGKRKVKDSFWAGIKRCMMKELPDMKVCVAYGSAITKLKPTGPGEVAVPTGAMFASCKRIFKEDVSVTDEFKTTLMSWETGKEKERVYKIPSVCSADVKLRLGGERFGHTKSKTMPKVADCDHLGVRLYNKRKGAQEKHRRGGFATSLVDSQKSIERYPEVRGLRFSPETCIYSDRDRSSALTIARLHCMELMGLGRPLPFAHSSSVVVE

SEQ ID NO: 749 - protein, 405 aa, Chlamydomonas sp.
IISYLSTIVKKKISLNSLKLWSFANLKKVETVSRKFGYRIVTDGFAVSILMNKPTCLTCSMPADAFSTRAHEYVTTDEGGIVSFLDNVVVAAVDPGVTDIVTVTGLNGGTRSYSSAKYYRKGLIFKSQRQTDVWNLETADIVGGIIPDRDSSSSEQIGAYARFYMGAAPILLAHRASRGYRNLRFRRYCKKQKLIVEIADFVAPRKKSAKVLVGFGDWKGLGATPISRRTCGPLQAIRFELRSRENVIMEDIDEFRTSQRCSCCENHLCNMVALTHRKKQDGTGWECTEGRKRIHKILHCKSSQSGAPRQQSGGMLHCGKTWDRDVNASRNILMLTLHQVFGRERPLAFRRDAPRSSSTTPPPDTDMGTQTVDRFTKEATRNIFENLFNLLHPPTLPKSNDLQSG

SEQ ID NO: 750 - protein, 615 aa, Chlamydomonas sp.
QCIRNLHVLNIRMPCMATNASVKLARSPMPVVSPGPSSVDGRIMARSGLQATNVSLTQAASKATSSSRKKKPAVVKSFSTHVCPHTNNNPTCSDSNCSCKPIFLTNIPDASKSRTSDQGSTSSAQDFYEYWDSSRQDLYRQLLWLPKTGTQGLVSSSFNGFAHSTPTRSSFSITKTEPLKTSLEKTSCPSFKYIVTDGTVEDATKSNAKPKLRTLKLKLNPTKAQKSMLAEFAGCSRFMYNKAVAARLGVGSTHKSVFRIRDRYVTNKVRGKGKMPNPYFKNRQWLLQCPKSVRQSAIKSALANIKACFSNLKVGNIKQFSAPFRRKKTELERGWVIEMDQKNVSKDGDKLFIFKEILGNMRYFGSKQLHKLMPEENPTHDPKVQKSRFGEYFLVLSVAARDRRAERKPVNPDKVATASIDPGVRKTMVTYSPENEESFMLGQGQASDLVKLLLVHDKLQSRLDTEKTLRSKERMKIKKLMIRIRKTIFYLKKEFRDQTTNFLAARYDVLLVPQLETAKMTISAERELTTKVARQMLTLSHSVLFNRLKEKCEEYGTVFLHVLEHYTSQTCPMCGFLNKCGETYTCKNCQFTCDRDIVGAAGIFLKAVRTENPCS

SEQ ID NO: 751 - protein, 810 aa, Chlamydomonas sp.
SSFSSLPESCLRGACFPCRIKSSVMYKLCKMATKPPTVAKLKELLKLAEVAYSSKDKKDDIVRLCEDNGLIARPPPEYKTVEKMCVVKCALKKAMSLDDEEFGKFREHVDQLVNVVSRMLRRSSLVLTFHVTRLMEGDLPIPNMYDMKDTYWKDWLRIGVDGVFPDEESRISYEAVKDVIGKVLGSDDPDYINSYPIYFDQVLNYAGHTLSTVVSNNAWVPLVPRLTRLTKATLNALKAPKTIRVYDVMRVIQQEIQEMESWPESVQEYVREVRVRLKVPDGSRLYDDYGKDMDFPTMVRFNYWMQTRLESIGARRIRLMPIFNVQRAHVRLDMKTLVNLFRHVFPKDPNIVELSKWKDVKDPDRFMLPLKPAVKKKKSCGPGEWEAYKLAQQKYDADVNDIKDTDEYRHAKGRYDTLVNARKTVAGSFFKKPPVKTGWVFDCSICTDGVSLSMQYSKTVQVRVSDLKKTSKRSRDDEGMSVSEQYDHKLKTTLPDMGIVVLGVDPGRSNIATVTYLADDKSKTWKLTRGAFYHKSGIKKQKKQQEKRFSDMIPRWESLRENGAALSTSRTDDISAYLKNYDTFSDEWWRMALLRRESRDNFQRYIGKRKAMDSFWAGIKRNMKLDHPDLRVRVAYGSAITTLKATGPGEVAVPTGSMFASCKRLFKEEVHVTDEFKTTLMSWETGAKKECVYKIPSVQITTEGQIRLGYELLGHTPLKETPNVSYRDQLAVRVYCTRKQIQEKHRRGGLAPSLVDNNSIKRYPEVRGLRFSPETSTYSDRDRSSALTIARLHCMELLGQGRPLPFCRDA

SEQ ID NO: 752 - protein, 697 aa, Chlamydomonas sp.
HVRCLQTRSLRGHEYVTTDEGGIVSFLDNVVVAAVDPGVTDIVTVTGLNGGTRSYSSAQYYRKGLIFKSQRQTDVWNLETADIVGGIIPDRDSSSSEQIGAYARFYMGAAPILLAHRASRGYRNLRFRRYCKKQKLIVEIADFVAPRKKSAKVLVGFGDWKGLGATPISRRTCGPLQAIRFDLRSRENVIMEDIDEFRTSQRCSCCENHLCNMVALTHRKKQDGTGWECTEGRKRIHKILHCKSSQSGAPRQQSGGMLHCGKTWDRDVNASRNILMLTLHQVFGRERPLAFRRDAPRSSSTTPPPDTDMGTQTVERFTKEATRNIFENLFNLLHPPTLPKSNDLDAVWMIIKFPTLFKNNCMHRKKKLKCLDLFSGIGGNALALRSICKTIAYCEIDPFARDVLEANMKRKNLDKAPIFEDVTTLKAVDVPELPDVITASFPCQDISSAGKGAGITGEHSGLYKHIFRLVKEFRRHRNHRISVIVMENSPMIKNRGLEKIESDLRSLGFRFQSVYRKASDFGARHERRRWCMVAIDKQSDLDLPCTYFRHNFDNLDNIPVLLKREGKASANFIRYGALGNAVVPKFIASVWDELICSVPFDSQDINRYPLLSYNTPHVTATRRLWPTPLYSRQQWTMRPFIRVGRREWSNMANRVFHEEGVMRKYNYNDANQAYHTYIINPEWVEALMGYPTGWTGT

SEQ ID NO: 753 - protein, 397 aa, Chlamydomonas sp.
TPEKTVAGSFFRKPPVKNGWVFDCSICTDGVSLSMQYSKTVQVLVSDLKKTCKKPRKEEGIKIAEKYDGSLKTILPDMGIVVLGVDPGRSNIATVTYLADDKNKTWTLTRGEFYHKSGIKKQTRQKELRFADMIPMWESLRENGAALSTSRTDKISAYLSNYAKFSDEWWRLALRRRESRDNLQRYIGKRKVKDSFWAGIKRCMMKELPDMKVCVAYGSAITKLKPTGPGEVAVPTGTMFASCKRIFKEDVSVTDEFKTTLMSWETGKEKERVYKIPSVCSADVKLRLGGERFGHTKSKTMPKVADCDHLGVRLYNKRKGAQEKHRRGGFATSLVDSQKSIERYPEVRGLRFSPETCIYSDRDRSSALTIARLHCMELMGLGRPLPFAHSSSVVVDE

SEQ ID NO: 754 - protein, 282 aa, Chlamydomonas sp.
TFYHKSGIKKQKKQQEKRFSDMIPRWESLRENGAALSTSRTDDISAYLKNYATFSDEWWRMALRRREFRDNFQRYIGKRKAMDSFSAGIKRNMKLDHPDLRVRVAYGSAITTLKATRPGEVAVPTGSMFASCKRLFKEEVHVTDEFKTTLMSWETGAKKECVYKIPSVQITTEGQIRLGYELLGHTPLKETPKVSYRDQLAVRVYCTRKQIQEKHRRGGLAPSLVDNNSIKRYPEVRGLRFSPETSTYSDRDRSSALTIARLHCMELLGQGRPLPFCRDACC

SEQ ID NO: 755 - protein, 464 aa, Chlamydomonas sp.
CNVMTLPLYHKILSETIEEKRKTKNEKHRTFSLLPYKSGFTLSHIPISKMAFFYMVNECHFDSCKADVASKNHQGIWERFANLKKVETVSRKFGYRIVTDGFAVSILMNKPTCLTCSMPADAFSTRAHEYVTTDEGGIVSFLDNVVVAAVDPGVTDIVTVTGLNGGTRSYSLAQYYRKGLIFKSQRQTDVWNLETADIVGGIIPDRDSSSSEQIGAYARFYMGAAPILLAHRASRGYRNLRFRRYCKKQKLIVEIADFVAPREKSAKVLVGFGDWKGLGATPISRRTCGPLQAIRFELRSRENVIMEDIDEFRTSQRCSCCENHLCNMVALTHRKKQDGTGWECTEGRKRIHKILHCKSSQSGAPRQQSGGMLHCGKTWDRDVNASRKYLMLTLHQVFGRERPLAFRRDAPRRSSTTPPPPLDTDMGTQTVERFTKEATRNIFENLFNLLHPPTLPKSNDLQSG

SEQ ID NO: 756 - protein, 499 aa, Chlamydomonas sp.
RTSDQGSTSSTQDFYEYWDSSRQDLYRQLLWLPKTGSQGLVSSSLNGFARSTPTRSSFSITKTEPLKTKTSCPSFKYIVADGTVKDATKSNAKPKLRTLKLKLNPTKAQKSMLAEFAGCSRFMYNKAVAARLGVGSTHKSVFRIRDKYVTNKVRGEGKMPNPYFKNRQWLLQCPKSVRQSAIKSALANVKACFSNLKAGNIKQFSAPFRRKNTELERGWAIEMDQHNISKDGDKLFIFKDTLGNMRYFGSKQLHKLMPEENPTHDPKVQKSRFGEYFLVLSVAAMDRRAERKPVHPDKVATASIDPGVRKTMVTYSPENEESFMLGQGQASDLVKLLLVHDKLQSRLDTEKTLRSKERMKIKQQMIRIRKRFFYLKKEFRDQTTNFLAARYDVLLVPQLETAKMTISAERELTTKVARQMLTLSHSVLFNRLKDKCEEYGTVFLHVLEHYTSQTCPMCGFLNKCGGETYTCNNCQFTCDRDIVGAAGIFLKAVRTENPC

SEQ ID NO: 757 - protein, 221 aa, Chlamydomonas sp.
RYCKKQKLIVEIADFVAPREKSAKVLVGFGDWKGLGATPISRRTCGPLQAIRFELRSRENVIMEDIDEFRTSQRCSCCENHLCNMVALTHRNKQDGTGWECTEGRKRIHKILHCKSSQSGAPRQQSGGMLHCGKTWDRDVNASRNILMLTLHQVFGRERPLAFRRDAPRSSSTTPPPPPDTDMGTQTVERFTKGATRNIFENLINLLHPPTLPKSNDLQSG

SEQ ID NO: 758 - protein, 794 aa, Chlamydomonas sp.
ECSREPLCRSRLHQNVFGVQFVMDNGIGESSSLVQEADQHDDVAELVDYEGEEDEERAPGRAICVVKMKLSTFIPHDWLRNKIDTLVLDMNKLLGEGYIFANFHIARLFENGIAVPPVNRNFFYRCLIAVSTNKCKGSTLGEDFESSRLLFDLLREPGQSKVDIRGNVKNQIIADLSILMATMASNHLWTNLERRITTYLKWKYPQIAKRLRSDIVAALIKCPTKNIDVIFKMSPHTTKLPTKLPTSRLRSAKSAVALAKKRVGRKEPEGSPLRVRLTQLQERLEKLSEAWLSSKNLRVDADNAKRFFAREVAFCLRGVLPLPSGNTFASRAHMTLPLYHKILSETIEEKRTTKNEKHRTFSLLPYKSGFTLSHIPISKMAFFYMVNECHFDSCKADVASKNHQGIWERFANLKKVETVSRKFGYRIVTDGFAVSILMNKPTCLTCSMPADAFSTRAHEYVTTDEGGIVSFLDNVVVAAVDPGVTDIVTVTGLNGGTRSYSSAQYYRKGLILKSQRQTDVWNLETADIVGGIIPDRDSSSSEQIGAYAGFYMGAAPILLAHRASRGYRNLRFRRYCKKQKLIVEIADFVAPREKSAKVLVGFGDWKGLGATPISRRTCGPLQAIRFELRSRENVIMEDIDEFRTSQRCSCCENHLCNMVALTHRNKQDGTGWECTEGRKRIHKILHCKSSQSGAPRQQSGGMLHCGKTWDRDVNASRNILMLTLHQVFGRERPLAFRRDAPRSSPTTPPPPPDTDMGTQTVERFTKEATRNIFDNLFNLLHPPTLPKSNDLQSG

SEQ ID NO: 759 - protein, 794 aa, Chlamydomonas sp.
ECSREPLCRSRLHQNVFGVQFVMDNGIGESSSLVQEADQHDDVAELVDYEGEEDEERAPGRAICVVKMKLSTFIPHDWLRNKIDTLVLDMNKLLGEGYIFANFHIARLFENGIAVPPVNRNFFYRCLIAVSTNKCKGSTLGEDFESSRLLFDLLREPGQSKVDIRGNVKNQIIADLSILMATMASNHLWTNLERRITTYLKWKYPQIAKRLRSDIVAALIKCPTKNLDVIFKMSPHTTKLPTKLPTSRLRSAKSAVALAKKRVGRKEPEGSPLRVRLTKLQERLEKLSEAWLSSKNIRVDADNAKRFFAREVAFCLRGVLPLPSGNTFASRAHMTLPLYHKILSETIEEKRTTKNEKHRTFSLLPYKSGFTLSHIPISKMAFFYMVNECHFDSCKADVASKNHQGIWERFANLKKVETVSRKFGYRIVTDGFAVSILMNKPKCLTCSMPADAFSTRAHEYVTTDEGGIVSFLDNVVVAAVDPGVTDIVTVTGLNGGTRSYSSAQYYRKGLIFKSQRQTDVWNLETADIVGGIIPDRDSSSSEQIGAYARFYMGAAPILLAHRASRGYRNLRFRRYCKKQKLIVEIADFVAPREKSAKVLVGFGDWKGLGATPISRRTCGPLQAIRFELRSRENVIMEDIDEFRTSQRCSCCENHLCNMVALTHRNKQDGTGWECTEGRKRIHKILHCKSSQSGAPRQQSGGMLHCGKTWDRDVNASRNILMLTLHQVFGRERPLAFRRDAPRSSSTTPPPPPDTDMGTQTVERFTKEATRNIFENLFNLLHPPTLPKSNDLQSG

SEQ ID NO: 760 - protein, 794 aa, Chlamydomonas sp.
ECSREPVCRSRLHQNVFGVQFVMENGIGESSSLVHEADQHDDVAELVDYEGEEDGECAPGRAICVVKMKLSTFIPHDWLRNKIDTLVLDMNKLLGEGYIFANFHIARLFENGIAVPPVNRNFFYRCLIAVSTNKCKGSTLGEDFESSRLLFDLLREPGQSKVDIRGSVKNQIIADLSILMATMASNHLWTNLERRITTYLKWKYPQIAKRLRSDIVAALIKCPTKNLDVIFKMSPHTTKLPTKLPTSRLRSAKSAVALAKKRVGRKEPEGSPLRVRLTKLQERLEKLSEAWLSSKNLRVDADNAKRFFAREVAFCLRGVLPLPSGNTFASRAHMTLPLYHKILSETIEEKRKTKNEKHRTFSLLPYKSGFTLSHIPISKMAFFYMVNECHFDSCKADVASKNHQGIWERFANLKKVETVSRKFGYRIVTDGFAVSILMNKPTCLTCSMPADAFSTRAHEYVTTDEGGIVSFLDNVVVSAVDPGVTDIVTVTGLNGGTRSYSSAKYYRKGLIFKSQRQTDVWNLETADIVGGIIPDRDSSSSEQIGAYARFYMGAAPILLAHRASRGYRNLRFRRYCKKQKLIVEIADFVAPRKKSAKVLVGFGDWKGLGATPISRRTCGPLQAIRFELRSRENVIMEDIDEFRTSQRCSCCENHLCNMVALTHRKKQDGTGWECTEGRKRIHKILHCKSSQSGAPRQQSGGMLHCGKTWDRDVNASRNILMLTLHQVFGRERPLAFRRDAPRSSSTTPPPPPDTDMGTQTVERFTKEATRNIFENLFNLLHPPTLPKSNDLQSG

SEQ ID NO: 761 - protein, 801 aa, Chlamydomonas sp.
PRMEHVCDVGIKSSVMYKLCKMATKPPTVAKLKELLKLAEVAYSSKDKKDDIVRLCEDNGLIAKPPPEYKTVEKMCVVKCALKKAMSLDDEEFGKFREHVDQLVNVVSRMLRRSSLVLTFHVTRLMEGDLPIPNMYDMKDTYWKDWLRIGVDGVFPDEESRISYEAVKDVIGKVLGSDDPDYINSYPIYFDQVLNYAGHTLSTVVSNNAWVPLVPRLTRLTKATLNALKAPKTIRVYDVMRVIQQEIQEMESWPESVQEYVREVRVRLKVPDGSRLYDDYGKDMDFPTMVRFNYWMQTRLEAIGARRIRLMPIFNVQRAHVRLDMKTLVNLFRHVFPKDPNIVELSKWKDVKDPDRFMLPLKPPFKKKKSCGPGEWEACKLAQQKYDADVNDIKDTDEYRHAKGRYDTLVNARKTVAGSFFKKPPVKTGWVFDCSICTDGVSLSMQYSKTVQVRVSDLKKTSKRSRDDEGMSVSEQYDHKLKTTLPDMGIVVLGVDPGRSNIATVTYLADDKSKTWKLTRGAFYHKSGIKKKKKQQEKRFSDMIPRWESLRENGAALSTSRTDDISAYLKNYDTFSDEWWRMALLRRESRDNFQRYIGKRKAMDSFWAGIKRNMKLDHPDLRVRVAYGSAITTLKATGPGEVAVPTGSMFASCKRLFKEEVHVTDEFKTTLMSWETGAKKECVYKIPSVQITTEGQIRLGYELLGHTPLKETPNVSYRDQLAVRVYCTRKQIQEKHRRGGLAPSLVDNNSIKRYPEVRGLRFSPETSTYSDRDRSSALTIARLHCMELLGQGRPLPFCRDA

SEQ ID NO: 762 - protein, 477 aa, Chlamydomonas sp.
LDMIRRLGRPCRYRSRAHMTLPLYHKILSETIEEKRKTKNEKHRTFSLLPYKSGFTLSHIPISKMAFFYMVNECHFDSCKADVASKNHQGIWERFANLKKVETVSRKFGYRIVTDGFAVSILMNKPTCLTCSMPADAFSTRAHEYVTTDEGGIVSFLDNVVVSAVDPGVTDIVTVTGLNGGTRSYSSAKYYRKGLIFKSQRQTDVWNLETADIVGGIIPDRDSSSSEQIGAYARFYMGAAPILLAHRASRGYRNLRFRRYCKKQKLIVEIADFVAPRKKSAKVLVGFGDWKGLGATPISRRTCGPLQAIRFELRSRENVIMEDIDEFRTSQRCSCCENHLCNMVALTHRKKQDGTGWECTEGRKRIHKILHCKSSQSGAPRQQSGGMLHCGKTWDRDVNASRNILMLTLHQVFGRERPLAFRRDAPRSSSTTPPPDTDMGTQTVERFTKEATRNIFENLFNLLHPPTLPKSNDLQSG

SEQ ID NO: 763 - protein, 793 aa, Chlamydomonas sp.
KMATKSPTVAKLKELLKLAEVPYSSKSNKDDLVRLCEDNGLIARPPPEYKTVEKMCVVKCALKKAMSLDDEEFGKFREHVDQLVNVVSRMLRRSSLVLTFHITSLLEKGLDIPDLYNMKDTYWKDWLRIGVDGIFPDEESKISYEAVKDSIGDVIGNDDADYIKSYPIYFDQVLNYAGHTLSTVVSNNAWVPLIPRLARLTSTTLNKLNAPKTLDTSKIIRGYDVMQAIQQEVQNMEGWPESVQEYVNEVREMLSVPDGSRVYDNYGKDMDFPTMVRFNYWIQTRLEDMDARRIRLMPIFNVQRVHVRLDLKTLVNLFRHMFPNDQNIVELSKWEHVKNPESFMLPQRPAQKKKKSCGPGEWEAYKSVLKQYDDDVKDIKATDEYRHAKGLYDTLVNARKTVAGSFFRKPPVKNGWVFDCSICTDGVSLSMQYSKTVQVLVSDLKKTCKKPRKEEGIKIAEKYDGSLKTILPDMGIVVLGVDPGRSNIATVTYLADDKNKTWKLTRGAFYHKSGIKKQTRQKELRFADMIPMWESLRENGAALSTSRTDKISAYLSNYAKFSDEWWRLALRRRESRDNLQRYIGKRKVKDSFWAGIKRCMMKELPDMKVCVAYGSAITKLKPTGPGEVAVPTGAMFASCKRIFKEDVSVTDEFKTTLMSWETGKEKERVYKIPSVCSADVNLRLGGERFGHTKSKTMPKVADCDHLGVRLYNKRKGAQEKHRRGGFATSLVDSQKSIERYPEVRGLRFSPETCIYSDRDRSSALTIARLHCMELMGLGRPLPFSHSSSVVVDE

SEQ ID NO: 764 - protein, 799 aa, Chlamydomonas sp.
PRMEHVCDVCIKNSVMYKLCKMATKPPTVAKLKELLKLAEVAYSSKDKKDDIVRLCEDNGLIARPPPEYKTVEKMCVVKCALKKAMSLDDEEFGKFREHVDQLVNVVSRMLRRSSLVLTFHVTRLMEGDLPIPNMYDMKDTYWKDWLRIGVDGVFPDEESRISYEAVKDVIGKVLGSDDPDYINSYPIYFDQVLNYAGHTLSTVVSNNAWVPLVPRLTRLTKATLNALKAPKTIRVYDVMRVIQQEIQEMESWPESVQEYVREVRVRLKVPDGSRLYDDYGKEMDFPTMVRFNYWMQTRLESIGARRIRLMPIFNVQRAHVRLDMKTLVNLFRHVFPKDPNIVELSKWKDVKDPFMLPLKPAFKKKKSCGPGEWEAYKLAQQKYDADVNDIKDTDEYRHAKGRYDTLVNARKTVAGSFFKKPPVKTGWVFDCSICTDGVSLSMQYSKTVQVRVSDLKKTSKRSRDNEGMSVSEQYDHKLKTTLPDMGIVVLGVDPGRSNIATVTYLADDKSKTWKLTRGAFYHKSGIKKQKKQQEKRFSDMIPRWESLRENGAALSTSRTDDISAYLKNYDTFSDEWWRMALLRRESRDNFQRYIGKRKAMDSFWAGIKRNMKLDHPDLRVRVAYGSAITTLKATGPGEVAVPTGSMFASCKRLFKEEVHVTDEFKTTLMSWETGAKKECVYKIPSVQITTEGQIRLGYELLGHTPLKETPNVSYRDQLAVRVYCTRKQIQEKHRRGGLAPSLVDNNSIKRYPEVRGLRFSPETSTYSDRDRSSALTIARLHCMELLGQGRPLPFCRDA

SEQ ID NO: 765 - protein, 241 aa, Chlamydomonas sp.
NSVSFHKTHWFYKKKEQTPWTVSVAARDRRAERKPVNPDKVATASIDPGVRKTMVTYSPENEESFMLGQGQASDLVKLLLVHDKLQSRLDTEKTLRSKERMKIKKLMIRIRKTIFYLKKEFRDQTTNFLAARYDVLLVPQLETAKMTISAERELTTKVARQMLTLSHSVLFNRLKEKCEEYGTVFLHVLEHYTSQTCPMCGFLNKCGETYTCKNCQFTCDRDIVGAAGIFLKAVRTENPCS

SEQ ID NO: 766 - protein, 372 aa, Chlamydomonas sp.
VAARLGVGSTHKSVFRIRDRYVTNKVRGKGKMPNPYFKNRQWLLQCPKSVRQSAIKSALANIKACFSNLKAGNIKQFSAPFRRKKTELERGWVIEMDQKNVSKDGDKLFIFKEILGNMRYFGSKQLHKLMPEENPTHDPKVQKSRFGEYFLVLSVAARDRRAERKPVNPDKVATASIDPGVRKTMVTYSPENEESFMLGQGQASDLVKLLLVHDKLQSRLDTEKTLRSKERMKIKKLMIRIRKTIFYLKKEFRDQTTNFLAARYDVLLVPQLETAKMTISAERELTTKVARQMLTLSHSVLFNRLKEKCEEYGTVFLHVLEHYTSQTCPMCGFLNKCGETYTCKNCQFTCDRDIVGAAGIFLKAVRTENPCS

SEQ ID NO: 767 - protein, 457 aa, Chlamydomonas sp.
HQGEREEPDHSRPVYSHGHNGLNHLWTNLERRITTYLKWKYPQIAKRLRSDIVAAVIKCPTKNLDVIFKMSPHVAKLPTKLPTARLRSAKSAVALAKKRVGRKEPEVSPLRVRLTKLQARFEKLSEAWLSSKNLRVDEDNAKRFFARDVAFCLRGGLPLPSGNTFASRAHMTLPLYHKILSETIEEKRKTKNEILRTFLSLPYKSGFTLSHIPISKMAFFYMVNEYHFDSCKADVASKNHQGIWERFANLKKVETVSRKFGYRIVTDGFAVSILMNKPTCLTCSMPADSFSTRAHEYVTTDEGGIVSFRDNVVVAAVDPGVTDIVTVTGLDGGTRSYSSAQYYRKGLIFKSQRQTDVWNLETADIVGDIIPDRDSSRSEQIGAFARFYMGAAPILLAHRASRGYRNLRFRRYCKKQKLIVEIADFVAPREKSAKVLVGFGDWKGLGATPIYTLPGTS

SEQ ID NO: 768 - protein, 534 aa, Chlamydomonas sp.
NVGAILYHQKKKNTHPLLMGVVQDRGDDDINISVVKKTLNSLCMDVSRHQISSRIQSMVLLINHAVAEAHLFANFHITRCLDDGDFDVKQLPHLDRNFYYRCLLAVSTSNVRKDTLGQSFNDTMVAFDALRPAGYVKVDIRPWGQVIADVSIQMATMACNSVWANVDRVVIKYLRLKHPSLKKHFKKIVKAVVQYPESKIDTIIPEGLVHAIHIKEVVSHLRALFPLPRGKQFNTRAHLTMRLFHHVLTELREVGRVDPKDKKTKKSHPRLFSILPRKNGFTISYVPISSMTFMKLLSMGDSPLESVSGDGRYENHTMLWRKYFNVQGLETKRSRFDNRILSDGKGVSVQMKQKGKEEVVEEGENAGYPKDANIVECKDAVGALRVGVDPGMTDIVTVASSAGRIESFSSARFSEVAGYNTSKRRTYKWNDETQDLVNSIPSPNTSNMVDLQDHVRAYLKALPILLQHRANKGYRSMRFFRYVGKQKTIEKVCDVISPRAQTTVVGFGNWSNQGYGISRSCSGPIKEIRRCLTS

SEQ ID NO: 769 - protein, 555 aa, Chlamydomonas sp.
PKQHPRLPHRAGKKKPAVVKSFSTHVCPHTNNNPTCSDSNCSCKPIFLTNIPDASKSRTSDQGSTSSAQDFYEYWDSSRQDLYRQLLWLPKTGSQGLVSSSLNGFARSTPARSSFSITKTEPLKTSLDKTSCPSFKYIVADGTVEDATMSNAKPKLRTLNPIKDQKSMLAEFAGCSRFMYNKAVAARLGVGSTHKSVFRIRDRYVTNKVRGEGKMPNPYFKNRQWLLQCPKSVRQSAIKAALANIKACFSNLKAGNIKQFSAPFRRKKTELERGWAIEMDQKNISKDGDKLFIFKDILSNMRYFGSKQLHKLMPEENPTHDPKVQKSRFGEYFLVLSVAARDRRAERKPVHPDKVATASIDPGVRKTMVTYSPENEESFMLGQGQASDLVKLLLVHDKLQSRLDTEKTLRSKERMKIKKQMIRIRKRIFYLKKEFRDQITNFLAARYDVLLVPQLETAKMTISAERELTTKVARQMLTLSHSVLFNRLKEKCEEYGTVFLHVLEHYTSQTCPMCGLLNKCGETYTCKNCQFTCDRDIVGAAGIFLKAVRTENPCS

SEQ ID NO: 770 - protein, 621 aa, Chlamydomonas sp.
QCIRNLHVLNIRMPCMATNASVKLARPPMPLVSPGPSSVDGRIIARSERSGLQATNVSLTQAASKATSSSRKKNPAVVKSFSTHVCPHTNNNPTCSDSNCSCKPIFLTNIPDVSKSLKSRTSDQGSTSSAQDFYEYWDSSRQDLYRQLLWLPKTGSQGLVSSSLNGFARSTPARSSFSITKTEPLKTSLDKTSCQSFKCIVADGTAEEAIKSNAKPKLRTLKLKLNPTKDQKSMLAEFAGCSRFMYNKAVAARLGVGSTHKSVFRIRDRYVTNKVRGKGKMPSPYFKNRQWLLQCPKSVRQSAIKAALANIKACFSNLKAGNIKQFSAPFRRKKTELERGWVIEMDQKNISKDGDKLFIFKDILGNMRYFGSKQLHKLMPEENPTHDPKVQKSRFGEYFLVLSVAARDRRAERKPVHPDKVAIASIDPGVRKTMVTYSPENEESFMLGQGQASDLVKLLLVHDKLQSRLDTEKTLRSKERMKIKKQMIRIRKRIFYLKKEFRDQTTNFLAACYDVLLVPQLETAKMTISAERELTTKVARQMLTLSHSVLFNRLKEKCEEYGTVFLHVLEHYTSQTCPMCGLLNKCGETYTCKNCQFTCDRDIVGAAGIFLKAVRTENPCS

SEQ ID NO: 771 - protein, 620 aa, Chlamydomonas sp.
LETSAQRNHKSAPYHVSQPVKIGREAGTPIDRKNGEGNVVKCTLSRIIADKDNKDVITKVIKERVDSLSKRTYLAGVAVNRILKEVFEGVPDAQLHTVSVHSVDQNFIRQLMVGSRQAHMETRDDDTVERFFHNNYWFREKIEGREVIVKKKKQYVGAIARYDGDRNLYSHASKKYLTNFNNHYRVHLSTWIKKFVYSKENRILAKEFKDEHGIDETVFHRYLLYDIHSWGVKEDLIAIHSLLPERTKMLLKIQHSIIGRDEINRQWLKSVSNSAKMIRYNVFINRYLEATEDEGYAKLVNIAPIPTVKHSFITIDTDGLLGVLKDVGLVESLEKTLTNKEHWESVFDVENIRSTGKGVFTCTIDTDGVMACTHFLRAEKKKISIKDDRTAIKKQTKTLRECSESDPNVVVVANDPGRCNIAFLTWKKNKVEEKDKGGRKRKRHCEFGSKRLTRERYYVESGVFKSRGPTKKWLSNIQDCLDDLKDNSPKRTSVESFDAYVTVMVNHWDSRWGEMSKSRWGAQRLRLYGGKKRVLARFFNEVQADVGERKTIVIAYGSSKFAPGGKGELSVPTTSAFNAFSDRFKGRVAVIDEVRTTKIWHKDSTTVLQSVQSEKEGRTV

SEQ ID NO: 772 - protein, 688 aa, Chlamydomonas sp.
RNVGTILYHQNKKNTHPLLMGVVQDKGDDDINFSVVKKTLNSLCMDVSRHQISSRIQSMVLLINHAVAEAYLFANFHITRCLDDGDFDVKQLPHLDRNFYYRCLLAVSTSNVRKDTLGQSFNDTMVAFDALRPAGYVKVDVRPWGQVIADVSIQMATMACNSIWANVDRVVIKYLRLKHPSLKKHFKKIVKAVVQYPESKIDTIIPEGLVHAIHIKEVVSHLRALFPLPRGKQFNTRAHLTLRLFHHVLTELGEVGRVDLKDKKTRKSHPRLFSILPRKNGFTISYVPISSMTFMKLLSMGDSPLESVSGDGRYENHTMLWRKYFNVQGLETKRSRFDNRILSDGKGVSVQMKQKGKEEVVEEGENAGYPKDANIVECNDAVGALRVGVDPGMTDIVTVASSAGRIESFSSARFSEVAGYNTSKRRTYKWNDETQDLVKSIPSPNTSNMSDLQDHVRAYLKALPILLQHRANKGYRSMRFFRYVGKQKTIEKVCDVIAPRAQTTVVGFGNWSNQGYGISRSCSGPIKEIRRCLSRRKNVLFKNVDERNTSCKCHGCFQRLVNMKADSVVWRGVCKESPIDGSITVEKQKMVVKNVKVHKVLHCRDSVKSASSNVGCGATWNRDVNAAKNLLLLMTTWMDGRERPEAFCVPSPPPKTTVSIEASVSAKPTDPPGFVSSFPCYPLGQLKC

SEQ ID NO: 773 - protein, 686 aa, Chlamydomonas sp.
METIVNKEPPDKRTRPDRAAKIKDRKNGEENVVKCTLSRIIADKDNKDVIIKVIKERVDSVSKRTYLAGVAVNRILKEVFEGVPDAQLHNVSVPSVDQNFIRQLMVGSRQAHMETRDATVERFFHNNYWFREKIEGREVIVKKKKQYVGAIARYDGDRNLYIHASKKYLTNFNNHYRVHLSTWIKKFVYSKENRTLAKEIKDEHGIDETVFHRYLLYDIHSWGVKEDLIAIHSILPERTKMLLKIQHSILGRDEINRQWLKSVSNSAKMIRYNVFINRYLEATEDEDYAKLVNIAPIPTVKHAFITIDTDGLLGVLKDVGLIESLEKTLTNKEHWESVFDVENIRSTGKGAFTCTIDTDGVMACTHFFRAEKKNISIKDDGTAIKKQTKTLREFSESDPNVVVVANDPGRCNIAFLTWKKNKVEEKDNGGRKRKRHCEFGSKRLTRERYYVESGVFKSRGPTKKWLSNIQDCLDDLKDNSPKRTSLVSFDAYVTVMVNHWDSRWGEMSKSRWGAQRLRLYGGKKRVLARFFNEVQEDVGERKTIVVAYGSAKFAPGGKGELSVPTTSAFKAFSYRFKGRVAVIDEFRTTKIWHKDSTTVLQSVQSEKEGRTVRGLLWCSSTMENSKLFVNRDLNAAINIHNCFTMYPIRPGILARPKKYCKLEVVVGRKIDYKLTGSLQNAVSSEV

SEQ ID NO: 774 - protein, 330 aa, Chlamydomonas sp.
PGPPDRYTLHIMNGCVDATVFRRLRVHGAAALACKNKTWTLTRGAFYHKSGIKKQTRQKELRFADMIPMWESLRENGAALSTSRTDKISAYLSNYAKFSDKWWRLALRRRESRDNLQRYIGKRKVKDSFWAGIKRCMMKELPDMKVCVAYGSAITKLKPTGPGEVAVPTGAMFASCKRIFKEDVSVTDEFKTTLMSWETGKEKERVYKIPSVCSADVKLRLGGERFGHSKSKTMPKVADCDHTGVRLYNKRKGAQEKHRRGGFATSIVDSQKSIERYPEVRGLRFSPETCIYSDRDRSSALTIARLHCMELMGLGRPLPFAHSSSVVVDE

SEQ ID NO: 775 - protein, 688 aa, Chlamydomonas sp.
RNVGTILYHQKKKNTHPLLMGVVQDKGDDDINISVVKKTLNSLCMDVSRHQISSRIQSMVLLINHAVAEAYLFANFHITRCLDDGDFDVKQLPHLDRNFYYRCLLAVSTSNVRKDTLGQSFNDTMVAFDALRPAGYVKVDVRPWGQVIADVSIQMATMACNSVWANVDRVVIKYLRLKHPSLKKHFKKIVKAVVQYPESKIDTIIPEGLVHAIHIKEVVSHLRALFPLPRGKQFNTRAHLTMRLFHHVLTELGEVGRVDPKDKKTRKSHPRLFSILPRKNGFTISYVPISSMTFMKLLSMGDSPLESVSGDGRYENHTMLWRKYFNVQGLETKRSRFDNRILSDGKGVSVQMKQKGKEEVVEEGENAGYPKDVNIVECKDAVGALRVGVDPGMTDIVTVASSAGRIESFSSARFSEVAGYNTSKRCTYKWNDETQDLVKSIPSPNTSNMSDLQDHVRAYLKALPILLQHRANKGYRSMRFFRYVGKQKTIEKVCDVIAPRAQTTVVGFGNWSNQGYGISRSCSGPIKEIRRCLSGRKNVLFKNVDERNTSCKCHGCFQRLVNMKADSVVWRGVCKESPINGSITVEKQKMVVKNVKVHKVLHCRDSVKSASSNVRCGATWNRDVNAAKNLLLLLTTWMDGRERPEAFCVPSPPPKTTVSIEASVSAKPTDPPGFVSSLPCYPLGQLKC

SEQ ID NO: 776 - protein, 303 aa, Chlamydomonas sp.
YPLKPDTGPWFTTRSLHRWVNADQAGKSKRLKRKRKELSMLLRSTISNNIAENPFITCKDLVGIICKSCNVRLSISTASRHIKQCGFSRKKAFPPVDFVAPREKSAKVLVGFGDWKGLGATPISRRTCGPLQAIRFELRSRGNVIMEDVDEFRTSQRCSCCENRLSNMVALTHRKKQDGTGWECTEGRKRIHKILHYKSSQSGAPRQQSGGRLHCGKTWDRDVNASRNILMLTLHQVFGRERPLAFRRDAPRSSSKTPPPPDTDMGTQTVERFTKETTRNIFENLFNLLHPPTLPKRNDLQSG

SEQ ID NO: 777 - protein, 548 aa, Chlamydomonas sp.
SVQEYVREVRVRLKVPDGSRLYDDYGKDMDFPTMVRFNYWMQTRLEAIGARRIRLMPIFNVQRAHVRLDMKTLVNLFRHVFPKDPNIVELSKRKNVKDPDRFMLPLKPAFKKKKSCGSGEWEAYKLSQQKYDADVNDIKATDEYRHAKGRYDTLVNAQKTVAGSFFKKPPVKTGWVFDCSICTDGVSLSMQYSKTVQVRVSDLKKTSKRSRDDEGMSVSEQYDHKLKTTLPDMGIVVLGVDPGRSNIATVTYLADDKSKTWKLTRGAFYHKSGIKKQKKQQEKRFSDMIPRWESLRENGAALSTSRKDDISAYLKNYATFSGEWWRMVLRRRESRDNFQRYIGKRKAMDSFWAGIKRNMKLDHPDLRVRVAYGSAITTLKATGPGEVAVPTGSMFASCKRLFKEEVHVTDEFKTTLMSWETGAKKECVYKIPSVQITTEGQIRLGYELLGHTPLKETPKVSYRDQLAVRVYCTRKQIQEKHRRGGLAPSLVDNNSIKRYPEVRGLRFSPETSTYSDRDRYSALTIARLHCMELLGQGRPLPFCRDACC

SEQ ID NO: 778 - protein, 794 aa, Chlamydomonas sp.
ECSREPVCRSRLHQNVFGVQFVMENGIGESSSLVHEADQHDDVAELVDYEGEEDGECAPGRAICVVKMKLSTFIPHDWLRNKIDTLVLDMNKLLGEGYIFANFHIARLFENGIAVPPVNRNFFYRCIIAVSTNKCNGSTLGEDFESSRLLFDLLREPGQSKVDIRGRVKNQIIADLSILMATMASNHLWTNLERRITTYLKWKYPQIAKRLRSDIVAALIKCPTKNLDDIFKMSPHTTKLPTKLPTSRLRSAKSAVALAKKRVGRKEPEGSPLRVRLTKLQDRLEKLSEAWLSSKNLRVDADNAKRFFAREVAFCLRGVLPLPSGNTFASRAHMTLPLYHKILSETIEEKRKTKNEKHRTFSLLPYKSGFTLSHIPISKMAFFYMVNECHFDSCKADVASKNHQGIWERFANLKKVETVSRKFGYRIVTDGFAVSILMNKPTCLTCSMPADAFSTRAHEYVTTDEGGIVSFLDNVVVAAVDPGVTDIVTVTGLNGGTRSYSSAQYYRKGLIFKSQRQTDVWNLETADIVGGIIPDRDSSSSEQIGAYARFYMGAAPILLSHRASRGYRNLRFRRYCKKQKLIVEIADFVAPRKKSAKVLVGFGDWKGLGATPISRRTCGPLQAIRFELRSRENVIMEDIDEFRTSQRCSCCENHLCNMVALTHRKKQDGTGWECTEGRKRIHKILHCKSSQSGAPRQQSGGMLHCGKTWDRDVNASRNILMLTLHQVFGRERPLAFRRDAPRSSSTTPPPPIDTDMGTQTVERFTKEATRNIFENLFNLLHPPKLPKSNDLQSG

SEQ ID NO: 779 - protein, 801 aa, Chlamydomonas sp.
PRMEHVCDVCIKSSVMYKLCKMATKPPTVAKLKELLKLAEVAYSSKDKKDDIVRLCEDNGLIARPPPEYKTVEKMCVVKCALKKAMSLDDEEFGKFREHVDQLVNVVSRMLRRSSLVLTFHVTRLMEGDLPIPNMYDMKDTYWKDWLRIGVDGVFPDEESRISYEAVKDVIGKVLGSDDPDYINSYPIYFDQVLNYAGHTLSTVVSNNAWVPLVPRLTRLTKATLNALEAPKTIRVYDVMRVIQQEIQEMESWPESVQEYVREVRVRLKVPDGSRLYDDYGKDMYFPTMVRFNYWMQTRLEDMDARRIRLMPIFNVQRAHVRLDMKTLVNLFRHVFPKDPNIVELSKWKDVKDPDRFMLPLKPAVKKKKSCGPGEWEAYKLAQQKYDADVNDIKDTDEYRHAKGRYDTLVNARKTVAGSFFKKPPVKTGWVFDCSICTDGVSLSMQYSKTVQVRVSDLKKTSKRSRDDEGMSVSEQYDHKLKTTLPDMGIVVLGVDPGRSNIATVTYLADDKSKTWKLTRGAFYHKSGIKKQKKQQEKRFSDMIPRWESLRENGAALSTSRTDDISAYLKNYDTFSDEWWRMALLRRESRDNFQRYIGKRKAMDSFWAGIKRNMKLDHPDLRVRVAYGSAITTLKATGPGEVAVPTGSMFASCKRLFKEEVHVTDEFKTTLMSWETGAKKECVYKIPSVQITTEGQIRLGYELLGHTPLKETPNVSYRDQLAVRVYCTRKQIQEKHRRGGLAPSLVDNKSIKRYPEVRGLRFSPETSTYSDRDRSSALTIARLHCMELLGQGRPLPFCRDA

SEQ ID NO: 780 - protein, 618 aa, Chlamydomonas sp.
QCIRNLHVLNIRMPCMATNASVKLARPPMPVVSPGPSSVDGRIMARSGLQATNVSLTQAASKATSSSRKKKPAVVKSFSTHVCPHTNNNPTCSDSNCSCKPIFLTNIPDASKSLKSRTSDQGSTSSAQDFYEYWDSSRQDLYRQLLWLPKTGTQGLVSSSFNGFAHSTPTRSSFSITKTEPLKTSLEKTSCPSFKYIVTDGTVEDATKSNAKPKLRTLKLKLNPTKAQKSMLAEFAGCSRFMYNKAVAARLGVGSTHKSVFRIRDRYVTNKVRGKGKMPNPYFKNRQWLLQCPKSVRQSAIKSALANIKACFSNLKAGNIKQFSAPFRRKKTELERGWVIEMDQKNVSKDGDKLFIFKEILGNMRYFGSKQLHKLMPEENPTHDPKVQKSRFGEYFLVLSVAARDRRAERKPVNPDKVATASIDPGVRKTMVTYSPENEESFMLGQGQASDLVKLLLVHDKLQSRLDTEKTLRSKERMKIKKLMIRIRKTIFYLKKEFRDQTTNFLAARYDVLLVPQLETAKMTISAERELTTKVARQMLTLSHSVLFNRLKEKCEEYGTVFLHVLEHYTSQTCPMCGFLNKCGETYTCKNCQFTCDRDIVGAAGIFLKAVRTENPCS

SEQ ID NO: 781 - protein, 793 aa, Chlamydomonas sp.
KMATKPPTVAKLKELLKLAEVPYSSKSNKDDLVRLCEDNGLIARPPPEYKTVEKMCVVKCALKKAMSLDDEEFGKFREHVDQLVNVVSRMLRRYSLVLTFHITSLLEKGLDIPDLYNMKDTYWKDWLRIGVDGIFPDEESKISYEAVKDSIGDVIGNDDADYIKSYPIYFDQVLNYAGHTLSTVVSNNAWVPLIPRLARLTSTTLNKLNSPKTLDTSKIIRGYDVMQAIQQEVQNMEGWPESVQEYVNEVREMLSVPDGSRVYDNYGKDMDFPTMVRFNYWIQTRLEDMDARRIRLMPIFNVQRVHVSLDLKTLVNLFRHMFPNDQNIVELSKWEHVKNPDSFMLPQRPAQKKKKSCGPGEWEAYKSVLKKYDDDVKDIKATDEYRHAKGLYDTLVNARKTVAGSFFRKPPVKNGWVFDCSICTDGVSLSMQYSKTVQVLVSDLKKTCKKPRKEEGIKIAEKYDGSLKTILPDMGIVVLGVDPGRSNIATVTYLADDKNKTWTLTRGAFYHKSGIKKQTRQKELRFADMIPMWESLRENGAALSTSRTDKISAYLSNYAKFSDEWWRLALRRRESRDNLQRYIGKRKVKDSFWAGIKRCMMKELPDMKVCVAYGSAITKLKPTGPGEVAVPTGAMFASCKRIFKEDVSVTDEFKTTLMSWETGKEKERVYKIPSVCSADVKLRLGGERFGHTKSKTMPKVADCDHLGVRLYNKRKGAQEKHRRGGFATSLVDSQKSIERYPEVRGLRFSPETCIYSDRDRSSALTIARLHCMELMGLGRPLPFAHSSSVVVDE

SEQ ID NO: 782 - protein, 407 aa, Chlamydomonas sp.
ERFQQRQDDPVQRLYQSIPRGHRGRGLRQAGQHRSHPKDVGLVESLEKTLTNKEHWESVFDVENIRSTGKGVFTCTIDTDGVMACTHFLRAEKKKISIKDDGTAIKKQTKTLREFSESDPNVVVVANDPGRCNIAFLTWKKNKVEEKDKGGRKRKRHCEFGSKRLTRERYYVESGVFKSRGPTKKWLSNIQDCLDDLKDNSPKRTSLESFDAYVTVMVNHWDSRWGEMSKSRWGAQRLRLYGGKKRFLARFFNEVQADVGERKTIVIAYGSSKFAPGGKGELSVPTTSAFNAFSDRFKGRVAVIDEFRTTKIWHKDSTTVLQSVQSEKEGRTVRGLLWCSSTMENSKLFVNRDLNAAINIHNCFTMYPTRPGILARPKKYCKLEVVVGRTIDYKLTGSLQNAVSSEV

SEQ ID NO: 783 - protein, 698 aa, Chlamydomonas sp.
YQDKKRTLPPSISMGVVTNNGDDDDDLDIMVVKKTLNSLCMDVSRQQICSRIQSMVLVINHAVAEAYLFANFHITRCLDDVDFDVKQLPHLDRNFYYRCILAVSTSNVRKDTLGQSLKDSMVAFDALRPAGYLKVDVRQWGQVISDVSIQMATMACNSVWANVDRVVIKYLRFKHPSLKKHFNKIVKAVVQYPESDIDKIIPASLVHANLIKDVVRRLRDLLPLPRGKQFNTRAHLTMRLFHHVLTELGADLKEKTTKKRPRLFSILPRKSGFTISYVLISSMTLMKLLSMGDSPLESFRGDGRHENHSMLWRKYFNVQGLETKGSRFDNRILSDGKGVSVQMKHQASEDVAVDNAGYPKDAILEDCQDASLRVGVDPGMKDIVTVASSAGRVESFSSARFSEAAGYNTSNRRTNKWNVDTQDLVKSIPSPTTSSMHDMQDHVRGYLSALPTLLQHRASRGYRSMRFFRYVGKQKTIEKVCDLIAPKAQKKTIEENVCDVIAPKAQKTIVGFGNWSNQGYGISRSCSGPVKEIRKCLSRRQNVLFKNVDERNTSCTCHGCFQKLINMKADSVVWRRVQNEPPSLINGAPTTTTTIEKQKTVVKNVKIHKVLHCRNSVKSASSNVRCGATWNRDVNAAKNLLLLLTTWMDGKERPATFCVPSSSPTPKTTVSGEANVGAQPTDPPGSVSSLQLLSSGPA

SEQ ID NO: 784 - protein, 793 aa, Chlamydomonas sp.
KMATKPPTVAKLKELLKLAEVPYSSKSNKDDLVRLCEDNGLIARPPPEYKTVEKMCVVKCALKKAMSLDDEEFGKFREHVDQLVNVVSRMLRRSSLVLTFHITSLLEKGLDIPDLYNMKDTYWKDWLRIGVDGIFPDEESKISYEAVKDSIGDVIGNDDADYIKSYPIYFDQVLNYAGHTLSTVVSNNAWVPLIPRLARLTSTTLNKLNAPKTLDTSKIIRGYDVMQAIQQEVQNMEGWPESVQEYVNEVREMLSVPDGSRVYDNYGKDMDFSTMVRFNYWIQTRLEDMDARRIRLMPIFNVQRVHVRLDLKTLVNLFRHMFPNDQNIVELSKWEHVKNPDSFMLPQRPAQKKKKSCGPGEWEAYKSVLKQYDDDVKDIKATDEYRHAKGLYDTLVNARKTVAGSFFRKPPVKNGWVFDCSICTDGVSLSMQYSKTVQVLVSDLKKTCKKPRKEEGIKIAEKYDGSLKTILPDMGIVVRGVDPGRSNIATVTYLADDKNKTWTLTRGAFYHKSGIKKQTRQKELRFADMIPMWESLRENGAALSTSRTDKISAYLSNYAKFSDEWWRLALRRRESRDNLQRYIGKRKVKDSFWAGIKRCMMKELPDMKVCVAYGSAITKVKPTGPGEVAVPTGAMFASCKRIFKEDVSVTDEFKTTLMSWETGKEKERVYKIPSVCSADVKLRLGGERFGHTKSKTMPKVADCDHLGVRLYNKRKGAQEKHRRGGFATSLVDSQKSIERYPEVRGLRFSPETCIYSDRDRSSALTIARLHCMELMGLGRPLPFSHSSSVVVDE

SEQ ID NO: 785 - protein, 417 aa, Chlamydomonas sp.
VRMAGPLESTDILQFVDSKSYWCIKSYLAIHKYASSRSSLVIVGAEQATYHSSHQPEDTTLLDGANTRTHVNVVVAAVDPGVTDIVTVTGLDGGTRSYSSVQYYGKGLIFKSQRQTDVWNLKTADIVGDIIPGRDSSRSEQIGAYARFYTGAAPILLAHRASMGYRNLRFRRYCKKQKLIVEIADFVAPREKSAKVLVVFGDWKGLGATPISRRTCGPLQAIRFELRSRGNVIMEDVDEFRTSQRCSCCENRLCNMVALTHRKKQDGTGWECTEGRNRIHKILHCKSSQSGAPRQQSGGRLHCGKTWDRDVNASRNILMLTLHQVFGRERPLAFRRDAPRSSSRTPPPPNTDRRLNGLPKRLLGISSRTSSTCCTPQRFPTATICSLDDYKVCPTLFENYCITEEEENTWKRKTKTR

SEQ ID NO: 786 - protein, 688 aa, Chlamydomonas sp.
GNVGAILYHQKKKNTHPLLMGVVQDKGDDDINISVVKKTLNSLCMDVSRHQISSRIQSMVLLINHAVAEAYLFANFHITRCLDDGDFDVKQLPHLDRNFYYRCLLAVSTSNVRKDTLGQSFNDTMVAFDALRPAGYVKVDVRPWGQVIADVSIQMATMACNSVWANVDRVVIKYLRFKHPSLKKNFKKIVKAVVQYPESKIDTIIPEGLVHAIHIKEVVSHLRALFPLPRGKQFNTRAHLTMRFFHHVLTELGEVGRVDPKDKKTKKSHPRLFSILPRNNGFTISYVPISSMTFMKILSMGDSPLESVSGDGRYENHTMLWRKYFNVQGLETKRSRFDNRILSDGKGVSVQMKQKGKEEVVEEGENAGYPKDANIVECKDAVGALRVGVDPGMTDIVTVASSAGRIKSFSSARFSEVAGYNTSKRRTYKWNDETQDLVKSIPSPNTSNMVDLQDHVRAYLKALPILLQHRANKGYRSMRFFRYVGKQKTIEKVCNVIAPRAQTTVVGFGNWSNQGYGISRSCSGPIKEIRRCLSRRKNVLFKNVDERNTSCKCHGCFQRLVNMKADSVVWRGVCKESPIDGSITVEKQKMVVKNVKVHKVLHCRDSVKSASSNVRCGATWNRDVNAAKNLLLLLTTWMDGRERPEAFCVPSPPPKTTVSIEASVSAKPTDPPGFVSSLPCYPLGQLKC

SEQ ID NO: 787 - protein, 651 aa, Chlamydomonas sp.
RCEIWQGYQKMGRNIEEMFPDIPRKGCNSCLVCFPKTVYKEFACTRYQNAMYGNQRFCKIGKASDALGVSRTVLRRWADNGTIRTPGNQRLFDTSSIQGYLIEQEKKPAVVKSFSTHVCPHTNNNPTCSDSNCSCKPIFLTNIPDASKSRTSDQGSTSSAQDFYEYWDSSRQDLYRQLLWLPKTGTQGLVSSSFNGFAHSTPTRSSFSITKTEPLKTSLEKTSCPSFKYIVTDGTVEDATKSNAKPKLRNLKLKLNPTKAQKSMLAEFAGCSRFMYNKAVAARLGVGSTHKSVFRIRDRYVTNKVRGEGKMPNPYFKNRQWLLQCPKSVRQSAIKAALANIKACFSNLKAGNIKQFSAPFRRKKTELERGWAIEMDQKNVSKDGDKLFIFKDILGNMRYFGSKQLHKLMPEENPTHDPKVQKSRFGEYFLVLSVAARDRRAERKPVHPDKVATASIDPGVRKTMVTYSPENEESFMLGQGQASDLVKLLLVHDKLQSRLDTEKTLRSKERMKIKKHMIRIRMRIFYLKKEFRDQTTNFLAARYDVLLVPQLETAKMTISAERELTTKVARQMLTLSHSVLFNRLKEKCAEYGTVFLHVLEHYTSQTCPMCGFLNKCGETYTCKNCQFTCDRDIVGAAGIFLKAVRTENPCS

SEQ ID NO: 788 - protein, 208 aa, Chlamydomonas sp.
ILIRNLKKTAGRQERPLMVNHWDSRWGEMSKSRWGAQRLRLYGGKKRVLARFFNEVQADVGERKTIVVAYGSAKFAPGGKGELSVPTTSAFKAFSDRFKGRVAVIDEFRTTKIWHKDSTTVLQSVHSEKEGRTVRGLLWCSSTMENSKLFVNRDLNAAINIHNCFTMYPTRPGILARPKKYCKLEVVVGRTIDYKLTGSLQNAVSSEV

SEQ ID NO: 789 - protein, 524 aa, Chlamydomonas sp.
ANVDRVVIKYLRLKHPSRKKHFKKIVKAVVQYPESKIDTIIPEGLVHAIHIKEVVSHLRALFPLPRGNQFNTRAHLTMRLFHHVLTELGEVGRVDPKDKKTRKSHPRLFSILPRKNGFTISYVPISSMTFVKLLSMGDSPLESVSGDGRYENHTMLWRKYFNVQGLETKRARFDNRILSDGEGVSVQMKQKGKEEVVEERENAGYPKDANIVECKDAVGALRVGVDPGMTDIVTVASSAGRIESFSSARFSEVAGYNTSKRRTCKWNDETQDLVKSIPSPNTSNMSDLQDHVRAYLKALRILLQHRANKGYRSMRFFRYVGKQKKIEKVCDVIAPRAQTTVVGFGNWSNQGYGISRSCSGPIKEIRRCLSRRKNVLFKNVDERNTSCKCHGCFQRLVNMKADSVVWRGVCKESPIDGSITVEKQKMVMKNVKVHKVLHCRDSVKSASSNVRCGATWNRDVNAAKNLLLLLTTWMDGRERPEAFCVPSPPPKTTVSIEASVSAKPTDPPGFVSSFPCYPLGQLKC

SEQ ID NO: 790 - protein, 267 aa, Chlamydomonas sp.
YPLKPDTLHLRSLLPPSTGKQFNTRAHLTMRLFHSVLAELVSSSSTEPNRLFSLLPRKIGFTISYIPISSMTFMKILSMVNGNKVYRSMRFFRYVGKQKAIEEVCDMIAPRHTPTIVGFGDWSNQGNGISRPCSGPVKEIRKRLSQRGNVLFKNIDERNTSCTCHGCFELLVNMKANSVRWRRGQIGQLGVSVKEKVMVKNVKVHKIQHCCNSVGSAPSVRCGTTWNRDVNASKNILLLLMTWVAGQERPTAFCVPSKKNHNFQRGN

SEQ ID NO: 791 - protein, 795 aa, Chlamydomonas sp.
LWKMATKPPTVAKLKELLKLAEVPYSSKSNKDDLVRLCEDNGLIARPPPEYKTVEKMCVVKCALKKAMSLDDEEFGKFREHVDKLVNVVSRMLRRSSLVLTFHITSLLEKGLEIPDLYNMKDTYWKDWLRIGVDGIFPDEESKISYEAVKDSIGEVIGNDDADYIKSYPIYFDQVLNYAGHTLSTVVSNNAWVPLIPRLARLTSTTLNKLNALKTLDTSKIIRGYDVMQAIQQEVQNMEGWPESVQEYVNEVREMLSVPDGSRVYDNYGKDMDFPTMVRFNYWIQTRLEDMDARRIRLMPIFNVQRVHVRLDLKTLVNLFRHMFPNDQNIVELSKWEHVKNPDSFMLPQRPAQKKKKSCGPGEWEAYKSVLKQYDDVVKDIKATDEYRHAKGLYDTLVNARKTVAGSFFRKPLVKNGWVFDCSIYTDGVSLSMQYSKTVQVLVSDLKKTCKNPRKEEGIKIAEKYDGSLKTILPDMGIVVLGVDPRRSNIATVTYLADDKNKTWTLTRGAFYHKSGIKKQTRQKELRFADMIPMWESLRENGAALSTSRTDKISAYLSNYAKFSEEWWRLALRRRESRDNLQRYIGKRKVKDSFWAGIKRCMMKELPDMKVCVAYGSAITKLKPTGPGEVAVPTRAMFASCKRIFNEDVSVTDEFKTTLMSWETGKEKERVYKIPSVCSADVKLRLGGERFGHTKSKTMPKVADCDHLGVRLYNKRKGAQEKHRRGGFATSLVDSQKSIERYSEVRGLRFSPETCIYSDRDRSSALTIARLHCMELMGLGRPLPFAHSSSVVVDE

SEQ ID NO: 792 - protein, 398 aa, Chlamydomonas sp.
RIPTASCCPRGLHRRRKNHVVLVNGRHTSRSLKQYDDDVKDIKATDEYRHAKGLYDTLVNARKTVAGSFFRKPPVKNGWVFDCSICTDGVSLSMQYSKTVQVLVSDLKKTCKNPRKEEGIKIAEKYDGSLKTILPDMGIVVLGVDPRRSNIATVTYLADDTNKTWTLTRGAFYHKSGIKKQTRQKELRFADMIPMWESLRENGAALSTSRTDKISVYLSNYAKFSEEWWRLALRRRESRDNLQRYIGKRKVKDSFWAGIKRCMMKELPDMKVCVAYGSAITKLKPTGLEEVAVPTGAMFASCKRIFKEDVSVTDEFKTTLMSWETGKEKERVYKIPSVCSADVKLRLGGERFGHTKSKTMPKVADCDHLGVRLYNKRKGAQEKHRRGGFATSLVDSQK

SEQ ID NO: 793 - protein, 615 aa, Chlamydomonas sp.
QCIRNLHVLNIRMLCMATNASVKLARSPMPLVSPGPSSVDGRIMARSGPQATNVSLTQAASKATSSSRKKKPAVVKSFSTHVCPHTNNNPTCSDSNCSCKPIFLTNIPDASKSRTSDQGSTSSAQDFYEYWDSSRQDLYRQLLWLPKTGSQGLVSSSLNGFARSTPARSSFSITKTEPLKTSLDKTSCPSLKYIVADGTVEDATKSNAKPKLRTLKLKLNPTKAQKSMLAEFAGCSRFMYNKAVSARLGVGSTHKSVFRIRDRYVTNKVRGEGKMPNPYFKNRQWLLQCPQSVRQSAIKAALANIKACYSNLKAGNINQFSAPFRRKKTELERGWAIEMDQKNVSKDGDKLFIFKDILSNMRYFGSKQLHKLMPEENPTHDPKVQKSRFGEYFLVLSVAVRDRRAERKPVHPDKVATASIDPGVRKTMVTYSPENEESFMLGQGQASDLVKLLLVHDKLHSRLDTEKTLRSKERMKIKKQMIRIRKRIFYLKKEFRDQTTNFLAARYDVLLVPQLETAKMTISAERKLTTKVARQMLTLSHSVLFNRLKEKCEEYGTVFLHVLEHYTSQTCPMCGLLNKCGETYTCKNCQFTCDRDIVGAAGIFLKAVRTENPCS

SEQ ID NO: 794 - protein, 820 aa, Chlamydomonas sp.
NHYGLFRPLMEHVCDVCIKSSVMYKLCKMATKPPTVAKLKELLKLAEVAYSSKDKKDDIVRLCEDNGLIARPPPEYKTVEKMCVVKCALKKAMSLDDEEFGKFREHVDQLVNVVSRMVRRSSLVLTFHITSLLEKGLDIPDLYNMKDTYWKDWLRIGVDGIFPDEESKISYEAVKDSIGNVIGNDDADYIKSYPIYFDQVLNYAGHTLSTVVSNNAWVPLIPRLARLTSTTLNKLNAPKTLDTSKIIRGYDVMQAIQQEVQNMEGWPESVQEYVNEVREMLSVPDGSRVYDNYGKDMDFPTMVRFNYWIQTRLEDMDARRIRLMPIFNVQRVHVRLDLKTLVNLFRHMFPNDQNIVELSKWGHVKNPDSFMLPQRPAQKKKKSCGPGEWEAYKSVMKQYDDDVKDIKATDEYRHAKGFYDTLVNARKTVAGSFFRKPPVKNGWVFDCSICTDGVSLSMQYSKTVQVLVSDLKKTCKKPRKEEGIKIAEKYDGSLKTILPDMGIVVLGVDPGRSNIATVTYLADDKNKTWTLTRGEFYHKSGIKKQTRQKELRFADKIPMWESLRENGAALSTSRSDKISAYLSNYAKFSDEWWRLALRRRESRDNLQRYIGKRKVKDSFWAGIKRCMMKELPDMKVCVAYGSAITKLKPTGPGEVAVPTGAMFASCKRIFKEDVSVTDEFKTTLMSWETGKEKERVYKIPSVCSADVKLRLGGERFGHTKSKTMPKVADCDHLGVRLYNKRKGAQEKHRRGGFATSLVDSQKSIERYPEVRGLRFSPETCIYSDRDRSSALTIARLHNMELMGLGRPLPFAHSSSVVVDE

SEQ ID NO: 795 - protein, 230 aa, Chlamydomonas sp.
RVVEIGLRRRESRDNLQRYIGKRKVKDSFWAGIKRCMMKELPDMKVCVAYGSAITKLKPTGPGEVAVPTGAMFASCKRIFKEDVSVTDEFKTTLMSWETGKEKERVYKIPSVCSADVKLRLGGERFGHTKSKTMPKVADCDHLGVRLYNKRKGAQEKHRRGGFATSLVDSQKSIERYPEVRGLRFSPETCIYSDRDRSSALTIARLHCMELMGLGRPLPFAHSSSVVVDE

SEQ ID NO: 796 - protein, 794 aa, Chlamydomonas sp.
KMATKPPTVAKLKELLKLAEVPYSSKSNKDDLVRLCDDNGLIARPPPEYKTVEKMCVVKCALKKAMSLDDEEFGKFREHVDQLVNVVSRMLRRSSLVLTFHITSLLEKGLDIPDLYNMKDTYWKDWLRIGVDGIFPDEESKISYEAVKDSIGDVIGNDDADYIKSYPIYFDQVLNYAGQTLSTVVSNNAWVPLIPRLARLTSTTLNKLNAPKTLDTSKIIRGYDVMQAIQQEVQNMEGWPESVQEYVNEVREMLSVPDGSRVYDNYGKDMDFPTMVRFNYWIQTRLEDMDARRIRLMPIFNVQRVHVRLDLKTLVNLFRHMFPNDQNIVELSKWEHVKNPDSFMLPQRPAQKKKKSCGPGEWEAYKSVLKQYDDDVKDIKATDEYRHAKGLYDTLVNARKTVAGSFFRKPPVKNGWVFDCSICTDGVSLSMQYSKTVQVLVSDLKKTCKKPRKEEGIKIAEKYDGSLKTILPDMGIVVLGVDPGRSNIATVTYLADDKNKTWTLTRGAFYHKSGIKKQTRQKELRFADMIPMWESLRENGAALSTSRTDKISAYLSNYAKFSDEWWRLALRRRESRDNLQRYIGKRKVKDSFWAGIKRCMMKELPDMKGCVAYGSAITKLKPTGPGEVAVPTGAMFASCKRIFKEDVSVTDEFKTTLMSWETGKEKERVYKIPSVCSADVKLRLGGERFGHTKSKTMPKVADYRDHLGVRLYNKRKGAQEKHRRGGFATSLVDSQKSIERYPEVRGLRFSPETCIYSDRDRSSALTIARLHCMELMGLGRPLPFAHSSSVVVDE

SEQ ID NO: 797 - protein, 813 aa, Chlamydomonas sp.
PRMEHVFDVCIKSSVMYKLCKMATKPPTVAKLKELLKLAEVAYSSKDKKDDIVRLCEDNGLIARPPPEYKTVEKMCVVKCALKKAMSLDDEEFGKFREHVDQLVNVVSRMLRRSSLVLTFHITSLLEKGLDIPDLYNMKDTYWKDWLRIGVDGIFPDEESKISYEAVKDSIGDVIGNDDADYIKSYPIYFDQVLNYAGHTLSTVVSNNAWVPLIPRLARLTSTTLNKLNAPKTLDTSKIIRGYEVMQAIQQEVQNMEGWPESVQEYVNEVREMLSVPDGSRVYDNYGKDMDFPTMVRFNYWIQTRLEDMDARRIRLMPIFNVQRVHVRLDLKTLVNLFRHMFPNDQNIVELSKWEHVKNPDSFMLSQRPAQKKKKSCGPGEWDAYKSVMKQYDDDVKDIKATDEYRHAKGLYDTLVNARKTVAGSFFRKPPVKNGWVFDCSICTDGVSLSMQYSKTVQVLVSDLKKTCKNPRKEEGIKIAEKYDGSLKTILPDMGIVVLGVDPGRSNIATVTYLADDKNKTWKLTRGAFYHKSGIKKQTRQKELRFADMIPVWESLRENGAALSTSRTDKISAYLSNYAKFSDEWWRLALRRRESRDNLQRYIGKRKIKDSFWAGIKRCMMKELPDMKVCVAYGSAITKLKPTGPGEVAVPTGAMFASCKRIFKEDVSVTDEFKTTLMSWETGKEKERVYKIPSVCSADVKLRLGGERFGHTKSKTMPKVADCDHLGVRLYNKRKGAQEKHRRGGFATSLVDSQKSIERYPEVRGLRFSPETCIYSDRDRSSALTIARLHCMELMGLGRPLPFAHSSSVVVDE

SEQ ID NO: 798 - protein, 680 aa, Chlamydomonas sp.
RNVGTILYHKKKKNTHPLLMGVVQDKGDDDINISVVKKTLNSLCMDVSRHQISSRIQSMVLLINHAVAEAYLFANFHITRCLDDGDFDVKQLPHLDRNFYYRCLLAVSTSNVRKDTLGQSFNDTMVAFDALRPAGYVKLDVRPWGQVIADVSIQMATMACNSVWANVDRVVIKYLRLKHPSLKKHFKKIVKAVVQYPESKIDTIIPEGLVHAIHIKEVVTHLRVIFPLPRGKQFNTRAHLTMRLFHHVLTALGEVGRVDPKDKKTRKSHPRLFSILPRKNGFTISYVPISSMTFMKLLSMGDSPLESVSGDGRYENHTMLWRKYFNVQGLETKRSRFDNRILSDGKGVSVQMKQKGKEEVVEEGENAGYPKDANIVECKDAVGALRVGVDPGMTDIVTVASSAGRIESFSSARFSEVAGYNTSKRRTYKWNDETQDLVKSIPSPNTSNMSDLQDHVRAYLKALPILLQHRANKGYRSMRFFRYVGKQKTIEKVCDVIAPRAQTTVVGFGNWSNQGYGISRSCSGPIKEIRRCLSRRKNVLFKNVDERNTSCKCHGCFQRLVNMKADSVVWRGVCKESPIDGSITVEKQKMVVKNVKVHKVLHCRDSVKSASSNVRCGATWNRDVNAAKNLLLLLTTWMDGRERPEAFCVPSPPPKTTVSIEASVSAKPTDPPGFVSSFPC

SEQ ID NO: 799 - protein, 209 aa, Chlamydomonas sp.
EVRLPHCDRRLCSQYILMNKPTCLTCSMPGDAFSTRAHEYMTTDEGGILSFRDNVVVAAVDPGVTDIVTVTGLDGSPNLYSSAQYYRKGLIFKSQRQTDVWNLETADIFGDVIPDRDSPMSRQIGAYARFYMGAAPILLAHRASRGYRNLRFRRYCKKQKLIVEIADFVAPREKSTKVLVGFGDWKGLGATPISRRGTCGPLQSYSFRA

SEQ ID NO: 800 - protein, 621 aa, Chlamydomonas sp.
CIRNLHVLNIRMPCMATNASVKLARPPMPLVSPGPSSVDGRIMARSERSGLQATNVSLTQAASKATSSSWKKNPAVVKSFSTHVCPHTNNNPTCSDSNCSCKPIFLTNIPDASKSLKSRTSDQGSTSSAQDFYEYWDSSRQDMYRQLLWLPKTGSQGLVSSSLNGFARSTPVRSSFSITKTEPLKTSLEKTSCPSFKYIVANGTVEDATKSNAKPKLRTLKLKLNPTKAQKSMLAEFAGCSRFMYNKAVAARLGVGSTHKFVFRIRDRYVTNKVKGEGKMPNPYFKNRQWLLQCPKSVRQSAIKAALTNIKACFSNLKAGNIKQFSAPFRQKKTELERGWAIEMDQHNISKDGDKLFIFKDTLGNMRYFGRKQLQKLMPEKNPTHDPKVQKSRFGEYFLVLSVAARDRREERKPVHPGKVATASIDPGVRKTMVTYSPENEESFMLGKGQASDLVKLLLVHDKLHSRLDTEKTLRSKERMKIKKQMIRIRKRIFYLKKEFRDQTRNFLAARYDVLLVPQLETAKMTISAERELTTKVARQMLTLSHSVLFNRLNENCEEYGTVFLHVLEHYTSQTCPMCGFLNKCGGETYTCKNCQFTCDRDIVGAAGIFLKTVRTENPCS

SEQ ID NO: 801 - protein, 710 aa, Chlamydomonas sp.
GNCPLVWYHQNNNHSLSMGVVTNNGDDDDLDIMVVKKTLNSLCMDVSRQQICSRIQSMVLVINHAVAEAYLFAIFHITRCLDDGDFDVKQLPHLDRNFYYRCILAVSISNVRNDTLDQSLKDSMVAFDALRPAGFLKVDVCQWGQVIADVSIQMATMACNSVWANVDRVVIKYLRLKHPSLKKHFNKIVKAVVQYPDSDIDKIIPAGLVHANLIKDVVRRLRDLLPLPRGKQFNTRAHLTMRLFHHVLTELGADLKEKTTKKRPRLFSILPRKSGFTISYVPISSMTLMKLLSMGDSPLESVRGDGRHENHSMLWRKYFNVQGLETKGSRFDNRILSDGKGVSVQMKHQVGKDIAGEGGGDNAGYPKDASIEDCQDASFRQGALRVGIDPGMTDIVTIASSDGRVESFSSARFSEAAGYNTSNRRTNKWNSDTQALVKSIPSPTTSSMHDMQDHVRGYLSALPTLLQHRANRGYRSMRFFRYVGKQKTIEKVCDLIAPKAQKKTIEEKVCDVIAPKAKKTVVGFGNWSNQGYGISRSCSGPVKEIRKCLSRRQNVLFKNVDERNTSCTCHGCFQKLVNMKADSVVWRRVQNEPSALIDGAPTTTTTFEKQKTVVKNVKVHKVLHCRNSVKSASSNVRCGATWNRDVNAAKNLLLLLTTWMDGKERPAAFCVPSSSPTPKTTVSGEANVGAQPTDPPGSVSSLQLLSSGPA

SEQ ID NO: 802 - protein, 682 aa, Chlamydomonas sp.
YYITKRKIILTPLLMGVVQDKGDDDINISVVKKTLNSLCMDVSRHQISSRIQSMVLLINHAVAEAYLFANFHITRCLDDGDFDVKQLPHLDRNFYYRCLLAVSTSNVRKDTLGQSFNDTMVAFDALRPAGYVKVDVRPWGQVIADVSIQMATMACNSVWANVDRVVIKYLRLKHPSLKKHFKKIVKAVVQYPESKIDTIIPEGLVHAIHIKDVVSHLRALFPMPRGKQFNTRAHLTMRLFHHVLTELGEVGRVDPKDKKTRKSHPRLFSILPRKNGFTILYVPISSMTFMKLLSMGDSPLESVSGDGRYENHTMLWQKYFNVQGLETKRSRFDNRILSDGKGVSVQMKQKGKEEVVEEGENAGYPKDANIVECKDAVGALRVGVDPGMTDIVTVASSAGRIESFSSARFSEVAGYNTSKRRTYKWNDETQDLVKSIPSPNTSNMSDLQDHVRAYLKALPILLQHRANKGYRSMRFFRYVGKQKTIEKVCDVIAPRAQTTVVGFGNWSNQGYGISRSCSGPIKEIRRCLSRRKNVLFKNVDERNTSCKCHGCFQRLVNMKADSVVWREVCKESPIDGSITVEKQKMVVKNVKVHKVLHCRDSVKSASSNVRCGATWNRDVNAAKNLLLLTTWMDGRERPEAFCVPPPPPKTTVSIEASVSAKPTDPPGFVSSLPCYPLGQLKS

SEQ ID NO: 803 - protein, 243 aa, Chlamydomonas sp.
ANRGYRSMRFFRYVGKQKTIEKVCDLIAPKAQKKTIEEKVCDVIAPKAKKTVVGFGNWSNQGYGISRSCSGPVKEIRRCLSRRQNVLFKNVDERNTSCTCHGCFQKLVNMKADSVVWRRFQNEPYALIDGAPTTTTTTTFEKQKTVVKNVTVHKVLHCRNSVKSASSNVRCGATWNRDVNAAKNLLLLLTTWMDGKERPAALCVPSSSPTPKTTVSGEANVGAQPTDPPGSVSSLQLLSSGPA

SEQ ID NO: 804 - protein, 525 aa, Chlamydomonas sp.
RRNNFLGRTVGDAICGTPYSRRNSKMNVRRAHVRLDMKTLVNLFRHVFPKDPNIVELSKWKNVKDPDRFMLPLKPAFKKKKSCGPGEWEAYKLAQQKYDADVNDIKDPSTHPPTSFHPPTHPLPSTHPPTSFHARKIVAGSFFKKPPVKTGWVFDCSICTDGVSLSMQYSKTVQVRVSDLKKTSKRSRDDEGMSVSEQYEHKLKTTLPDMGIVVLGVDPGRSNIATVTYLADDKSKTWKLTRGAFYHKSGIKKQKKQQEKRFSDMIPRWESLRENGAALSTSWTDDISAYLTNYATFSDEWWRMALRRRESRDNFQRYIGKRKAMDSFWAGIKRNMKLDHPDLRVRVAYGSAITTLKATGPGEVAVPTRSMFASCKRLFKEELHVTDEFKTTLMSWETGAKKECVYKIPSVQITTEGQIRLGYELLGHTPLKETPKVSYRDQLAVRVYCTRKQIQEKHRRGGLAPSLVDNNSIKRYPEVRGLRFSPETSTYSDRDRSSALTIARLHCMEQLGQGRPLPFCRDACC

SEQ ID NO: 805 - protein, 707 aa, Chlamydomonas sp.
GNCPLVWYHQNNNHSLSMGVVTNNGDDDDLDIMVVKKTLNSLCMDVSRQQICSRIQSMVLVINHAVAEAYLFANFHITRCLDDGDFDVKQLPHLDRNFYYRCILAVSISNVRNDTLDQSLKDSMVAFDALRPAGYVKVDVCQWGQVIADVSIQMATMACNSVWANVDRVVIKYLRLKHPSLKKHFKKIVKAVVQYPDSDIDKIILAGLVHANLIKDVVRRLRDLLPLPRGKQFNTRAHLTMRLFHHVLTELGADLKEKTTKKRPRLFSILPRKSGFTISYVPILSMTLMKLLSIESVRGDGRHENHSMLWRKYFNVQGLETKGSRFDNRILSDGKGVSVQMKHQVGKDIAGEGGGDNAGYPKDASIEDCQDASLRQGALRVGIDPGMTDIVTIASSDGRVESFSSARFSEAAGYNTSNRRTNKWNADTQDLVKSIPSPTTSSMHDMQDHVRGYLSALPTLLQHRANRGYRSMRFFRYVGKQKTIEKVCDLIAPKAQKKTIEEKVCDVIAPKAKKTVVGFGNWSNQGYGISRSCSGPVKEIRKCLSRRQNVLFKNVDERNTSCTCHGCFQKLVNMKADSVVWRRVQNEPPSLINRAPTTTTTTTFEKQKTVVKNVKVHKVLHCRNSVKSASSNVRCGATWNRDVNAAKNLLLLLTTWMDGKERPAAFCVPSSSPTPKTTVSGEANVGAQPTDPPGSVSSLQLLSSGPA

SEQ ID NO: 806 - protein, 571 aa, Chlamydomonas sp.
LVQIGSWPHGKQICTILQGYHLPRGRSFSVGIGEQKTPPGRLKTPPGRLKHPSLKKHFKKIVKAVVQYPDSDIDKIIPAGLVHANLIKDVVRRLRDLLPLPRGKQFNTRAHLTMRLFHHVLTELGADLKEKTTKKRPRLFSILPRKSGFTISYVPISSMTLMKLLSMGDSPLESVRGDGRHENHSMLWRKYFNVQGLETKGSRFDNRILSDGKGVSVQMKHQVGKDIAGEGGGDNAGYPKDASIEDCQDASLRQGALRVGIDPGMTDIVTIASSDGRVESFSSARFSEAAGYNTSNRRTNKWNADTQDLVKSIPSPTTSSMHDMQDHVRGYLSALPTLLQHRANRGYRSMRFFRYVGKQKTIEKVCDLIAPKAQKKTIEEKVCDVIAPKAKKTVVGSGNWSNQGYGISRSCSGPVKEIRKCLSRRQNVLFKNVDERNTSCTCHGCFQKLVNMKADSVAWRRVQNEPSALIDGAPTTTTTFEKQKTVVKNVKVHKVLHCRNSVKSASSNVRCGATWNRDVNAAKNLLLLLTTWMDGKERPAAFCALLIAHPKNHSFRRGKCGRSTNRPTWVS

SEQ ID NO: 807 - protein, 268 aa, Chlamydomonas sp.
WLHLGHGLQTTCCSPWWNCTIASLEPCALLFRTAHSGGRWCCPCARSLWYGHAGPCQRLPQRSPDTPSTPSQQRLPIGFFRYVGKQKTIEKVCDLIAPKAQKKTIEEKVCDVIAPKAQKTIVGFGNWSNQGYGISRSCSGPVKEIRKCLSRRQNVLFKNVNERNTSCTCHGCFQKLVNMKADSVVWRRVQNEPPSLINGAPTTTTTIEKQKTVVKNVKVHKVLHFVCPPHRPPQKPQFPERQMWALNQPTHLGQLAAYNCYPLGQLKC

SEQ ID NO: 808 - protein, 802 aa, Chlamydomonas sp.
PRMEHVCDVCIKSSVMYKLCKMATKPPTVAKLKELLKLAEVAYSSKDKKDDIVRLCEDNGLIARPPPEYKTVENMCVVKFALKKAMSLDDEEFGKFRGHVDQLVNVVSRMLRRSSLVLTFHVTRLMEGDLPIPNMHDMKDTYRKDWLRIGVDGVFPDEESRISYESMKDVIGKVLGSDDPDYISSYPIYFDQVLNYAGHTLSTVVSNNAWVPLVPRLTRLTKATLNALGAPKTIRVYDVMRLIQQEIQEMESWPESVQEYVREVRVRLKVPDGSRLYDDYGKDMDFPTMVRFNYWMQTRLEAIGARRIRLMPIFNVQRAHVRLDMKTLVNLFRHVFPKDPNIVELSKWKNVKDPDRFMLPLKSAVKKKKSCGPGEWEAYKLAQQKYDADVNDIKDTDEYRHAKGRYDTLVNARKTVAGSFFKKPPVKTGWVFDCSVCTDGVSLSMQYSKTVQVRVSDLKKTSKRSRDDEGMSVSEQYDHKLKTTLPDMGIVVLGVDPGRSNIATVTYLADDKSKTWKLTRGAFYHKSGIKKQKKQQEKRFSDMIPRWESLLENGAALSTSRTDDISAYLKNYATFSDEWWRMALLRRESRDNFQRYIGKRKAMDSFWAGIKRNMKLDHPDLRVRVAYGSAITTLKATGPGEVTVPTGSMFASCKRLFKEEVHVTYEFKTTLMSWETGAKKECVYKIPSVQITTEGQIRLGYELGHTPLKETPKVSYRDQLAVRVYCTRKKIQEKHRRGGLAPSLVDNNSIKRYPEVRGLRFSPETSTYSDRDRSSALTIARLHCMELLGQGRPLPFCRDACC

SEQ ID NO: 809 - protein, 794 aa, Chlamydomonas sp.
ECSREPVCRSRLHQNVFGVQFVMENGIGELSSLVHEADQHDDVAELVDYEGEEDEECAPGRAICVVKMKLSTFIPHDWLRKKIDTLVLDMNKLLGEGYIFANFHIARLFENGIAVPPVNRNFFYRCLIAVSTNKCKGSTLGEDFESSRLLFDLLREPGQSKVDIRGNVKNQIIADLSILMATMASNHLWTNLERRITTYLKWKYPQIAKRLRSDIVAAVIKCPTKNLDVIFKMSPHTTKLPTKLPTARLRSAKSAVALAKKRVGRKEPEGSPLRVRLTKLQERLEKLSEAWLSSKNLRVDADNAKRFFARDVAFCLRGVLPLPSGNTFASRAHMTLPLYHKILSETIEEKRKTKNEKHRTFSLLPYKSGFTLSHIPISKMAFFYMVNECHFDSCKADVTSKNHQGIWERFANLKKVETVSRKFGYRIVTDGFAVSILMNKPTCLTCSMPADAFSTRAHEYVTTDEGGIVSFLDNVVVAAVDPGVTDIMTVTGLNGGTRSYSSAQYYRKGLIFKSQRQTDVWNLETADIVGGIIPDRDSSSSEQIGAYARFYMGAAPILLAHRASRGYRNLRFRRYSKKQKLIVEIADFVAPREKSAKVLVGFGDWKGLGATPISRRTCGPLQAIRFELRSRENVIMEDIDEFRTSQRCSCCENHLCNMVALTHRKKQDGTGWECTEGRKRIHKILHCKSSQSGAPRQQSGGMLHCGETWDRDVKASRNILMLTLHQVFGRERPLAFRRDAPRSSSTTPPPPPDTDMGTQTVERFTKEATRNIFENLFNLLHPPTLPKSNDLQSG

SEQ ID NO: 810 - protein, 621 aa, Chlamydomonas sp.
QCIRNLHVLNIRMPCMATNASVKLARPPMPLVSPGPSSVDGRIMARSERSGLQATNVSLTQAASKATSSSRKKNPAVVKSFSTQVCPHTNNNPTCSDSNCSCKPIFLTNIPDASKSLKSRTSDQGSTSSAQDFYEYWDSSRQDLYRQLLWLPKTGSQGLVSSSLNGFARSTPARSSFSITKTEPLKTSLEKTSCPSFKYIVADGTVEDATKSNAKPKLRTLKLKLNPTKAQKSMLAEFAGCSRFMYNKAVAARLGVGSTHKSVFRIRDRYVTNKVRGKGKMPNPYFKNRQWLLQCPKSVRQSAIKAALANIKACFSNMKAGNIKQFSAPFRRKKRELERGWAIEMDQKNVSKDGDKLFIFKDILGNMRYFGSKQLHKLMPEENPTHDPKVQKSRFGEYFLVLSVASRDRRAEQEPVHPDKVATASIDPGVRKTMVTYSPENEESFMLGQGQASDLVKFLLVHDKLQSRLDTEKTLRSKERMKIKKHMIRIRKRIFYLKKEFRDQTTNFLAARYDVLLVPQLETAKMTISAERELTTKVARQMLTLSHSVLFNRLKEKCAEYGTVFLHVLEHYTSQTCPMCGFLNKCGETYTCKNCQFTCDRDIVGAAGIFLKAVRTENPCS

SEQ ID NO: 811 - protein, 293 aa, Chlamydomonas sp.
QISVASSAGRIESFSSARFSKVAGYNTSKRRTYKWNDETQDLVKSIPSPNTSNMVDLQDHVRAYLKALPILLQHRANKGYRSMRFFRYVGKQKTIEKVCDVIAPRAQTTVVGFGNWSNQGYGISRSCSGPIKEIRRCLSRRKNVLFKNVDERNTSCKCHGCFQRLVNMKADSVVWRGVCKESPIDGSITVEKQKMVVKNVKVHKVLHCRDSVKSASSNVRCGATWNRDVNAAKNLLLLLTTWMDGRERPEAFCVPSPPPKTTVSIEASVSAKPTDPPGFVSSLPCYPLGQLKC

SEQ ID NO: 812 - protein, 200 aa, Chlamydomonas sp.
AFSSMQQRSKHRDNKQHRNKQGGSSQHYCKQQDSDGKKRVLARFFNEVQEDVGERKTIVVAYGSAKFAPGGNGELSVPTTSAFKAFSDRFKGRVAVIDEFRTTKIWHKDSTTVLQSVQSEKEGRTVRGLLWCSSTMENSKLFVNRDLNAAINIHNCFTMYPIRPGILARPKKYCKLEVVVGRKIDYKLTGSLQNAVSSEV

SEQ ID NO: 813 - protein, 664 aa, Chlamydomonas sp.
PRMEHVCDVCIKSSVMYKLCKMATKPPTVAKLKELLKLAEVAYSSKDKKDDIVRLCEDNGLIARPPPEYKTVEKMCVVKCALKKAMSLDDEEFGKFRGHVDQLVNVVSRMLRRSSLVLTFHVTRLMEGDLPIPNMYDMKDTYWKDWLRIGVDGVFPDEESRISYEAVKDVIGKVLGSDDPDYINSYPIYFDQVLNYAGHTLSTVVSNNAWVPLVPRLTRLTKATLKALGAPKTIRVYDVMRVIQQEIQEMESWPESVQEYVREVRVRLKVPDGSRLYDDYGKDMDFPTMVRFNYWMQTRLEAMGARRIRLMPIFNVQRAHVRLDMKTLVNLFRHVFPKDPNIVELSKWENVKDPDRFMLPLKPAVKKKKSCGPGEWEAYKLAQQKYDADVKDIKATDEYRHAKGRYDTLVNARKTVAGSFFKKPPVKTGWVFDCSICTDGVSLSMQYSKTVHVRVSDLKKTSKRSRDEEGMSVAEQYDHKLKTTLPDMGIVVLGVDPGRSNIATVTYLADDKSKTWKLTRGAFYHKSGIKKQIKQQEKRFSDMIPRWEFLRENGAALSTSRKDDISAYLKNYATFSDEWWRMALRRRESRDNFQRYIGKRKAMDSFWAGIKRNMKLDHPDLRVRVAYGSAITKLKATGPGEVAVPTGSMFASCKRLFKGGSCDR

SEQ ID NO: 814 - protein, 407 aa, Chlamydomonas sp.
DHPLIHYNVCRPDSSRTVSRKFGYRIVTDGFAVSILMNKPTCSMPADSFSTRAHEYVTTDEGGIVSFRDNVVVAAVDPGVTDIVTVTGLGGGTRSYSSAQYYRKGLIFKSQRQTEVWNLETADIVGDIIPDRDSSRSEQIGAYAWFYMGAAPILLAHRASRGYRNLRFRRYCKKQKLIVEIADFVAPREKSAKVLVGFGDWKGLGATPISRRTCGPLQAIRFELRSRGNVIMEDVDEFRTSQRCSCCENRLCNMVALTHHKKQDGTGWECTEGRKRIHKILHCKSSQSGAPRQQSGGRLHCGKTWDRDVNASRNILMLTLHQVFGRERPLAFRRDAPRSSSKTPPPPDTDMGTQTVERFTKEATRNIFENLFNLLHPPPQRCPKATICSLDDYKVCPTLFENYCIKH

SEQ ID NO: 815 - protein, 621 aa, Chlamydomonas sp.
QCIRYLHVLNIRMPCTATNASVKLVRPPMPLVFPGPSSVDGRIMARSERSGLQATNVSLTQAASKATSSSRKKKPAVVKSFSTHVCPHTNNNPTCSDSNCSCKPIFLTNIPDASKSLKSRTSDQGSTSSAQDFYEYWDSSRQDLYRQLLWLPKTGSQGLVSSSLNGFARSTPARSSFSITKTEPLKTSLEKTSCPSFKYIVADGTVEDATKSNAKPKLRTLKLKLNPTKAQKSMLAEFAGCSRFMYNKAVAARLGVGSTHKSVFRIRDRYVTNKVRGEGKMPNPYFKNRQWLLQCPKSVRQSAIKAALANIKACFSNLKAGNIKQFSAPFRRKKTELERGWAIEMDQKNVSKDGDKLFIFKDILGNMRYFGSKQLHKLMPEENPTHDPKVQKSRFGEYFLVLSVAARDRRAERKPVHPDKVATASIDPGVRKTMVTYSPENEESFMLGQGQASDLVKLLLVHDKLQSRLDTEKTLRSKERMKIKMQMIRIRKRIFYLKKEFRDQTTNFLAARYDVLLVPQLETAKMTISAERELTTKVARQMLTLSHSVLFNRLKEKCEEYGTVFLHVLEHYTSQTCPMCGFLNKCGETYTCKNCQFTCDRDIVGAAGIFLKAVRTENPCS

SEQ ID NO: 816 - protein, 803 aa, Chlamydomonas sp.
PRMEHVCDVCIKSSVMYKLCKMATKPPTVAKLKELLKLAEVAYSSKDKKDDIVRLCEDNGLIARPPPEYKTVEKMCVVKCALKKAMSLDDEEFGKFREHVDQLVNVVSRMLRRSSLVLTFHVTRLMEGDLPIPNMYDMKDTYWKDWLRIGVDGVFPDEESRISYESVKDVIGKVLGSDDPDYINSYPIYFDQVLNYAGHTLSTVVSNNAWVPLVPRLTRLTKATLNALGAPKTIRVYDVMRVIQQEIQEMESWPESVQEYVREVRVRLKVPDGSRLYDDYGKDMDFPTMVRFNYWMQTRLEAIGARRIRLMPIFNVQRAHVRLDMKTLVNLFRHVFPKDPNIVELSKWKDVKDPDRFMLPLKPAVKKKKSCGPGEWEAYKLAQQKYDADVNDIKDTDEYRHAKGRYDTLVNARKKVAGSFFKKPPVKTGWVFDCSICTDGVSLSMQYSKTVQVRVSDLKKTSKRSRDDEGMSVSEQYDHKLKTTLPDMGIVVLGVDPGRSNIATVTYLADDKSKTWKLTRGAFYHKSGIKKQKKQQEKRFSDMIPRWESLRENGAALSTSRTDDISAYLKNYATFSDEWWRMALLRRESRDNFQRYIGKRKAMDSFWAGIKRNMKLDHPDLRVCVAYGSAITTLKATGPGEVAVPTGSMFASCKRLFKEEVHVTDEFKTTLMSWETGAKKECVYKIPSVQITTEGQIRLGYELLSHTPLKETPNVSYRDQLAVRVYCTRKQIQEKHRRGGLAPSLVDNNSIKRYPEVRGLRFSPETSTYSDRDRSSALTIARLHCMELLGQGRPLPFCRDACC

SEQ ID NO: 817 - protein, 682 aa, Chlamydomonas sp.
NNNHSLSMGVVTNNGDDDDLDIMVVKKTLNSLCMDVSRQQICSRIQSMVLVINHAVAEAYLFANFHITRCLDYGDFDVKQLPHLDRNFYYRCILAVSTSNVRKDTLGQSLKDSMVAFDALRPAGYLKVDVCQWGQVIADVSIQMATMACNSVWANVDRVVIKYLRLKHPSLKKHFNKIVKAVVQYPDSDIDKIIPASLVHANLIKDVVRRLRDLLPLPRGKQFNTRAHLTMRLFHHVLAELGANLKEKTTKKRPRLFSILPRKSGFTISYVPISSMTLMKLLSMGDSPLESVRGDGRHENHSMLWRKYFNVQGLETKGSRFDNRILSDGKGVSVQMKHQVGKDIAGEGGGDNAGYPKDASIEDCQDASLRQGALRVGIDPGMTDIVTIASSDGRVESFSSARFSEAAGYNTSNRRTNKWNADTQDLVKSIPSPTTSSMHDMQDHVRGYLSALPTLLQHRANRGYRSMRFFRYVGKQKTIEKVCDLIAPKAQKKTIEEKVCDVIAPKAKKTVVGFGNWSNQGYGISRSCSGPVKEIRKCLSRRQNVLFKNVDERNTSCTCHGCFQKLVNMKADSVAWRRVKNEPSALIDGAPTTTTTFEKQKTVVKNVKVHKVLHCRNSVSLWCNLEPRRERCQEPSSASDNVDGRERATSGILCALLIAHPKNHSFRRGKCGRSTNRPTWVS

SEQ ID NO: 818 - protein, 803 aa, Chlamydomonas sp.
PRMEHVCYVCIKSSVMYKLCKMATKPPTVAKLKELLKLAEVAYSSKDKKDDIVRLCEDNGLIARPPPEYNTVEKMCVVKCALKKAMSLDDEEFGKFREHVDQLVNVVSRMLRRSSLVLTFHVTRLMEGDLPIPNMYDMKDTYWKDWLRIGVDGVFPDEESRISYESVKDVIGKVLGSDDPDYINSYLIYFDQVLNYAGHTLSTVVSNNAWVPLVPRLTRLTKATLNALGAPKTIRVYDVMRVIQQEIQEMESWPESVQEYVREVRVRLKVPDGSRLYDDYGKDMDFPTMVRFNYWMQTRLEAIGARRIRLMPIFNVQRAHVRLDMKTLVNLFRHVFPKDPNIVELSKCKNVKDPDRFMLPLKPAVKKKKSCGPGEWEAYKLAQQKYDADVNDIKDTDEYRHAKGRYDTLVNARKTVAGSFFKKPPVKTGWVFDCSICTDGVSLSMQYSKTVQVRVSDLKKTSKRSRDDEGMSVSEQYDHKLKTTLPDMGIVVLGVDPGRSNIATVTYLADDKRKTWKLTRGAFYHKSGIKKQKKQQEKRFSDMIPRWESLRENGAALSTSRTDDISAYLKNYATFSDEWWRMALRRRESRDNFQRYIGKRKAMDSFWAGIKRNMKLDHPDLRVRVAYGSAITTLKATGPGEVAVPTGSMFASCKRLFKEEVHVTDEFKTTLMSWETGAKKECVYKIPSVQITTEGQIRLGYELLGHTPLKETPNVSYRDQLAVRVYCTRKQIQEKHRRGGLAPSLVDNNSIKRYPEVRGLRFSPETSTYSDRDRSSALTIARLHCMELLGQGRPLPFCRDACC

SEQ ID NO: 819 - protein, 795 aa, Chlamydomonas sp.
LWKMATKPPTVAKLKELLKLAEVPYSSKSNKDDLVRLCEDNGLIARPPPEYKTVEKMCVVKCALKKAMSLDDEEFGKFREHVDQLFNVVSRMLRRSSLVLTFHITSLLEKGLEIPDLYNMKDTYWKDWLRIGVDGIFPDEESKISYESVKDSIGDVIGNDDADYIKSYPIYFDQVLNYAGHTLSTVVSNNAWVPLIPRLARLTSTTLNKLNAPKTLDTSKIIRGYDVMQAIQQEVQNMEGWPESVQEYVNEVREMLSVPDGSRVYDNYGKDMDFPTMVRFNYWIQTRLEDMDARRIRLMPIFNVQRVHVRLDLKTLVNLFRHMFPNDQNIVELSKWEHVKNPDSFMLPQRPAQKKKKSCGPGEWEAYKSVLKQYDDDVKDIKATDEYRHAKGLYDTLVNAQKTVAGSFFRKPPVKNGWVFDCSICTDGVSLSMQYSKKVQVLVSDLKKICKNPRKEEGIKIAEKYDGSLKTILPDMGIVVLGVDPGRSNIATVTYLADDKNKTWTLTRGAFYHKSGIKKQTRQKELRFADMIPMWESLRENGAALSTSRTDKISAYLSNYAKFSEEWWRLALRRRESRDNLQRYIGKRKVKDSFWAGIKRCMMKELPDMKVCVAYGSAITKLKPTGPGEVAVPTGAMFASCKRIFKEDVSVTDEFRTTLMSWETGKEKERVYKIPSVCSADVKLRLGGERFGHTKSKTMPKVADCDHLGVRLYNKRKGAQEKHRRGGFATSLVDSQKLIERYPEVRGLRFSPETCIYSDRDRSSALTIARLHCMELMGLGRPLPFAHSSSVVVDE

SEQ ID NO: 820 - protein, 543 aa, Chlamydomonas sp.
ETIRGCHRSLRWRSKPVQPRVEEVPDQFHNPHRPVHLSTWIKKFVYSKENRILAKEFKDEHGIDETVFHRYLLYDIHSWGVKEDLIAIHSLLPERTKMLLKIQHSIIGRDEINRQWLKSVSNSAKMIRYNVFINRYLEATEDEGYAKLVNIAPIPTVKHAFIMIDTDGLLGVLKDVGLVESLEKTLTNKEHWESVFDVENIRSTGKGVFTCTIDTDGVMACTHFLRAEKKKISIKDDGTAIKKQTKTLREFSESDPNVVVVANDPGRCNIAFLTWKKNKVEEKDKGGRKRKRHCEFGSKRLTRERYYVESGVFKSRGPTKKWLSNIQDCLDDLKDNSPKRTSLESFDAYVTVIVNHWDSRWGEMSKSRWGAQRLRLYGGKKRVLARFFNEVQADVGERKTIVIAYGSSKFAPGGKGELSVPTTSAFNAFSDRFKGRVAVIDEFRTTKIWHKDSTTVLQSVQSEKEGRTVRGLLWCSSTMENSKLFVNRDLNAAINIHNCFTMYPIRPGILARPKKYCKLEVVVGRKIDYKLTGSLQNAVSSEV

SEQ ID NO: 821 - protein, 725 aa, Chlamydomonas sp.
VPLFPHDWLRKKIDTLVLDMNKLLEEGYIFANFHIARLFENGIAVPPVNRNFFYRCILAVSTNKCKGSTLGEDFESSRLLFDLLREPGQSKVDIRGNVKNQIIADLSILMATMASNHLWTNLERRITTYLKWKYPQIAERLRSDTVAAVIKCPTKNLDVIFKMSPHVAKLPTKLPTAQLRSAKSAVALAKKRVGRKEPEVSPLRVRLTKLQARFEKLSEAWLSSKNLRVDEDNAKRFFARDVAFCLRGGLPLPSGNTFASRAHMTLPLYHKILSETIEEKRKTKNEKLRTFSLLPYKSGFTLSHIPISKMAFFYMVNECHFDSCKADVASKNHQGIWERFANLKKVETVSRKFGYRIVTDGFAVSILMNKPTCLTCSMPADSFSSRAHEYVTTDEGGIVSFRDNVVVAAVDPGVTDIVTVKGLDGCTRSYSSAQYYRKGLIFKSQRQTDVWNLETADIVGNIIPDRDSSRSEQIGAYARFYMGAAPILLAHRASRGYRNLRFRRYCKKQKLIVEIADFVAPREKSAKVLVGFGDWKGLGATPISRRTCGPLQAIRFELRSRGNVIMEDVDECRTSQRCSCCENRLCNMVALTHRKKQDGTGWECTEGRKRIHKILHCKSSQSGAPRQQSGGRLHCGKTWDRDVNASRNILMLTLHQVFGRERPLAFLRDAPRSSSRPPPPPDTDMGTQTVEWFTKEATRNIFENLFNLLHPPTLPKSNDLQSGSL

SEQ ID NO: 822 - protein, 384 aa, Chlamydomonas sp.
DERVSFDNRILSDGKGVSVQMKHQVGKDIAGEGGGDNAGYSKDASIEDCQDASLRQGALRVGIDPGMTDIVTIASSDGRVESFSSARFSEAAGYNTSNRRTNKWNADTQDLVKSIPSPTTSSMHDMQDHVRGYLSALPTLQHRANRGYRSMRFFRYVGKQKTIEKVCYLIAPKAQKKTIEEKVCDVIAPKAKKTVVGFGNWSNQGYGISRSCSGPVKEIRKCLSRRQNVLFKNVDERNTSCTCHGCFQKLVNMKADSVVWRRVQNEPSALIDGAPTTTTTFEKQKTVVKNVKVHKVLHCRNSVKSASSNVRCGATWNRDVNAAKNLLLLLTTWMDGKERPAAFCVPSSSPTPKTTVSGEANVGAQPTDPPGSVSSLQLLSSGPA

SEQ ID NO: 823 - protein, 363 aa, Chlamydomonas sp.
YLEATEDEGYAKLVNIAPIPTVKHSFITIDTDGLLGVLKDVGLVKSLEKTLTNKEHWESVFDVENTRSTGKGVFTCTIDTDGVMACTHFLRAEKKKISIKDDGTAIKKQTKTLREFSESDPNVVVVANDPGRCNIAFLTWKKNKVEEKDKGGRKRKRHCEFGSKRLTRERYYVESGVFKSRGPTKKWLSNIQDCLDDLKDNSPKRTSLESFDAYVTVMVNHWDSRWGEMSKSRCVAQRLRLYGGKKRVLARFFNEVQADVGERKTIVIAYGSSKFAPGGKGELSVPTTSAFNAFSDRFKGRVAVIDEFRTTKIWHKDSTTVLQSVQSEKEGRTVRGLLWCSYTMDNSKLFVNRDLNAAINIHN

SEQ ID NO: 824 - protein, 794 aa, Chlamydomonas sp.
ECSREPVCRSRLHQNVFGVQFVMENGIGESSSLVHEADQHDDVAELVDYEGEEDEECAPGRAICVVKMKLSTFIPHDWLRNKIDTLVLDMNKLLGEGYIFANFHIARLFENGIAVPPVNRNFFYRCLIAVSTNKCKGLTLGEDFKSSRLLFDLLREPGQSKVDIRGNVKNQIIADLSILMATMASNHLWTNLERRITTYLKWKYPQIAKRLRSDIVAALIKCPTKNLDVIFKMSPHTTKLPTKLPTSRLRSAKSAVALAKKRVGRKEPEGSPLRVRLTKLQERLEKLSEAWLSSKNLRVDADNAKRFFAREVAFCLRGVLPLPSGNIFATRAHMTLPLYHKILSETIEEKRKTKNEKHRTFSLLPYKSGFTLSHIPISKMAFFYMVNECHFDSCKADVASKNHQGIWERFANLKKVETVSRKFGYRIVTDGFAVSILMNKPTCLTCSMPADAFSTRAHEYVTTYEGGIVSFLDNVVVAAVDPGVTDIVTVTGLNGGTRSYSSAQYYRKGLIFKSQRQTDVWNLETADIVGGIIPDRDSSSSEQIGAYARFYMGAAPILLAHRASRGYRNLRFRRYCKKQKLIVEIADFVAPREKSAKVLVGFGDWKGLGATPISRRTCGPLQAIRFELRSRENVIMEDIDEFRTSQRCSCCENHLCNMVALTHRKKQDGTGWECTEGRKRIHKILHCKSSQSGAPRQQSGGMLHCGKTWDRDVNASRNILMLTLHQVFGRERPLAFRRDAPRSSSTTPPPPPDTDMGTQTVERFTKEATRNIFENLFNLLHPPTLPKSNDLQSG

SEQ ID NO: 825 - protein, 547 aa, Chlamydomonas sp.
ECSREPVCRSRLHQNVFGVQFVMEHGVVLVHEADQHDDVAELVDYEGDEDEERAPGRAICVVKMKLSTFIPHDWLRRKIDTLVLDMNKLLGEGCIFANFHIARLFENGIAVPPVNRNFFYRCLLAVSTNKCKGSTLGEDFESSRLLFDLLREPGKNHQGIWERFANLKKVETVSRKFGYRIVTDGFAVSILMNKPTCLICSMPADAFSTRAHEYVTTDEGGIVSFRDNVVVAAVDPGVTDIVTVTGLDGGTRSYSSAQYYRKGLIFKSQRQTDVWNLETADIVGDIIPDRDSSRSEQIGAYARFYIGAAPILLAHRASRGYRNLRFRRYCKKQKLIVEIADFVAPREKSAKVLVGFGDWKGLEATPISRRTCGPLQAIRFELCSRENVIMEDVDEFRTSQRCSCCENRLCNMVALTHRKKQDGTGWECTEGRKRIHKILHCKSSQSGAPRQQNGGRLHCGKTWDRDVNASRNILMLTLHQVFGRERPLAFRRDAPRSSSKTPPPPDTDMGTQTVERFTKEATRNIFENFFNLLHPPTLPKSNDLQSG

SEQ ID NO: 826 - protein, 487 aa, Chlamydomonas sp.
YWDSSRQDLYRQLLWLPKTGSQGLVSSSLNGFARSTSARSSFSITKTEPLKTSLEKTSCPSFKYIVADGTVEDATKSNAKPKLRTLKLKLNPTKAQKLMLAEFAGCSRFMYNKALAARLGVGSTHKSVFRIRDRYVTNKVRGKGKMPNPYFKNRQWLLQCPKSVRQSAIKAALANIKACFSNLKAGNIKQFSAPFRRKKTELERGWAIEMDQKNVSKDGDRLFIFKDILGNMRYFGSKQLHKLMPEENPTHDPKVQKSRFGEYFLVLSVAARDRRAERKPVHPDKVATASIDPGVRKTMVTYSPENEESFMLGQGQASDLVKLLLVHDKLQSRLDTEKTFRSKERMKIKKQMIRIRKRIFYLKKEFRDQTTNFLAARYDVLLVPQLETAKMTISAERELATKVARQMLTLSHSVLFNRLKEKCEEYGTVFLHVLEHYTSQTCPMCGFLNKCGGETYTCKNCQFTCDRDIVGAAGIFLKAVRTENPCS

SEQ ID NO: 827 - protein, 684 aa, Chlamydomonas sp.
KETIVNKEPPDKRTRPDRAAKFKDRKNGEESVVKCTLSRIIADKDNKDVIMKVIKERVDSVSKRTYLAGVAVNRILKEVFEGVPDAQLHTVSVPSVDQNFIRQLMVGSRQAHMETRDATVERFFHNNYWFREKIEGREVIVKKKKQYVGAIARYDGDRNLYSHASKKYLTNFNNHYRVHLSTWIKKLVYSKENRILAKEIKDEHGIDETVFHRYLLYDIHSWGVKEDLIEIHSLLPERTKMLLKIQHSIRDEINRQWLKSVSNSAKMIRYNVFINRYLEATEDEGYAKLVNIAPIPTVKHAFITIDTDGLLGVLKDVGLIERLEKTLTNKEHWESVFDVENIRSTGKGVFTCTIDTDGVMACTHFLRAEKKKISIKDDGTAIKKQTKTLREFSESEPNVVVVANDPGRCNIAFLTWKKNKVEEKDKGGRKRKRHCEFGSKRLTRERYYVESGVFKSRGPTKKWLSNIQDCLDDLKDNSPKRTSLVSFDAYVTVMVNHWGSRWGEMSKSQWGAQRLRLYGGKKRVLARFFNEVQEDVGERKTIVVAYGSAKFAPGGKGELSVPTTSAFNAFSDRFKRRVAVIDEFRTTKIWHKDSTTVLQSVQSEKEGRTVRGLLWCSSTMENSKLFVNRDLNAAINIHNCFTMYPIRPGILARPRKYCKLEVVVGRKIDYKLTGSLQNAVSSEV

SEQ ID NO: 828 - protein, 242 aa, Chlamydomonas sp.
EQHRYSHVSGRRQKQDMEAYTRSFLPQVWYQETEKTARKRFSDIIPRWESLRENGAALSTSRKDDISAYLKNYATFSDEWWRMALPRRESRDNFQRYIGKRKAMDSFWAGIKRNMKLDHPDLRVRVAYGSAITKLKATGPGEVAVPTGSMFASCKRLFKEEVHVTDEFKTTLMSWETGAKKECVYKIPSVQITAEGQIRLGYELLGHTPLKETPKVSYRDQLAVRVYCTHKKKSKKTTGGVA

SEQ ID NO: 829 - protein, 715 aa, Chlamydomonas sp.
GNCPLVWYHQNNNHSLSMGMVTNNGDDDDLDIMVVKKTLNSLCMDVSRQQICSRIQSMVLVINHAVAEAYLFANFHITRCLDDGDFDVKQLPHLDRNFYYRCILAVSISNVRNDTLDQSLKDSMVAFDALRPAGYLKVDVCQWGQVIADVSIQMATMACNSVWANVDRVVIKYLRLKHPSLKKHFNKIVKAVVQYPDSDIDKIIPAGLVHANLIKDVVRRLRDLLPLPRGKQFNTRAHLTMRLFHHVLTELGADLKEKTTKKRPRLFSILPRKSGFTISYVPISSMTLMKLLSMGDSPLESVRGDGRHENHSMLWRKYFNVQGLETKGSRFDNRILSDGKGVSVQMKHQVGKDIAGEGGGDNAGYPKDASIEDCQDASLRQGALRVGIDPGMTDIVTIASSDGGVESFSSARFSEAAGYNTSNRRTNKWNADTQDLVKSIPSPTTSSMHDMQDHVRGYLSALPTLLQHRANRGYRSMRFFRYVGKQKTIEKVCDLIAPKAQKKTIEEKVCDVIAPKAKKTVVGFGNWSNQGYGISRSCSGPVKEIRKCLSRRQNVLFKNVDERNTSCTCHGCFQKLVNMKADSVVWRRVQNEPSALIDGAPTTTTTTTTTTFEKQKTVVKNVKVHKVLHCRNSVKSASSNVRCGATWNRDVNAAKNLLLLLTTWMDGKERPAAFCVPSSSPTPKTTVSGEANVGAQPTDPPGSVSSLQLLSSGPA

SEQ ID NO: 830 - protein, 321 aa, Chlamydomonas sp.
TQTTLPDMGIVVLGVDPGRSNIATVTYLADDKSKTWKLTRGAFYHKSGIKKQKKQQEKRFSDMIPRWESLRENGAALSTSRTDDISAYLKNYDTFSDEWWRMALLRRESRDNFQRYIGKRKAMDSFWAGIKRNMKLDHPDLRVRVAYGSAITTLKATGPGEVAVPTGSMFASCKRLFKEEVHVTDEFKTTLMSWETGAKKECVYKIPSVQITTEGQIRLGYELLGHTPLKETPNVSYRDQLAVRVYCTRKQIQEKHRRGGLAPSLVDNNSIKRYPEVRGLRFSPETSTYSDRDRSSALTIARLHCMELLGQGRPLPFCRDA

SEQ ID NO: 831 - protein, 623 aa, Chlamydomonas sp.
IYQCIRNLHVLNIRMPCMATKASVKLARPPMPLVSPGPSSVDGRIMARSERSGLQATNVSLTQAASKATSSSRKKNPAVVKSFSTHVCPHTNNNPTCSDSNCSCKPIFLTNIPDASKLLKSRTSDQGSTSSAQDFYEYWDSSRQDLYRQLLWLPKTGSQGLVSSSLNGFARSTPARSSFSITKTEPLKTSLEKTSCPSFKYIVADGTVEDATKSNAKPKLRTLKLKLNPNKAQKSMLAEFAGCSRFMYNKAVAARLGVGSTHKSVFRIRDRYVTNKVRGKGKMQNPYFKNRQWLLQCPKSVRQSAIKSALANIKACFSNLKAGNIKQFSAPFRRKKTELERGWAIEMDQKNVSKDGDKLFIFKEILGNMRYFGSKQLHKLMPEENPTHDPKVQKSRFGEYFLVLSVAARDRRAERKPVHPDKVATASIDPGVRKTMVTYSPENEESFMLGQGQASDLVKLLLVHDKLQSRLDTEKTLRSKERMKIKKLMIRIRKTIFYLKKEFRDQTTNFLAARYDVLLVPQLETAKMTISAERELTTKVARQMLTLSHSVLFNRLKEKCEEYGTVFLHVLEHYTSQTCPMCGFLNKCGETYTCKNCQFTCDRDIVGAAGIFLKAVRTENPCS

SEQ ID NO: 832 - protein, 793 aa, Chlamydomonas sp.
KMATKSPTVAKLKELLKLAEVPYSSKSNKDDLVRLCEDNGLIARPPPEYKTVEKMCVVKCALKKAMSLDDEEFGKFREHVDQLVNVVSRMLRRSSLVLTFHITSLLEKGLDIPDLYNMKDTYWKDWLRIGVDGIFPDEESKISYEAVKDSIGDVIGNDDADYIKSYPIYFDQVLNYAGHTLSTVVSNNAWVPLIPRLARLTSTTLNKLNAPKTLDTSKIIRGYDVMQAIQQEVQNMEGWPESVQEYVNEVRERLSVPDGSRVYDNYGKDMDFPTMVRFNYWIQTRLEDMDARRIRLMPIFNVQRVHVRLDLKTLVNLFRHMFPNDQNIVELSKWEHVKNPESFMLPQRPAQKKKKSCGPGEWEAYKSVLKQYDDDVKDIKATDEYRHAKGLYDTLVNARKTVAGSFFRKPPVKNGWVFDCSICTDGVSLSMQYSKTVQVLVSDLKKTCKKPRKEEGIKIAEKYDGSLKTILPDMGIVVLGVDPGRSNIATVTYLADDKNKTWKLTRGAFYHKSGIKKQTRQKELRFADMIPMWESLRENGAALSTSRTDKISAYLSNYAKFSDEWWRLALRRRESRDNLQRYIGKRKVKDSFWAGIKRCMMKELPDMKVCVAYGSAITKLKPTGPGEVAVPTGAMFASCKRIFKEDVSVTDEFKTTLMSWETGKEKERVYKIPSVCSADVNLRLGGERFGHTKSKTMPKVADCDHLGVRLYNKRKGAQEKHRRGGFATSLVDSQKSIERYPEVRGLRFSPETCIYSDRDRSSALTIARLHCMELMGLGRPLPFSHSSSVVVDE

SEQ ID NO: 833 - protein, 793 aa, Chlamydomonas sp.
KMATKPPTVAKLKELLKLAEVPYSSKSNKDDLVRLCEDNGLIARPPPEYKTVEKMCVVKCALKKAMSLDDEEFGKFREHVDQLVNVVSRMLRRSSLVLTFHITSLLEKGLDIPDLYNMKDTYWKDWLRIGVDGIFPDEESKISYEAVKDSIGDVIGNDDADYIKSYPIYFDQVLNYAGHTLSTVVSNNAWVPLIPRLARLTSTTLNKLNSPKTLDTSKIIRGYDVMQAIQQEVQNMEGWPESVQEYVNEVREMLSVPDGSRVYDNYGKDMDFPTMVRFNYWIQTRLEDMDARRIRLMPIFNVQRVHVRLDLKTLVNLFRHMFPNDQNIVELSKWEHVKNPESFMLPQRPAQKKKKSCGPGEWEAYKSVLKQYDDDVKEIKATDEYRHAKGLYDTLVNARKTVAGSFFRKPPVKNGWVFDCSICTDGVSLSMQYSKTVQVLVSDLKKTCKKPRKEEGIKIAEKYDGSLKTILPDMGIVVLGVDPGRSNIATVTYLADDKNKTWKLTRGAFYHKSGIKKQTRQKELRFADMIPMWESLRENGAALSTSRTDKISAYLSNYAKFSDEWWRLALRRRESRDNLQRYIGKRKVKDSFWAGIKRCMTKELPDMKVCVAYGSAITKLKPTGPGEVAVPTGAMFASCKRIFKEDVSVTDEFKTTLMSWETGKEKERVYKIPSVCSADVKLRLGGERFGHTKSKTMPKVADCDHLGVRLYNKRKGAQEKHRRGGFATSLVDSQKSIERYPEVRGLRFSPETCIYSDRDRSSALTIARLHCMELMGLGRPLPFAHSSSVVVDE

SEQ ID NO: 834 - protein, 686 aa, Chlamydomonas sp.
METIVNKEPPDKRTRPDRAAKIKDRKNGEENVVKCTLSRIIADKDNKDVITKVIKERVDSVSKRTYLAGVAVNRILKEVFEGVPDAQLHTVSVPSVDQNFIRQLMVGSRQALMETRDATVERFFHNNYWFREKIEGREVIVKKKKQYVGAIARYDGDRNLYSHASKKYLTNFNNHYRVHLSTWIKKFVYSKENRILAKEFKDEHGIDETVFHRYLLYDIHSWGVKEDLIAIHSLLPERTKMLLKIQHSIIGQDEINRQWLKSVSNSAKMIRYNVFINRYLEATEDEGYAKLVNIAPIPTVKHSFITIDTDGLLGVLKDVGLVESLEKTLTNKEHWESVFDVENIRSTGKGVFTCTIDTDGVMACPHFLRAEKKKISIKDDGTAIKKQTKTLREFSESDPNVVVVANDPGRCNIAFLTWKKNKVEEKDNGGRKRKRHCEFGSKRLTRERYYVESGVFKSRGPTKKWLSNIQDCLDDLKDNSPKRTSLESFDAYVTVMVNHWDSRWGEMSKSRWGAQRLRLYGGKKRVLARFFNEVQADVGERKTIVIAYGSSKFAPGGKGELSVPTTSAFNAFSDRFKGRVAVIDEFRTTKIWHKDSTTVLQSVQSEKKGRTVRGLLWCSSTMENSKLFVNRDLNAAINIHNCFTMYPTRPGILARPKKYCKLEVVVGRTIDYKLTGSLQNAVSSEV

SEQ ID NO: 835 - protein, 801 aa, Chlamydomonas sp.
PRMEHVCDVGIKSSVMYKLCKMATKPPTVAKLKELLKLAEVAYSSKDKKDDIVRLCEDNGLIARPPPEYKTVEKMCVVKCALKKAMSLDDEEFGKFREHVDQLVNVVSRMLRRSSLVLTFHVTRLMEGDLPIPNMYDMKDTYWKDWLRIGVDGVFPDEESRISYEAVKDVIGKVLGSDDPDYINSYPIYFDQVLNYAGHTLSTVVSNNAWVPLVPRLTRLTKATLNALKAPKTIRVYDVMRVIQQEIQEMESWPESVQEYVREVRVRLKVPDGSRLYDDYGKDMDFPTMVRFNYWMQTRLEDMDARRIRLMPIFNVQRAHVRLDMKTLVNLFRHVFPKDPNIVELSKWKDVKDPDRFMLPLKPAVKKKKSCGPGEWEAYKLAQQKYDADVNDIKDTDEYRHAKGRYDTLVNARKTVAGSFFKKPPVKTGWVFDCSICTDGVSLSMQYSKTVQVRVSDLKKTSKRSRDDEGMSVSEQYDHKLKTTLPDMGIVVLGVDPGRSNIATVTYLADDKSKTWKLTRGAFYHKSGIKKQKKQQEKRFSDMIPRWESLRENGAALSTSRTDDISAYLKNYDTFSDEWWRMALLRRESRDNFQRYIGKRKAMDSFWAGIKRNMKLDHPDLRVRVAYGSAITTLKATGPGEVAVPTGSMFASCKRLFKEEVHVTDEFKTTLMSWETGAKKECVYKIPSVQITTEGQIRLGYELLGHTPLKETPNVSYRDQLAVRVYCTRKQIQEKHRRGGLAPSLVDNKLIKRYPEVRGLRFSPETSTYSDRDRSSALTIARLHCMELLGQGRPLPFCRDA

SEQ ID NO: 836 - protein, 614 aa, Chlamydomonas sp.
DYRSVLHLWTNLERRITTYLKWKYPQIAKRLRSDIVAALIKCPTKNLDVIFKMSPHTTKLPTKLPTSRLRSAKSAVALAKKRVGRKEPEGSPLRVRLTKLQERLEKLSEAWLSSKNLRVDADNAKRFFAREVAFCLRGVLPLPSGNTFASRAHMTLPLYHKILSETIEEKRKTKNEKHRTFSLLPYKSGFTLSHIPISKMAFFYMVNECHFDSCKADVASKNHQGIWERFANLKKVETVSRKFGYRIVTDGFAVSILMNKPTCLTCSMPADAFSTRAHEYVTTDEGGIVSFLENVVVSAVDPGVTDIVTVTGLNGGTRSYSSAKYYRKGLIFKSQRQTDVWNLETADIVGGIIPDRDSSSSEQIGAYARFYMGAAPILLAHRASRGYRNLRFRRYCKKQKLIVEIADFVAPRKKSAKVLVGFGDWKGLGATPISRRTCGPLQAIRFELRSRENVIMEDIDEFRTSQRCSCCENHLCNMVALTHRKKQDGTGWECTEGRKRIHKILHCKSSQSGAPRQQSGGMLHCGKTWDRDVNASRNILMLTLHQVFGRERPLAFRRDAPRSSSTTPPPPPDTDMGTQTVERFTKEATRNIFENLFNLLHPPTLPKSNDLQSG

SEQ ID NO: 837 - protein, 347 aa, Chlamydomonas sp.
GGEGKMPNPYFKNRQWLLQCPKSVRQSAIKAALANIKACFSNLKAGNIKQFSAPFRRKKTELERGWAIEMDQKNVSKDGDKLFIFKDILGNMRYFGSKQLHKLMPEENPTHDPKVQKSRFGEYFLVLSVAARDRRADRKPVHPDKVATASIDPGVRKTMVTYSPQNEESFMLGQGQASDLVKLLLVHDKLQSRLDTEKTLRSKERMKIKMQMIRIRKRIFYLKKEFRDQTTNFLAARYDVLLVPQLETAKMTISAERELTTKVARQMLTLSHSVLFNRLKEKCEEYGTVFLHVLEHYTSQTCPMCGFLNKCGGETYTCKNCQFTCDRDIVGAAGIFLKAVRTENPCS

SEQ ID NO: 838 - protein, 686 aa, Chlamydomonas sp.
METIVNKEPPDKRTRPDRAAKIKDRKNGEENVVKCTLSRIIADKDNKDVITKVIKERVDSVFKRTYLAGVAVNRILKEVFEGVPDAQLHTVSVPSVDQNFIRQLMVGSRQAHMETRDATVERFFHNNDWFREKIEGREVIVKKKKQYVGAIARYDGDRNLYSHASKKYLTNFNNHYRVHLSTWIKKFVYSKENRILAKEFKDEHGIDETVFHRYLLYDIHSWGVKEDLIAIHSLLPERTKMFLKIQHSIIGRDEINRQWLKSVSNSAKMIRYNVFINRYHEATEDEGYAKLVNIAPIPTVKHSFITIDTDGLLGVLKDVGLVESLEKTLTNKEHWESVFDVENIRSTGKGVFTCTIDTDGVMACTHFLRAEKKKISIKDDGTAIKKQTKTLREFSESDPNVVVVANDPGRCNIAFLTWKKNKVEEKDKGGRKRKMHCEFGSKRLTRERYYVESGVFKSRGPTKKWLSNIQDCLDDLKDNSPKRTSLESFDAYVTVMVNHWDSRWGEMSKSRWGAQRLRLYGGKKRVLARFFNEVQADVGERKTIVIAYGSSKFAPGGKGELSVPTTSAFNAFSDRFKGRVAVIDEFRTTKIWHKDSTTVLQSVQSEKEGRTVRGLLWCSSTMENSKLFVNRDLNAAINIHNCFTMYPTRPGILGRPKKYCKLEVVVGRTIDYKLTGSLQNAVSSEV

SEQ ID NO: 839 - protein, 518 aa, Chlamydomonas sp.
YPFTQPSCQQLDFDRQKSAVALAKKRVGRKEPEGSPLRVRLTKLQERLEKLSEAWLSSKNLRVDADNAKRFFARDVAFCLRGVLPLPSGNTFASRAHMTLPLYHKILSETIEEKRKTKNEKHRTFSLLPYKSGFTLSHIPISKMAFFYMVNECHFDSCKADVASKNHQGIWERFANLKKVETVSRKFGYRIVTDGFAVSILMNKPTCLTCSMPADAFSTRAHEYVTTDGGGIVSFLDNVVVAAVDPGVTDIVTVTGLNGGTRSYSSAQYYRKGLIFKSQRQTDVWNLETADIVGGIIPDRDSSSSEQIGACARFYIGAAPILLAHRASRGYRNLRFRRYCKKQKLIVEIADFVAPREKSAKVLVGFGDWKGLGATPISRRTCGPLQAIRFELRSRENVIMEDIDEFRTSQRCSCCENHLCNMVALTHRKKQDGTSWECTEGSKRIHKILHCKSSQSGAPRQQSGGMLHCGKTWDRDVNASRNILMRTLHQVFGRERPLAFRRDAPRSSSTTPPPPPDI

SEQ ID NO: 840 - protein, 793 aa, Chlamydomonas sp.
LLKMATKPPTVAKLKELLKLAEVPYSSKSNKDDLVRLCEDNGLIARPPPEYKTVEKMCVVKCALKKAMSLDDEEFGKFREHVDQLVNVVSRMLRRSSLVLTFHITSLLEKGLEIPDLYNMKDTYWKDWLRIGVDGIFPDEESKISYEAVKDSIGDVIGNDDADYIKSYPIYFDQVLNYAGHTLSTVVSNNAWVPLIPRLARLTSTTLNKLNAPKTLDTSKIIGGYDVMRAIQQEVQNMEGWPESVQEYVNEVREMLSVPDGSRVYDNYGKDMDFPTMVRFNYWIQKRLEDMDARRIRLMPIFNVQRVHVRLDLKTLVNLFRHMFPTDKNIVELSKWEHVKNPDSFMLPQRPAQKKKKSCCPGEWEAYKSVLKQYDDDVKDIKATDEYRHAKGLYDTLVNARKTVAGSFFRKPPVKNGWVFDCSICTDGVSLSMQYSKTVQVLVSDLKKTCKKPRKEEGIKIAEKYDGSLKTILPDMGIVVLGVDPGRSNIATVTYLADDKNKTWKLTRGAFYHKLGIKKLTGQKELRFADMIPMWESLHENGAALSTSRTDNISAYLSNYAKFSDEWWRLALRRRESRDNLQRYIGKRKVKDSFWAGIKRCMMKELPDMKVCVAYGSAITKLKPTGPGEVAVPTGAMFASCKRIFKEDVSVTDEFKTTLMSWETGKEKEHVYKIPSVCSADVKLRLGGERFGHTKSKTMPKVADCDHLGVRLYNKRKRAQEKHRRGGFATSLVDSQKSIERYPEVRGLRFSPETCIYSDRDRSSALTIARLHCMELMGLGRPLPFAHSSSVDE

SEQ ID NO: 841 - protein, 926 aa, Chlamydomonas sp.
YYSRRNSKMKHISDGRKEFVVKKGSVKKKDFAAFIDTLSLCNNSVVIMDNASIHKNLVLRSPVNICYTPPYSPEFNAIELCFAKVKKDFRRLNYIPNDTNTHVSDMISLAFSNLTDKIIMGCFDHVWNTYEICIKSSVMYKLCKMATKPPTVAKLKELLKLAEVAYSSKDKKDDIVRLCEDNGLIARPPPEYKTVEKMCVVKCALKKAMSLDDEEFGKFRGHVDQLVNVVSRMLRRSSLVLTFHVTRLMEGDLPIPNMYDMKDTYWKDWLRIGVDGVFPDEESRISYEAVKDVIGKVLGSDDPDYINSYPIYFDQVLNYAGHTLSTVVSNNAWVPLVPRLTRLTKATLNAMGAPKTIRVYDVMRVIQQEIQEMESWPESVQEYVREVRVRLKVPDGSRLYDDYGKDMNFPTMVRFNYWMQTRLEAIGARRIRLMPIFNVQRAHVRLDMKTLVNLFRHVFPKDPNIVELSKWKNVKDPDRFMLPLKPAFKKKKSCGPGEWEAYKLSQQKYDADVNDIKATDEYRHAKGRYDTLVNARKTVAGSFFKKPPVKTGWVFDCSICTDGVSLSMHYSKTVQVCVSDLKKTSKRSRDDEGMSVSEQYDHKLKTTLPDMGIAVLGVDPGRSNIATVTYLADDKSKTWKLTRGAFYHKSGIKKQKKQQEKRFSDMIPRWESLRENGAALSTSRKDDISAYLKNYATFSDEWWRMALRRRESRYNFQRYIGKRKAMDSFWAGIKRNMKLDHPDLRVRVAYGSAITTLKATGPGEVAVPTGSMFASCKRLFKEEVHVTDEFKTTLMSWETGAKKECVYKIPSVQITTEGQIRLGYELLGHTPLKETPKVSYRDQLAVRVYCTRKQIQEKHRRGGLAPSLVDNNLIKRYPEVRGLRFSPETSTYSDRDRSSALTIARLHCMELLGQGRPLPFCRDACC

SEQ ID NO: 842 - protein, 701 aa, Chlamydomonas sp.
RPQGGGVQSRFRSIQLGTFDITKRKIILTPLLMGVVQDKGDDDINISVVKKTLNSLCMDVSRHQISSRIQSMVLLINHAVAEAYLFANFHVTRCLDDGDFDVKQLPHLDRNFYYRCLLAVSTSNVRKDTLGQSFNDTMVAFDALRPAGYVKVDVRPWGQVIADVSIQMATMACNSVWANVDRVVIKYLRLKHPSLKKHFKKIVKAVVQYPESKIDTIIPEGLVHAIHIKEVVSHLRALFPLPRGKQFNTRAHLTMRLFHHVLTELGEVRRVDPKDKTTRKSHPRLFSILPRKNGFTISYVPISSMTFMKLLSMGDSPLESVSGDGRYENHTMLWRKYFNVQGLETKRYRFDNRILSDGKGVSVQMKQKGKEEVVEEGENAGYPKDANIVECKDAVGALRVGVDPGMADNVTVASSAGRIESFSSARFSEVAGYNTSKRRTYKWNDETQDLVKSIPSPNTSNMSDLQDHVRAYLKALLILLQHRANKGYRSMRFFRYVGKQKTIEKVCDVIAPRAQTTVVGFGNWSNQGYGISRSCSGPIKEIRRCLSRRKNVLFKNVDERNTSCKCHGCFQRLVNMKADNVVWRGVCKESPIDGSITVEKQKMVVKNVKVHKVLHCRDSVKSASSNVRCGATWNRDVNAAKNLLLLLTTWMDGRERPEAFCVPSPPPKTTVSIEASVSAKPTDPPGFVSSLPCYFFGQLKC

SEQ ID NO: 843 - protein, 793 aa, Chlamydomonas sp.
KMATKPPTVAKLKELLKLAEVPYSSKSNKDDLVRLCEDNGLIARPPPEYKTVEKMCVVKCALKKAMSLDDEEFGKFREHVDQLVNVVSRMLRRSSLVLTFHITSLLEKGLDIPDLYNMKDTYWKDWLRIGVDGIFPDEESKISYEAVKDSIGDVIGNDDADYIKSYPIYFDQVLNYAGHTLSTVVSNNAWVPLIPRLARLTSTTLNKLNAPKTLDTSKIIRGYDVMQAIQQEVQNMEGWPESVQEYVNEVREMLSVPDGSRVYDNYGKDMDFPTMVRFNYWIQTRLEDMDARRIRLMPIFNVQRVHVRLDLKTLVNLFRHMFPNDQNIVELSKWEHVKNPDSFMLPQRPAQKKKKSCGPGEWEAYKSVLKQYDDDVKDIKATDEYRHAKGLYDTLVNARKTVAGSFFRKPPVKNGWVFDCSICTDGVSLSMQYSKTVQVLVSDLKKTCKKPRKEEGIKIAEKYDGSLKTILPDMGIVVLGVDPGRSNIATVTYLADDKNKTWTLTRGAFYHKSGIKKQTRQKELRFADMIPMWESLRENGAALSTSRTDKISAYLSNYAKFSDEWWRLALRRRESRDNLQRYIGKRKVKDSFWAGIKRCMMKELPDMKVCVAYGSAITKLKPTGPGEVAVPTGAMFASCKRIFKEDVSVTDEFKTTLMSWETGKEKERVYKIPSVCSADVKLRLGGERFGHTKSKTMPKVADRDHLGVRLYNKRKGAQEKHRRGGFATSLFDSQKSIERYPEVRGLRFSPETCIYSDRDRSSALTIARLHCMELMGLGRPLPFAHSSSVVVDE

SEQ ID NO: 844 - protein, 374 aa, Chlamydomonas sp.
CRGRRTCGLIESLEKTLTNKEHWESVFDVENIRSTGKGVFTCTIDTDGVMACTHFLRAEKKKISIKDDGTAIKKQTKTLREFSESDPNVVVVANDPGRCNIAFLTWKKNKVEEKDKGGRKRKRHCEFGSKRLTRERYYVESGVFKSRGPTKKWLSNIQECLDNLKDNSPKRTSLVSFDAYVTVMVNHWDSRWGEMSKSRWGAQRLRLYGGKKRVLARFFNEVQEDVGERKTIVVAYGSAKFAPGGKGELSVPTTSAFKAFSDRFKGRVAVIDEFRTTKIWHKDSTTVLQSVQSEKKGRTVRGLLWCSSTMENSKLFVNRDLNAAINIHNCFTMYPIRPGILARPKKYCKLEVVVGRKIDYKLTGSLQNAVSSEV

SEQ ID NO: 845 - protein, 551 aa, Chlamydomonas sp.
METIVNKEPPDKRTRPDRAAKIKDRKNGEENVVKCTLSRIIADKDNKDVIIKVIKERVDSVSKRTYLAGVAVNRILKEVFEGVPDAQLHTVSVPSVDQNFIRQLMVGSRQVHMETRDATVERFFHNNYWFREKIEGREVIVKKKKQYVGAIARYDGDRNLYSHASKKYLTNFNNHYRVHLSTWIKKFVYSKENRILAKEIKDEHGIDETVFHRYLLYDIHSWGVKEDLIAIHSLLLERTKMLLKIQHSILRRDEINRQLLKSVSNSAKMIRYNVFIDRYLEATEDEVYAKLVNIAPIPTIKHAFITIDTDGLLGVLKDVGLIESLKKTLTNKEHWESVFDVENIRSTGKGVFTCTIDTDGVMACTHFLRAEKKKISIKDDGTAIKKQTKTLREFSESDSNVVVVANDPGRCNIAFLTWKKNKVEEKDKGGRKRKRQCEFGSKRLTRERYYVESGVFKLRGPTKKWLSNIQDCLDNLKDNSPKRTSLVSFDAYVTVMVNHWDSRWGEMSKSRWGAQRLRLYGGKKRVLARFFNEVQEDVGERKTIVVAYGSA

SEQ ID NO: 846 - protein, 688 aa, Chlamydomonas sp.
GNVGAILYHQKKKNTHPLLMGVVQDKGDDDINISVVKKTLNSLCMDVSRHQISSRIQSMVLLINHAVAEAYLFANFHITRCLDDGDFDVKQLPHLDRNFYYRCLLAVSTSNVRKDTLGQSFNDTMVAFDALRPAGYVKVDVRPWGQVIADVSIQMATMACNSVWANVDRVVIKYLRLKHPSLKKHFKKIVKAVVQYPESKIDTIIPEGLVHAIHIKEVVSHLRALFPLPRGKQFNTRAHLTMRLFHHVLTELGEVGRVDPKDKKTKKSHPRLFSILPRKNGFTISYVPISSMTFMKLLSMGDSPLESVSGDGRYENHTMLWRKYFNVQGLETKRSRFDNRILSDGKGVSVQMKQKGKEEVVEEGENAGYPKDANIVECKDAVGALRVGVDPGMTDIVTVASSAGRIESFSSARFSEVAGYNTSKRRTYKWNDETQDLVKSIPSPNTSNMVDLQDHVRAYLKALPILLQHRANKGYRSMRFFRYVGKQKTIEKVCDVIAPRAQTTVVGFGNWSNQGYGISRSCSGPIKEIRRCLSRRKNVLFKNVDERNTSCKCHGCFQRLVNMKADSVVWRGVCKESPIDGSITVEKQKMVVKNVKVHKVLHCRDSVKSASSNVRCGATWNRDVNAAKNLLLLLTTWMDGRERPEAFCVPSPPPKTTVSIEASVSAKPTDPPGFVSSLPCYPLGQLKC

SEQ ID NO: 847 - protein, 317 aa, Chlamydomonas sp.
DANIVECKDAVGALRVGVDPGMTDIVTVASSAGRIESFSSARFSEVAGYNTSKRRTYKWNDETQDLVKSIPSPNTSNMVDLQDHVRAYLKALPILLQHRANKGYRSMRFFRYVGKQKTIEKVCDVIAPRAQTTVVGFGNWSNQGYGISRSCSGPIKEIRRCLSRRKNVLFKNVDERNTSCKCHGCFQRLVNMKADSVVWRGVCKESPIDGSISVEKQKMVVKNVKVHKVLHCRDSVKSASSNVRCGATWNRDVNAAKNLLLLLTTWMDGRERPEAFCVPSPPPKTTVSIEASVSAKPTDPPGFVSSLPCYPLGQLKC

SEQ ID NO: 848 - protein, 587 aa, Chlamydomonas sp.
PKQHPRLPHRAGKKTQQSSSHSLRTCVCPHTNNNPTCSDSNCSCKPIFLTNIPDASKSLKSRTSDQGSTSSAQDFYEYWDSSRQDLYRQLLWLPKTGSQGLVSSSLNGFARSTPVRSSFSITKTEPLNTSLEKTSCPSFKYIVADGTVEDATKSNAKPKLRTLKLKLNPTKAQKSMLAEFAGCSRFMYNKVAARLGVGSTHKSVFRIRDRYVTNKVRGEGKMPNPYFKNRQWLLQCPKSVRQSAIKAALANIKACFSNLKAGNIKQFSAPFRRKKTELERGWAIEMDQKNVSKDGDKLFIFKDILGNMRYFGSKQLHKLMPEENPTHDPKVHKSRFGEYFLVLSVAARDRRAERKPVHPDKVATASIDPGVRKTMVTYSPENEESFMLGQGQASDLVKLLLVHDKLQSRLDTEKTLRSKERMKIKMQMIRIRKRIFYLKKEFRDQTTNFLAARYDVLLVPQLETAKMTISAERELTIKVARQMLTLSHSVLFNWLKEKCEEYGTVFLHVLEHYTSQTCPMCGFLNKCGETYTCKNCQFTCDRDIVGAAGIFLKAVRTEKSPGELTPMIPIWRIHCLSYYMSPGPPDV

SEQ ID NO: 849 - protein, 370 aa, Chlamydomonas sp.
MLWRKYFNVQGLETKRSRFDNRILSDGKGVSVQMKQKGKEEVVEEGENAGYPKDANIVECKDAVGALRVGVDPGMTDIVTVASSAGRIESFSSARFSEVAGYNTSKRRTYKWNDETQDLVKSIPLPNTSNMVDLQDHVRAYLKALPILLQHRANKGYRSMRFFRYVGKQKTIGKVCDMIAPRAQTTVVGFGNWSNQGYGISRSCSGPIKEIRRCLSRRKNVLFKNVDERNTSCKCHGCFQRLVNMKADSVVWRGVCKESPIDGSITVEKQKMVVKNVKVHKVLHCRDSVKSASSNVRCGATWNRDVNAAKNLLLLLTTWMDGRERPEAFCVPSPPPKTTVSIEASVSAKPTDPPGFVSSLPCYPLGQLKC

SEQ ID NO: 850 - protein, 561 aa, Chlamydomonas sp.
METIVNKEPPDKRTRPDRAAKIKDRKNGEENVVKCTLSRIIADKDNKDVIIKVIKERVDSISKRTYLAGVAVNRILKEVFEGVPDAQLHTVSVPSIDQNFIRQLMVGSRQAHMETRDATVERFFHNNYWFREKIEGREVIVKKKKQYVGAIARYDGDRNLYSHASKKYLTNFNKHYRVHLSTWIKKFVYSKENRILAKEIKDEHGIDETVFHRYLLYDIHSWGVKEDLIAIHSLLPERTKMLLKIQHSILGRDEINRQWLKSVSNSAKMIRYNVFINRYLEATEDEGYAKLVNIAPIPTVKHAFITIDTDGLLGVLKDVGLIESLEKTLTNKEHWESVFNVENICSTGKGVFTCTIDTDGVMACTHFLRAEKKKISIKDDGTAIKKQTKTLREFSESDPNMVVVANDPGRCNIAFLTWKKNKVEEKDKGGRKRKRHCEFGSKRLTRERYYVESGVFKSRGPTKKWLSNIQDCLDDLKDNSPKRTSLVSFDAYVTVMVNHWDSRWGEMSKSRWGAQRLRLYGGKKRVLARFFNEVQADVGERKTINGRSCLPADFFKFLIRI

SEQ ID NO: 851 - protein, 794 aa, Chlamydomonas sp.
ECSREPVCRSRLHQNVFGVQFVMENGIGESSSLVHEADQHDDVAELVDYEGEEDGECAPGRAICVVKMKLSTFIPHDWLRNKIDTLVLDMNKLLGEGYIFANFHIARLFENGIAVPPVNRNFFYRCLIAVSTNKCKGSTLGEDFESSRLLFDLLREPGQSKVDIRGNVKNQIIADLSILMATMASNHLWTNLERRITTYLKWKYPQIAKRLRSDIVAALIKCPTKNLDVIFKMSPHTTKLPTKLPTSRLRSAKSAVALAKKRVGRKEPEGSPLRVRLTKLQERLEKLSEAWLSSKNLRVDADNAKRFFAREVAFCLRGVLPLPSGNTFASRAHMTLPLYHKILSETIEEKRKTKNEKHRTFSLLPYKSGFTLSHIPISKMAFFYMVNECHFDSCKADVASKNHQGIWERFANLKKVETVSRKFGYRIVTDGFAVSILMNKPTCLTCSMPADAFSTRAHEYVTTDEGGIVSFLDNVVVAAVDPGVTDIVTVTGLNGGTRSYSSAQYYRKGLIFKSQRQTDVWNLETADIVGGIIPERDSSSSEQIGAYARFYMGASPILLAHRASRGYRNLRFRRYCKKQKLIVEIADFVAPREKSAKVLVGFGDWKGLGATPISRRTCGPLQAIRFELRSRENVIMEDIDEFRTSQRCSCCENHLCNMVALTHRKKQDGTGWECTEGRKRIHKILHCKSSQSGAPRQQSGGMLHCGKTWDRDVNASRNILMLTLHQVFGRERPLAFRRDAPRSSSTTPPPPPDTDMGTQTVERFTKEATRNIFENLFNLLHPPTLPKSNDLQSG

SEQ ID NO: 852 - protein, 601 aa, Chlamydomonas sp.
QCIRNLHVLNIRMPCMATNASVKLARPPMPLVSPGPSSVDGRIMARSERSGLQATNVSLTQAASKATSSSRKKNPTVVKSFSTHVCPHTNNNPTCSDSNCSCKPIFLTNIPDASKSLKSLKSRTSDQGSTSSAQDFNEYWDSSRQDLYRQLLWLPKTGSQGLVSSSLNGFARSTPARSSFSITKTEPLKTSLDKTSCPSFKYIVADGMVEYATKSNAKPKLRTLKLKLNPTKAQKSMLAEFAGCSRFMYNKAVAARLGVGSTHKSVFRIRDRYVANKVRGKGKMPNPYFKNRQWLLQCPKSVRQSAIKAALANIKACFSNLKAGNIKQFSAPFRRKKTELERGWAIEMDQKNFSKDGDKLFIFKDILGNMRYFGSKQLHKLMPEENPTHDPKVQKSRFGEYFLVLSVAARDRRAERKPVHPDKVANASINLGVRKTMVTYSPENEESFMLGQGQASDLVKLLLVHDKLQSRLDTEKTLRSKERMKIKKQMIRIRKRIFYLKKEFRDQTTNFLAARYDVLLVPQLETAKMTISAERELTTKVARQMLTLSHSVLFNRLKEKCEEYGTVFLHVLEHYTSQTCPMCGFLNKCGETYTCKNCQFS

SEQ ID NO: 853 - protein, 350 aa, Chlamydomonas sp.
RETLLCTRRGILSRGVLPLPSGNTFASRAHMTLPLYHKILSETIEEKRKTKNEKHRTFSLLPYKSGFTLSHIPISKMAFFYMVNECHFDSCKADVASKNHQGIWERFANLKKVETVSRKFGYRIVTDGFAVSILMNKPTCLTCSMPADAFSTQAHEYVTTDEGGIVSFLDNVVVAAVDPGVTDIVTVTGLNGGTRSYSSAQYYRKGLIFKSQRQTDVWNLETADIVGGIIPDRDSSSSEQIGAYARFYMGAAPILLAHRASRGYRNLRFRRYCKKQKLIVEIADFVAPREKSAKVLVGFGDWKGLGATPISRRTCGPLQAIRFELRSRENVIMEDIDEFRKRHRRYLVLL

SEQ ID NO: 854 - protein, 794 aa, Chlamydomonas sp.
ECSREPVCRSRLHQNVFGVQFVMENGIGESSSLVHEADQHDDVAELVDYEGEEDGECAPGRAICVVKMKLSTFIPHDWLRNKIDTLVLDMNKLLGEGYIFANFHIARLFENGIAVPPVNRNFFYRCLIAVSTNKCKGSTLGEDFESSRLLFDLLREPGQSKVDIRGSVKNQIIADLSILMATMASNHLWTNLERRITTYLKWKYPQIAKRLRSDIVAALIKCPTKNLDVIFKMSPHTTKLPTKLPTSRLRSAKSAVALAKKRVGRKEPEGSPLRVRLTKLQERLEKLSEAWLSSKNLRVDADNAKRFFAREVAFCLRGVLPLPSGNTFASRAHMTLPLYHKILSETIEEKRKTKNEKHRTFSLLPYKSGFTLSHIPISKMAFFYMVNECHFDSCKADVASKNHQGIWERFANLKKVETVSRKFGYRIVTDGFAVSILMNKPTCLTCSMPADAFSTRAHEYVTTDEGGIVSFLDNVVVAAVDPGVTDIVTVTGLNGGTRSYSSAKYYRKGLIFKSQRQTDVWNLETADIVGGIIPDRDSSSSEQIGAYARFYMGAAPILLAHRASRGYRNLRFRRYCKKQKLIVEIADFVAPRKKSAKVLVGFGDWKGLGATPISRRTCGPLQAIRFELRSRENVIMEDIDEFRTSQRCSCCENHLCNMVALTHRKKQDGTGWECTEGRKRIHKILHCKSSQSGAPRQQSGGMLHCGKTWDRDVNASRNILMLTLHQVFGRERPLAFRRDAPRSSSTTPPPPPDTDMGTQTVERFTKEATRNIFENLFNLLHRSTLPKSNDLQSG

SEQ ID NO: 855 - protein, 450 aa, Chlamydomonas sp.
SRRLHVAQRPARKKKRSCGPGEWEAYNSALKQYDDDVKDIKATDEYRHAKGLYDTLVNARKTVADSFFRKPPVKNGWVFDCSICTDGVSLSMQYSKKVQVRVSDIKKTSMRSRDNEGLSVAEQYDRKLETTLTEMGIVVLGVDPGRSNIATVTYLAKGKSKTWKLTRGAFYHKSGIKKQKKQQEKRFSDMIPRWESLRENGAALSTSRKDDISAYLKNYATFSDKWWKMALRRRESRDNFQRYIGKRKAMDSFWAGIKRNMKLDHPDLRVRIAYGSAIKTMKATGPGEVAVPTGSMFASCKRLFKEEVHVTDEFKTTLMSWETGAKKECVYKIPSVQITTEGQIRLGYELLGHTPLKETPKVSYRDQLAVRVYCTRKKIQEKHRRGGLAPSLVDNKSIKRYPEVRGLRFSPETSTYSDRDRSSALTIARLHCMELLGQGRPLPFCRDACC

SEQ ID NO: 856 - protein, 277 aa, Chlamydomonas sp.
ESVFDVENICSIGKGVLTCTIDTDGVMACTHFLRAEKKKISIKDDGTAIKKQTKTLREFSESDPNVVVVANDPGRCNIAFLTWKKNKVEEKDKGGRKRKRHCEFGSKRLTRERYYVESGVFKSRGPTKKWLSNIQDCLDDLKDNSPKRTSLVSFDAYVTVMVNHWDSRWGEMSKSRWGAQRLRLYGGKKRVLARFFNEVHADVGERKTIVVACGSAKFAPGGKGEISVPTTSAFKAFSDRFKGRVAVTDEFRTTQIWHKDSTTVLQSVQSKKEGRTV

SEQ ID NO: 857 - protein, 735 aa, Chlamydomonas sp.
NAPLKKAMSLDDEEFGKFREHVDQLVNVVSRMLRRSSLVLTFHITSLLEKGLEIPDLYNMKDTYWKDWLRIGVDGIFPDEESKISYEAVKDSIGDVIGNDDADYIKSYPIYFDQVLNYAGHTLSTVVSNNAWVPLIPRLARLTSTTLNKLNAPKTLDTSKIIRGYEVMQAIQQEVQNMEGWPESVQEYVNEVREMLSVPDGSRVYDNYGKDIDFPTMVLFNYWIQTRLEDMDARRIRLMPIFNVQRVHVRLDLKTLVNLFRHMFPNDQNIVELSKWEHVKNPDSFMLSQRPAQKKKRSCGPGEWEAYKSVMKQYDDDVKDIKATDEYRHAKGLYDTLVNARKTVAGSFFRKPPVKNGWVFDCSICTDGVSLSMQYSKTVQVLVSDLKKTCKNPRKEEGIKIAEKYDGSLKTILPDMGIVVLGVDPGRSNIATVPYLADDKNKTWKLTRGAFYHKSGIKKQTRQKELRFADMIPMWEALRENGAALSTSRTDNISAYLSNYAKFSEEWWRLALRRRESRDNLQRYIGKRKVKESFWAGIKRCMMKELPDMKVCVAYGSAITKLKPTGPGEVAVPTGAMFASCKRIFKEDVSVTDEFKTTLMSWETGKEKERVYKIPSVCSADVKLRLGGERFGHTKSKTMPKVADCDHLGVRLYNKRKGAQEKHRRGGFATSLVDSQKSIERYPKVRGLRFSPETCIYSDRDRSSALTIARLHCMELMGLGRPLPFSHSSSVVVDE

SEQ ID NO: 858 - protein, 409 aa, Chlamydomonas sp.
KRKQQKKRPRLFSILPRKSGFTISYVPISSMTLMKLLSMGDSPLESFRGDGRHENHSMLWRKYFNVQGLETKGSRFDNRILSDGKGVSVQMKHQASEDVAVEGGDNAGYPKDAILEDCQDASLRVGVDPGMTDIVTVASSAGRVESFSSARFSEAAGYNTSNRRTNKWNVDTQDLVKSIPSPTTSSMHDMQDHVRGYLSALPTLLQHRASRGYRSMRFFRYVGKQKTIEKVCDLIAPKAQKKTIEEKVCDVIAPKAQKTIVGFGNWSNQGYGISRSCSGPVKEIRKCLSRRQNVLFKNVDERNTFCTCHGCFQKLINMKADSVVWRRVQNEPPSLINGAPTTTTTTTLWCNLEPRRERCQEPSSASDDVDGRERATGDILCALIIAHPKNHSFRRGKCGRSTNRPTWVS

SEQ ID NO: 859 - protein, 813 aa, Chlamydomonas sp.
PRMEHVCDVCIKSSVMYKLCKMATKPPTVAKLKELLKLAEVAYSSKDKKDDIVRLCEDNGLIARPPPEYKTVEKMCVVKCALKKAMSLDDEEFGKFREHVDQLVNVVSRMLRRSSLVLTFHITSLLEKGLDIPDLYNMKDTYWKDWLRIGVDGIFSDEESKISYEAVKDSIGDVIGNDDADYIKSYPIYFDQVLNYAGHTLSTVVSNNAWVPLIPRLARLTSTTLNKLNAPKTLDTSKIIRGYDVMQAIQQEVQNMEGWPESVQEYVNEVREMLSVPDGSRVYDNYGKDMDFPTMVRFNYWIQTRLEDMDARRIRLMPIFNVQRVHVRLDLKTLVNLFRHMFPNDQNIVELSKWEHVKNPDSFMLSQRPAQKKKKSCGPGEWEAYKSVMKQYDDDVKDIKATDEYRHAKGLYDTLVNARKTVAGSFFRKPPVKNGWVFECSICTDGVSLSMQYSKTVQVLVSDLKKTCKNPRKEEGIKIAEKYDGSLKTIFPDMGIVVLGVDPGRSNIATVTYLADDKNKTWKLTRGAFYHKSGIKKQTRQKELRFADMIPMWESLRENGAALSTSRTDNISAYLSNYAKFSDEWWRLALRRRESRDNLQRYIGKRKVKDSFWAGIKRCMMKELPDMKVCVAYGSAITKLKPTGPGEVAVPTGAMFASCKRIFKEDVSVTDEFKTTLMSWETGKEKERVYKIPSVCSADVKLRLGGERFGHTKSKTMPKVADCDHLGVRLYNKRKGAQEKHRRGGFATSLVDSQKSIERYPEVRGLRFSPETCIYSDRDRSSALTIARLHCMELMGLGRPLPFAHSSSVVVDE

SEQ ID NO: 860 - protein, 590 aa, Chlamydomonas sp.
RLTWKWKYPQIAKRLRSDIVAAVIKCPTKNLDVIFKMSPHTTKLPTKLPTTRLRSAKSAVALAKKRVGRKEPEGSPLRVRLTKLQERLEKLSESWLSSKNIRVDADNAKRFFARDMAFCLRGVLPLPSGNTFASRAHMTLPLYHKILSETIEEKRKTKNEKHRTFSLLPYKSGFTLSHIPISKMAFFYMVNECHFDSCKADVASKNHQGIWERFANLKKVETVSRKFGYRIVTDGFAVSILMNKPTCLTCSMPADAFSTRAHEYVTTDEGGIVSFLDNVVVAAVDPGVTDIVTVTGLNGGTRSYSSAQYYRKGLIFKSQRQTDVWNLETADIVGGIIPDRDSSSSEQIGAYARFYMGAAPILLAHRASRGYRNLRFRRYCKKQKLIVEIADFVAPREKSAKVLVGFGDWKGLGATPISRRTCGPLQAIRFELRSRENVIMEDIDEFRTSQRCSCCENHLCNMVALTHRKKQDGTGWECTEGRKRIHKILHCKSSQSGAPRQQSGGMLHCGKTWDRDVNASRNILMLTLHQVFGRERPLAFRRDAPRSSSTTPPPDTDMGTQTVERFTKEATRNIFENLFNLSHAIACLPT

SEQ ID NO: 861 - protein, 686 aa, Chlamydomonas sp.
METIVNKEPPDKRTRPDRAAKIKDRKNGEENVVKCTLSRIIADKDNKDVITKVIKERVDSVSKRTYLAGVAVNRILKEVFEGVPDAQLHTVSVPSVDQNFIRQLMVGSRQAHMETRDATVERFFHNNYWFREKIEGREVIVKKKKQYVGAIARYDGDRNLYSHASKKYLTNFNNHYRVHLSTWIKKFVYSKENRILAKEFKDEHGIDETVFHRYLLYDIHSWGVKEDLIAIHSLLPERTKMLLKIQHSIIGRDEINRQWLKSVSNSAKMIRYNVFINRYLEATEDEGYAKLVNIAPIPTVKHSFITIDTDGLLGVLKDVGLVESLEKTLTNKEHWESVFDVENIRSTGKGVFTCTIDTDGVMACTHFLRAEKKKISIKDDGTAIKKQTKTLREFSESDPNVVVVANDPGRCNIAFLTWKKNKVEEKDNGGRKRKRHCEFGSKRLTRERYYVESGVFKSRGPTKKWLSNIQDCLDDLKDNSPKRTSLESFDAYVTVMVNHWDSRWGEMSKSRWGAQRLRLYGGKKRVLARFFNEVQADVGERKTIVIAYGSSKFAPGGKGELSVPTTSAFNAFRDRFKGRVAVIDEFRTTKIWHKDNTTVLQSVQSEKKGRTVRGLLWCSSTMENSKLFVNRDLNAAINIHNCFTMYPTRPGILARPKKYCKLEVVVGRTIDYKLTGSLQNAVSSEV

SEQ ID NO: 862 - protein, 786 aa, Chlamydomonas sp.
ECSREPVCRSRLHQNVFGVQFVMENGIGESSSLVHEADQHDDVAELVDYEGEEDGECAPGRAICVVKMKLSTFIPHDWLRNKIDTLVLDMNKLLGEGYIFANFHIARLFENGIAVPPVNRNFFYRCLIAVSTNKCKGSTLGEDFESSRLLFDLLREPGQSKVDIRGSVKNQIIADLSILMATMASNHLWTNLERRITTYLKWKYPQIAKRLRSDIVAALIKCPTKNLDVIFKMSPHTTKLPTKLPTSRLRSAKSAVALAKKRVGRKEPEGSPLRVRLTKLQERLEKLSEAWLSSKNLRVDADNAKLFFAREVAFCLRGVLPLPSGNTFASRAHMTLPLYHKILSETIEEKRKTKNEKHRTFSLLPYKSGFTLSHIPISKMAFFYMVNECHFDSCKADIASKNHQGIWERFANLKKVETVSRKFGYRIVTDGFAVSILMNKPTCLTCSMPADAFSTRAHEYVTTDEGGIVSFLDNVVVAAVDPGVTDIVTVTGLNGGTRSYSSAKYYRKGLIFKSQRQTDVWNLETADIVGGIIPDRDSSSSEQIGAYARFYMGAAPILLAHRASRGYRNLRFRRYCKKQKLIVEIADFVAPRKKSAKVLVGFGDWKGLGATPISRRTCGPLQAIRFELRSRENVIMEDIDEFRTSQRCSCCENHLCNMVALTHRKKQDGTGWECTEGRKRIHKILHCKSSQSGAPRQQSGGMLHCGKTWDRDVNASRNILMLTLHQVFGRERPLAFRRDAPRSSSTTPPPDTDMGTQTVERFTKEATRNIFENLFNLSHAIACLPT

SEQ ID NO: 863 - protein, 307 aa, Chlamydomonas sp.
RSSRVFQLCPRVSESSWVQYQQSSHKWNADTQDLVKSIPSPTTSSMQDHVRGYLSALPTLLQHRANRGYRSMRFFRYVGKQKTIEKVCDLIAPKAQKKTIEEKGCDVIAPKAKKTVVGFGNWSNQGYGISRSCSGPVKEIRKCLSRRQNVLFKNVDERNTSCTCHGCFQKLVNMKADSVVWRRVQNEPSALIDGAPTTTTTIEKQKTVVKNVKVHKVLHCRNSVKSASSNVRCGATWNRDVNAAKNLLLLLTTWMDGKERPAAFCVPSSSPPPKTTVSGEENVGAQQTDPPGSVSSLQLLSSGQLKC

SEQ ID NO: 864 - protein, 793 aa, Chlamydomonas sp.
KMATKPPTVAKLKELLKLAEVPYSSKSNKDDLVRLCEDNGLIARPPPEYKTVEKMCVVKCALKKAMSLDDEEFGKFREHVDQLVNVVSRMLRRSSLVLTFHITSLLEKGLDIPDLYNMKDTYWKDWLRIGVDGIFPDEESKISYEAVKDSIGDVIGNDDADYIKSYPIYFDQVLNYAGHTLSTVVSNNAWVPLIPRLARLTSTTLNKLNAPKTLDTSKIIRGYDVMQAIQQEVQNMEGWPESVQEYVNEVREMLSVPDGSRVYDNYGKDMDFPTMVRFNYWIQTRLEDMDARRIRLMPIFNVQRVHVRLDLKTLVNLFRHMFPNDQNIVELSKWEHVKNPESFMLPQRPAQKKKKSCGPGEWDAYKSVLKQYDDDVKDIKATDEYRHAKGLYDTLVNARKTVAGSFFRKPPVKNGWVFDCSICTDGVSLSMQYSKTVQVLVSDLKKTCKKPRKEEGIKIAEKYDGSLKTILPDMGIVVLGVDPGRSNIATVTYLADDKNKTWKLTRGAFYHKSGIKKQTRQKELRFADMIPMWESLRENGAALSTSRTDKISAYLSNYAKFSDEWWRLALRRRESRDNLQRYIGKRKVKDSFWAGIKRCMMKELPDMKVCVAYGSAITKLKPTGPGEVAVPTGAMFESCKRIFKEDVSVTDEFKTTLMSWETGKEKERVYKIPSVCSADVKLRLGGERFGHTKSKTMPKVADCDHLGVRLYNKRKGAQEKHRRGGFATSLVDSQKSIERYPEVRGLLFSPETCIYSDRDRSSALTIARLHCMELMGLGRPLPFAHSSSVVVDE

SEQ ID NO: 865 - protein, 686 aa, Chlamydomonas sp.
METIVNKEPPDKRTRPDRAAKIKDRKNGEENVVKCTLSRIIADKDNKDVITKVIKERVDSVSKRTYLAGVAVNRILKEVFEGVPDAQLHTVSVPSVDQNFIRQLMVGSRQAHMETRDATVERFFHNNYWFREKIEGREVIVKKKKQYVGAIARYDGDRNLYSHASKKYLTNFNNHYRVHLSTWIKKFVYSKENRILAKEFKDEHGIDETVFHRYLLYDIHSWGVKEDLIAIHSLLPERTKMLLKIQHSIIGQDEINRQWLKSVSNSAKMIRYNVFINRYLEATEDEGYAKLVNIAPIPTVKHSFITIDTDGLLGVLKDVGLVESLEKTLTNKEHRESVFDVENIRSTGKGVFTCTIDTDGVMACTHFLRAEKKKISIKDDGTAIKKQTKTLREFSESDPNVVVVANDPGRCNIAFLTWKKNKVEEKDNGGRKRKRHCEFGSKRLTRERYYVESGVFKSRGPTKKWLSNIQDCLDDLKDNSPKRTSLESFDAYVTVMVNHWDSRWGEMSKSRWGAQRLRLYGGKKRVLARFFNEVQADVGERKTIVIAYGSSKFAPGGKGELSVPTTSAFNAFRDRFKGRVAVIDEFRTTKIWHKDSTTVLQSVQSEKKGRTVRGLLWCSSTMENSKLFVNRDLNAAINIHNCFTMYPTRPGILARPKKYCKLEVVVGRTIDYKLTGSLQNAVSSEV

SEQ ID NO: 866 - protein, 621 aa, Chlamydomonas sp.
QCIRNLHVLNIRMPCMATNASVKLARPPMPLVSPGPSSVDGRIMAQSERSGLQATNVSLTQAASKATSSSRKKNPAVVKSFSTHVCPHTNNNPTCSDSNCSCKPIFLTNIPDASKSLKSRTSDQGSTSSAQDFYEYWDSSQQDLYRQLLWLPKTGSQGLVSSSLNGFARSTPARSSFSITKTEPLKTSLEKTSCPSFKYIVADGTVEDATKSNAKPKLRTLKLKLNPTKAQKSMLVEFAGCSRFMYNKAVAARLGVGSTHKSVFRIRDRYVTNKVRGEGKMPNPYFKNRQWLLQCPKSVRQSAIKAALANIKACFSNLKAGNIKQFSAPFRRKKTELERGWAIEMDQKNVSKDGDKLFIFKDILGNMRYFGSKQLHKLMPEENPTHDPKVKKSRFGEYFLVLSVAARDRRAERKPVHPDKVATASIDPGVRKTMVTYSPENEESFMLGQGQASDLVKLLLVHDKLQSRLDTEKNLRSKERMKIKMQMIRIRKRIFYLKKEFRDQTTNFLAARYDVLLVPQLETAKMTISAERELTTKVARQMLTLSHSVLFNRLKEKCEEYGTVFLHVLEHYTSQTCPMCGFLNKCGETYTCKNCQFTCFRDIVGAAGIFLKAVRTENPCS

SEQ ID NO: 867 - protein, 794 aa, Chlamydomonas sp.
ECSREPVCRSRLHQNVFGVQFVMENGIGVSSSLVHEADQHDEVAELVDYEGEEDEECAPGRAICVVKMKLSTFTPHDWLRNKIDTLILDMNKLLGEGYIFSNFHIARLFENGIAVPPVNRNFFYRCLIAVSTNKCKGSTLGEDFESSRLLFDLLREPGQSKVDIRGNVKNQIIADLSILMATMASNHLWTNLERRITTYLKWKYPQIAKRLRSDIVAALIKCPTKNLDVIFKVSPHTTKLPTKLPTARLRSAKSAVALAKKRVGRKEPEGSPLRVRLTKLQERLEKLSEAWLSSKNIRVDADNAKRFFARDVAFCLRGGLPLPSGNTFASRAHMTLPLYHKILSETIEEKRKTKNEKHRTFSLLPYKSGFTLSHIPISKMAFFYMVNECHFDSCKADVASKNHQGIWERFANLKKVETVSRKFGYRIVTDGFAVSILMNKPTCLTCSMPADAFSTRAHEYVTTDEGGIVSFLDNVVVAAVDPGVTDIVTVTGLNGGTRSYSSAQYYRKGLIFKSQRQTDVWNLETADIVGGIIPDRDSSSSEQIGAYARFYMGAAPILLAHRASRGYRNLRFRRYCKKQKLIVEIADFVAPREKSAKVLVGFGDWKGLGATPISRRTCGPLQAIRFELRSRENVIMEDIDEFRTSQRCSCCENHLCNMVALTHRKKQDGTGWECTEGRKRIHKILHCKSSQSGAPRQQSGGMLHCGKTWDRDVNASRNILMLTLHQVFGRERPLAFRRDAPRSSSTTPPPPPDTDMGTQTVERFTKEATRNIFENLFNLLHPPTLPKSNDLQSG

SEQ ID NO: 868 - protein, 278 aa, Chlamydomonas sp.
ETWYKSGIKKQKKQQEKRFSDMIPRWESLRENGAALSTSRTDDISAYLKNYATFSDEWWRMALLRRESRDNFQRYIGKRKAMDSFWAGIKRNMKLDHPDLRVRVAYGSAITTLKATGPGEVAVPTGSMFASCKEEVHVTDEFKTTLMSWETGAKKECVYKIPSVQITTEGQIRLGYELLGHTPLKETPKVSYRDQLAVRVYCARKQIQEKHRRGGLAPSLVDNNSIKRYPEVRGQRFSPETSTYSDRDRSSALTIARLHCMELLGQGRPLPFCRDACC

SEQ ID NO: 869 - protein, 310 aa, Chlamydomonas sp.
FKRVHMNTSEKTLHLGNTQFIFQQKNKKFPTNPYFKRVHTEPPLKGLSHLGNNNYFKQKIRNHQSIPILWKRLCLCLVPWVGKQKTIEKVCDLIAPKAQKKTIEEKVCDVIAPKAKKTVVGFGNWSNQGYGISRSCSGPVKEIRKCLSRRQNVLFKNVDERNTSCTCHGCFQKLVNMKADSVVWRRVQNEPSALIDGAPTTTTTTTFEKQKTVVKNVKVHKVLHCRNSVKSASSNVRCGATWNRDVNAAKNLLLLLTTWMDGKERPAAFCVPSSSPTPKTTVSGEANVGAQPTDPPGSVSSLQLLSSGPA

SEQ ID NO: 870 - protein, 446 aa, Chlamydomonas sp.
KRKQQKKRPRLFSILPRKSGFTISYVPISSMTLMKLLSMGDSPLESFRGDGRHENHSMLWRKYFNVQGLETKGSRFDNRILSDGKGVSVQMKHQASEDVAVDNAGYPKDAILENCQDASLRVGVDPGMTDIVTVASSDGRVESVSSARFSEAAGYNTSNRRTNKWNVDTQDLVKSIPSPTTSSMHDMQDHVRGYLSALPTLLQHRASRGYRSMRFFRYVGKQKTIEKVCDLIAPKAQKKTIEEKVCDVIAPRAQTTVVGFGNWSNQGYGISRSCSGPIKEIRRCLSRRKNVLFKNVDERNTSCTCHGCFQKLVNMKADSVVWRRVQNEPPSLINGAPTTTTTIEKQKTVVKNVKVHKVLHCRNSVKSASSKVRCGATWNRDVNAAKNLLLLLTTWMDGKERPATFCVPSSSPTPKTTVSGEANVGAQPTDPLGSVSSLQLLSSGPA

SEQ ID NO: 871 - protein, 701 aa, Chlamydomonas sp.
YQDKKRTLPPSISMGVVTNNGDDDDDLDIMVVKKTLNSLCMDVSRQQICSRIQSMVLVINHAVAEAYLFANFHITRCLDDVDFDVKQLPHLDRNFYYRCILAVSTSNVRKDTLGQSLKDSMVAFDALRPAGYLKVDVRQWGQVIADVSIQMATMACNSVWANVDRVVIKYLRLKHPSLKKHFNKIVKAVVQYPESDIDKIIPASLVHANLIKDVVRRLRDLLPLPRGKQFNTRAHLTMRLFHHVLTELGADLKEKTTKKRPRLFSILPRKSGFTISYVPISSMTLMKLLSMGDLPLESFRGDGRHENHSMLWRKYFNVQGLETKGSRFDNRILSDGKGVSVQMKHQASEDVAVEGGDNAGYPKDASIEDCQDASLRVGVDPGMTDIVTVASSAGRVESFSSACFSEAAGYNTSNRRTNKWNVDTQDLVKSIPSPTTSSMHDMQDHVRGYLSALPTLLQHRASRGYRSMRFFRYVGKQKTIEKVCDLIAPKAQKKTIEEKVCDVIAPKAQKTIVGFGNWSNRGYGISRSCSGPVKEIRKCLSRRQNVLFKNVDERNTSCTCHGCFQKLINMKADSVVWRRVQNEPPSLINGAPTTTTTIEKQKTVVKNVKVHKVLHCRNSVKSASSNVRCGATWNRDVNAANNLLLLLTTWMDGKERPATFCVPSSSPTPKTTVSGEANVGAQPTDPPGSVSSLQLLSSGPA

SEQ ID NO: 872 - protein, 637 aa, Chlamydomonas sp.
ISSRIQSMVLLINHAVAEAYLFANFHITRCLDDGDFDVKQLPHLDRNFYYRCLLAVSTSNVRKDTLGQSFNDTMVAFDALRPAGYVKVDVRPWGQVIADVSIQMATMACNSVWANVDRVVIKYLRLKHPSLKKHFKKIVKAVVQYPESKIDTIIPEGLLHAIHIKEVVSHLRALFPMPRGKQFNTRAHLTMRLFHHVLTELGEVGRVDPKDKKTRKSHPRLFSILPRKNGFTISYVPISSMTFMKLLSMGDSPLESVSGDGRYENHTMLWRKYFNVQGLETKRSRFDNRILSDGKGVSVQMKQKGKEEVVEEGENAGYPKDANIVECNDAVGALRVGVDPGMTDIVTVAFSAGRIESFSSARFSEVAGYNTSKRRTYKWNDETQDLVKSIPSPNTSNMSDLQDHVRAYLKALPILLQHRANKGYRSMRFFRYVGKQKTIEKVCDVIAPRAQTTVVGFGNWSNQGYGISRSCSGPIKEIRRCLSRRKNVLFKNVDERNTSCKCHGCFQRLVNMKADSVVWRGVCKESPIDGSIIVEKQKMVVKNVKVHKVLHCRDSVKSASSNVRCGATWNRDVNAAKNLLLLLTTWMDGRERPEAFCVPSPPPKTTVSIEASVSAKPTNPPGFVSSLPCYPLGQLKC

SEQ ID NO: 873 - protein, 509 aa, Chlamydomonas sp.
VGYRQNHPSESRACEPHQRRCQTPERSLAAAKGEAVQHSSAPDNETVSSRAYRVGSGSKRENKKKRPRLFSILPRKSGFTISYVPISSMTLMKLLSMGDSPLESFRGDGRHENHSMLWRKYFNVQGLETKGSRFDNRILSDSKGVSVQMKHQASEDVAVEGGDNAGYPKDAILEDCQDASLRVGVDPGMTDIVTVASSAGRVESFSSARFSEAAGYNTSYRRTNKWNVDTQDLVKSIPSPTTSSMHDMQDHVRGYLSALPTLLQHRASRGYQSMRFFRYVGKQKTIEKVCDLIAPKAQKKTIEEKVCDVIAPKAQKTIVGFGNWSNQGYGISRSCSGPVKEIRKCLSRRQNVLFKNVDERNTSCTCHGCFQKLVNMKADSVVWRRVQNEPPSLINGAPTTTTTTTIEKQKTVVKNVKVHKVLHCRNSVKSASSNVRCGATWNRDVNAAKNLLLLLTTWMDGKERPATFCVPSSSPTPKTTVSGEANVGAQPTDSPGSVSSLQLLSSGPA

SEQ ID NO: 874 - protein, 549 aa, Chlamydomonas sp.
METIVNKEPPDKRTRPDRAAKIKDRKNGEENVVKCTLSRIIADKDNKDVITKVIKERVDSVSKRTYLAGVAVNRILKEVFEGVPDAQLHTVSVPSVDQNFIRQLMVGSRQAHMETRDATVERFFHNNYWFREKIEGREVIVKKKKQYVGAIARYDGDRNLYSHASKKYLTNFNNHYRVHLSTWIKKFVYSKENRILAKEFKDEHGIDETVFHRYLLYDIHSWGVKEDLIAIHSLLPEQTKMLLKIQHSIIGRDEINRQWLKSVSNSAKMIRYNVFINRYLEATEDEGYANLVNIAPIPTVKHAFITIDTDGLLGVLKDVGLVESLEKTLTNKEHWESVFDVENIRSTGKGVFTCTIDTDGVMSCTHFLRAEKKKISIKDDGTAIKKQTNTLREFSESDPNVVVVANDPGRCNIAFLTWKKNKVEEKDKGGRKRKRHCEFGSKRLTRERYYVESGVFKSRGPTKKWLSNIQDCLDDLKDNSPKRTSLESFDAYVTVMVSHWDSRWGEMSKSRWGAQRLRLYGGKKRVLARFFNEVQADVGERKTIVIRFF

SEQ ID NO: 875 - protein, 598 aa, Chlamydomonas sp.
ATYLKWKYPQIAKRLRSDIVAAVIKCPTKNLDVIFKMSPHTTKLPTKLPTARLRSAKSAVALAKKRVGRKEPEGSPLRVRLTKLQARLEKLSEAWLSSKNLRVDADNAKRFFARDVAFCLRGVLPLPPGNTFASRAHMTLPLYHKILSETIEEKRKTKNEKHRTFSLLPYKSGFTLSHIPISKMAFFYMVNECHFDSCKADVASKNHQGIWERFANLKKVETVSRKFGYRIVTDGFAVSILMNKPTCLTCSMYADAFSTRAHEYVTTDESGIVSFRDNVVVAAVDPGVTDIVTVTGLDGGTRSYSSAQYYRKGLIFKSQRQTDVWNLETADIVGDIIPDRDSSRSEQIGAYARFYMGAAPILLAHRASRGYRNLRFRRYCKKQKLIVEIADFVAPKEKRAKVLVGFGDWNGLGATPISRRTCGPLQAIRFELRSRENVIMEDVDKFRTSQRCSCCENRLCNMVALTHRKKQDGTGWDCTEGRNRIHKILHCKSSQSGAPRQQSGGRLHCGKTWDRDVNASRNILMLTLHQVFGRERPLAFRRDAPRSSSKTPPPPPDTDMGTQTVERFTKEATRNIFENLFNLLHLPTLPKSNDLQSG

SEQ ID NO: 876 - protein, 660 aa, Chlamydomonas sp.
CFTTAMGDDDSCIMVVKTTLNSLCRDTSRQQLCSRIREMVGTMNKVVAEAYLFANFHVTRCLDNPTFDVEFLPKLDRNFYYRCLLAVSRSNIRKGSLGESLTASMDAFDGLRPEGCPKTDVRPWGQVVADLSIQMATMACNSVWSNLSKIVVKYLRLKYPSLKKHFDRIVKAVVQFPKSDINNFVPSNIGNAVEVKSVINHLWSLLPTSTGNQFNTRAHLTMRLFHSVLSELVSSSSSEPNRRAPRLFSLLPRKIGFTISYIPISSMIFMKILSMGNTPLEKIRGDGRLEDHDRLWRKYFNIGSVETKVSRFDCRIITDGKGVSIQMRRELGQCLMETSGYPKDSSIGECIDATTHRNARCAGVDPGMTDIATVAFSGGGGTQSFSSSHFSHTAGYKTSKRRTDKWNVETSELVKSIPTSMTTSMDGMERHVQAYLVALPTLLQHRTNKGYRSMRFFRYVGKQKAIEEVCDMIAPRDTPTIVGFGNWSNQGNGISRPCSGPVKEFRKRLSHMGNVLFKNIDERNTSCTCHGCFERLVNMKANSVRWRRGQIGQLGVAVKEKVMVKNVKVHKKLHCCNSVGSAPSVRCGTTWNRDVNASKNILLLLMTWVAGQERPAAFCVPSKNKITTSREATEMLRPVDPSLGSIGHTRLLSSVHQLKC

SEQ ID NO: 877 - protein, 512 aa, Chlamydomonas sp.
QDRREVSTPKVSFIKKHFDRIVKAVVQFPKSDINNFVPSNIGNAVEVKSVINHLWSLLPTSTGNQFNTRAHLTMRLFHSVLSELVSSSSSEPNRRAPRLFSLLPRKIGFTISYIPISSMIFMKILSMGNTPLEKIRGDGRLEDHDRLWRKYFNIGSVETKVSRFDCRIITDGKGVSIQMRRELGQCLMETSGYPKDSSIGECIDATTHRNARCAGVDPGMTDIATVAFSGGGGTPSFSSSHFSHTAGYKTSKRRTDKWNVETSELVKSIPTSMTTSMDGMERHVQAYLVALPTLLQHRTNKGYRSMRFFRYVGKQKAIEEVCDMIAPRDTPTIVGFGNWSNQGNGISRPCSGPVKEIRKRLSHRGNVLFKNIDERNTSCTCHGCFERLVNMKANSVRWRRGQIGQLGVAVKEKVMVKNVKVHKILHCCNSVGSAPSVRCGTTWNRDVNASKNILLLLMTWVAGQERPAAFCVPSKNKITTSREATEMLRPVDPSLGSIGHTRLLSSVHQLKC

SEQ ID NO: 878 - protein, 343 aa, Chlamydomonas sp.
CFTTAMGDDDSCIMVVKTTLNSFCRDTSRQQLCSRIREMVSTMNQVVAEAYLFANFHVTRCLDDPTFEVECLPKLDRNFYYRCLLAVSRSNIRKGTLGESLTTSMDAFDGLRPEGCPKTDVRPWGQVASDLSIQMATMACNSVWSNLSKIIVKYLRLKYPSLKKHFDRIVKAVVQFPKSDINNFVPSIRKRLSQRGNVLFKNIDERNTSCICHGSFERLVNMKANSVRWRRGQIGQLGVSVKEKVMVKNVKVHKILHCCNSVGSAPSVRCGTTWNRDVNASKNILLLLMTWVAGQERPAAFCVPSKNKITTSREATEMLRPVDPPLGSIGHTRFLSSEHQLKC

SEQ ID NO: 879 - protein, 238 aa, Chlamydomonas sp.
AIAYHVRAYLEALPILLQHRANKGYRSMQFFRYVGKQKTIEKVCDVIAPRAQTTVVGFGNWSNQGYGISRSCSGPIKEIRRCLSRRNNVLFKNVDERNTSCKCHGCFQRLVNMKADSVVWRGVCKESPIDGSITVEKQKMVVKNVKVHKVLHCRDSVKSASSNVRCGATWNRDVNAAKNLLLLLTTWMDGTERPEAFRVPSPPPKTAVSIEASVSAKPTDPPGFVSSLPCYPLGQLKC

SEQ ID NO: 880 - protein, 688 aa, Chlamydomonas sp.
GNVGAILYHQKKKNTHPLLMGVVQDKGDDDINISVVKKTLNSLCMDVSGHQISSRIQSMVLLINHAVAEAYLFANFHITRCLDDGDFDVKQLPHLDRNFYYRCLLAVSTSNVRKDTLGQSFNDTMVAFDALRPAGYVKVDVRPWGQVVADVSIQMATMACNSVWANVDRVVIKYLRLKHPSLKKHFKKIVKAVVQYPESKIDTIIPEGLVHAIHIKEVVSHLRALFPLPRGKQFNTRAHLTMRLFHHVLTELGEVGRVDPKDKKTKKSHPRLFSILPRKNGFTISYVPKSSMTFMKLLSMGDSPLESVSGDGRYENHTMLWRKYFNVQGLETKRSRFDNRILSDGKGVSVQMKQKGKEEVVEEGENAGYPKDANIVECKDAVGALRVGVDPGMTDIVTVASSACRIESFSSARFSEVAGYNTSKRRTYKWNDETQDLVKSIPSPNTSNMVDLQDHVRAYLKALPILLQHRANKGYRSMRFFRYVGKQKTIEKVCDVIAPRAQTTVVGFGNWSNQGYGISRSCSGPIKEIRRCLSRRKNVLFKNVDERNTSCKCHGCFQRLVNMKADSVVWRGVCKESPINGSITVEKQKMVVKNVKVHKVLHCRDSVKSASSNVRCGATWNRDVNAAKNLLLLLTTWMDGRERPEAFCVPSHPTKTTVSIEASVSAKPTDPPGFVSSLPCYPLGQLKC

SEQ ID NO: 881 - protein, 249 aa, Chlamydomonas sp.
GHSIPSPNTSNMVDLQDHVRAYLKALPILLQHRANKGYRSMRFFRYVGKQKTIEKVCDVIAPRAQTTVVGFGNWSNQGYGISRSCSGPIKEIRRCLSRCKNVLFKNVDERNTFCKCHGCFQRLVNMKADSVVWRGVCKESPIDGSITVEKQKMVVKNVKVHKVLHCRDSVKSASSNVRCGATWNRDVNAAKNLLLLLTTWMDGRERPEAFCVPSPPPKTTVSIEASVSAKTDRPTWVCQQLALLSFGPA

SEQ ID NO: 882 - protein, 568 aa, Chlamydomonas sp.
ATNVSLTQAASKATSSSRKKNPAVVKSFSTHVCPHTNNNPTCSDSNCSCKPIFLTNILDASKSLKSRTSDQGSTSSAQDFYEYWDSSRQDLYRQLLWLPKTGSQGLVSSSLNGFARSTPARSSFSITKTEPLKTSLEKTSCPSFKYIVADGTVEDATKSNDKPKLRTLKLKLNPTEAQKSMLAEFAGCSRFMYNKAVAARLGVGSTHKSVFRIRDRYVTNKVRGKGKKPNPYFKNRPWLLQCPKSVRQSAIKSALANIKACFSNLKAGYIKQFSAPFRRKKTELERGWAIEMDQKNVSKDGDKLFIFKYILGNMRYFGSKQLHKLMPEENPTHDPKVQKSRFGEYFLVLSVAARDRRAERKPVHPDKVATASIDPGVRKTMVTYSPENEESFMLGQGQASDLVKLLMVHDKLQSRLDTEKTLRSKERMKIKKQMIPIRKRIFYLKKEFRDQTTNFLSARYDVLLVPQLETAKMTISAERELTTKVARQMLTLSHSVLFNRLKEKCEEYGTVFLHVLEHYTSQTGPMCGFLNKCGETYTCKNCQFTCDRDIVGAAGIFLKAVRTENPCS

SEQ ID NO: 883 - protein, 793 aa, Chlamydomonas sp.
KMATKPPTVAKLKELLKLAEVPYSSKSNKDDLVRLCEDNGLIARPPPEYKTVEKMCVVKCALKKAMSLDDEEFGKFREHVDQLVNVVSRMLRRSSLVLTFHITSLLEKGLDIPDLYNMKDTYWKDWLRIGVDGIFPDEESKISYEAVKDSIGDVIGNDDADYIKSYPIYFDQVLNYAGHTLSTVVSNNAWVPLIPRLARLTSTTLNKLNSPKTLDTSKIIRGYDVMQAIQQEVQNMEGWPESVQEYVNEVREMLSVPDGSRVYDNYGKDMDFPTMVRFNYWIQTRLEDMDARRIRLMPIFNVQRVHVRLDLKTLVNLFRHMFPNDQNIVELSKWEHVKNPDSFMLPQRPAQKKKKSCGPGEWEAYKSVLKQYDDDVKDIKATDGYRHAKGLYDTLVNARKTVAGSFFRKPPVKNGWVFDCSICTDGVSLSMQYSKTVQVLVSDLKKTCKKPRKEEGIKIAEKYDGSLKTILPDMGIVVLGVDPGRSNIATVTYLADDKNKTWKLTRGAFYHKSGIKKQTRQKELRFADMIPMWESLRENGAALSTSRTDKISAYLSNYAKFSDEWWRLALRRRESRDNLQRYIGKRKVKDSFWAGIKRCMMKELPDMKVCVAYGSAITKLKPTGPGEVAVPTGAMFASCKRIFKEDVSVTDEFKTTLMSWETGKEKERVYKIPSVCSADVKLRLGGERFSHTKSKTMPKVADCDHLGVRLYNKRKGAQEKHRRGGFATSLVDSQKSIERYPEVRGLRFSPETCIYSDRDRSSALTIARLHCMELMGLGRPLPFAHSSSVVVDE

SEQ ID NO: 884 - protein, 695 aa, Chlamydomonas sp.
LRRKCVQGNVGAVLYHQKKKNTHPLLMGVVQDKGDDDINISVVKKTLNSLCMDVLRHQISSRIQSMVLLINHAVAEAYLFANFHITRCLDDGDFDVKQLPHLDRNFYYRCLLAVSTSNVRKDTLGQSFNDTMVAFDALRPAGYVKVDVRPWGQVIADVSIQMATMACNSVWANVDRVVIKYLRLKHPSLKKHFKKIVKAAVQYPESKIDTIIPEGLVHAIHIKEVVSHLRALFPLPRGKQFNTRAHLTMRLFHHVLTELGEVGRVDPKDKKTKKSHPRLFSILPRKNGFTISYVPISSMTFMKLLSMGDSPLESVSGDGRYENHTMLWRKYFNVQGLETKRSRFDNRILSDGKGVSVQMKQKGKEEVVEEGENAGYPKDANIVECKDAVGALRVGVDPGMTDIVTVASSAGRIESFSSARFSEVAGYNTSKRRTNKWNDETQDLVKSIPSPNTSNMVDLQDHVRAYLKALPILLQHRANKGYRSMRFFRYVGKQKTIEKVCDVIAPRAQTTVVGFGNWSNQGYGISRPCSGPIKEIRRCLSRHKNVLFNNVDERNTSCKCHGCFQRLVNMKADSVVWRGVCKESPIDESITVEKQKMVVKNVKVHKVLHCRDSVKSASSNVRCGATWNRDVNAAKNLLLLLTTWMDGRERPEAFCVPSPPPKTTVSIEASVSAKPTDPPGFVSSLPCYPLGQLKC

SEQ ID NO: 885 - protein, 307 aa, Chlamydomonas sp.
STMLWRKYFNVQGLETKRSRFDNRLLSDGKGVSVQMKQKGKEEVVEEGENAGYPKDANIVECKDAVGALRVGVDPGMTDIVTVASSAGRIESFSSARFSEVAGYNTSKRRTYKWNDETQDLVKSIPSPNTSNMSDLQDHVRAYLKALPILLQHRANKGYRSMRFFRYVGKQKTIEKVCDVIAPRAQTTVVGFGNWSNQGYGISRSCSGPIKEIRRCLSRRKNVLFKNADERNTSCKCHGCFQRLVNMKADSVVWRGVCKESPIDGSITVEKQKMVVKTSRSTKYCTLETVSKAHHPMCAVVQPGIKT

SEQ ID NO: 886 - protein, 646 aa, Chlamydomonas sp.
SSSVRLVKRAGQSKVDIRGKVKNQIVADLSILMATMSSNHLWTNLERRITTYLKWKYPQIAKRLRSDIVAAVIKCPTKNLDVIFKMSPHVAKLPTKLPTARLRSAKSAVALAKKRVGRKEPEVSPLRVRLTKLQARFEKLSEAWLSSKNLRVDEDNAKRFFARDVAFCLRGVLPLPSGNTFASRAHMTLPLYHKILSETIEEKRKTKNEKLRTFSLLPYKSGFTLSHIPISKTAFFYMVNECQFDSCKADVASKNHQGIWERFANLKKVETVSRKFGYRIVTDGFAVSILMNKPTCLTCSMPADSFSTRAHEYVTTDEGGIVSFRDNVVVAAVDPGVTDIVTVTGLDGGTRSYSSAQYYRKGLIFKSQRQTDVWNLETADIVNDIIPDRDSSRSEQIGAYARFYMGAAPILLAHRASRGYRNLRFRRYCKKQKLIVEIADFVAPREKSAKVLVGFGDWKGLGATPISRRTCGPLQAIRFELRSRGNVIMEDVDEFRTSQRCSCCENRLCNMVALTHRKKQDGTGWECTEGRKRIHKILHCKSSQSGAPRQQSGGRLHCGKTWDRDVNASRNILMLTLHQVFGRERPLAFRRDAPRSSSKTPPPPDTDMGTQTVERFTKEATRNIFENLFNLLHPPTLPKRNDLQSG

SEQ ID NO: 887 - protein, 621 aa, Chlamydomonas sp.
QCIRNLHVLNIRMPCMATNASVKLARPPMPLVSPGPSSVDGRIMARSERSGLQATNVSLTQAASKATSSSRKKNPAVVKSFSTHVCPHTNNNPTCSDSNCSCKPIFLTNIPDASKSLKSRTSDQGSTSSAQDFYEYWDSSRQDLYRQLLWLPKTGTQGLVSSSLNGFARSTPARASFSITKTGPLKTSLEKTSCPSFKYIVAGGTVEDATKSNAKPKLRTLKLKLNPTKAQKSMLAEFAGCSRFMYNKAVAARLGVGSTHKSVFRIRDRYVTNKVRGEGKMPNPYFKNRQWLLQCPKSVRQSAIKGALANIKACFSNLKAGNIKQFSAPFRRKKTELERGWAIEMDQKNVSKDGDKLFIFKEILGNMRYFGSKQLHKLMPEENPTHDPKVQKSRFGEYFLVLSVAARDRRAEWKPVHPDKVATTSIDPGVRKTMVTYSPENEESFMLGQGQASDLVKLLLVHDKLQSRLDTEITLRSKERMKIKMQMIRIRKRMFYLKKEFRDQTTNFLAARYDVLLVPQLETAKMTISAERELTTKVARQMLTLSHFVLFNRLKEKCEEYGTVFLHVLEHYTSQTCPMCGFLNKCGETYTCKNCQFTRDRDIVGAAGIFLKAVRTENPCS

SEQ ID NO: 888 - protein, 657 aa, Chlamydomonas sp.
GRMRRGAMLLKEVKIQSIVQSIVQRIQSMVLLINHAVAEAYLFANFHITRCLDDGDFDVKQLPHLDRNFYYRCLFAVSTSNVRKDTLGQSFNDTMVAFDALRPAGYVKVDVRPWGQVIADVSIQMATMACNSVWANVDRVVIKYLRLKHPSLKKHFKKIVKAVVQYPESKIDTIIPEGLVHAIHIKEVVSHLRALFPLPRGKQFNTRAHLTMRLFHHVLTELGEVGRVDPKDKKTRKSHPRLFSILPRKNGFTISYVPISSMTFMKLLSMGDSPLESVSGDGRYENHTMLWRKYFNVQGLETKRSRFDNRILSDGKGVSVQMKQKGKEEVVEEGENAGYPKDANIVECKDAVGALRVGVDPGMTDIVTVASSAGRIESFSSARFSEVAGYNTSKRTYKWNDETQDLVKSIPSPNTSNMSDLQDHVRAYLKALPILLQHRANKGYRSMRFFRYVGKQKTIEKVCDVIAPRAQTTVVGFGNWSNQGYGISRSCSGPIKEIRRCLSRRKNVLFKNVDERNTSCKCHGCFQRLVNMKADSVVWRGVCKESPIDGSITVEKQKMVVKNVKVHKVLHCRDSVKSASSNVRCGATWNRDVNAAKNLLLLLTTWMDGRERPEAFCVPSPPPKTTVSIEASVSAKPTDPPGFVSSLPCYPLGQLKC

SEQ ID NO: 889 - protein, 686 aa, Chlamydomonas sp.
METIVNKEPPDKRTRPDRAAKIKDRKNGEENVVKCTLSRIIADKDNKDVITKVIKERVDSVSKRTYLAGVAVNRILKEVFEGVPDAQLHTVSVPSVDQNFIRQLMVGSRQAHMETRDATVERFFHNNYWFREKIEGREVIVKNKKQYVGAIARYDGDRNLYSHASKKYLTNFNNHYRVHLSTWIKKFVYSKENRILAKEFKDEHGIDETVFHRYLLYDIHSWGVKEDLIAIHSLLPERTKMLLKIQHSIIGRDEINRQWLKSVSNTAKMIRYNVFINRYLEATEDEGYAKLVNIAPIPTVKHSFITIDTDGLLGVLKDVGLVESLEKTLTNKEHWESVFDVENIRSTGKGVFTCTIDTDGVMACTHFPRAEKKKISIKDDGTAIKKQTKTLLEFSESDPNVVVVANDPGRCNIAFLTWKKNKVEEKDKGGRKRKRHCEFGSKRLTRERYYVESGVFKSRGPTKKWLSNIQDCLDELKDNSPKRTSLELFDAYVTVMVNHWDSRWGEMSKSRWGAQRLRLYGGKKRVLARFFNEVQADVGERKTIVIAYGSSKFAPGGKGELSVPTTSAFYAFSDRFKGRVAVIDEFRTTKIWHKDSTTVLQSVQSEKEGRTVRGLLWCSSTMENSKLFVNRDLNAAINIHNCFTMYPTRPGILARPKKYCKLEVVVGRTIDYKLTGSLQNAVSSEV

SEQ ID NO: 890 - protein, 280 aa, Chlamydomonas sp.
AIEMDQKNVSKDGDKLFIFKDILGNMRYFGSKQLHKLMPEENPTHDPKVQKSRFGEYFLVLSVAARDRRAERKPVHPDKVATASIDPGVRKTMVTYSPENEESFMLGQGQASDLVKLLLVHEKLQTRLDTEKTLRSKERMKIKMQMIRIRKRIFYLKKEFRDQTTNFLAARYDVSLVPQLETAKMTISAERELTTKVARQMLTFSHSVLFNRLKEKCEEYGTVFLHVLEHYTSQTCPMCGFLNKCGETYTCKNCQFTCDRDIVGAAGIFLKAVRTENPCS

SEQ ID NO: 891 - protein, 534 aa, Chlamydomonas sp.
MATMACNSVWANVDRVVIKYLRLKHPSLKKHFKKIVKAVVQYPESKIDTIIPEGLVHAIHIKEVVSHLRALFPLPRGKQFNTRAHLTMRLFHHVLTELGEVGLVDPKDKKTKKSHPRLFSILPRKNGFTISYVPISSMTFMKLLSMGDSPLESVSGDGRYENHTMLWRKYFNVQGLETKRSRFDNRILSDGKGVSVQMKQKGKEEVVEEGENAGYPKDANIVECKDAVGALRVGVDPGMTDIVTVASSAGRIESFSSARFSEVAGYNTSKRRTYKWNDETQDLVKSIPSPNTSNMVDLQDHVRAYLKALPILLQHRANKVYRSMRFFRYVGKQKTIEKVCDVIAPRAQTTVVGFGNWSNQGYGISRSCSGPIKEMRRCLSRRKNVLFKNVDERNTSCKCHGCFQRLVNMKADSVVWRGVSKESPIDGSITFEKQKMVVKNVKVHNVLHSRDSVKSASSNVRCGATWNRDVNAAKNLLLLLTTWMDGRERPEAFCVPSPPPQTTVSNEASVSAKPTDPPGFVSSLPCYPLGQLKC

SEQ ID NO: 892 - protein, 793 aa, Chlamydomonas sp.
KMATKPPTVAKLKELLKLAEVPYSSKSNRDDLVRLCEDNGLIATPPPEYKTVEKMCVVKCALKKAMSLDDEEFGKFREHVDQLVNVVSRMLRRSSLVLTFHITSLLEKGLDIPDLYNMKDTYWKDWLRIGVDGIFPDEESKISYEAVKDSIGDVIGNDDADYIKSYPIYFDQVLNYAGHTLSTVVSNNAWVPLIPRLARLTSTTLNKLNAPKTLDTSKIIRGYDVMQAIQQEVQNMEGWPESVQEYVNEVREMLSVPDGSRVYDNYGKDMDFPTMVRFNYWIQTRLEDMDARRIRLMPIFNVQRVHVRLDLKTLVNLFRHMFPNDQNIVELSKWEHVKNPDSFMLPQRPAQKKKKSCGPGEWEAYKSVLKKYDDDVKDINATDEYRHAKGLYDTLVNARKTVAGSFFRKPPVKNGWVFDCSICTDGVSLSMQYSKTVQVLVSDLKKTCKKPRKEEGIKIAEKYDGSLKTILPDMGIVVLGVDPGRSNIATVTYLADDKNKTWTLTRGAFYHKSGIKKQTRQKELRFADMIPMWESLRENGAALSTSRTDKISAYLSNYAKFSDEWWRLALRRRESRDNLQRYIGKRKVKDSFWAGIKRCMMKELPDMKVCVAYGSAITKLKPTGPGEVAVPTGAMFASCKRIFKEDVSVTDEFKTTLMSWETGKEKERVYKIPSVCSADVKLRLGGERFGHTKSKTMPKVADCDHLGVRLYNKRKGAQEKHRRGGFATSLVDSQKSIERYPEVRGLRFSPETCIYSDRDRSSALTIARLHCMELMGLGRPLPFAHSSSVVVDE

SEQ ID NO: 893 - protein, 801 aa, Chlamydomonas sp.
PRMEHVCDVCIKSSVMYKLCKMATKPPTVAKLKELLKLAEVAYSSKDKKDDIVRLCEDNGLIARPPPVYKTVEKMCVVKCALKKAMSLDDEEFGKFREHVDQLVNVVSRMLRRSSLVLTFHVTRLMEGDLPIPNMYDMKDTYWKDWLRIGVDGVFPDEESRISYESVKDVIGKVLGSDDPDYINSYPIYFDQVLNYAGHTLSTVVSNNAWVPLVPRLTRLTKATLNALEAPKTIRVYDVMRVIQQEIQEMESWPESVQEYVREVRVRLKVPDGSRLYDDYGKYMDFPTMVRFNYWMQTRLEAIGARRIRLMPIFNVQRAHVRLDMKTLVNLFRHVFPKDPNIVELSKWKDVKDPDRFMLPLKPAVKKKKSCGPGELEAYKLAQQKYDADVNDIKDTDEYRHAKGRYDTLVNARKTVAGSFFKKPPVKTGWVFDCSICTDGVSLSMQYSKTVQVRVSDLKKTSKRSRDDEGMSVSEQYDHKLKTTLPDMGIVVLGVDPGRSNIATVTYLADDKSKTWKLTRGAFYHKSGIKKQKKQQEKRFSDMIPRWESLRENGAALSTSRTIDISAYLKNYDTFSDEWWRMALLRRESRDNFQRYIGKRKAMDSFWAGIKRNMKLDHPDLRVRVAYGSAITTLKATGPGEVAVPTGSMFASCKRLFKEEVHVTDEFKTTLMSWETGAKKECVYKIPSVQITTEGQIRLGYELLGHTPLKETPNVSYRDQLAVRVYCTRKQIQEKHRRGGLAPSLVDNNSIKRYPEVRGLRFSPETSTYSDRDRSSALTIARLHCMELLGQGRPLPFCRDA

SEQ ID NO: 894 - protein, 803 aa, Chlamydomonas sp.
PRMEHVCDVCIKSSVMYKLCKMATKPPTVAKLKELLKLAEVAYSSKDKKDDIVRLCEDNGLIASPPPEYKTVEKMCVVKCALKKAMSLDDEEFGKFRGHVDQLVNVVSRMLRRSSLVLTFHVTRLMEGDLPIPNMYDMKDTYWKDWLRIGVDGVFPDEESRISYESVKDVIGKVLGSDDPYYINSYPIYFDQVLNYAGHTLSTVVSNNAWVPLVPRLTRLTKATLNALGAPKTIRAYDVMRVIQQEIQEMESWPESVQEYVREVRVRLKVPDGSRLYDDYGKDMDFPTMVRFNYWMQTRLESIGARHIRLMPIFNVQRAHVRLDMKTLVNLFRHVFPKDPNIVELSKWKNVKDPDRFMLPPKPAVKKKKSCGPGEWEAYKLAQQKYDADVNDIKDTDEYRHAKGRYDTLVNARKTVAGSFFKKPPVKTGWVFDCSICTDGVSLSMQYSKTVQVRVSDLKKTSKRSRDDEGMSVSEQYDHKLKTTLLDMGIVVLGVDPGRSNIATVIYLADDKSKTWKLTRGAFYHKSGIKKQKKQQEKRFSEMIPRWESLRENGAALSTSRTDDISAYLKNYATFSDEWWRMALLRRESRDNFQRYIGKRKAMDSFWAGIKRNMKLDHPDLRVRVAYGSAITTLKATGPGEVAVRTGSMFASCKRLFKEEVHVTDEFKTTLMSCETGAKKECVYKIPSVQITTEGQIRLGYELLGHTPLKETPKVSYRDQLAVRVYCTRKQIQEKHRRGGLAPSLVDNNSIKRYPEVRGLRFSPETSTYSDRDRSSALTIARLHCMELLGQGRPLPFCRDACC

SEQ ID NO: 895 - protein, 795 aa, Chlamydomonas sp.
LWKMATKPPTVAKLKELLKLAEVPYSSKSNKDDLVRLCEDNGLIARPPPEYKTVEKMCVMKCALKKAMSLDDEEFGKFRGHVDQLVNVVSRMLRRSSLVLTFHITSLLEKGLEIPDLYNMKDTYWKDWLRIGVDGIFPDEESKISYEAVKDSIGDVIGNDDADYIKSYPIYFDQVLNYAGHTLSTVVSNNAWVPLIPRLARLTSTTLNKLNAPKTLDTSKIIRGYDVMQAIQQEVQNMEGWPESVQEYVNEVREMLSVPDGSRVYDNYGKDMDSPTMVRFNYWIQTRLEDMDARRIRLMPIFNVQRVHVRLDLKTLVNLFRHMFPNDQNIVELSKWEHVKNPDSFMLPQRPAQKKKKSCGPGEWEAYKSVLKQYDDDVKDIKATDEYRHAKGLYDTLVNARKTVAGSFFRKPPVKNGWVFDCSICTDGVSLSMQYSKTVQVLVSDLKKTCKNPRKEEGIKIAEKHDGSLKTILPDMGIVVLGVDPGRSNIATVTYLADDKNKTWTLTRGAFYHKSGIKKQTRQKELRFADMIPMWESLRENGAALSTLRTDKISAYLSNYAKFSDEWWRLALRRRESRDNLQRYIGKRKVKDSFWAGIKRCMMKELPDMKVCVAYGSAITKLKPTGPGEVAVPTGAMFASCKRIFKEDVSVTDEFKTTLMSWETGKEKERVYKIPSVCSADVKLRLGGERFGHTKSKTMPKVADCDHLGVRLYNKRKGAQEKHRRGGFATSLVDSQKLIERYPEVRGLRFSPETCIYSDRDRSSALTIARLHCMELMGLGRPLPFAHSSSVVVDE

SEQ ID NO: 896 - protein, 332 aa, Chlamydomonas sp.
RIWVTWWQANHHLQYRCGDIPPFVCWARDIVNGGIRSYSSAQYYRKGLIFKSQRQTDVWNLETADIVGGIIPDRDSSSSEQIGAYARFYMGAAPILLAHRASRGYRNLRFRRYCKKQKLIVEIADFVAPREKSAKVLVGFGDWKGLGATPISRRTYGPLQAIRFELRSLENVIMEDIDEFRTSQRCSCCENHLCNMVALTHRKKQDGTGWECTEGRKRIHKILHCKSSQSGAPRQHSGGMLHCGKTWDRDVNASRNILMLTLHQVFGRERPLAFCRDAPRSSSTTPPPPPDTDMGTQTVERFTKEATRNIFENLFNLLHPPTLPKSNDLQSG

SEQ ID NO: 897 - protein, 711 aa, Chlamydomonas sp.
GNCPLVWYHQNNNHSLSMGVVTNNGDDDDLDIMVVKKTLNSLCMDVSRQQICSRIQSMVLVINHAVAEAYLFAIFHITRCLDDGDFDVKQLPHLDRNFYYRCILAVSISTVRNDTLDQSLKDSMVAFDALRPAGYLKVDVCQWGQVIADVSIQMATMACNSVWANVDRVVIKYLRLKHPSLKKHFNKIVKAVVQYPDSDIDKIIPAGLVHANLIKDVVRRLRDLLPLPRGKQFNTRAHLTMRLFHHVLTELGADLKEKTTKKRPRLFSILPRKSGFTISYVPISSMTLMKLLSMGDSPLESVRGDGRHENHSMLWRKYFNVQGLETKGSRFDYRILSDGKGVSVQMKHQVGKDIAGEGGGDNAGYPKDASIEDCQDASLRQGALRVGIDPGMTDIVTIASSDGRVESFSSARFSEAAGYNTSNHRTNKWNADTQDLVKSIPSPTTSSMHDMQDHVRGYLSALPTLLQHRANRGYRSMRFFRYVGKQKTIEKVCDLIAPKAQKTTIEKVCDVIAPKAKKTVVGFGNWSNQGYGISRSCSGPVKEIRKCLSRRQNVLFKNVDERNTSCTCHGCFQKLVNMKADSVVWRRVQNEPSALIDGAPTTTTTTTFEKQKTVVKNVKVHKVLHCRNSVKSASSNVRCGATWNRDVNAAKNLLLLLTTWMDGKERPAAFCVPSSSPTPKTTVSGEANVGAQPTDPPGSVSSLQLLSSGPA

SEQ ID NO: 898 - protein, 794 aa, Chlamydomonas sp.
ECSREPVCRSRLHQNVFGVQFVMENGIGESSSLVHEADQHDDVAELVDYEGEEDGECAPGRAICVVKMKLSTFIPHDWLRNKIDTLVLDMNKLLGEGYIFANFHIARLFENGIAVPPVNRNFFYRCIIAVSTNKCNGSTLGEDFESSRLLFDLLREPGQSKVDIRGRVKNQIIADLSILMATMASNHLWTNLERRITTYLKWKYPQIAKRLRSDIVAALIKCPTKNIDDIFKMSPHTTKLPTKLPTSRLRSAKSAVALAKKRVGRKEPEGSPLRVRLTKLQERLEKLSEAWLSSKNLRVDADNAKRFFAREVAFCLRGVLPLPSGNTFASRAHMTLPLYHKILSETIEEKRKTKNEKHRTFSLLPYKSGFTLSHIPISKMAFFYMVNECHFDSCKADVASKNHQGIWERFANLKKVETVSRKFGYRIVTDGFAVSILMNKPTCLTCSMPADAFSTRAHEYVTTDEGGIVSFLDNVVVAAVDPGVTDIVTVTGLNGGTRSYSSAQYYRKGLIFKSQRQTDVWNLETADIVGGIIPDRDSSSSEQIGAYARFYMGAAPILLAHRASRGYRNLRFRRYCKKQKLIVEIADFVAPRKKSAKVLVGFGDWKGLGATPISRRTCGPLQAIRFELRSRENVIMEDIDEFRTSQRCSCCENHLCNMVALTHRKKQDGTGWECTEGRKRIHKILHCKSSQSGAPRQQSGGMLHCGKTWDRDVNASRNILMLTLHQVFGRERPLAFRRDAPRSSSTTPPPPLDTDMGTQTVERFTKEATRNIFENLFNLLHPPKLPKSNDLQSG

SEQ ID NO: 899 - protein, 304 aa, Chlamydomonas sp.
LNGGTRSYSSAKYYRKGLIFKSQRQTDVWNLETADIVGGIIPDRDSSSSEQIGAYARFYMGAAPILLAHRASRGYRNLRFRRYCKKQKLIVEIADFVAPRKKSAKVLVGFGDWKGLGATPISRRTCGPLQAIRFELRSRENVIMEDIDEFRTSQRCSCCENHLCNMVALTHRKKQDGTGWECTEGRKRIHKILHCKSSQSGAPRQQSGGMLHCGKTWDRDVNASRNILMLTLHQVFGRERPLAFRRDAPRSSSTTPPPPPDTDMGTQTVERFTKEATRNIFENLFNLLHPPTLPKSNDLQSGLL

SEQ ID NO: 900 - protein, 298 aa, Chlamydomonas sp.
ATPHVFFLDFPSAGRIESFSSARFSEVAGYNTSKRRTYKWNDETQDLVKSIPSPNTSNMVDLQDHVRAYLKALPILLQHRANKGYRSMRFFRYVGKQKTIEKVCDMIAPREQTTVVGFGNWSNQGYGISRSCSGPIKEIRRCLSRRKNVLFKYVDERNTSCKCHGCFQRLVNMKADSVVWRGVCKESPIDGSITVEKQKMVVKNVNVHKVLHCRDSVKSVSSNVRCGATWNRDVNAAKNLLLLLTTWMDGRERPEAFCVPSPPPKTTVSIEASVSAKPTDPPGFVSSLPCYPLGQLKC

SEQ ID NO: 901 - protein, 273 aa, Chlamydomonas sp.
RSCGYNTSKRRTYKWNDETQDLVKSIPSPYTSNMVDLQDHVRAYLKALPILLQHRANKGYRSMRFFRYVGKQKTIEKVCDMIAPREQTTVVGFGNWSNQGYGISRSCSGPIKEIRRCLSRRKNVLFKYVDERNTSCKCHGCFQRLVNMKADSVVWRGVCKESPIDGSITVEKQKMVVKNVNVHKVLHCRDSVKSASSNVRCGATWNRDVNAAKNLLLLLTTWMDGRERPEAFCVPSPPPKTTVSIEASVSAKPTDPPGFVSSLPCYPLGQLKC

SEQ ID NO: 902 - protein, 485 aa, Chlamydomonas sp.
KMSTALTRPYSTDTSSTISTLGGVKEDLIAIHSLLPERTKMFLKIQHSIIGRDEINRQWLKSVSNSAKMIRYNVFINRYLEATEDEGYAKLVNIAPIPTVKHSFITIDTDGLLGVLKDVGLVESLEKTLTNKEHWESVFDVENIRSTGKGVFICTIDTDGVMACTHFLRAEKKKISIKDDGTAIKKQTKTLREFSESDPNVVVVANDPGRCNIAFLTWKKNKVEEKDKGGRKRKMHCEFGSKRLTRERYYVESGVFKSRGPTKKWLSNIQDCLDDLKDNSPKRTSLESFDAYVTVMVNHWDSRWGEMSKSRWGPRLRLYGGKKRVLARFFNEVQADVGERKTIVIAYGSSKFAPGGKGELSVPTTSAFNAFSDRFKGRVAVIDEFRTEKIWHKDSTTVLQSVQSEKEGRTVRGLLWCSSTMENSKLFVNRDLNAAINIHNCFTMYPTRPGILARPKKYCKLEVVVGRTIDYKLTGSLQNAVSSEV

SEQ ID NO: 903 - protein, 615 aa, Chlamydomonas sp.
QCIRNLHVLNIRMPCMATKASVKLARPPMPLVSPGPSSVDGQIMARSGLQATNVSLTQAASKATSSSRKKKPAVVKSFSTHVCPHTNNNTTCSDSNCSCKPIFLTNIPDASKSRTSDQGSTSSALDFYEYWDSSRQDMYRQLLWLPKTGTQGLVSSSFNGFAHSTPTRSSFSITKTEPLKTSLEKTSCPSFKYIVTDGTVEDATKSNAKPKLRTLKLKLNPTKAQKSMLAEFAGCSRFMYNKAVAARLGVGSTHKSVFRIRDRYVTNKVRGEGKMPNPYFKNRQWLLQCPKSVRQSAIKSALANIKACFSNLKAGNIKQFSAPFRRKKTELERGWVIEMDQKNVSKDGDKLFIFKEILGNMRYFGSKQLHKLMPEENPTHDPKVQKSRFGEYFLVLSVAARDRRAERKPVNPDKVATASIDPGVRKTMVTYSPENEESFMLGQGQASDLVKLLLVHDKLQSRLDTEKTLRSKERMKIKKLMIRIRKTIFYLKKEFRDQTTNFLAARYDVLLVPQLETAKMTISAERELTTKVARQMLTLSHSVLFNRLKEKCEEYGTVLLHVLEHYTSQTCPMCGFLNKCGETYTCKNCQFTCDRDIVGAAGIFLKAVRTENPCS

SEQ ID NO: 904 - protein, 801 aa, Chlamydomonas sp.
PRMEHVCDVCIKSSVMYKLCKMATKPPTVAKLKELLKLAEVAYSSKDKKDDIVRLCEDNGLIARPPPEYKTVEKMCVVKCALKKAMSLDDEEFGKFREHVDQLVNVVSRMLRRSSLVLTFHVTRLMEGDLPIPNMYDMKDTYWKDWLRIGVDGVFPDEESRISYEAVKDVIGKVLGSDDPDYINSYPIYFDQVLNYAGHTLSTVVSNNAWVPLVPRLTRLTKATLNALKAPKTIRVYDVMRVIQQEIQEMESWPESVQEYVREVRVRLKVPDGSRLYDDYGKDMDFPTMVRFNYWMQTRLEDMDARRIRLMPIFNVQRAHVRLDMKTLVNLFRHVFPKDPNIVELSKWKDVKDPDRFMLPLKPAFKKKKSCGPGEWEAYKLAQQKYDADVNDIKDTDEYRHAKGRYDTLVNARKTVAGSFFKKPPVKTGWVFDCSICTDGVSLSMQYSKTVQVRVSDLKKTSKRSRDDEGMSVSEQYDHKLKTTLPDMGIVVLGVDPGRSNIATVTYLADDKSKTWKLTRGAFYHKSGIKKQKKQQEKRFSDMIPRWESLRENGAALSTSRTDDISAYLKNYDTFSDDWWRMALLRRESRDNFQRYIGKRKAMDSFWAGIKRNMKLDHPDLRVRVAYGSAITTLKATGPGEVAVPTGSMFASCKRLFKEEVHVTDEFKTTLMSWETGAKKECVYKIPSVQITTEGQIRLGYELLGHTPLKETPNVSYRDQLAVRVYCTRKQIQEKHRRGGLAPSLVDNNSIKRYPEVRGLRFSPETSTYSDRDRSSALTIARLHCMELLGQGRPLPFCRDA

SEQ ID NO: 905 - protein, 801 aa, Chlamydomonas sp.
PRMEHVCDVGIKSSVMYKLCKMATKPPTVAKLKELLKLAEVAYSSKDKKDDIVRLCEDNGLIAKPPPEYKTVEKMCVVKCALKKAMSLDDEEFGKFREHVDQLVNVVSRMLRRSSLVLTFHVTRLMEGDLPIPNMYDMKDTYWKDWLRIGVDGVFPDEESRISYEAVKDVIGKVLGSDDPDYINSYPIYFDQVLNYAGHTLSTVVSNNAWVPLVPRLTRLTKATLNALKAPKTIRVYDVMRVIQQEIQEMESWPESVQEYVREVRVRLKVPDGSRLYDDYGKDMDFPTMVRFNYWMQTRLEAIGARRIRLMPIFNVQRAHVRLDMKTLVNLFRHVFPKDPNIVELSKWKDVKDPDRFMLPLKPAFKKKKSCGPGEWEACKLAQQKYDADVNDIKDTDEYRHAKGRYDTLVNARKTVAGSFFKKPPVKTGWVFDCSICTDGVSLSMQYSKTVQVRVSDLKKTSKRSRDDEGMSVSEQYDHKLKTTLPDMGIVVLGVDPGRSNIATVTYLADDKSKTWKLTRGAFYHKSGIKKQKKQQEKRFSDMIPRWESLRENGAALSTSRTDDISAYLKNYDTFSDEWWRMALLRRESRDNFQRYIGKRKAMDSFWAGIKRNMKLDHPDLRVRVAYGSAITTLKATGPGEVAVPTGSMFASCKRLFKEEVHVTDEFKTTLMSWETGAKKECVYKIPSVQITTEGQIRLGYELLGHTPLKETPKVSYRDQLAVRVYCTRKQIQEKHRRGGLSPSLVDNNSIKRYPEVRGLRFSPETSTYSDRDRSSALTIARLHCMELLGQGRPLPFCRDA

SEQ ID NO: 906 - protein, 788 aa, Chlamydomonas sp.
ECSREPVCRSRLHQNVFGVQFVMENEVRESSSLVHEADQHDDVAELVDYDGEEDEECAPGRAICVVKMKLSTFIPHDWLRRKIDTLVLDMNKLLGEGYIFANFHIARLFENGIAVPPVNLNFFYRCLLAVSTNKCMGSTLGEDFENSRLLFDLLREQGQSKVDIRGRVNNQIVADLSILMATMASNHLWTNLERRITTYLKWKYPKIAKRLRSDIVAAVIKCPTKNLDVIFKMSPHTTKLPTKLPTARLRSAKSAVALAKKRVGRKEPEGSPLRVRLTKLQARLEKLSEAWLSSKNLRVDEDNAKRFSAREVAFCLRGVLPLPSGKTFASRAHMTLPLYHKILSETIASENDRLRTFLLLPYKSGFTLSHIPISKMAFFYMVNECHFDSCKADVASKNHQGIWERFANLKIVETVSRKFGYRIVTDGFAVSILMNKPTCLTCSMPGDAFSTRAHEYMTTDEGGILSFRDNVVVAAVDPGVTDIVTVTGLDGSTNSYSSAQYYRKGLIFKSQRQTDVWNLETADIFGDVIPDRDSPISQHIGANARFYMGAAPILLAHRASRGYRNLRLRRYCKKQKLIVEIADFVAPREKSTKVLVGFGDWKGLGATPISRRTCGPLQAIRFELRSRENVIMEDVDEFRTSQRCSCCETRLCNMVALTHRKKQDGTWECTEGRKRIHKILHCKSSQSGAPRQQSGGRLHCGKTWDRDVNASRNIQMLTLHQVFGRERPLAFRRDAPRGSSKNPPIPDTDMGTQTVERFTTEATRNIFENLFNLLHPPTLPKRNDLQSG

SEQ ID NO: 907 - protein, 620 aa, Chlamydomonas sp.
QCIRNLHVLNIRMPCMATTSVKLARPPMPLVSPGPSFVDGRIMARSERSGLQATNVSLTQAASKATSSSRKKKPAVVKSFSTHVCPHTNNNPTCSDSNCSCKPIFLTNIPDASKSLKSMTSDQGSTSSAQDFYEYWDSSRQDLYRQLLWLPKTGSQGLVSSSLNGFARSTLARSSFSITKTEPLKTSLENTSCPSFKYIVADGTVEDDTKSDAKPKLGTLKLKLNPTKAQKSMLAEFAGCSRFMYNKAVAARLGVGSTHKSVFRIRDRYVTNKVRGKGKMPNPYFKNRQWLLQCPKSVRQSAIKAALANIKACFSNMKAGNIKQFSAPFRRKKTELERGWAIEMDQKNVSKDGDKLFIFKDILGNMRYFGSKQLHKLMPEENPTHDPKVQKSRFGEYFLVLSVASRDRRAERKPVHPDKVATASIDPGVRKTMVTYSPENEESFMLGQGQASDLVKLLLVHDKLQSRLDTEKTLRSKERMKIKKQMIRIRKIIFYLKKEFRDQTTNFLAARYDVLLVPQLETAKMTISAERELKTKVARQMLTLSHSVLFNRLKEKCAEYGTVFLHVLEHYTSQTCPMCGFLNKCGETYTCKNCQFTCDRDIVGAAGIFLKAVRTENPCS

SEQ ID NO: 908 - protein, 637 aa, Chlamydomonas sp.
PRMEHVCDVCIKSSVMYKLCKMATKPPTVAKLKELLKLAEVAYSSKDKKDDIVRLCEDNGLIARPPPEYKTVEKMCVVKCALKKAMSLDDEEFGKFRGHVDQLVNVVSRMLRRSSLVLTFHVTRLMEGDLPIPNMYDMKDTYWKDWLRIGVDGVFPDEESRISYEAVKDVIGKVLDSDDPDYINSYPIYFDQVLNYAGHTLSTVVSNNAWVPLVPRLTRLTKATLKALGAPKTIRVYDVMRVIQQEIQEMESWPESVQEYVREVRVRLKVPDGSRLYDDYGKDMDFPTMVRFNYWMQTRLEAIGERRIRLMPIFNVQRAHVRLDMKTLVNLFRHVFPKDPNIVELSKWENVKDPDRFMLPLKPAVKKKKSCGPGEWEAYKLAQQKYDADVKDIKATDEYRHAKGRYDTLVNARKTVAGSFFKKPPVKTGWVFDCSICTDGVSLSMQYSKTVQVRVSDLKKTSKRSRDEEGMSVSEQYDHKLKTTLPDMGIVVLGVDPGRSNIATVTYLADDKSKTWKLTRGAFYHKSGIKKQKKQQEKRFSDMIPRWESLRENGAALSTSRKDDISAYLKNYATFSDEWWRMALRRRESRDNFQRYIGKRKAMDSFWAGIKRNMKLDHPDLRVRIAYGSAIKTMKAT

SEQ ID NO: 909 - protein, 803 aa, Chlamydomonas sp.
PRMEHVCDVCIKSSVMYKLCKMATKPPTVAKLKELLKLAEVAYSSKDKKDDIVRLCEDNDLIARPPPEYKTVEKMCVVKCALKKAMSLDDEEFGKFRGHVDQLVNVASRMLRRSSLVLTFHVTRLMEGDLPIPNMYDMKDTYWKDWLRIGVDGVFPDEENRISYESVKDVIGKVLGSDDPDYINSYPIYFDQVLNYAGHTLSTVVSNNAWVFLVPRLTRLTKATLNALGAPKTIRVYDVMRVIQQEIQEMESWPESVQEYVREVRVRLKVPDGSRLYDDYGKDMDFPTMVRFNYWMQTRLEAIGARCIRLMPIFNVQRAHVRLDMKTLVNLFRHVFPKDPNIVELSEWKNVKDPDRFMLPLKPAFKKKKSCGPGEWEAYKLAQQNYDADVKDIKAPNEYRHAKGRYDTLVNARKTVAGSFFKKPPVKTGWVFDCTICTDGVSLSMQYSKTVQVRVSDMKKTSKRSRDDEGMSVSEQYDHKLKTTLPDMGIVVLGVDPGRSNIATVTYLADDKSKTWKLTRGAFYHKSGIKKQKKQQEKRFLDMIPRWESLRENGAALSTSRKDDISAYLKNYATFSDEWWRMALRRRESRDNFQRYIGKRKAMDSFWAGIKRNMKLDHPDLRVRVAYGSAITKLKATGPGEVAVPTGSMFASCKRLFKEEVHVTDEFKTTLMSWETGAKKECVYKIPSVQITTEGQIRLGYELLGHTPLKETPKVSYRDQLAVRVYCTRKKIQEKHRRGGLAPSLVDNNSIKRYPEVRGLRFSPEISTYSDRDRSSALTIARLHCMELLGQGRPLPFCRDACC

SEQ ID NO: 910 - protein, 260 aa, Chlamydomonas sp.
FLDGSLFVKMEAALSTSRKDDISAYLKNYATFSDEWWRMALRRRESRDNFQRYIGKRKAMDSFWAGIKRNMKLDHPDLRVRVAYGSAITTLKATGPGEVAVPTGSMFASCKRLFKDEVHVTDEFKTTLMSWETGAKKECVYKIPSVQITTEGQIRLGYELLGHTPLKETPKVSYRDQLAVRVYCTRKQIQEKHRRGGLAPSLVNNNSIKRYPEVRGLRFSPETSTYSDRDRSSALTIARLHCMELLGQGRPLPFCRDACC

SEQ ID NO: 911 - protein, 617 aa, Chlamydomonas sp.
GTACTKYQNAMYGNHLFCKIGKASDALGVSRTVLRRWADNGTIRTIRTPGNQRLFDPSSIQGYLIEQEKQPSSRQVILYARVSSHENNPTCSDSNCSCKPIFLTNIPDASKSLKSRTSDQGSTSSAQDFYEYWDSSRQDLYRQLLWLPKTGSQGLVSSSLNEFARSTPARSSFSITKTEPLKTSLEKTSCPSFKYIVADGTVEDATKSNAKPKLRTLKLKLNPTKAQKSMLAEFAGCSRFMYNKAVAARLGVGSTHKSVFRIRDRYVTNKVRGKGKMPNPYFKNRQWLLQCPKSVRQNAIKSALANVKACFSNLKAGNIKQFSALFRRKKTELERGWAIEMDQKNVSKDGDKLFIFKDILGNMRYFGSKQLQKLMPEENPTHDPKVHKSRFGEYFLVLSVATRDRRAERKPVHTGRVATASIDPGVRKTMVTYSLENEESFMLGQGQASDLVKLLLVHDKLQSRLDTEKTLRSKERMKIKKQMIRIRKRIFYLKKEFRDQTTHFLAARYDVLLVPQLETAKMTISVERELTTKASRQMLTLSHSVLFNRLKEKCAEYGTVFLHVLEHYTSQTCPMCGCLNKCVDTYTCKNCQFTCNRDIVGAAGIFLKAVRTENPCS

SEQ ID NO: 912 - protein, 273 aa, Chlamydomonas sp.
NLETADIVGGIIPDRDSSSSEQIGAYARFYMGAAPILLAHRASRGYRNLRFRRYCKKQKLIVEIADFVAPREKSAKVLVGFGDWKGLGATPISRRTCGPLQAIRFELRSRENDIMEDIDEFRTSQRCSCCENHLCNMVALTHRKKQDGTSWECTEGRKRIHKILHCKSSQSGAPRQQSGGMLHCGKTWDRDVNASRNILMLTLHQVFGRERPLAFRRDAPRSSSTTPPPPPDTDMGTQTVERFTKEATRNIFENLFNLLHPPTLPKSNDLQSG

SEQ ID NO: 913 - protein, 803 aa, Chlamydomonas sp.
PRMEHVCDVCIKSSVMYKLCKMATKPPTVAKLKELLKLAEVAYSSKDKKDDIVRLCEDNGLIARPPPEYKTVEKMCVVKCALKKAMSLDDEEFGKFREHVDQLVNVLSRMLRRSSLVLTFHVTRLMEGDLPIPNMYDMKDTYWKDWLRIGVDGVFPDEESRISYESVKDVIGKVLGSDDPDYINSYPIYFDQVLNYAGHTLSTVVSNNAWVPLVPRLTRLTKATLNALGAPKTIRVYDVMRVIQQEIQEMESWPESVQEYVREVRVRLKVPDGSRLYDDYGKDMDFPTMVRFNYWMQTRLEAIGARRIRLMPIFNVQRAHVRLDMKTLVNLFRHVFPKDPNIVELSKWKDVKDPDRFMLPLKPAVKKKKSCGPGEWEAYKLAQQKYDADVNDIKDTDEYRHAKGRYDTLVNARKKVAGSFFKKPPVKTGWVFDCSICTDGVSLSMQYSKTVQVRVSDLKKTSKRSRDDEGMSVSEQYDHKLKTTLPDMGIVVLGVDPGRSNIATVTYLADDKSKTWKLTRGAFYHKSGIKKQKKQQEKRFSGMIPRWESLRENGAALSTSRTDDISAYLKNYATFSDEWWRMALLRRESRDNFQRYIGKRKAMDSFWAGIKRNMKLDHPDLRVRVAYGSAITTLKATGPGEVAVPTGSMFASCKRLFKEEVHVTDEFKTTLMSWETGAKKECVYKIPSVQITTEGQIRLGYELLGHTPLKETPNVSYRDQLAVRVYCTRKQIQEKHRRGGLAPSLVDNNSIKRYPEVRGLRFSPETSTYSDRDRSSALTIARLHCMELLGQGRPLPFCRDACC

SEQ ID NO: 914 - protein, 509 aa, Chlamydomonas sp.
YPESDIYKIIPASLVHANLIKDVVRRLRDLLPLPRGKQFNTRAHLTMRLFHHVLTELGADLKEKTTKKRPRLFSILPRKSGFTISYVPISSMTLMKLLSMGDSPLESFRGDGRHENHSMLLWRKYFNVQGLETKGSRFDNRILSDGKGVSVQMKHQASEDVAVDNAGYPKDAILEDCQDASLRVGVDPGMTDIVTVASSAGRVESFSSARFSEAAGYNTSNRRTNKWNVDTQDLVKSIPSPTTSSMHDMQDHVRGYLSALPTLLQHRASRGYRSMRFFRYVGKQKTIEKVCDLIAPKAQKKTIEEKVCDVIAPRAQTTVVGFGNWSNQGYGISRSCSGPVKEIRKCLSRRQNVLFKNVDERNTSCTCHGCFQKIVNMKADSVVWRRVQNEPPSLINGAPTTTTTTFEKQKTVVKNVKVHKVLHCRNSVKSASSNVRCGATWNRDVNAAKNLLLLLTTWMDGKERPAAFCVPSSSPTPKTTVSGEANVGAQQTDPPGSVSSLQLLSSGPA

SEQ ID NO: 915 - protein, 793 aa, Chlamydomonas sp.
KMATKPPTVAKLKELLKLAEVPYSSKSNKDDLVRLCEDNGLIARPPPEYKTVEKMCVVKCALKKAMSLDDEEFGKFREHVDQLVNVVSRMLRRSSLVLTFHITSLLEKGLDIPDLYNMKDTYWKDWLRIGVDGIFPDEESKISYEAVKDSIGDVIGNDDADYIKSYPIYFDQVLNYAGHTLSTVVSNNAWVPLIPRLTRLTSTTLNKLNAPKTLDTSKIIRGYDVMQAIQQEVQNMEGWPESVQEYVNEVREMLSVPDGSRVYDNYGKDMDFPTMVRFNYWIQTRLEDMDARRIRLMPIFNVQRVHVRLDLKTLVNLFRHMFPNDQNIVELSKWEHVKNPDSFMLPQRPAQKKKKSCCPGEWDAYKSVLKQYDDDVKDIKATDEYRHAKGLYDTLVNAQKTVAGSFFRKPPVKNGWVFDCSICTDGVSLSMQYSKTVQVLVSDLKKTRKKPRKEEGIKIAEKYDGSLKTILPDMGIVVLGVDPGRSNIATVTYLADDKNKTWKLTRGAFYHKSGIKKQTRQKELRFADMIPMWESLRENGAALSTSRTDKISAYLSNYAKFSDEWWRLALRRRESRDNLQRYIGKRKVKDSFWAGIKRCMMKELPDMKVCVAYGSAITKLKPTGPGEVAVPTGAMFASCKRIFKEDVSVTDEFKTTLMSWETGKEKERVYKIPSVCSADVKLRLGGERFGHTKSKTMPKVADCDHLGVRLYNKRKRAQEKHRRGGFATSLVDSQKSIERYPEVRGLRFSPETSTYSDRDRSSALTIARLHCMELMGLGRPLPFAHSSSVVVDE

SEQ ID NO: 916 - protein, 226 aa, Chlamydomonas sp.
LALRRRESRDNLQRYIGKRKVKDSFWAGIKRCMMKELPDMKVCVAYGSAITKLKPTGPGEVAVPTGAMFASCKRIFKEDVSVTDEFKTTLMSWETGKEKERVYKIPSVCSADVKLRLGGERFGHTKSKTMPKVADCDHLGVRLYNKRKGAQEKHRRGGFATSLVDSQKSIERYPEVRGLRFSPETCIYSDRDRSSALTIARLHCMELMGLGRPLPFAHSSSVVVDE

SEQ ID NO: 917 - protein, 686 aa, Chlamydomonas sp.
METIVNKEPPDKRTRPDRASKIKDRRNGEENVVKCTLSRIIADKDNKDVIIKVIKERVDSVSKRTYLAGVAVNRILKEVFEGVPDAQLHTVSVPSVDQNFIRQLMVGSRQANMETRDATVERFFHNNYWFREKIEGREVIVKKKKQYVGAIARYDGDRNLYSHASKKYLTNFNNHYRVHLSTWIKKFVYSKENRILAKEFKDEHGIDETVFQRYLLYDIHSWGVKEDLIAIHSLLPERTKMLLKIQHSIIGRDEINRQWLKSVSNSAKMIRYNVFINRYLEATEDEGYAKLVNIAPIPTVKHAFITIDTDGLLGVLKDVGLVESLEKTLTNKEHWESVFDVENIRSTGKGVFTCTIDTDGVMACTHFLRAEKKKISIKDDGTAIKKQTNTLREFSESDPNVVVVANDPGRCNIAFLTWKKNKVEEKDKGGRKRKRHCEFGSKRLTRERYYVESGVFKSRGPTKKWLSNIQDCLDDLKDNSPKRTSLESFDAYVTVMVNHWDSRWGEMSKSRWGAQRLRLYGGKKRVLARFFNEVQADVGERKTIVIAYGSSKFAPGGKGELSVPTTSAFNAFSDRFKGRVAVIDEFRTTKIWHKDSTTVLQSVQSEKEGRTVRGLLWCSSTMENSKLFVNRDLNAAINIHNCFTMYPTRPGILARPKKYCKLEVVVGRTIDYKLTGSLQNAVSSEV

SEQ ID NO: 918 - protein, 246 aa, Chlamydomonas sp.
YVGKQKTIEKVCDLIAPKALNKTIEEKVCDVIAPKAKKTVVGFGNWSNQGYGISRSCSGPVKEIKKFLSRRQNVLFKNVDERNTSCTCHGCFQKLVNMKADSVVWRRVQNEPSALIDGAPTTTTTTTFEKQKTVVKNVKVHKVLHCRNSVKSASSNVRCGATWNRDVNAAKNLLLLLTTWMDGKERPATFCVPSSSPTPKTTVSGEANVGAQPTDPPGSVSSLQLLSSGPSLNAEIRDEGHEGLGP

SEQ ID NO: 919 - protein, 813 aa, Chlamydomonas sp.
PRMEHVCDVCIKSSVMYKLCKMATKPPTVAKLKELLKLAEVAYSSKDKKDDIVRLCEDNGLIARPPPEYKTVEKMCVVKCALKKAMSLDDEEFGKFREHVDQLVNVVSRMLRRSSLVLTFHITSLLEKGLDVPDLYNMKDTYWKDWLRIGVDGIFPDKESKISYEAVKDSIGDVIGNDDADYIKSYPIYFDQVLNYAGHTLSTVVSNNAWVPLIPRLARLTSTTLNKLNAPKTLDTSKIIRGYDVMQAIQQEVQNMEGWPESVQEYVNEVREMLSVPDGSRVYDNYGKDMDFPTMVRFNYWIQTRLEDMDARRIRLMPIFNVQRVHVRLDLKTLVNLFRHMFPNDQNIVELSKWEHVKNPDSFMLSQRPAQKKKKSCGPGEWDAYKSVMKQYDDDVKDIKATDEYRHAKGLYDTLVNARKTVAGSFFRKPPVKNGWVFDCSICTDGVSLSMQYSKTVQVLVSDLKKTCKNPRKEECIKIAEKYDGSLKTILPDMGIVVLGVDPGRSNIATVTYLADDKNKTWKLTRGAFYHKSGIKKQTRQKELRFADMIPMWESLRENGAALSTSRTDKISAYLSNYAKFSDEWWRLALRRRESRDNLQRYIGKRKVKDSFWAGIKRCMMKELPDMKVCVAYGSAITKLKPTGPGEVAVPTGAMFASCKRIFKEDVSVTDEFKTTLMSWETGKEKERVYKIPSVCSADVKLRLGGERFGHTKSKTMPKVADCDHLGVRLYNKRKGAQEKHRRGGFATSLVDSQKSIERYPEVRGLRFSPETCIYSDRDCSSALTIARLHCMELMGLGRPLPFAHSSSVVVNE

SEQ ID NO: 920 - protein, 408 aa, Chlamydomonas sp.
RHAKGLYDTLVNARKTVAGSFFRKPPVKNGWVFDCSICTDGVSLSMQYSKTVQVLVSDLKKTCKNPRKEEGIKIAEKYDGSLKTILPDMGIVVLGVDPGRSNIATVTYLADDKNKTWKLTRGAFYHKSGIKKQTRQKELRFADMIPMWESLRENGAALSTSRTDKISAYLSNYAKFSDEWWRLALRRRESRDNLQRYIGKRKVKDSFWAGIKRCMMKELPDMKVCVAYGSAITKLKPTGPGEVAVPTGAMFASCKRIFKEDVSVTDEFKTTLMSWETGKEKERVYKIPSVCSADVKLRLGGERFGHTKSKTMPKVADCDHLGVRLYNKRKGAQEKHRRGGFATSLVDSQKSIERYPEVRGLRFSPETCIYSDRDCSSALTIARLHCMELMGLGRPLPFAHSSSVVVDE

SEQ ID NO: 921 - protein, 794 aa, Chlamydomonas sp.
ECSREPVCRSRLHQNVFGVQFVMENGIGESSSLVHEADQHDDVAELVDYEGEEDGECAPGRAICVVKMKLSTFIPHDWLRNKIDTLVLDMNKLLGEGYIFANFHIARLFENGIAVPPVNRNFFYRCLIAVSTNKCKGSTLGEDFESSRLLFDLLREPGQSKVDIRGSVKNQIIADLSILMATMASNHLWTNLERRITTYLKWKYPQIAKRLRSDIVAALIKCPTKNLDVIFKMSPHTTKLPTKLPTSRLRSAKSAVALAKKRVGRKEPEGSPLRVRLTKLQERLEKLSEAWLSSKNLRVDADNAKRFFAREVAFCLRGVLPLPSGNTFASRAHMTLPLYHKILSETIEEKRKTKNEKHRTFSLLPYKSGFTLSHIPISKMAFFYMVNECHFDSCKADVASKNHQGIWERFANLKKVETVSRKFGYRIVTDGFAVSILMNKPTCLTCSMPADAFSTRAHEYVTTDEGGIVSFLDNVVVAAVDPGVTDIVTVTGLNGGTRSYSSAKYYRKGLIFKSQRQTDVWNLETADIVGGIIPDRDSSSSEQIGAYARFYMGAAPILLAHRASRGYRNLRFRRYCKKQKLIVEIADFVAPRKKSAKVLVGFGDWKGLGATPISRRTCGPLQAIRFELRSRENVIMEDIDEFRTSQRCSCCENHLCNMVALTHRKKQDGTGWECTEGRKRIHKILHCKSSQSGAPRQQSGGMLHCGKTWDRDVNASRNILMLTLHQVFGRERPLAFRRDAPRSSSTTPPPPPDTDMGTQTVERFTKEATRNIFENLFNLLHPPTLPKSNDLQSG

SEQ ID NO: 922 - protein, 418 aa, Chlamydomonas sp.
SFSAWAIRRSRASVAMDVTRIIPCCGESTSMSKDLRRKGLVLTTESSATAKGVQMKHQVGKDIAGEGEGGGDNAGYPKDASIEDCQDASLRQGALRVGIDPGMTDIVTIASSDGRVESFSSARFSEAAGYNTSNHRTNKWNADTQDLVKSIPSPTTSSMQDHVRGYLSALPTLLQHRANRGYRSMRFFRYVGKQKTIEKVCDLIAPKAQKKTIEEKGCDVIAPKAKKTVVGFGNWSNQGYGISRSCSGPVKEIRKCLSRRQNVLFKNVDERNTSCTCHGCFQKLVNMKADSVVWRRVQNEPSALIDGAPTTTTTIEKQKTVVKHVKVHKVLHCRNSVKSASSNVRCGATWNRDVNAAKNLLLLLTTWMDGKERPAAFCVPSSSPPPKTTVSGEANVGAQPTDPPGSVSSLQLLSSGPA

SEQ ID NO: 923 - protein, 304 aa, Chlamydomonas sp.
EQHRYSHVSGRRQKQDMEAYTRSFLPQVWYQETEKTARKRFSDMIPRWESLRENGAALSTPRKDDISAYLKNYATFSDEWWRMALRRRESRDNFQRYIGKRKAMDSFWAGIKRNMKLDHPDLRVRVAYGSAITKLKATGPGEVAVPTGFMFASCKRLFKEEVHVTDEFKTTLMSWETGAKKECVYKIPSVQITTEGQIRLGYELLGHTPLKETPRVSYRDQLAVRVYCTRKKIQENHRRGGLAPSLVDNNSIKRYPEVRGLRFSPETSTYSDRDRSSALTIARLHCMELLGQGRPLPFCRDACC

SEQ ID NO: 924 - protein, 293 aa, Chlamydomonas sp.
SVKDPDRHSCLPLKPAFKKKKSCGPGEWEAYKLAQQKYDADVNDIKDTDEYRHAKGRYDTLVNARKTVAGSFFKKPPVKTGWVFDCSICTDGVSLSMQYSKTVQVRVSDLKKTSKRSRDDEGMSVSEQYDHKLKTTLPDMGIIVLGVDPGRSNIATVTYLADDKSKTWKLTRGAFYHKSGIKKQKKQQEKRFSDMIPRWESLRENGAALSTSRTDDISAYLKNYDTFSDEWWRMALLRRESRDNFQRYIGKRKAMDSFWAGIKRNMKLDHPDLRVRVAYGSAITTLKATDQER

SEQ ID NO: 925 - protein, 801 aa, Chlamydomonas sp.
PRMEHVCDVCIKSSVMYKLCKMATKPPTVAKLKELLKLAEVAYSSKDKKDDIVRLCEDNGLIARPPPEYKTVEKMCVVKCALKKAMSLDDEEFGKFREHVDQLVNVVSRMLRRSSLVLTFHVTRLMEGDLPIPNMYDMKDTYWKDWLRIGVDGVFPDEESRISYEAVKDVIGKVLGSDDPDYINSYPIYFDQVLNYAGHTLSTVVSNNAWVPLVPRLTRLTKATLNALKSPKTIRVYDVMRVIQQEIQEMESWPESVQEYVREVRVRLKVPDGSRLYDDYGKDMDFPTMVRFNYWMQTRLESIGARRIRLMPIFNVQRAHVRLDMKTLVNLFRHVFPKDPNIVELSKWKDVKDPDRFMLPLKPAVKKKKSCGPGEWEAYKLAQQKYDADVNDIKDTDEYRHAKGRYDTLVNARKTVAGSFFKKPPVKTGWVFDCSICTDGVSLSMQYSKTVQVRVSDLKKTSKRSRDDEGMSVSEQYDHKLKTTLPDMGIVVLGVDPGRSNIATVTYLADDKSKTWKLTRGAFYHKSGIKKQKKQQEKRFSDMIPRWESLRENGAALSTSRTDDISAYLKNYDTFSDEWWRMALLRRESRDNFQRYIGKRKAMDSFWAGIKRNMKLDHPDLRVRVAYGSAITTLKATGPGEVAVPTGSMFASCKRLFKEEVHVTDEFKTTLMSWETGAKKECVYKIPSVQITTEGQIRLGYELLGHTPLKETPKVSYRDQLAVRVYCTRKKIQEKHRRGGLAPSLVDNNSIKRYPEVRGLRFSPETSTYSDRDRSSALTIARLHCMELLGQGRPLPFCRDA

SEQ ID NO: 926 - protein, 793 aa, Chlamydomonas sp.
KMATKPPTVAKLKELLKLAEVPYSSKSNKDDLVRLCEDNGLIARPPPEYKTVEKMCVVKCALKKAMSLDDEEFGKFREHVDQLVNVVSRMLRRSSLVLTFHITSLLEKGLDIPDLYNMKDTYWKDWLRIGVDGIFPDEESKISYEAVKDSIGDVIGNVDADYIKSYPIYFDQVLNYAGHTLSTVVSNNAWVPLIPRLTRLTSTTLNKLNAPKTLDTSKIIRGYDVMQAIQQEVQNMEGWPESVQEYVNEVREMLSVPDGSRVYDNYGKDMDFPTMVRFNYWIQTRLEDMDARRIRLMPIFNVQRVHVRLDLKTLVNLFRHMFPNDQNIVELSKWEHVKNPDSFMLPQRPAQKKKKSCGPGEWEAYKSVLKQYDDDVKDIKATDEYRHAKGLYDTLVNARKTVAGSFFRKPPVKNGWVFDCSICTDGVSLSMQYSKTVQVLVSDLKKTCKKPRKEEGIKIAEKYDGSLKTILPDMGIVVLGVDPGRSNIATVTYLADDKNKTWKLTRGAFYHKSGIKKQTRQKELRFADMIPMWESLRENGADLSTSRTDKISAYLSNYAKFSDEWWRLALRRRESRDNLQRYIGKRKVKDSFWAGIKRCMMKELPDMKVCVAYGSAITKLKPTGPGEVAVPTGAMFASCKRIFKEDVSVTDEFKTTLMSWETGKEKERVYKIPSVCSADVKLRLGGERFGHTKSKTMPKVADCDHLGVRLYNKRKGAQEKHRRGGFATSLVDSQKSIERYPEVRGLRFSPETCIYSDRDRSSALTIARLHCMELMGLGRPLPFAHSSSVVVDE

SEQ ID NO: 927 - protein, 795 aa, Chlamydomonas sp.
LWKMATKPPTVAKLKELLKLAEVPYSSKSNKDDLVRLCEDNGLIARPPPEYKTVEKMCVVKCALKKAMSLDDEEFGKFREHVDQLVNVVSRMLRRSSLVLTFHITSLLEKGLEIPDLYNMKDTYWKDWLRIGVDGIFPDEESKISYEAVKDSIGDVIGNDDADYIKSYPIYFDQVLNYAGHTLSTVVSNNAWVPLIPRLARLTSTTLNKLNAPKTLDTSKIIRGYEVMQAIQQEVQNMEGWPESVQEYVNEVREMLSVPDGSRVYDNYGKDMDFPTMVRFNYWIQTRLEDMDARRIRLMPIFNVQRVHVRLDLKTLVNLFRHMFPNDQNIVELSKWEHVKNPDSFMLSQRPAQKKKKSCGPGEWEAYKSVMKQYDDDVKDIKATDEYRHAKGLYDTLVNARKTVAGSFFRKPPVKNGWVFDCSICTDGVSLSMQYSKTVQVLVSDMKKTCKNPRKEEGIKIAEKYDGSLKTILPDMGIVVLGVDPGRSNIATVTYLADDKNKTWKLTRGAFYHKSGIKKQTRQKELRFADMIPMWESLREIGAALSTSRTDKISAYLSNYAKFSEEWWRLALRRRESRDNLQRYIGKRKVKDFFWAGIKRCMMKELPDMKVCVAYGSAITKLKPTGPGEVAVPTGAMFASCKRIFKEDVSVTDEFKTTLMSWETGKEKERVYKIPSFCSADVKLRLGGERFGHTKSKTMPKVADCDHLGVRLYNKRKGAQEKHRRGGFATSLVYSQKSIERYPEVRGLRFSPETCIYSDRDRSSALTIARLHCMELMGLGRPLPFAHSSSVVVDE

SEQ ID NO: 928 - protein, 713 aa, Chlamydomonas sp.
QDRHTGTGHEQVAWRGLYFRKFPHCSSFENGIAVPPVNRNFFYRCLIAVSTNKCKGSTLGEDFESSRLLFDLLREPGQSKVDIRGNVKNQIIADLSILMATMASNHLWTNLERRITTYLKWKYPQIAKRLRSDIVAALIKCPTKNLDVIFKMSPHTTKLPTKLPTSRLRSAKSAVALAKKRVGRKEPEGSPLRVRLTKLQERLEKLSEAWLSSKNLRVDADNAKRFFAREVAFCLRGVLPLPSGNTFASRAHMTLPLYHKILSETIEEKRKTKNEKHRTFSLLPYKSGFTLSHIPISKMAFFYMVNECHFDSCKADVASKNHQGIWERFANLKKVETVSRKFGYRIVTDGFAVSILMNKPTCLTCSMPADAFSTRAHEYVTTDEGGIVSFLDNVVVAAVDPGVTDIVTVTGLNGGTRSYSSAQYYRKGLIFKSQRQTDVWNLETADIVGGIIPDRDSSSSEQIGAYARFYMGAAPILLAHRASRWYRNLRFRRYCKKQKLIVEIADFVAPREKSAKVLVGFGDWKGLGATPISRRTCGPLQAIRFELRSRENVIMEDIDEFRTSQRCSCCENHLCNMVALTHRKKQDGTGWECTEGRKRIHKILHCKSSQSGAPRQQSGGMLHCGKTWDRDVNASRNILMLTLHQVFGRERPLAFRRDAPRSSSTTPPPPPDTDMGTQTVERFTKEATRNIFENLFNLLHPPTLPKSNDLQSG

SEQ ID NO: 929 - protein, 394 aa, Chlamydomonas sp.
KTVAGSFFRKPPVKNGWVFDWSICTDGVSLSMQYSKTVQVLVSDLKKTCKKPRKEEGIKIAEKYDGSLKTILPDMGIVVLGVDPGRSNIATVTYLADDKNKTWTLTRGAFYHKSGIKKQTRQKELRFADMIPMWESLRENGAALSTSRTDKISAYLSNYAKFSDEWWRLALRRRESRDNLQRYIGKRKVKDSFWAGIKRCMMKELPDMKVCVAYGSAITKLKPTGPEEVAVPTGAMFASCKRIFKEDVSVTDEFKTTLMSWETGKEKERVYKIPSVCSADVKLRLGGERFGHTKSKTMPKVADCDHLGVRLYNKRKGAQEKHRKGGFATSLVDSQKSIERYPEVRGLRFSPETCIYSDRDRSSALTIARLHCMELMGLGRPLPFAHSSSVVVDE

SEQ ID NO: 930 - protein, 803 aa, Chlamydomonas sp.
PRMEQVCDVCIKSSVMYTLCKMATKPPTVAKLKELLKLAEVAYSSKDKKDDIVRLCEDNGLIARPPPEYKTVEKMCVVKCALKKAMSLDDEEFGKFRGHVDQLVNVVCRMLRRSSLVLTFHVTRLMEGDLPIPNMYDMKDTYWKDWLRIGVDGVFPDEESRISYESVKDVIGKVLGSDDPDYINSYPIYFDQVLNYAGHTLSTVVSNNAWVPLVPRLTRLTKATLNALGAPKTIRVYDVMRVIQQEIQEMESWPESVQEYVREVRVRLKVPDGSRLYDDYGKDMDFPTMVRFNYWMQTRLEAIGARRIRLMPIFNVQRAHVRLDMKTLVNLFRHVFPKDPNIVELSKWENVKDPDRFMLPLKPSIKMKKSCGPGEWEAYKLAQHKYDADVKDIKATDEYRHSKGRYDTLVNARKTVAGSFFKKPPVKTGWVFDCSICTDGVSLSMQYSKTVQVRVSDLKKTSKRSRDEEGMSVSEQYDHKLKTTLPDMGIVVLGVDPGRSNIATVTYLADDKSKTWKLTRGAFYHKSGIKKQKKQQEKRFSDMIPRWESLRENGAALSTSRKDDISAYLKNYATFSDEWWRMALRRRESRDNFQRYIGKRKAMDSFWAGIKRNMKLDHPDLRVRVAYGSAITKLKATGPGEVAVPTGSMFASCKRLFKEEVHVTDEFKTTLMSWETGAKKECVYKIPSVQITAEGQIRLGYELLGHTPLKETPKVSYRDQLAVRVYCTRKKIQEKHRRGGLAPSLVDNNSIKRYPEVRGLRFSPETSTYSDRDRSSALTIARLHCMELLGQGRPLPFCRDACC

SEQ ID NO: 931 - protein, 795 aa, Chlamydomonas sp.
LWKMATKPPTVAKLKELLKLAEVPYSSKSNKDDLVRLCEDNGLIARPPPEYKTVEKMCVVKCALKKAMILDDEEFGKFREHVDQLVTVVSRMLRRSSLVLNFHITSLLEKGLEIPDLYNMKDTYWKDWLRIGVDGIFPDEESKISYEAVKDSIGDVIGNDDADYIKSYPIYFDQVLNYAGHTLSTVVSNNAWVPLIPRLARLTSTTLNKLNAPKTLDTSKIIRGYEVMQAIQQEVQNMEGWPESVQEYVNEVREMLSVPDGSRVYDNYGKDMDFPTMVRFNYWIQTRLEDMDARRIRLMPIFNVQRVHVRLDLKTLVNLFRHMFPNDQNIVELSKWEHVKNPDSFMLSQRPAQKKKKSCGPGEWEAYKSVMKQYDDDVKDIKATDEYRHAKGLYDTLVNARKTVAGSFFRKPPVKNGWVFYCSICTDGVSLSMQYSKTVQVLVSDLKKTCKKPRKEEGIKIAEKYDGSLKTILPDMGIVVLGVDPGRSNIATVTYLADDKNKTWKLTRGAFYHKSGIKKQTRQKELRFADMIPMWESLRENGAALSTSRTDKISAYLSNYAKFSDEWWRLALRRRESRDNLQRYIGKRKVKDSFWAGIKRCMMKELPDMKVCVAYGSAITKLKPTGPGEVAVPTGAMFASCKRIFKEDVSVTDEFKTTLMSWETGKEKERVYKIPSVCSADVKLRLGGERFGHTKSKTMPKVADCDHLGVRLYNKRKGAQEKHRRGGFATSLVDSQKSIERYPEVRGLRFSPETCIYSDRDRSSALTIARLHCMELMGLGRPLPFAHSSSVVVDE

SEQ ID NO: 932 - protein, 400 aa, Chlamydomonas sp.
HACERPKTVAGSFFRKPPVKNGWVFYCSICTDGVSLSMQYSKTVQVLVSDLKKTCKKPRKEEGVKIAEKYDGSLKTILPDMGIVVLGVDPGRSNIATVTYLADDKNKTWKLTRGAFYHKSGIKKQTRQKELRFADMIPMWESLRENGAALSTSRTDKISAYLSNYAKFSDEWWRLALRRRESRDNLQRYIGKRKVKDSFWAGIKRCMMKELPDMKVCVAYGSAITKLKPTGPGEVAVPTGAMFASCKRIFKEDVSVTDEFKTTLMLWETGKEKERVYKIPSVCSADVKLRLGGERFGHTKSKTMPKVADCDHLGVRLYNKRKGAQEKHRRGGFATSLVDSQKSIERYPEVRGLRFSPETCIYSDRDRSSALTIARLHCMELMGLGRPLPFAHSSSVVVDE

SEQ ID NO: 933 - protein, 400 aa, Chlamydomonas sp.
HACERPKTVAGSFFRKPPVKNGWVFYCSICTNGVSLSMQYSKTVQVLVSDLKKTCKKPRKEEGIKIAEKYDGSLKTILPDMGIVVLGVDPGRSNIATVTYLADNKNKTWKLTRGAFYHKSGIKKQTRQKELRFADMIPMWESLRENGAALSTSRTDKISAYLSNYAKFSDEWWRLALRRRESRDNLQRYIGKRKVKDSFWAGIKRCMMKELPDMKVCVAYGSAITKLKPTGPGEVAVPTGAMFASCKRIFKEDVSVTDEFKTTLMSWETGKEKERVYKIPSVCSADVKLRLGGERFGHTKSKTMPKVADCDHLGVRLYNKRKGAQEKHRRGGFATSLVDSQKSIERYPEVRGLRFSPETCIYSDRDRSSALTIARLHCMELMGLGRPLPFAHSSSVVVDE

SEQ ID NO: 934 - protein, 237 aa, Chlamydomonas sp.
SMRFFRYVGKQKTIEKVCDLIAPKAQKKTIEEKVCDVIAPKAQKTIVGFGNWSNQGYGISRSCSGPVKEIRKCLSRRQNVLFKNVDERNISCTCHGCFQKLVNMKADSVVWRRVQNEPPSLINGAPTTTTTTTIEKQKTVVKNVKVHKVLHCRNSVKSASSNVRCGATWNRDVNAAKNLLLLLTTWMDGKERPATFCVPSSSPTPKTTVSGEANVGAQPTDPPGSVSSLQLLSSGPA

SEQ ID NO: 935 - protein, 795 aa, Chlamydomonas sp.
LWKMATKPPTVAKLKELLKLAEVPYSSKSNKDDLVRLCEDNGLIARPPPEYKTVEKMCVVKCALKKAMSLDDEEFGKFREHVDQLVNVVSRMLRRSSLVLTFHIASLLEKGLEIPDLYNMKDTYWKDWLRIGVDGIFPDEESKISYEAVKDSIGDVIGNDDADYIKSYPIYFDQVLNYAGHTLSTVVSNNAWVPLIPRLARLTSTTLNKLNAPKTLDTSKIIRGYDVMHAIQQEVQNMEGWPESVQEYVNEVREMLSVPDGSRVYDNYGKDMDFPTMVRFNYWIQTRLEDMDARRIRLMPIFNVQRVHVRLDLKTLVNLFRHMFPNDQNIVELSKWEHVKNPDSFMLPQRPAQKKKKSCGPGEWEAYKSVLKQYDDDVKDIKATDEYRHAKGLYDTLVNARKTVAGSFFRKPPVKNGWVFESSICTDGVSLSMQYSKTVQVLVSDLKKTCKNPRKEEGIKIAEKYDGSLKTILPDMGIVVLGVDPGRSNIATVTYLADDKNKTWTLTRGAFYHKSGIKKQTRQKELRFDDMIPMWESLRENGAALSTSRTDKISAYLSNYAKFSEEWWRLALRRRESRDNLQRYIGKRKVKDSFWAGIKRCMMKELPDMKVCVAYGSAITKLKPTGPGEVAVPTGAMFASCKRIFEEDVSVTDEFKTTLMSWETGKEKERVYKIPSVCSADVKLRLGGERFGRTKSKTMPKVADCDHLGVRLYNKRKGAQEKRRGGGFATSLVDSQKSIEQYPEVRGLRFSPETCIYSDRDRSSALTIARLHCMELMGLGRPLPFAHSSSVVVDE

SEQ ID NO: 936 - protein, 789 aa, Chlamydomonas sp.
ECSREPVCRSRLYQNVVGVQFVMEHGVVLVHEADQHDDVAELVDYEGDEDEERAPGRAICVVKMKLSTFIPHDWLRKKIDTLVLDMNKLLAEGYIFANFHIARLFENGIAVPPVNRNFFYRCLLAVSTNKCKGSTLGEDFESSRLLFDLLREPGQSKVDIRGNVKNQMIADLSILMATMSSNHLWTNLERRITPYLKWKYPQIAKRLQSDIVAAVIKCPTKNLDVIFKMSPHVAKLPTKLPTARLRSAKSAVALAKKRVGRKESEVSPLRVMLTKLQARFEKLSEAWLSSKNLRVDEDNAKRFFARDVAFCLRGVLPLPSGNTFASRAHMTLPLYHKILSETIEEKRKTKNEKLRTFSLLPYKSGFTLSHIPISKTAFFYMVNECHFDSCKADVASKNHQGIWERFANLKKVETVSRKFGYRIVTDGFAVSILMNKPTCLTCSMPADSFSTRAHEYVTTDEGGIVSFRDNVVVAAVDPGVTDIVTVTGLDGGTRSYSSAQYYRKGLIFKSQRQTDVWNLETADIVGDIIPDRDSSRSEQIGAYARFYMGAAPILLAHRASRGYRNLRFRRYCKKQKLVVEIADFVAPREKSAKVLVGFGDWKGLGATPISRRTCGPLQAIRFELRSRGNVIMEDVDEFRTSQRCSCCENRLCNMVALTHRKKQDGTGWECTEGRKRIHKILHCKSSQSGAPRQQSGGRLHCGKTWDRDVNASRNILMLTLHQVFGRERPLAFRRDAPRISSKTPPPPDTDMGTQTVERFTKEATRNIFENLFNLLHPPTLPKRNDLQSG

SEQ ID NO: 937 - protein, 686 aa, Chlamydomonas sp.
METIGNKEPPDKRTRPDRASKIKDRKNGEENVVKCTLSRIIADKDNKDVIIKVIKERVDSVSKRTYLAGVAVNRILKEVFEGVPDAQLHTVSVPSVDKNFIRQLMVGSRQAHMETRDATVERFFHNNYWFREKIEGREVIVKKKKQYVGAIARYDGDQNLYSHALKKYLTNFNNHYRVHLSTWIKKFVYSKENRILAKEIKDEHGIDETVFHRYLLYDIHSWGVMADLIAIHSLLPERTKMLLKIQHSILGRDEINRQWLKSVSNSAKMIRYNVFINRYLEATEDEGYAKLVNIAPIPTVKHAFITIDTDGLLGVLKDVGLIESLEKTLTNKEHWESVFDVENIRSAGKGVFTCTIDTDGVMACTHFLRAEKKKISIKDDGTAIKKQTKTLREFSESDPNVVVVANDPGRCNIAFLTWKKNKVEEKDKGGRKRKRHCEFESKRLTRERYYVESGVFKSRGPTKKWLSNIQDCLDDLKDNSPKRTSLVSFDAYVAVMVNHWDSRWGEMSKSRWGAQRLRLYGGKKRVLARFFNEVQEAVGERKTIVVAYGSAKFAPGGKGELSVPTTSAFKSFSDRFKGRVAVIDEFRTTKIWHKDSTTVLQSVQSEKEGRTVQGLLWCSSTMEKSKFFVNRDLNAAINIHNCFTMYPIRPGILARPKKYCKLEVVVGRKIDYKLTGSLQNAVSSEV

SEQ ID NO: 938 - protein, 458 aa, Chlamydomonas sp.
PQLDRNFYYRCLLAVSTSNVRKDTLGQSFNDTMVAFDALRPAGYVKVDIRPWGQIIADVSIQMATMACNSVWANVDRVVIKYLRLKHPSLKKHFKKIAKAVVQYPESKIDTIIPEGLLHAIHIKEVVSHLRALFPLPKGKQFNTRAHLTMRLFHHVLTELGEVGRVDPKDKKTKKSHPRLFSILPRKNGFTVLYVPISSMTFMKLLSMGDSPLESVSGDGRYENHTMLWRKYFNVQGLETKRSRFDNRILSDGKGVSVQMKQKGKEEVVEEGENAGYPKDANIVECKDAVGALRVGVDPGMTDIVTVASSAGRIESFSSARFSEVAGYNTSKRRTYKWNEETQDLVKSIPSPNTSNMVDLQDHVRAYLKALPILLQHRANKGYRSMRFFRYVGKQKTIEKVCDVIAPRAQTTVVGFGNWSNQGYGISRSCSGPIKEIRRCLSRRKNVLFKNVDERNTL

SEQ ID NO: 939 - protein, 647 aa, Chlamydomonas sp.
GNVGAILYHQKKKNTHPLLMGVVQDKGDDDINISVVKKTLNSLCMDVSRHQISSRIQSMVLLINHAVAEAYLFANFHITRCLDDGDFDVKQLPHLDRIFYYRCLLAVSTSNVRKDTLGQSFNDTMVAFDALRPAGYVKEDIRPWGQIIADVSIQMATMACNSVWANVDRVVIKYLRLKHPSLKKHFKKIVKAVVQYPESKIDTIIPEGLVHAIHIKEVVINLRALFPLPKGKQFNTRAHLTMRLFHHVLTELGEVGRVDPKDKKTKKSHPRLFSILPRKNGFTISYVPISSMTFMKLLSMGDSPLESVFGNGRYENHTMLWRKYFNVQGLETKRSRFDNRILSDGKGVSVPMKQKGKEEVVEEGENAGYPKDANIVECKDAVGALRVGVDPGMTDIVTVASSAGRIESFSSARFSEVAGYNTSKRRTYKWNDETQYLVKSIPSPNTSNMVVLQDHVRAYLKALPILLQHRANKGYRSMRFFRYVGKQKTIGKVCDMIAPRAQTTVVGFGNWSNQGYGISRSCSGPIKEIRRCLSRRKNVLFKNVDERNTSCKCHGCFQRLVNMKADSVVWRGVCKESPIDGSITVEKQKMVVKNVKVHKVLHCRDSVKSASSNVRCGATWNRDVNAAKNLLLLLTTCMDGRERPEAF

SEQ ID NO: 940 - protein, 287 aa, Chlamydomonas sp.
KTKKSHPRLFSILPRKNGFTISYVPISSMTFMKLLSMGDSPLESVFGNGRYENHTMLWRKYFNVQGLETKRSRFDNRILSDGKGVSVPMKQKGKEEVVEEGENAGYPKDANIVECKDAVGALRVGVDPGMTDIVTVASSAGRIESFSSARFSEVAGYNTSKRRTYKWNDETQYLVKSIPSPNTSNMVDLQDHVRAYLKALPILLQHRANKGYRSMRFFRYVGKQKTIEKVCDVIAPRAQTTIVGFGNWSNQGYGISRSCSGPIKEIKRCLSRRKNVLFKNVDERNTL

SEQ ID NO: 941 - protein, 278 aa, Chlamydomonas sp.
HLCWFDHIVSCFRINDDLRKGRGPFFCVREQLLQVLVLSHDMAVAGTVVAVAALIKSPRIESVATLVVSTFAVVKATKSTLDKILSFRIKESVQMKQKGKEEVVEEGENAGYPKDANIVECKDAVGALRVGVDPGMTDIVTVASSAGRIESFSSARFSEVAGYNTSKRRTYKWNDETQYLVKSIPSPNTSNMVDLQDHVRAYLKALPILLQHRANKGYRSMRFFRYVGKQKTIEKVCDVIAPRAQTTVVGFGNWSNQGYGISRSCSGPIKSQEVPLTS

SEQ ID NO: 942 - protein, 550 aa, Chlamydomonas sp.
GNVGAILYHQKKKNTHPLLMGVVQDKGDDDINISVVKKTLNSLCMDVSRHQISSRIQSMVLLINHAVAEANLFANFHITRCLDDGYFDVKQLPHLDRNFYYRCLLAVSTSNVRKDTLGQSFNDTMVAFDALRPAGYVKVDIRPWGQVIADVSIQMATMACNSVWANVDRVVIKYLRLKHPSLKKHFKKIVKAVVQYPESKIDTIIPEGLVHAIHITEVVSHLRALFPLPKGKQFNTRAHLTMRLFHHVLTELGEVGRVDPKDKKTKKSHPRLFSILPRKNGFTISYFPISSMTFMKLLSMGDSPLESVSGNGRYENHTMLWRKYFNIQGLETKRSRFDNRILSDGKGVSVQMKQKGKEEVVEEGENAGYPKDANIVECKDAVGALRVGVDPGMTDIVTVASSAGRIESFSSARFSEVAGYNTSKRRTYKWNDETQDLVKSIPSPNTSNMVDLQDHVRAYLKALPILLQHRANKGYRSMRFFRYVGKQKTIEKVCDVIAPRAQTTVVGFGNWSNQGYGISRSCSGPIKEIRRCLSRRNNVLFKNVDERNTL

SEQ ID NO: 943 - protein, 639 aa, Chlamydomonas sp.
DISTNESQFRSIPCFATSQNRPGGRNAHYVLNIRMPCMATNASVKLARPPMPLVSPGLSSVDGRIMARSERSGLQATNVSLTQAASKATSSSRKKNPAVVKSFSTHVCPHTNNNPTCSDSNCSCKPIFLTNIPDASKSLKSRTSDQGSTSSAQDFYEYWDLSRQDLYRQLLWLPKTGSQGLVSSSLNGFARSTPARSSFSITKTEPLKTSLEKTSCPSFKYIVADGTVEDATKSNAKPKLRNLKLKLNPTKAQKSMLAEFAGCSRFMYNKAVATRLGVGSTHKSVFRIRDRYVTNKVRGEGKMPNPYFKNRQWLLQCPKSVRQSAIKAALANIKACFSNLKAGNIKQFSAPFRRKKTELERGWAIEMDQKNVSKDGDKLFIFKDILGNMRYFGSKQLHKLMPEENPTHDPKVQKSRFGEYFLVLSVAARDRRAERKPVHPDKVATASIDKTMVTYSPENEESFMLGQGQASDLVKLLLVHDKLQSRLDTEKNLRSKERMKIKMQMIRIRKRIFYLKKEFRDQTTNFLAARYDVLFVPQLETAKMTIRAERELTTKVARQMLTLSHSVLFNRLKEKCEEYGTVFLHVLEHYTSQTCPMCGFLNKCGETYTCKNCQFTCDRDIVGAVGIFLKAVRTENPCS

SEQ ID NO: 944 - protein, 204 aa, Chlamydomonas sp.
LRGRRARRYSSVLVIGKVWGRRQSLGGLVALSKLFVSSFVAEENVIMEDVDEFRTSQRCSCCENRLCNMVALTHRKKQDGTGWESTEGRKRIHKILHCKSSQSGAPRQQSGGRLHCGKTWDRDVNASRNILMLTLHQVFGRERPLAFRRDAPRSSSRTPPPPDTDMGTQTVERFTKEATRNIFENLFNLLHPPTLPKSNDLQSG

SEQ ID NO: 945 - protein, 618 aa, Chlamydomonas sp.
QCIRNLHVLNIRMPCMATNASVKLARPPMPVVSPGPSSVDGRIMARSGLQATNVSLTQAASKATSSSRKKKPAVVKSFSTHVCPHTNNNPTCSDSNCSCKPIFLTNIPDASKSLKSRTSDQGSTSSALDFYEYWDSSRQDLYRQLLWLPKTGTQGLVSSSFNGFAHSTPTRSSFSITKTEPLKTSLEKTSCPSFKYIVTDGTVEDATKSNAKPKLRTLKLKLNPTKAQKSMLAEFAGCSRFMYNKAVAARLGVGSTHKSVFRIRDRYVTNKVRGKGKMPNPYFKNRQWLLQCPKSVRQSAIKSALANIKACFSNLKAGNIKQFSAPFRRKKTELERGWVIEMDQKNVSKDGDKLFIFKEILGNMRYFGSKQLHKLMPEENPTHDPKVQKSRFGEYFLVLSVAARDRRAERKPVNPDKVATASIDPGVRKTMVTYSPENEESFMLGQGQASDLVKLLLVHDKLQSRLDTEKTLRSKERMKIKKLMIRIRKTIFYLKKEFRDQTTNFLAARYDVLLVPQLETAKMTISAERELTTKVARQMLTLSHSVLFNRLKEKCEEYGTVFLHVLEHYTSQTCPMCGFLNKCGETYTCKNCQFTCDRDIVGAAGIFLKAVRTENPCS

SEQ ID NO: 946 - protein, 801 aa, Chlamydomonas sp.
PRMEHVCDVCIKSSVMYKLCKMATKPPTVAKLKELLKLAEVAYSSKDKKDDIVRLCEVNGLIARPPPEYKTVEKMCVVKCALKKAMSLDDEEFGKFREHVDQLVNVVSRMLRRSSLVLTFHVTRLMEGDLPIPNMYDMKDTYWKDWLRIGVDGVFPDEESRISYEAVKDVIGKVLGSDDPDYINSYPIYFDQVLNYAGHTLSTVVSNNAWVPLVPRLTRLTKATLNALKAPKTIRVYDVMRVIQQEIQEMESWPESVQEYVREVRVRLKVPDGSRLYDDYGKDMDFPTMVRFNYWMQTRLEAIGARRIRLMPIFNVQRAHVRLDMKTLVNLFRHVFPKDPNIVELSKWKDVKDPDRFMLPLKPAVKKKKSCGPGEWEAYKLAQQKYDADVNDIKDTDEYRHAKGRYDTLVNARKTVAGSFFKKPPVKTGWVFDCSICTDGVSLSMQYSKTVQVRVSDLKKTSKRSRDDEGMSVSEQYDHKLKTTLPDMGIVVLGVDPGRSNIATVTYLADDKSKTWKLTRGAFYHKSGIKKQKKQQEKRFSDMIPRWESLRENGAALSTSRTDDISAYLKNYDTFSDEWWRMALLRRESRDNFQRYIGKRKAMDSFWAGIKRNMKLDHPDLRVRVAYGSAITTLKATGPGEVAVPTGSMFASCKRLFKEEVHVTDEFKTTLMSWETGAKKECVYKIPSVQITTEGQIRLGYELLGHTPLKETPKVSYRDQLAVRVYCTRKQIQEKHRRGGLAPSLVNNNSIKRYPEVQGLRFSPETSTYSDRDRSSALTIARLHCMELLGQGRPLPFCRDA

SEQ ID NO: 947 - protein, 362 aa, Chlamydomonas sp.
RSLIEHAVQQDSTARVSDLKKTSKRSRDDEGMSVSEQYDHKLKTTLPDMGIVVLGVDPGRSNIATVTYLADDKSKTWKLTRGAFYHKSGIKKQKKQQEKRFSDMIPRWESLRENGAALSTSRTDDISAYLKNYDTFSDEWWRMALLRRESRDNFQRYIGKRKAMDSFWAGIKRNMKLDHPDLRVRVAYGSAITTLKATGPGEVAVPTGSMFASCKRLFKEEVHVTDEFKTTLMSWETGDKKECVYKIPSVQITTEGQIRLGYELLGHTPLKETPKVSYRDQLAVRVYCTRKQIQEKHRRGGLAPSLVDNNSIKRYPEVRGLRFSPETSTYSDRDRSSALTIARLHCMELLGQGRPLPFCRDA

SEQ ID NO: 948 - protein, 616 aa, Chlamydomonas sp.
GQQGRVPSVDQNFIRQLMVGSRQAHMETRDATVERFFHNNYWFREKIEGREVIVKKKKQYVGAIARYDGDRNLYSHASKKYLTNFNNHYRVHLSTWIKKFVYSKENRILAKEFKDEHGIDETVFHRYLLYDIHSWGVKEDLIAIHSLLPERTKMLLKIQHSIIGRDEINRQWLKSVSNSAKMIRYNVFINRYLEATEDEGYANIAPIPTVRGRGLRQHRSHTNIAPIPTVKHSFITIDTDGLLGVLKDVGLVESLEKTLTNNEHWELVFDVENIRSTGKGVFTCTIDTDGVMACTHFLRAEKKKISIKDDGTAIKKQTKTLREFSESDPNVVVVANDPGRCNIAFLTWKKNKVEEKDKGGRKRKRHCEFGSKRLTRERYYVESGVFKSRGPTKKWLSNIQDCLDDLKDNSPKRTSLESFDAYVTVMVNHWDSRWGEMSKSRWGAQRLRLYGGKKRVLARFFNEVQADVGERKTIVIAYGSSKFAPGGKGELSVPTTSAFNAFSDRFKGRVAVIDEFRTTKIWHKDSTTVLQSVQSEKEGRTVRGLLWCSSTMENSKLFVNRDLNAAINIHNCFTMYPTRPGILARPKKYCKLEVVVGRTIDYKLTGSLQNAVSSEV

SEQ ID NO: 949 - protein, 832 aa, Chlamydomonas sp.
SVTLLTVVVAGPRDISPRGVRKMRSRWDPPRSSIRCTPTGAAAPLYRLAERIVSRSVCRSTVAKLKELLKLAEVAYSSKDKKDDIVRLCEDHGLIARPPPEYKTVEKMCVVKCALKKAISLDDEEFGKFRGHVDQLVNVVSRMLRRSSLVLTFHVTRLMEGDLPIPNMYDMKDTYWKDWLRIGVDGVFPDEESRISYEAVKDVIGKVLGSDDPDYINSYPIYFDQVLNYAGHTLSTVVSNNAWVPLVPRLTRLTKATLNALGAPKTIRVYDVMRVIQQEIQEMESWPESVQVYVREVRVRLKVPDGSQLYDDYGKDMDFPTMVWFNYWMQTRLEAIGARRIRLMPIFNVQRAHVRLDMKTLVNLFRYVFPKDPNIVELSKWENVKDPDRFMLPLKPSVKKKKSCGPGEWDAYKLAQQKYDADVKDIKATDEYRHAKGRYDTLVNARKTVAGSFFKKPPVKTGWVFDCSICTDGVSLSMQYSKTVQVRVSDLKNKSKRSRDEEGMSVSEQYDQKLKTTLPDMGIVVLGVDPGRSNIATVTYLADDKSKTWKLTSGAFDHKSGIKKQKKQQENMIPRWESLRENGAALSTSRKDDISAYLKNYATFSDEWWRMALRRRESRDNFQRYIGKRKAMDSFWAGIKRNMKLDHPDLRVRVAYGSAITKLKATGPGEVAVPTGSMFASCKRLFKEEVHVTDEFKTTLMSWETGAKKECVYKIPSVQITTEDQIRLGYELLGHTPLKETPKVSYRDQLAVRVYCTRKKIQEKHRRGGLAPSLADNNSIKRYPEVRGLRFSPETSTYSDRDRSSALTIARLHCMELLGQGRLLPFCRDACC

SEQ ID NO: 950 - protein, 347 aa, Chlamydomonas sp.
QHFKAPSSSRKRRNTVSSSHQSSSSIGVHTHTVQSSSSSSSHMHGGLRIPLFVHQRRWADNGTIRTIRTPDNQRLFDPSSIQGYLIEQEKKPSSRQVILYARVSSHNNNLTHDPKVQKSRFGEYFLVLSVASRHRRAERKPVHLDMVATASIDPGVRKTMVTYSPENEESFMLGQGQASDLVKLLLVHDKLQSRLDTEKTLRSKERKKIKKQMIRIRKRIFYLKKEFRDQTTNFLAARYDVLLVPQLETAKMTISAERELTTKVARQMLTLSHSVLFNRLKEKCAEYGTVFLHVLEHYTSQTCPMCGFLNKCGETYTCKNCQFTCDRDIVGAAGIFLKAVRTENPCS

SEQ ID NO: 951 - protein, 793 aa, Chlamydomonas sp.
KMATKPPTVAKLKELLKLAEVPYSSKSNKDDLVRLCEDNGLITSPPPEYKTVEKICVVKCALKKAMSLDDEEFGKFREHVDQLVNVVSRMLRRSSLVLTFHITSLLEKGLEIPDLYNMKDTYWKDWLRIGVDGIFPDEESKISYEAVKDSIGNVIGNDDADYIKSYPIYFDQVLNYAGHTLSTVVSNNAWVPLIPRLARLTSTTLNKLNAPKTLDTSKIIRGYDVMRAIQQEVQNMEGWPESVQEYVNEVREMLSVPDGSRVYDNYGKDMDFPTMVRFNYWIQKRLEDMDARRIRLMPIFNVQRVHVRLDLKTLVNLFRHMFPTDQNIVELSKWEHVKNPDSFMLPQRPAQKKKKSCGPGEWEAYKSVLKQYDDDVKDIKATDEYRHAKSLYDTLVNARKTVAGSFFRKPPVKNGWVFDCSICTDGVSLSMQYSKTVQVLVSDLKKTCKKSRKEEGIKIAEKYDSSLKTILPDMGIVVLGVDPGRSNIATVTYLADGKNKTWKLTRGAFYHKSGIKKQTRQKELRFADMIPMWESLRENGKALSTSRTDNISAYLSNYAKFSDEWWRLALRRRESRDNFQRYIGKRKVKDSFWAGIKRCMMKELPDMKVCVAYGSAITKLKPTGPGEVAVPTGPMFASCKRIFKEDVSVTDEFKTTLMSWETGKEKERVYKIPSVCSADVKLRLGGERFGHTKSKTMPKVADCDHLGVRLYNKRKRAQEKHRRGGFATSLVDSQKSIERYPEVRGLRFSPETCIYSDRDRSSALTIARLHCMELMGLGRPLPFAHSSYVVVDE

SEQ ID NO: 952 - protein, 460 aa, Chlamydomonas sp.
AKWEHVKNPDSFMLPQRPAQKKKKSCCPGEWEAYKSVLKQYDDDVKDIKATDEYRHAKGLYDTLVNAQKTVAGSFFRKPPVKNGWVFDCSICTDGVSLSMQYSKTVQVLVSDLKKTCKKPRKEEGIKIAEKYDGSLKTILPDMGIVVLGVDPGWSNIATVTYLADDKNKTWKLTRGAFYHKSGIKKQTRQKELRFADMIPMWESLRENGAALSTSRTDNISAYLSNYAKFSDEWWRLALRRRESHDNLQRYIGKRKVKDSFWAGIKRCMMKELPDMKVCVAYGSAITKLKPTGPGEVAVPTGAMFASCKRIFKEDVSVTDEFKTTLMSWETGKEKERVYKIPSVCSADVKLRLGGERFGHTKSKTMPKVADCDHLGVRLYNKRKRAQEKHRWGGFATSLVDSQKSIERYAEVRGLRFSPETCIYSDRDRSSALTIARLHCMELMGLGRPLPFAHSSSVDE

SEQ ID NO: 953 - protein, 685 aa, Chlamydomonas sp.
EWYRCPSPVNRNFFYRCLIAVSTNKCKGSTLGEDFESSRLLFDLLREPGQSKVDIRGNVKNQIIADLSILMATMASNHLWTNLERRITNYLKWKYPQIAKRLRSDIVAAVIKCPTKNLDVIFKMSPHTTKLPTKLPTARLRSAKSAVALAKKRVGRKEPEGSPLRVRLTKLQERLEKLSEAWLSSKNLRVDADNAKRFFARDVAFCLRRVLPLPSGNTFASRAHMTLPLYHKILSETIEEKRKTKNEKHRTFSLLPYKSGFTLSHIPISKMAFFYMVNECHFDSCKADVASKNHQGIWERFANLKKVETVSRKFGYRIVTDGFAISILMNKPTCLTCSMPADAFSTRAHEYVTTDEGGIVSFLDNVVVAAVDPGVTDIVTVTGLNGGTRSYSSAQYYRKGLIFKSQRQTDVWNLETADIVGGIIPDRDSSSSEQIGAYARFYMGAAPILLAHRASRGYRNLRFRRYCKKQKLIVEIADFVAPREKSAKVLVGFGDWKGLGATPISRRTCGPLQAIRFELRSRENVIMEDIDEFRTSQRCSCCENHLCNMVALTHRKKQDGTGWECTEGRKRIHKILHCKSSQSGAPRQQSGGMLHCGKTWDRDVNASRNILMLTLHQVFGRERPLAFRRDAPRSSSTTPPPPPDTDMGTQTVERSTKEATRNIFENLFNLLHPPTLPKSNDLQSG

SEQ ID NO: 954 - protein, 669 aa, Chlamydomonas sp.
NELCWKDWLRIGVDGVFPDEESRISYEAVKDVIGKVLGSDDPDYINSYPIYFDQVLNYAGHTLSTVVSNNAWVPLVPRLTRLTKATLKALGAPKTIRVYDVMRVIQQEIQEMESWPESVQEYVREVRVRLKVPDGSRLYDDYGKDMDFPTMVRFNYWMQTRLEAMGARRIRLMPIFNVQRAHVRLDMKTLVNLFRHVFPKDPNIVELSKWENVKDPDRFMLPLKHAVKKKKSCGPGEWEAYKLAQQKYDADVKDIKATDEYRHAKGRYDTLVNARKTVACSFFKKPPVKTGWVFDCSICTDGVSLSMQYSKTVQVRVSDLKKTSKRSRDEEGMSVAEQYDHKLKTTLPDMGIVVLGVDPGRSNIATVTYLADDKSKTWKLTRGAFYHKSGIKKQKRQQEKRFTDMIPMWASLRENGAALSTSRMDDISVYLSNYATFSDEWWRLALRCRESRDNLQRYIGKRKAMDSFWAGIKRNMMMDHPDLRVRVAYGSAITKLKATGPGEVAVPTGSMFASCKRIFKEEVRVTDEFKTTLMSWETGAKKECVYKIPSVSLNAEGQIRLGDEWLFCHTLLKKPPKVAERDQSAVRVYCTRKKKQEKHRRGGLATSLVDVNKLIKRYPEVRGLRFSPETSTYSDRDRSSALTIARLHCMELLGLGRPLPFSRCKAACC

SEQ ID NO: 955 - protein, 684 aa, Chlamydomonas sp.
METIVNKEPPDKRTRPDRAAKIKDRKNGKENVVKCTLSRIIADKDNKDVIIKVIKERVDSVSKKTYLAGVAVNRILKEVFEGVPDAQLHTVSVPSVDQNFIRQLMVGSRQAHMETRDATVERFFHNNYWFREKIEGREVIVKKKKQYVGAIARYDGDRNLYSHASKKYLTNFNSHYRVHLSTWIKKFVYSKENRILAKEFKDEHGIDETVFHRYLLYDIHSWGVKEDLIAIHSLLPERTKMLLKIQHSILGRDKINRQWLKCVSNSAKMIRYNVFINRYLEATEDEGYAKLVNIAPIPTVKHAFITIDTDGLLGVLKDVGLIESLEKTLTNKEHWESVFDVENIRSTGKGVFTCTIDTDGVMACTHFLRAEKKKISIKDDGTAIKTKTLREFSESDPNVVVVANDPGRCNIAFLTWKKNKVEEKDKGGRKRKRHCEFGSKRLTRERYYVESGVFKSRGPTKKWLSNIQDCLDDLKDNSPKRTSLVSFDAYVTVMVNHWDSRWGEMSKSRWGAQRLRLYGGKKRVLARFFNEVQADVGERKTIVVAYSSANFAPGGKGELSVPTTSAFNAFSDRFKGRVAVIDEFRTTKIWHKESTTVLQSVQSEKEGRTVRGLLWCSSTMENSKLFVNRDLNAAINIHNCFTMNPIRPGILARPKKYCKLEVVVGRKIDYKLTGSLQNAVSSEV

SEQ ID NO: 956 - protein, 316 aa, Chlamydomonas sp.
YHGCFRRPKTCRLREGGHSSLGTSNRRRLNTNRIESFSSARFSEVAGYNTSKRRTYKWNDETQDLVKSIPSPNTSNMVDLQDHVRAYLKALPILLQHRANKGYRSMRFFRYVGKQKAIGKVCDMIAPRAKTTVVGFGNWSNQGYGISRSCSGPIKEIRRCLSRRKNVLFKNVDERNTSCKCHGCFQRLVNMKADSGVWSGVCKESPIDGSITVEKQKMVVKNVKVHKVLHCRDSVKSASSNVRCGATWNRDVNAAKNLLLLLTTWMDGRERPEAFCVPSPPPKTTVSIEASVSAKPIYPPGFVSSLPCYPLGQLKC

SEQ ID NO: 957 - protein, 258 aa, Chlamydomonas sp.
GGRKRKRHCEFGSKRLTRERYYVESGVFKSRGPTKKWLSNIQDCLDDLKDNSPKRTSLVSFDAYVTVMVNHWDSRWGEMSKSRWGAQRLRLYGGKKRVLARFFNEVQEDVGERKTIVVAYGSAKFAPGGKGELSVPTTSAFNAFSDCFKGRVAVIDEFRTTKIWHKDSTTVLQSVQSEKEGRTVRGLLYCSSTMENSKLFVNRDLNAAINIHNCFTMYPIRPGILARPKKYCKLEVVVGRKIDYKLTGSLQNAVSSEV

SEQ ID NO: 958 - protein, 254 aa, Chlamydomonas sp.
MPADAFSTRAHEYVTTDEGGIVSFRDNVVVAAVDPGVTDIVTVTGLDGGTRSYSSAQYYRKGLIFKSQRQTDVWNLETADIVGDIIPDRDSSRSEQIGAYARFYKGAAPILLAHRASRGYRNLRFRRYCKKQKLIVEIADFVATREKKVWGRRQSLGGLVALSKLFVSSFVAEKTSSWRTSMSSEHLNDAAAVRTAFATWWHSLIVRSKTVLVGNVQKDASGFTRFSTAKAVKAERHANRAVVGSTAGRLGTAM

SEQ ID NO: 959 - protein, 500 aa, Chlamydomonas sp.
WKYPQIAKRLRSDIVAAVIKCPTKNLDVIFKMSPHVAKLPTKLPTARLRSAKSAMALAKQRVGRKEPEVSPLRVRLTKLQARFEKLSEAWLSSKNLRVDEDNAKRFFARDVAFCLRGVLPLPSGNTFAPRAHMTLPLYQKILSETIKEKRKTKNEKLRTFSLLPYKSGFTLSHIPISKMAFFYMVNECHFDSCKADVASKNHQGIWERFANLKKVETVSRKFGYRIVTDGFAVSILMNKPTCLTCSMPADAFSTRAHEYVTTDEGGILSFRDNVVVAAVDPGVTDIVTVTGLDGGTRSYSSAQYYRKGLIFKSQRQTDVWNLETVDIVGDIIPDRDSSRSEQIGAYARFYKGAAPILLAHRASRGYRNLRFRRYCKKQKLIVEIADFVATREKKVWGRRQSLGGLVALSKLFVSSFVAKKTSSWRTSMSSEHLNDAAAVRTAFATWWHSLIVRSKTVLVGNVQKDASGFTRFSTAKAVKAERHANIAVVGSTAGRLGTAM

SEQ ID NO: 960 - protein, 286 aa, Chlamydomonas sp.
DGSEERFQGWRQTLHLQRHIGQHALLSVAKQLHKLMLRKTRPTIPRSKNPASANISSSCLSLPGTGGQIGSLSIQTRFATASIDPGVRKTMVTYSPENEESFMLGQGQASDLVKLLLVHDKLQSRLDTEKTLRSKERMKIKMQMIRIRKRIFYHKKEFRDQTTNFLAARYDVLLVPQLETAKMTISAERELTTKVARQMLTLSHSVLFNRLKEKCEEYGTVFLHVLEHYTSQTCHMCGFLNKCGETYTCKNCQFTCDRDIVGAAGIFLKAVRTEIPVCKGQHPRGS

SEQ ID NO: 961 - protein, 291 aa, Chlamydomonas sp.
LGAILSQGSDLQISASNCVWNLETADIFGDVIPDRDSPMSQHIGAYARFYMGAAPILLAHRASRGYRNLRFRRYCKKQKLIVEIAAFVAPREKSTKVLVGFGDWKGLGATPISRRTCGPLQAIRFELRSRENVIMEDVDEFRTSQRCSCCETRLCNMVAHTHRKKQDGTWECTEGRKRIHKILHCKSSQSGAPRQQSGGRLHCGKTWDRDVNASRNILMLTLHQVFGRERPLAFRRDAPRGSSKNPPIPDTDMGTQTVERFTTEATRNIFENLFNLLHPPTLPKRNDLQSG

SEQ ID NO: 962 - protein, 695 aa, Chlamydomonas sp.
LWKMASKPPTVAKLKELLKLAEVPYSSKSNKDDLVRLCEDNGLIARPPPEYKTVEKMCVVKCALKKAMSLDDEEFGKFREHVDQLVNVVSRMLRRSSLVLTFHITSLLEKGLEIPDLYNMKDTYWKDWLRIGVDGIFPDEESKISYEAVKDSIGDVIGNDDTDYIKSYPIYFDQVLNYAGHTLSTVVSNNAWVPLIPRLARLTSTTLNKLNAPKTLDTSKIIRGYDVMQAIQQEVQNMEGWPESVQEYVNEVREMLSVPDGSRVYDNYGKDMDFPTMVRFNYWIQTRLEDMDARRIRLMPIFNVQRVHVRLDLKTLVNLFRHMFPNDQNIVELSKWEHVKNPDSFMLPQRPAQKKKKSCGPGEWEAYKSVLKQYDDDVKDIKATDEYRHAKGLYDTLVNARKTVAGSFFRKPPAKNGWVFDCSICTDGVSLSMQYSKKVQVLVSDLKKTCKKPRKEEGIKIAEKYDGSLKTILSDMGIVVLGVDPGRSNIATVKIDDKNKTWTLTRGAFYHKLGIKKQTRQKELRFADMIPMWESLRENGAALSTSRTDKISAYLSNYAKFSEEWWGLALRRRESRDTLQRYIGKRKVKDSFWAGIKRCMMKELPDMKVCVAYGSAITKLKPTGPGEVAVPTGAMFASCKRIFKEDVSVTDEFKTTLMSWETGKEKERVYKIPSVCSADVKLRLGGERFGHTKSP

SEQ ID NO: 963 - protein, 301 aa, Chlamydomonas sp.
EADQDSPRVFRVRPQCGGRCKRPWPLQHCLFDLEENKVEEKDKGGRKRKRHCEFGSKRLTRERYYVESGVFKSRGPTKKWLSNIQDCLDDLKDNSPKRTSLVSFDAYVTVMVNHWDSRWGEMSKSRWGAQRLRLYSGKKRVLARFFNEVQADVGERKTIVVAYGSGKFAPGGKGELSVPTTSAFNAFSDRFKGRVAVIDEFGTTKIWHKDSTTALQSVHSEKEGRTVRGLLWCSSTMENSKLFVNRDLNAAINIHNCFTMYPTRPGILARPKKYCKLEVVVGRTIDYKLTGSLQNVVSSEV

SEQ ID NO: 964 - protein, 801 aa, Chlamydomonas sp.
PRMEHVCDVCIKSSVMYKLCKMATKPPTVAKLKELLKLAEVAYSSKDKKDDIVRLCEDNGLIARPPPEYKTVEKMCVVKCALKKAMSLDDEEFGKFREHVDQLVNVVSRMLRRSSLVLTFHVTRLMEGDLPIPNMYDMKDTYWKDWLRIGVDGVFPDEESRISYEAVKDVIGKVLGSDDPDYINSYPIYFDQVLNYAGHTLSTVVSNNAWVPLVPRLTRLTKATLNALKSPKTIRVYDVMRVIQQEIQEMESWPESVQEYVREVRVRLKVPDGSRLYDDYGKDMDFPTMVRFNYWMQTRLESIGARRIRLMPIFNVQRAHVRLDMKTLVNLFRHVFPKDPNIVELSKWKDVKDPDRFMLPLKPAVKKKKSCGPGEWEAYKLAQQKYDADVNDIKDTDEYRHAKGRYDTLVNARKTVAGSFFKKPPVKTGWVFDCSICTDGVALSMQYSKTVQVRVSDLKKTSKRSRDDEGMSVSEQYDHKLKTTLPDMGIVVLGVDPGRSNIATVTYLADDKSKTWKLTRGAFYHKSGIKKQKKQQEKRFSDMIPRWESLRENGAALSTSRTDDISAYLKNYDTFSDEWWRMALLRRESRDNFQRYIGKRKAMDSFWAGIKRNMKLDHPDLRVRVAYGSAITTLKATGPGEVAVPTGSMFASCNRLFKEEVHVTDEFKTTLMSWETGAKKECVYKIPSVQITTEGQIRLGYELLGHTPLKETPKVSYRDQLAVRVYCTRKQIQEKHRRGGLAPSLVDNNSIKRYPEVRGLRFSPETSTYSDRDRSSALTIARLHCMELLGQGRPLPFCRDA

SEQ ID NO: 965 - protein, 721 aa, Chlamydomonas sp.
PRMEHVCDVGIKSSVMYKLCKMATKPPTVAKLKELLKLAEVAYSSKDKKDDIVRLCEDNGLIARPPPEYKTVEKMCVVKCALKKAMSLDDEEFGKFREHVDQLVNVVSRMLRRSSLVLTFHITSLLEKGLDIPDLYNMKDTYWKDWLRIGVDGIFPDEESKISYEAVKDSIGDVIGNDDADYIKSYPIYFDQVLNYAGHTLSTVVSNNAWVPLIPRLARLTSTTLNKLNAPKTLDTSKIIRGYDVMQAIQQEVQNMEGWPESVQEYVNEVREMLSVPDGSRVYDNYGKDMDFPTMVRFNYWIQTRLEDMDARRIRLMPIFNVQRVHVRLDLKTLVNLFRHMFPNDQNIVELSKWEHVKNPDSFMLPQRPAQKKKKSCGPGEWDAYKSVLKQYDDDVKDIKATDEYRHAKGLYDTLVNARKTVAGSFFRKPPVKNGWVFDCSICTDGVSLSMQYSKTVQVLVSDLKKTCKKPRKEEGIKIAEKYDGSLKTILPDMGIVVLGVDPGRSNIATVTYLADDKNKTWKLTRGAFYHKSGIKKQTRQKELRFADMIPMWESLRENGAALSTSRTDKISAYLSNYAKFSDEWWRLALRRRESRDNFQRYIGKRKVKDSFWAGIKRCMMKELPGMKVCVAYGSAITKLKPTGPGEVAVPTGAMFASCKRIFKEDVSVTDEFKTTLMSWETGKEKERVYKIPSVCSADVNLRLGGERFGHTKSKNDAKGR

SEQ ID NO: 966 - protein, 801 aa, Chlamydomonas sp.
PRMEHVCDVGIKSSVMYKLCKMATKPPTVAKLKELLKLAEVAYSSKDKKDDIVRLCEDNGLIAKPPPEYKTVEKMCVVKCALKKAMSLDDEEFGKFREHVDQLVNVVSRMLRRSSLVLTFHVTRLMEGDLPIPNMYDMKDTYWKDWLRIGVDGVFPDEESRISYEAVKDVIGKVLGSDDPDYINSYPIYFDQVLNYAGHTLSTVVSNNAWVPLVPRLTRLTKATLNALKAPKTIRVYDVMRVIQQEIQEMESWPESVQEYVREVRVRLKVPDGSRLYDDYGKDMDFPTMVRFNYWMQTRLEAIGARRIRLMPIFNVQRAHVRLDMKTLVNLFRHVFPKDPNIVELSKWKDVKDPDRFMLPLKPAFKKKKSCGPGEWEACKLSQQKYDADVNDIKDTDEYRHAKGRYDTLVNARKTVAGSFFKKPPVKTGWVFDCSICTDGVSLSMQYSKTVQVRVSDLKKTSKRSRDDEGMSVSEQYDHKLKTTLPDMGIVVLGVDPGRSNIATVTYLADDKSKTWKLTRGAFYHKSGIKKQKKQQEKRFSDMIPRWESLRENGAALSTSRTDDISAYLKNYDTFSDEWWRMALLRRESRDNFQRYIGKRKAMDSFWAGIKRNMKLDHPDLRVRVAYGSAITTLKATGPGEVAVPTGSMFASCKRLFKEEVHVTDEFKTTLMSWETGAKKECVYKIPSVQITTEGQIRLGYELLGHTPLKETPNVSYRDQLAVRVYCTRKQIQEKHRRGGLSPSLVDNNSIKRYPEVRGLRFSPETSTYSDRDRSSALTIARLHCMELLGQGRPLPFCRDA

SEQ ID NO: 967 - protein, 686 aa, Chlamydomonas sp.
METIVNKEPPDKRTRPDRAAKIKDRKNGEENVVKCTLSRIIADKDNKDVITKVIKERVDSVSKRTYLAGVAVNRILKEVFEGVPDAQLHTVSVPSVDQNFIRQLMVGSRQALMETRDATVERFFHNNYWFREKIEGREVIVKKKKQYVGAIARYDGDRNLYSHASKKYLTNFNNHYRVHLSTWIKKFVYSKENRILAKEFKDEHGIDETVFHRYLLYDIHSWGVKEDLIAIHSLLPERTKMLLKIQHSIIGQDEINRQWLKSVSNSAKMIRYNVFINRYLEATEDEGYAKLVNIAPIPTVKHSFITIDTDGLLGVLKDVGLVESLEKTLTNKEHWESVFDVENIRSTGKGVFTCTIDTDGVMACTHFLRAEKRKISIKDDGTAIKKQTKTLREFSESDPNVVVVANDPGRCNIAFLTWKKNKVKEKDNGGRKRKRHCEFGSKRLTRERYYVESGVFKSRGPTKKWLSNIQDCLDDLKDNSPKRTSLESFDAYVTVMVNHWDSRWGEMSKSRWGAQRLRLYGGKKRVLARFFNEVQADVGERKTIVIAYGSSKFAPGGKGELSVPTTSAFNAFSDRFKGRVAVIDEFRTTKIWHKDSTTVLQSVQSEKKGRTVRGLLWCSSTMENSKLFVNRDLNAAINIHNCFTMYPTRPGILARPKKYCKLEVVVGRTIDYKLTGSLQNAVSSEV

SEQ ID NO: 968 - protein, 713 aa, Chlamydomonas sp.
GNCPLVWYHQNNNHSLSMGVVTNNGDDDDLDIMVVKKTLNSLCMDVSRQKICSRIQRMVLVINHAVAEAYLFANFHITRCLDDGDFDVKQLPHLDRNFYYRCILAVSISNVRNDTLDQSLKDSMVAFDALRPAGYLKVDVCQWGQVIADVSIQMATMACNSVWANVDRVVIKYLRLKHPSLKKHFNKIVKAVVQYPDSDIDKIIPAGLVHANLIKDVVRRLRDLLPLPRGKQFNTRAHLTMRLFHHVLTELGADLKEKTTKKRPRLFSILPRKSGFTISYVPISSMTLMKLLSMGDSPLESVRGDGRHDNHSMLWRKYFNVQGLEKKGSRFDNRILSDGKGVSVQMKHQVGKDIAGEGGGDNAGYPKDASIEDCQDASLRQGALRVGIDPGMTDIVTIASSDGRVEYFSSARFSEAAGYNTSNRRTNKWNADTQDLVKSIPSPTTSSMHDMQDHVRGYLSALPTLLQHRANRGYRSMRFFRYVGKQKTIEKVCDLIAPKAQKKTIEEKVCDVIAPKAKKTVVGFGNWSNQGYGISRSCSGPVKEIRKCLSRRQNVLFKNVDERNTSCTCHGCFQKLANMKADSVVWRRVQNEPSALIDGAPTTTTTTTTFEKQKTVVKNVKVHKVLHCRNSVKSASSNVRCGATWNRDVNAAKNLLLLLTTWMDGKERPAAFCVPSSSPTPKTTVSGEANVGAQPTDPPGSVSSLQLLSSGPA

SEQ ID NO: 969 - protein, 226 aa, Chlamydomonas sp.
RSDQEVSNIQDCLDDLKDNSPKRTSLESFDAYVTVMVNHWDSRWGEMPKSRWGAQRLRLYGGKKRVLARFFNEVQADVGERKTIVIAYGSSKFAPGGKGELSVPTTSAFNAFSDRFKGRVAVIDEFRTTKIWHKDSTTVLQSVQAEKEGRTVRGLLWCSSTMENSKLFVNRDLNAAINIHNCFTMYPTRPGILARPKKYCKLEVVVGRTIDYKLTSSLQNAVSSEV

SEQ ID NO: 970 - protein, 794 aa, Chlamydomonas sp.
ECSREPVCRSRLHQNVFGVQFVMENGIGESSSLVHEADQHDDVAELVDYEGEEDEECAPGRAICVVKMKLSTFIPHDWLRNKIDTLVLDMNKLLGEGYIFANFHIARLFENGIAVPPVNRNFFYRCLIAVSTNKCKGSTLGEDFESSRLLFDLLREPGQSKVDIRGNVKNQIIADLSILMATMASNHLWTNLERRITTYLKWKYPQIAKRLRSDIVAALIKCPTKNLDVIFKMSPHTTKLPTKLPTARLRSAKSAVALAKKRVGRKEPEGSPLRVRLTKLQERLEKLSEAWLSSKNLRVDADNAKRFFAREVAFCLRGVLPLPSGNTFASRAHMTLPLYHKILSETIEEKRKTKNEKHSTFSLLPYKSGFTLSHIPISKMTFFYMVNECHFDSCKADVASKNHQGIWERFANLKKVETVSRKFGYRIVTDGFAVSVLMNKPTCLTCSMPADAFSTRAHEYVTTDEGGIVSFLDNVVVAAVDPGVTDIVTVTGLNGGTRSYSSAQYYRKGLIFKSQRQTDVWNLETADIVGGIIPDRDSSSSEQIGAYARFYMGAAPILLAHRASRGYRNLRFRRYCKKQKLIVEIADFVAPREKSAKVLVGFGDWKGLGATPISRRTCGPLQAIRFELRSRENVIMEDIDEFKTSQRCSCCENHLCNMVALTHRKKQDGTGWECTEGRKRIHKILHCKSSQSGAPRQQSGGMLHCGKTWDRDVNASRNILMLTLHQVFGRERPLAFRRDAPRSSSTTPPPPPDTDMGTQTVERFTKEATRNIFENLFNLLHPPTLPKSNDLQSG

SEQ ID NO: 971 - protein, 794 aa, Chlamydomonas sp.
ECSREPVCRSRIHQNVFGVQFVMENGIGESSSLVHEADQHDDVAELVDYEGEEDEECAPGRAICVVKMKLSTFIPHDWLRKKIDTLVLDMNKLLGEGYIFANFHIARLFENGIAVPPVNRNFVYRCLIAVSTNKCKGSTLGEDFESSRLLFDLLREPGQSKVDIRGKVKNQIIANLSILMATMASNHLWTNLERRITTYLKWKYPQIAKRLRSDIVAAVIKCPTKNIDVIFKMCPHTTKLPTKLPTTRLRSAKSAVALAKKRVGRKEPEGSPLRVRLTKLQERLEKLSEAWLSSKNIRVDADNAKRFFARDVAFCLRGGLPLPSGNTFASRAHMTLPLYHKILSETIEEKRKTKNEKHSTFSLLPYKSGFTLSYIPISKMAFFYMVNECHFDSCKADVASKNHQGIWERFANLKKVETVSRKFGYRIVTDGFAVSVLMNKPTCLTCSMPADAFSTRAHEYVTTDEGGIVSFLDNVVVAAVDPGVTDIVTVTGLNGGTRSYSSAQYYRKGLIFKSQRQTDVWNLETADIVGGIIPDRDSSSSEQIGAYARFYMGAAPILLAHRASRGYRNLRFRRYCKKQKLIVEIADFVAPREKSAKVLVGFGDWKGLGATPISRRTCGPLQAIRFELRSRENVIMEDIDEFKTSQRCSCCENHLCNMVALTHRKKQDGTGWECTEGRKRIHKILHCKSSQSGAPRQQSGGMLHCGKTWDRDVNASRNILMLTLHQVFGRERPLAFRRDAPRSSSTTPPPPPDTDMGTETVERFTKEATRNIFENLFNLLHPPTLPKSNDLQSG

SEQ ID NO: 972 - protein, 658 aa, Chlamydomonas sp.
QCIRNLHVLNIRMPCMATKASVKLARPPMPLVSPGPSSVDGRIMARSERSGLQATNVSLTQAASKATSLSRKNNPAVVKSFSTHVCPHTNNNPTCSDSNCSCKPIFLTNIPDASKSLKSRTSDQGSTSSAQDFYEYWDSSRQDLYRQLLWLPKTGSQGLVSSSLNGFARSTPARSSFSITKTEPLKTSLEKTSCPSFKYIVADGTVEDATKSNAKPKLRTLKLKLNPTKAQKSMLAEFAGCSRFMYNKAVAARLGVGSTHKSVFRIRDRYVTNKVRGKGKMPNPYFKNRQWLLQCPKSVRQSAIKSALANIKACFSNLKAGNIKQFSAPFRRKKTELERGWVIEMDQKNVSKDGDKLFIFKDILGNMRYFGSKQLHKLMPEENPTHDPKVQKSRFGEYFLVLSVAARDRRAERKPVNPDKVATASIDPGVRKTMVTYSPENEESFMLGQGQASDLVKLLLVHDKLQSRLDTEKTLRSKERMKIKKLMIRIRKTIFYLKKEFRDQTTNFLAARYDVLLVPQLETAKMTISAERELTTKVARQMLTLSHSVLFNRLKEKCEEYGTVFLHVLEHYTSQTCPMCGFLNKCGETYTCKNCQFTCDRDIVGAAWHLPEGCSNRKSLFVKDSIPWGVDPCDTPMENSLSFLLHVPRAPGCLVRNS

SEQ ID NO: 973 - protein, 813 aa, Chlamydomonas sp.
PRMEHVCDVCIKSSVMYKLCKMATKPPTVAKLKELLKLAEVAYSSKDKKDDIVRLCEDNGLIAIPPPEYKTVEKMCVVKCALKKAMSLDDEEFGKFREHVDQLVNVVSRMLRRSSLVLTFHITSLLEKGLDIPDLYNMKDTYWKDWLRIGVDGIFPDEESKISYEAVKDSIGDVIGNDDADYIKSYPIYFDQVLNYAGHTLSTVVSNNAWVPLIPRLARLTSTTLNKLNAPKTLDTSKIIRGYDVMQAIQQEVQNMEGWPESVQEYVNEVREMLSVPDGSRVYDNYGKDMDFPTMVRFNYWIQTRLEDMDARRIRLMPIFNVQRVHVRLDLKTLVNLFRHMFPNDQNIVELSKWEHVKNPDSFMLPQRPAQKKKKSCGPGEWEAYKSVMKQYDDDVKDIKATDEYRHAKGLYDTLVNARKTVAGSFFRKPPVKNGWVFDCSICTDGVSLSMQYSKTVQVLVSDLKKTCKKPRKEEGIKIAEKYDGSLKTILPDMGIVVLGVDPGRSNIATVTYLADDKNKTWKLTRGEFYHKSGIKKQTRQKELRFADMIPMWESLRENGAALSTSRTDKISAYLSNYAKFSDEWWRLALRRRESRDNFQRYIGKRKVKDSFWAGIKRCMMKELPDMKVCVAYGSAITKLKPTGPGEVAVPTGAMFASCKRIFKEDVSVTDEFKTTLMSWETGEEKERVYKIPSVCSADVKLRLGGERFGHTKSKTMPKVADCDHLGVRLYNKRKGAQEKHRRGGFATSLVDSQKSIERYPEVRGLRFSPETCIYSDRDRSSALTIARLHCMELMGLGRPLPFAHSSSVVVDE

SEQ ID NO: 974 - protein, 223 aa, Chlamydomonas sp.
MYDIAVSNLQRYIGKRKVKDSFWAGIKRCMMKELPDMKVCVAYGSAITKLKPTGPGEVAVPTGAMFASCKRIFKEDVSVTDEFKTTLMSWETGKEKERVYKIPSVCSADVKLRLGGERFGHTKSKTMPKVADCDHLGVRLYNKRKGAQEKHRRGGFATSIVDSQKSIERYPEVRGLRFSPETCIYSDRDRSSALTIARLHCMELMGLGRPLPFAHSSSVVVDE

SEQ ID NO: 975 - protein, 793 aa, Chlamydomonas sp.
KMATKPPTVAKLKELLKLAEVPYSSKSNKDDLVRLCEDNGLIARPPPEYKTVEKMCVVKCALKKAMSLDDEEFGKFREHVDQLVNVVSRMLRRSSLVLTFHITSLLEKGLDIPDLYNMKDTYWKDWLRIGVDGIFPDEESKISYEAVKDSIGDVIGNDDADYIKSYPIYFDQVLNYAAHTLSTVVSNNAWVPLIPRLARLTSTTLNRLNAPKTLDTSKIIRGYDVMQAIQQEVQNMEGWPESVQEYVNEVREMLSVPDGSRVYDNYGKDMDFPTMVRFNYWIQTRLEDMDARRIRLMPIFNVQRVHVRLDLKTLVNLFRHMFPNDQNIVELSKWEHVKNPESFMLPQRPAQKKKKSCSPGEWEAYKSVLKQYDDDVKDIKATDEYRHAKGLYDTLVNARKTVAGSFFRKPPVKNGWVFDCSICTDGVSLSMQYSKTVQVLVSDLKKTCKKPRKEEGIKIAEKYDGSLKTILPDMGIVVMGVDPGRSNIATVTYLADDKNKTWKLTRGAFYHKSGIKKQTRQKELRFADMIPMWESLRENGAALSTSRTDNISAYLSNYAKFSDEWWRLALRRRESRDNLQRYIGKRKVKDSFWAGIKRCMMKELPDMKVCVAYGSAITKLKPTGPGEVAVPTGAMFASCKRIFKEDVSVTDEFKTTLMSWETGKEKERVYKIPSVCLADVKLRLGGERFGHTKSKTMPKVADCDHLGVRLYNKRKGAQEKHRRGGFATSLVDSQKSIERYPEVRGLRFSPETCIYSDRDRSSALTIARLHCMELMGLGRPLPFAHSSSVVVDE

SEQ ID NO: 976 - protein, 244 aa, Chlamydomonas sp.
ILIINLKKSAGRQERPLCACQSRQGCNCLSIQTRLQLPVNPDKVATASIDPGVRKTMVTYSPENEESFMLGQGQASDLVKLLLVHDKMQSRLDTEKTLRSKERMKIKKLMIRIRKTIFYLKKEFRDQTTNFLAARYDVLLVPQLETAKMTISAERELTTKVARQMLTLSHSVLFNRLKEKCEEYGTVFLHVLEHYTSQTCPMCGFLNQCGETYTCKNCQFTCDRDIVGAAGIFLKAVRTENPCS

SEQ ID NO: 977 - protein, 801 aa, Chlamydomonas sp.
PRMEHVCDVCIKSSVMYKLCKMATKPPTVAKLKELLKLAEVAYSSKDKKDDIVRLCEDNGLIARPPPEYKTVEKMCVVKCALKKAMSLDDEEFGKFREHVDQLVNVVSRMLRRSSLVLTFHVTRLMEGDLPIPNMYDMKDTYWKDWLRIGVDGVFPDEESRISYEAVKDVIGKVLGSDDPDYINSYPIYFDQVLNYAGHTLSTVVSNNAWVPLVPRLTRLTKATLNALKAPKTIRVYDVMRVIQQEIQEMESWPESVQEYVREVRVRLKVPDGSRLYDDYGKDMDFPTMVRFNYWMQTRLESIGARRIRLMPIFNVQRAHVRLDMKTLVNLFRHVFPKDPNIVELSKWKDVKDPDRFMLPLKPAVKKKKSCGPGEWEAYKLAQQKYDADVNDIKDTDEYRHAKGRYDTLVNARKTVAGSFFKKPPVKTGWVFDCSICTDGVSLSMQYSKTVQVRVSDLKKTSKRSRDDEGMSVSEQYDHKLKTTLPDMGIVVLGVDPGRSNIATVTYLADDKSKTWKLTRGAFYHKSGIKKQKKQQEKRFSDMIPRWESLRVNGAALSTSRTDDISAYLKNYDTFSDEWWRMALLRRESRDNFQRYIGKRKAMDSFWAGIKRNMKLDHPDLRVRVAYGSAITTLKATGPGEVAVPTGSMFASCKRLFKEEVHVTDEFKTTLMSWETGAKKECVYKIPSVQITTEGQIRLGYELLGHTPLKETPKVSYRDQLAVRVYCTRKQIQEKHRRGGLAPSLVDNNSIKRYPEVRGLRFSPETSTYSDRDRSSALTIARLHCMELLGQGRPLPFCRDA

SEQ ID NO: 978 - protein, 802 aa, Chlamydomonas sp.
ECSREPVCRSRLHQKVFGVQFVMENGIGESSSLAHEADQHDDVAELVDYEGEEDEECAPGRAICVVKMKLSTFIPHDWLRKKIDTLVLDMNKLLGEGYIFANFHIARLFENGIAVPPVNRNFFYRCLIAVSTNKCKGSTLGEDFESSRLRFDLLREPGQSKVDIRGNVKNQIIADLSILMATMASNHLWTNLERRITTYLKWKYPQIAKRLRSDIVAAVIKCPTKNLDVIFKMSPHTTKLPTKLPTARLRSAKNAVALAKKRVGRKEPEGSPLRVRLTKLQERLEKLSEAWLSSKNLRVDADNAKRFFARDVAFCLRGVLPLPSGNTFASRAHMTLPLYHKILSETIEEKRKTKNEKHRTFSLLPYKSGFTLSHIPISKMAFFYMVNECHFDSCKADVASKNHQGIWERFANLKKVETVSRKFGYRILTDGFAVSILMNKPTCLTCSMPADAFSTRAHEYVTTDEGGIVSFLDNVVVAAVDPGVTDIVTVTGLNGGTRSYSSAQYYRKGLIFKSQRQTDVWNLETADIVGGIIPDRDSSSSEQIGAYARFYMGAAPILLAHRASRGYRNLRFRRCCKKQKLIVEIADFVAPREKSAKVLVGFGDWKGLGATPISRRTCGPLQAIRFELRSRENVIMEDIDEFRTSQRCSCCENHLCNMVALTHRKKQDGTGWECTEGPKRIHKILHCKSSQSGAPRQQSGGMLHCGKTWDRDVNASRNILMLTLHQVFGRERPLAFRRTRREVPRQPHPHPLILIWGHRRLNGLPKRLLGISSRTSSTCCTPQRCPKATICSLDDYKVSHFI

SEQ ID NO: 979 - protein, 712 aa, Chlamydomonas sp.
GNCPLVWYHQNNNHTLSMGVVTNNGDDDDLDIMVAKKTLNSLCMDVSRQQICSRIQSMVLVINHAVAEAYLFANFHITRCLDDGDFDVKQLPHLDRNFYYRCILAVSISNVRNDTLDQSLKDSMVAFDALRPAGYLKVDVCQWGQVIADVSIQMATMACNSVWENVDRVVIKYLRLKHPSLKKHFNKIVKAVVQYPDSDIDKIIPAGLVHANLIKDVVRRLRDLLPLPRGKQFNTQAHLTMRLFHHVLTELGADLKEKTTKKRPRLFSILPRKSGFTISYVPISSMTLMKLLSMGDSPLESVSGDGRHENHSMLWRKYFNVQGLETKGSRFDNRILSDGKGVSVQMKHQVGKDIAGEGGGDNAGYPKDASIEDCRDASLRQGALRVGIDPGMTDIVTIASSDGRVESFSSARFSEAAGYNTSNRRTNKWNADTQDLVKSIPSLTTSSMHDMQDHVRGYLSALPTLLQHRANRGYRSMRFFRYVGKQKTIEKVCDLIAPKAQKKTIEEKVCDVIAPKAKKTVVGFGNWSNQGYGISRSCSGPVKEIRKCLSRRQNVLFKNVNERNTSCTCHGCFQKLVNMKADSVVWRRVQNEPSALIDGAPTTTTTTTFEKQKMVVKNVKVHKVLHCCNSVKSASSNVRCGATWNRDVNAAKNLLLLLTTWMDVKERPAAICVPSSSPTPKSTVSGEANVGAQPTDPPGSVSSLQLLSSGPA

SEQ ID NO: 980 - protein, 422 aa, Chlamydomonas sp.
KNKKSHPRLFSILPRKNGFTISYVPISSMTFMKLLSMGDSPLQSISGDGRYENHTMLWRKYFDVQGLETKRSRFDNRILSDGKGVSVQMKQKAKEEVVEEGENAGYPKNANIVECKDAVGALRVGVDPGMTDIVTVASSAGRIEYFSFSEVAGYNTSKRRTYKWNDETQDLVKSIPSPNTSNMVDLQDHVRAYLKALPILLQHRANKGYRSMRFFRYVGKQKTIEKVCDVIAPRAQTTVVGFGNWSNQGYGISRSCSGPIKEIRRCLSRRKNVLFKNVDERNTSCKCHGCFQRLVNMKADSVVWRGVCKESPIDGSITVEKQKMVVKNVKVHKVLHCRDSVKSASSNVRCGATWNRDVNAAKNLLLLLTTWMDGRERPEAFCVPSPPPKTTVSIEASVSAKPTDPPGFVSSLPCYPLGQLKC

SEQ ID NO: 981 - protein, 351 aa, Chlamydomonas sp.
PFLCTTRYCRRPSKNEKRKRKTSHILVVALQIWIHSVAHSDFENGLFLYGQRVPPSIHARQTFAYKNHQEYGSASQTSRKWRQFLGSSVTRIVTDGFAVSILMNKPTCLTCSMPADSFSTRAHEYVTTDKGGIVSFRDNVVVAAVDPGVTDIVTVTGLDGGTRSYSSAQYYRKGLIFKSQRQTDVWNLETADIVGDIIPDRDSSRSEQIGAYARIYMGAAPILLAHRASRGYRNLRFRRYCKKQKLIVEIADFVGPREKSAKVLVGFGDWKGLGATPITRRTCGPLQAIRFELRSRGNVIMEDVDEFRTSQRCSCCENRLCNMVALTHRKKQDGTGWECTEGRMRIHKILH

SEQ ID NO: 982 - protein, 304 aa, Chlamydomonas sp.
EQHRYSHVSGRRQKQDMEAYTRSFLPQVWYQETEKQQEKRFSDMIPRWESLRENGAALSTSRTDDISAYLKNYATFSDEWWRMALRRRESRDKFQRYIGKRKAMDSFWAGIKRNMKLDHPDLRVRVAYGSAITTLKATGPGEVAVPTGSMFASCERLFKEEVHVTDEFKTTLMSWETGAKKECVYKIPSVQITTEGQIRLGYELLGHTPLKETPKVSYRDQLAVRVYCTRKQIQEKHRRGGLAPSLVDNNSIKRYPEVRGLRFSPETSTYSDRDRSSALTIARLHCMELLGQGRPLPFCRDACC

SEQ ID NO: 983 - protein, 693 aa, Chlamydomonas sp.
RRKWYKEMWVQYYHQKKKNTHPLLMGVVQDKGDDDINISVVKKTLNSLCMDVSRHQISSRIQSMVLLINHAVAEAYLFANFHITRCLDDGDFDVKQLPHLDRNFYYRCLLAVSTSNVRRDTLGQSFNDTMVDFDALRPEGYVKVDVRPWGQVIADVSIQMATMACNSVWANVDRVVIKYLRLKHPSLKKHFKKIVKAVVHYPESKIDTIIPEGLVHAIHIKEVVSHLRALFPLPRGKQFNTRAHLTMRLFHHVLTELGEVGRVDPKDKNTRKSHPRLFSILPRKNGFTISYVPISSMTFMKLLSMGDSPLESVSGDGRYENHTMLWRKYFNVQGLETKRSRFDNRILSDGKGVSVQMKQKGKEEVVEEGENAGYPKDANIVECKDGVGALRVGVDPGMTDIVTVASSAGRIESFSSARFSEVAGYNTSKRRTYKWNDETQDLVKSIPSPNTSNMSDLQDHVRAYLKALPILLQHRANKGYRSMRFFRYVGKQKTIEKVCDVISPRAQTTVVGFGNWSNQGYGISRSCSGPIKEIRRCLSRRKNVLFKNVDERNTSCKCHGCFQRLVNMKADSVIWRGVCKESPIDGSITVEKQKMVVKNVKVHKVLHCRDSVKSASSNVRCGATWNRDVNAAKNLLLLLTTWMDGRERPEAFCVPSPPPKTTVSIEASVSAKPTDPPGFVSSFPCYPLGQLKC

SEQ ID NO: 984 - protein, 792 aa, Chlamydomonas sp.
ECSREPVCRSRLHQNVFGVQFVMENGIGESSSLVHEADQHDDVAELVDYEGEEDGECAPGRAICVVKMKLSTFIPHDWLRNKIDTLVLDMNKLLGEGYIFANFHIARLFENGLAVPPVNRNFFYRCLIAVSTNKCNGSTLGEDFESSRLLFDLLREPGQSKVDIRGRVKNQIIADLSILMATMASNHLWTNLERRITTYLKWKYPQIAKRLRSDIVAALIKCPTKNLDVIFKMSPHTTKLPTKLPTSRLRSAKSAVALAKKRVGRKEPEGSPLRVRLTKLQERLEKLSEAWLSSKNLRVDADNAKRFFAREVAFCLRGVLPLPSGKTFASRAHMTLPLYHKILSETIEEKRKTKNKKHRTFSLLPYKSGFTLSHIPISKMAFFYMVNECHFDSCKADVASKNHQGIWERFANLKKVETVSRKFGYRIVTDGFAVSILMNKPTCLTCSMPADAFSTRAHEYVTTDEGGIVSFLDNVVVAAVDPGVTDIVTVTGLNGGTRSYSSAKYYRKGMIFKSQRQTDVWNLETADIVGGIIPDRDSSSSEQIGAYARFYMGAAPILLAHRASRGYRNLRFRRYCKKQKLIVEIADFVAPRKKSAKVLVGFGDWKGLGATPISRRTCGPLQAIRFELRRRENVIMEDIDEFRTSQRCSCCENHLCNMVALTHRKKQDGTGWECTEGRKRIHKILHCKSSQSGAPRQQSDGMLHCGKTWDRDVNASRNILMLTLHQVFGRERPLAFRRDAPRSSSTTPPPDTDMGTQTVERFTKEATRNIFENLFNLLHPPTLPKSNDLQSG

SEQ ID NO: 985 - protein, 665 aa, Chlamydomonas sp.
METIVNKEPPDKRTRPDRAAKIKDRKNGEENVVKCTLSRIIADKDNKDVITKVIKERVDSVSKRTYLAGVAVNRILKEVFEGVPDAQLHTVSVPSVDQNFIRQLMVGSRQAHMETRDATVERFFHNNYWFREKIEGREVIVKKKKQYVGAIARYDGDRNLYSHASKKYLTNFNNHYRVHLSTWIKKFVYSKENRILAKEFKDEHGIDETVFHRYLLYDIHSWGVKEDLIAIHSLLPERTKMLLKIQHSIIGRDEINRQWLKSVSNSAKMIRYNVFINRYLEATEDEGYAKLVNIAPIPTVKHSFITIDTDGLLGVLKDVGLVESLEKTLTNKEHWESVFDVENIRSTGKGVFTCTIDTDGVMACTHFLRAEKKKISIKDDGTAIKKQTKTLREFSESDPNVVVVANDPGRCNIAFLTWKKNKVEEKDKGGRKRKRHCEFGSKRLTRERYYVESGVFKSRGPTKKWLSNIQDCLDDLKDNSPKRTSLESFDAYVTVMVNHWDSRWGEMSKSRWGAQRLRLYGGKKRVLARFFNEVQADVGERKTIVIAYGSSKFAPGGKGELSVPTTSAFNAFRDRFKGRVAVIDEFRTTKIWHKDSTTVLQSVQSEKKGRTVRGLLWCSSTMENSKLFVNRDLMQPLTSTIALQCTQPAPEFLRGQRNIANWKLW

SEQ ID NO: 986 - protein, 803 aa, Chlamydomonas sp.
PRMEHVCDVCIKSSVMYKLCKMATKPPTVAKLKELLKLAEVAYSSKDKKDDIVRLCEDNGLIARPPPEYKTVEKMCVVKCALKKAMSLDDEEFGKFREHVDQLVNVVSRMLRRSSLVLTFHVTRLMEGDLPIPNMYDMKDTYWKNWLRIGVDGVFPDEESRISYESVKDVIGKVLGSDDPDYINSYPIYFDQVLNYAGHTLSTVVSNNAWVPLVPRLTRLTKATLNALKAPKTIRVYDVMRVIQQEIQEMESWPESVQEYVREVRVRLKVPDGSRLYDDYGKDMDFPTMVRFNYWMQTRLEAIGARRIRLMPIFNVQRAHVRLDMKTLVNLFRHVFPKDPNIVELSKWKDVKDPDRFMLPLKPAVKKKKSCGPGEWEAYKLAQQKYDADVNDIKDTDEYRHAKGRYDTLVNARKTVAGSFFKKPPVKTGWVFDCSICTDGVSLSMQYSKTVQVRVSDLKKTSKRSRDDEGMSVSEQYDHKLKTTLPDMGIVVLGVDPGRSNIATVTYLADDKSKTWKLTRGAFYHKSGIKKQKKQQEKRFSDMIPRWEFLRENGAALSTSRTDDISAYLKNYATFSDEWWRMALLRRESRDNFQRYIGKRKAMDSFWAGIKRNMKLDHPDLRVRVAYGSAITTMKATGPGEVAVPTGSMFASCKRLFKEEVHVTDEFKTTLMSWETGAKKECVYKNPSVQITTEGQIRLGYELLGHTPLKETPNVSYRDQLAVRMYCTRKQIQEKHRRGGLAPSLVDNNSIKRYPEVRGLRFSPETSTYSDRDRSSALTIARLHCMELLGQGRPLPFCRDACC

SEQ ID NO: 987 - protein, 688 aa, Chlamydomonas sp.
GNVGAILYHQKKKNTHPLLMGVVQDKGDDDINISVVKKTLNSLCMDVSRHQISSRIQSMVLLINHAVAEAYLFANFHITRCLDDGDFDVKQLPHLDRNFYYRCLLAVSTSNVRKDTLGQSFNDTMVAFDALRPAGYVKVDVRPWGQVIADVSIQMATMACNSVWANVDRVVIKYLRLKHPSLKKHFKKIVKAVVQYPESKIDTIIPEGLVHAIHIKEVVSHLRALFPLPRGKQFNTRAHLTMRLFHHVLTELGEVGRVDPKDKKTRKSHPRLFSILPRKNGFTISYVPISSMTFMKLLSMGDSPLESVSGDGRYENHTMLWRKYFNVQGLETKRSRFDNRILSDGKGVSVQMKQKGKEEVVEEGENAGYPKDANIVECKDAVGALRVGVDPGMTDIVTVASSAGRIESFSSARFSEVAGYNTSKRRTYKWNDETQDLVKSIPSPNTSNMSDLQDHVRAYLKALPILLQHRANKGYRSMRFFRYVGKQKTIEKVCDVIAPRAQTTVVGFGNWSNQGYGISRSCSGPIKEIRRCLSRRKNVLFKNVDERNTSCKCHGCFQRLVNMKADSVVWRGVCKESPIDGSITVEKQKMVVKNVKVHKVLHCRDSVKSASSNVRCGATWNRDVNAAKNLLLLLTTWMDGRERPEAFCVPSPPPKTTVSIKASVSAKPTDPPGFVSSLPCYPLGQLKC

SEQ ID NO: 988 - protein, 701 aa, Chlamydomonas sp.
YQDKKRTLPPSISMGVVTNNGDDEDDLDIMVVKKTLNSLCMDVSRQQICSRIQSMVLVINHAVVEAYLFANFHITRCLDDVDFDVKQLPHLDRNFYYRCILAVSTSNVRKDTLGQSLKDSMVAFDALRPAGYLEVDVRQWGQVIADVSIQMATMACNSVWANVDRVVIKYVHLKHPSLKKHFNKIVKAVVQYPESDIDKIIPASLVHANLIKDVVRRLRDLLPLPRGKQFNTRAHLTMRLFHHVLTELGADLKEKTTKKRPRLFSILPRKSGFTVSYVPISSMTLMKLLSMGDSPLESFRGDGRHENHSMLWRKYFNVQGLETKGSRFDNRILSDGKGVSVQMKHQASEDVAVEGGDNAGYPKDAILEDCQDASLRVGVDPGMTDIVTIASSDGRVESFSSAHFSEAAGYNTSNRRTNKWNADTQDLVKSIPSPTTSSMHDMQDHVRGYLSALPTLLQHRANRGYRSMRFFRYVGKQKTIEKVCDLITPKAQKKTIEEKVCDVIAPKAKKTVVGFGNWSNQGYGISRSCSGPVKEIRKCLSRRQNVLFKNVDERNTSCTCHGCFQKLVNMKADSVAWRRVKNEPSALIDGAPTTTTTFEKQKTVVKNVKVHKVLHCRNSVKSASSNVRCGATWNRDVNAAKNLLLLLTTWMDGKERPAAFCVPSSSPTPKTTVSGEANVGAQPTDPPGSVSSLQLLSSGPA

SEQ ID NO: 989 - protein, 619 aa, Chlamydomonas sp.
AYLFAHFHITRCLDDGDFDVKQLPHLDRNFYYRCLLAVSTSNVRKDTLGQSFNDTMVAFDALRPAGYVKVDVRPWGQVIADVSIQMATMACNSVWANVDRVVIKYLRLKHPSLKKHFKKIVKAVVQYPESKIDTIIPEGLVHAIHIKEVVSHLRTLFPLPRGKQFNTRAHLTMRLFHHVLTELGEVGRVDPKDKKTKKSHPRLFSILPRKNGFTISYVPILSMTFMKLLSMGDSPLKSVSGDGRYENHTMLWRKYFNVQGLETKRSCFDNRILSDGKGVSVQMKQNGKEEVVEEGENAGYPKDANIVECKDAVGALRVGVDPGMTDIITIASSACRIESFSSARFSEVAGYNTSKRRTYKWNDETQDLVKSIPSPNTSNMVDLQDHVRAYLKALPILLQHRANKGYRSMRFFRYVGKQKTIEKVCDVIAPRAQTTVVGFGNWSNQGYGISRSCSGPIKEIRRCLSRRKNVLFKNDDERNTSCKCHGCFQRLVNMKADSVVWRGVCKESPIDGSITVEKQKMVVKNVKVHKVLHCRDSVKSASSNVRCGATWNRDVNAAKNLLLLLTTWMDGRERPEAFCVPSPPPKTTVSIEASVSAKPTDPPGFVSSLPCYPLGQLKC

SEQ ID NO: 990 - protein, 390 aa, Chlamydomonas sp.
NSTVRCPTIFVVSCNMLWRKYFNVRAVETQSVRFGGRILTDGKAVSIQMKRDTADIFEDAEGFPKDATVNACNEAVTYKGARRVGVDPGMTDIVTIASDNTKKEIRSFSSAKFSEMAGYNTSKRCTNRWNKEHEKLISEIPTSNTTDLEGHVKSYLAALPVLLTHRFDKGYRSMRFLRFMGKQKTIEEVCNTIAPRNEVTVVGFGNWSNQGYGIRLSCSGPIKEIRQRLSRRENVLFKNVDEYKTSCTCHGCFNRLVNMKATSTLWRWRKVTENGVEVNRRVKEVVNNNKVHKVLHCCNSVPSVTSRCGATWNRDVNASKNLLLLLVVWMDEKERPANFCRSLRNTVSEEAAESFNHVHPGVDSHETQMLSFGPTSKVEIQHLEEYSGPS

SEQ ID NO: 991 - protein, 341 aa, Chlamydomonas sp.
RETLLCTRRGILSQGGSPFTIRKHFCVSGSHDPASVPQDIVGDHRRKTKNEKLRTLSLLPYKSGFTMSHIPISKMAFFYMVNECHFDSCKADVASKNHQGIWERFANLKKVDTVSRKFGYRIVTDGFAVSILMNKPTCLTCSMPADSFSTRAHEYVTTDEGGIVSFRDNVVVAAVDPGVTDIVTVTGLDGGTRSYSSAQYYRKGLIFKSQRQTDVWNLETADIVGDIIPDRDSSRSEQIGAYARFYMGAAPILLAHRASRGYRNLRFRRYCKKQKLIVEIADFVAPREKSAKVLVGFGDWKGLGATPISRRTCGPLQAIRFELRSRGNVIMEDVDEFRTSQ

SEQ ID NO: 992 - protein, 851 aa, Chlamydomonas sp.
KLLFTPPYCPRANAIEQIFGSMKRDYRASCPLTSTCNFDYLMQICCVLEMWRYKDFSKYMINTREPVCRSRLHQNVFGVQFVMENGIGESSSLVHEADQHDDVAELVDYEGEEDEECAPGQAICVVKMKLSTFIPHDWLRKKIDTLVLDMNKLLGEDYIFANFHIARLFENGIAVPPVNRNFFYRCLIAVSTNKCKGSTLGEDFESSRLLFDLLREPGQSKVDIRGKVKNQIIADLSILMATMASNHLWTNLERRITTYLKWKYPQIAKRLRSDIVAAVIKCPTKNLDVIFKMSPHTTKLPTKLPTARLRSEKSAVALAKKRVGRKEPEGSPLRVRLTKLQERLEKLSEAWLSSKNLRVDAKRFFARDVAFCLRGVLPLPSGNTFASRAHMTLPLYHKILSETIEEKRKTKNEKHRTFSLLPYKSGFTLSHIPISKMAFFYMVNECHFDSCKADVASKNHQGIWERFANLKKVETVSRKFGYRIVTDGFAVSILMNKPTCLTCSMPADAFSTRAHEYVTTDEGGIVSFLDNVVVAAVDPGVTDIVTVTGLNGGTRSYSSAQYYRKGLIFKSQRQTDVWNLETADIVGGIIPDRDSSSSEQIGAYARFYMGAAPILLAHRASRGYRNLRFRRYCKKQKLIVEIADFVAPREKSAKVLVGFGDWKGLGATPISRRTCGPLQAIRFELRSRENVIMEDIDEFRTSQRCSCCENHLCNMVALTHRKKQDGTGWECTEGRKRIHKILHCKSSQSGAPRQQSGGMLHCGKTWDRDVNASRNILMLTLHQVFGRERPLAFRRDAPRSSSTTPPPPPDTDMGTQTVERFTKEATRNIFENLFNLLHPPTLPKSNDLQSG

SEQ ID NO: 993 - protein, 307 aa, Chlamydomonas sp.
FPCPSVPHCYLGHWLPVPRFRGADLRTRILFPRLHEGLGTHEGVLRSCLKAWVAHDCNKMARTVHGGRVHENHTMLWRKYFNVQGLETKRSRFDNRILSDGKGVSVQMKQKGTEEVVEEGEHAGYPKDANIVECKDAVGALRVGVDPGTTDIVTVASSAGRIESFSSARFSEVAGYNTSKRRTYKWNAETQDLVKSIPSPNTSNVVDLQDHVRAYLKALPILLQHRASKGYRSMRFFRYVGKQKTIEKVCDVIAPREQTTVVGFGNWSNQGYGISRSCSGPIKEIRKCLSRRKNVYVQKRRRTQHFL

SEQ ID NO: 994 - protein, 331 aa, Chlamydomonas sp.
RGVSQRRKSRRLCAWVRCESVSTRVSMTDIVTVASSDGRVESFSSARFSEAAGYNTSNRRTNKWNVDTQDLMKSIPSPTTSNMPDMQDHVRGYLSALLQHRASRGYRSKRFFRYVGKQKTIEKVCDLIAPKAQKTIEKVCDVIAPKAQKTVVGFGNWSNQGYGISRSCSGPMKEIRKFLSRRQNVLFKNVDERNTSCICHSCFQKLVNMKADSVVWRRVHKEPPALIDGATTTTTTMFEKQKTVVKNVKVHKVLHCRNSVKSASSNVRCGRCNLESRRERCQEPSSASDDVDGLERATGGILCALLITHPKNHSFRRGKCGRSTNRPTWVS

SEQ ID NO: 995 - protein, 773 aa, Chlamydomonas sp.
KMATKPLTVAKLKELLKLAEVPYSSKSNKDDLVRLCEDNGLIARPPPEYKTVEKMYVVKCALKKAMSLDDEEFGKFREHVDQLVNVVSRMLRRSSLVLTFHITSLLEKGLDIPDLYNMKDTYWKDWLRIGVDGIFPDEESKISYEAVKDSIGDVIGNDDADYIKSYPIYFDQVLNYAGHTLSTVVSNNAWVPLIPRLARLTSTTLNKLNAPKTLDTSKIIRGYDVMQAIQQEVQNMEGWPESVQEYVNEVREMLSVPDGSRVYDNYGKDMDFPTMVRFNYWIQTRLEDMDARRIRLMPIFNVQRVHVRLDLKTLVNLFRHMFPNDQNIVELSKWEHVKNPDSFMLPQRPAQKKKKSCGPGEWEAYKSVLKQYDDDIKDIKATDEYRHAKGLYDTLVNARKTVAGSFFRKPPVKNGWVFDCSICTDGVSLSMQYSKTVQVLVSDLKKTCKKPRKEEGIKIAEKYNGSLKTILPDMGIVVLGVDPGRSNIATVTYLADDKNKTWTLTRGAFYHKSGIKKQTRQKELRFADMIPMWESLRENGAALSTSRTDKISAYLSNYAKFSDEWWRLALRRRESRDNLQRYIGKRKVKDSFWAGIKRCMMKELPDMKVCVAYGSAITKLKPTGPGEVAVPTGAMFASCKRIFKEDVSVTDEFKTTLMSWETGKEKERVYKIPSVCSADVKLRLGGERFGHTKSKTMPKVADCDHLGVRLYNKRKGAQDKHRRGNFATSLVDSQKSIERYPEVRGLRLSLETCIIWTGIALLLSQSQGCTAWN

SEQ ID NO: 996 - protein, 794 aa, Chlamydomonas sp.
GHLIVGHLLFWGFDQFKFCNRSCQYRYCLQEIYTKHSRPVKTQKLHDQSSLTSQRVGLHRAHQYVNNHAMSYLCIDHDNVRVLWYKEIVVHDDIKTRKEHSLPPSISMGVVTNNGDDDDDLDIMVVKKTLNSLCMDVSRQQICSRIQSMVLVINHAVAEAYLFANFHITRCLDDVDFDVKQLPHLDRNFYYRCILAVSTSNVRKDTLGQSLKDSMVAFDALRPAGYLKVDVRQWGQVIADVSIQMATMACNSVWANVDRVVIKYLRLKHPSLKKHFKKIVKAVVQYPESDIDKIIPASLVHANLIKDVVRRLRDLLPLPRGKQFNTRAHLTMRLFHHVLTELGADLKEKTTKKRPRLFSILPRKSGFTISYVPISSMTLMKLLSMGDSPLESFRCDGRHENHSMLWRKYFNVQGLETKGSRFDNRILSGGKGVSVQMKHQASEDVAVDNAGYPKDAILEDCQDASLRVGVDPGMTDIVTVASSDGRVESFSSARFSEAAGYNTSNRRTNKWNVDTQDLVKSIPSPTTSSMHDMQDHVRGYLSALPTLLQHRASRGYRSMRFFRYVGKQKTIEKVCDLIAPKAQKKTIEEKVCDVIAPRAQTTVVGFGNWSNQGYGISRSCSGPIKEIRRCLSRRKNVLFKNVDERNTSCTCHGCFQKLVNMKADSVVWRRVQNEPPSLINGAPTITTTTTIEKQKTVVKNVKVHKVLHFRNSVKSASSKVRCGATWNRDVNAAKNLLLLLTTWMDGKERPATFCVPSSSPTPKTTVSGEANVGAQPTDPPGSVSSLQLLSSGPA

SEQ ID NO: 997 - protein, 686 aa, Chlamydomonas sp.
METIVNKEPPDKRTRPDRAAKIKDRKNGEENVVKCTLSRIIADKDNKDVITKVIKERVESVSKRTYLAGVAVNRILKEVFEGVPGAQLHTVSVPSVDQNFIRQLMVGSRQAHMETRDATVERFFHNNYWFREKIEGREVIVKKKKQYVGAIARYDGDRNLYSHASKKYLTNFNNHYRVHLSTWIKKFVYSKENRILAKEFKDEHGIDETVFHRYLLYDIHSWGVKEDLIAIHLLLPERTKMLLKIQHSIIGRDEINRQWLKSVSNSAKMIRYNVFINRYLEATEDEGYAKLVNIAPIPTVKHSFITIDTDGLLGVLKDVGLVESLEKTLTNKEHWESVFNVENIRSTGKGVFTCTIDTDGVMACTHFLRAEKKKISIKDDGTAIKKQTKTLREFSESDPNVVVVANDPGRCNIAFLTWKKNKVGEKDKGGRKRKRHCEFGSKRLTRERYYVESGVFKSRGPTKKWLSNIQDCLDDLKDNSPKRTSLESFDAYVTVMVNHWDSRWGEMSKSRWGAQRLRLYGGKKRVLARFFNEVQADVGERKTIVIAYGSSKFAPGGKGELSVPTTSAFNAFSDRFKGRVAVIDEFRTTKIWHKDSTTVLQGVQSEKEGRTVRGLLWCSSTMENSKLFVNRDLNAAINIHNCFTMYPTRPGILARPKKYCKLEVVVGRTIDYKLTGSLQNAVSSEV

SEQ ID NO: 998 - protein, 618 aa, Chlamydomonas sp.
QCIRNLHVLNIRMPCMATKASVKLARPPMPLVSPGPSSVDGQIMARSERSGLQATNVSLTQAASKATSSSRKKKPAVVKSFSTHVCPHTNNNTTCSDSNCSCKPIFLTNIPDASKSRTSDQGSTSSALDFYEYWDSSRQDMYRQLLWLPKTGTQGLVSSSFNGFAHSTPTRSSFSITKTEPLKTSLEKTSCPSFKYIVTDGTVEDATKSNAKPKLRTLKLKLNPTKAQKSMLAEFAGCSRFMYNKAVAARLGVGSTHKSVFRIRDRYVTNKVRGEGKMPNPYFKNRQWLLQCPKSVRQSAIKSALANIKACFSNLKAGNIKQFSAPFRRKKTELERGWVIEMDQKNVSKDGDKLFIFKEILGNMRYFGSKQLHKLMPEENPTHDPKVQKSRFGEYFLVLSVAARDRRAERKPVNPDKVATASIDPGVRKTMVTYSPENEESFMLGQGQASDLVKLLLVHDKLQSRLDTEKTLRSKERMKIKKLMIRIRKTIFYLKKEFRDQTTNFLAARYDVLLVPQLETAKMTISAERELTTKVARQMLTLSHSVLFNRLKEKCEEYGTVFLHVLEHYTSQTCPMCGFLNKCGETYTCKNCQFTCDRDIVGAAGIFLKAVRTENPCS

SEQ ID NO: 999 - protein, 794 aa, Chlamydomonas sp.
ECSREPVCRSRLHQNVFGVQFVMENGIGESSSLVHEADQHDDVAELVDYEGEEDGECAPGRAICVVKMKLSTFIPHDWLRNKIDTLVLDMNKLLGEGYIFANFHIARLFENGIAVPPVNRNFFYRCLIAVSTNKCNGSTLGEDFESSRLLFDLLREPGQSKVDIRGRVNNQIIADLSILMATMASNHLWTNLERRITTYLKWKYPQIAKRLRSDIVAALIKCPTKNLDVIFKMSPHTTKLPTKLPTSRLRSAKSAVALAKKRVGRKEPEGSPLRVRLTKLQERLEKLSEAWLSSKNLRVDADNAKRFFAREVAFCLRGVLPLPSGNTFASRAHMTLPLYHKILSETIEEKRKTKNEKHRTFSLLPYKSGFTLSHIPISKMAFFYMVNECHFDSCKADVASKNHQGIWERFANLKKVETVSRKFGYRIVTDGFAVSILMNKPTCLTCSMPAGAFSTRAHEYVTTDEGGIVSFLDNVVVSAVDPGVTDIVTVTGLNGGTRSYSSAKYYRKGLIFKSQRQTDVWNLETADIVVGIIPDRDSSSSEQIGAYARFYMGAAPILLAHRASRGYRNLRFRRYCKKQKLIVEIADFVAPRKKSAKVLVGFGDWKGLGATPISRRTCGPLQAIRFELRSRENVIMEDIDEFRTSQRCSCCENHLCNMVALTHRKKQDGTGWECTEGRKRIHKILHCKSSQSGAPRQQSGGMLHCGKTWDRDVNASRNILMLTLHQVFGRERPLAFRRDAPRSSSTTPPPPPDTDMGTQTVERFTKEATRNIFENLFNLLHPPTLPKSNDLQSG

SEQ ID NO: 1000 - protein, 303 aa, Chlamydomonas sp.
EADQDSLASFPESDPNVVVVLQTTPGRSNIAFLTWKKNKVEEKDKGGRKRKRHCEFGSKRLTRERYYVESGVFKSRGPTKKWLSNIQDCLDDLKDNSPKRTSLVSFDAYVTVMVNHWDSRWGEMSKSRCGAQRLRLYGSKKRVLARFFNEVQEDVGERKTIVVAYGSAKFAPGGKGELSVPTTSVFKAFSDRFKGRVAVIDEFRTTKIWHKDSTTVLQSVQSEKEGRTVRGLLWCSSTMENSKLFVNRDLNAAINIHNCFTMYPIRPGILARPKKYCKLEVVVGRKIDYKLTGSLQNAVSSEV

SEQ ID NO: 1001 - protein, 615 aa, Chlamydomonas sp.
QCIRNLHVLDIRMPCMATNASVKLARPPMPLVSPGPSSVDGRIMARSGLQATNVSSTQAASKATSSSRKKNPAVVKSFSTHVCPHTNNNPTCSDSNCSCKPIFLTNIPDASKSRTSDQGSTSSAQDFYEYWNSSRQDLYRQLLWRPKTGTQGLVSSSFNGFAHSTPTRSSFSITKTEPLKTSLEKTSCPSFKYIVTDGTVEDATKSNAKPKLRTLKLKLNPTKAQKSMLAEFAGCSRFMYNKAVAARLGVGSTHKSVFRIRDRYVTNKVRGEGKMPNPYFKNCQWLLQCPKSVRQSAIKAALANIKACFSNLKAGNIKQFSAPFRRKKTELERAWAIEMDQKNVSKDGDKLFIFKDILGNMRYFGSKQLHKLMPEENPTHDPKVHKSRFGEYFLVLSVAARDRRAERKPVHPDKVATASIDPGVRKTMVTYSPENEESFMLGQGQASDLVKLLLVHDKLQSRLDTEKTLRSKERMKIKMHMIRIRKRIFYLKKEFRDQTTNLLAARYDVLLVPQLETAKMTISAERELTTKVARQMLTLSHSVLFNRLKEKCAEYGTVFLHVLEHYTSQTCPMCGFLNKCGETYTCKNCQFTCDRDIVGAAGIFLKAVRTENPCS

SEQ ID NO: 1002 - protein, 803 aa, Chlamydomonas sp.
PRMEHVCDVCIKSSVMYKLCKMATKPPTVAKLKELLKLAEVAYSSKDKKDDIVRLCEDNGLIARPPPEYKTVEKMCVVKCALKKAMSLDDEEFGKFREHVDQLVNVVSRMLRRSSLVLTFHVTRLMEGDLPIPNMYDMKDTYWKDWLRIGVDGVFPDEESRISYESVKDVIGKVLGSDDPDYINSYPIYFDQVLNYAGHTLSTVVSNNAWVPLVPRLTRLTKATLNALGAPKTIRVYDVMRVIQQEIQEMESWPESVQEYVREVRVRLKVPDGSRLYDDYGKDMDFPTMVRFNYWMQTRLEAIGARRIRLMPIFNVQRAHVRLDMKTLVNLFRHVFPKDPNIVELSKWKNVKDPDRFMLPMKPAVKKKKSCGPGEWEAYKLAQQKYDADVNDIKDTDEYRHAKGRYDTLVNARKTVAGSFFKKPPVKTGWVFDCSICTDGVSLSMQYSKTVQVRVSDLKKTSKRSRDDEGMSVSEQYDHKLKTTLPDMGIVVLGVDPGRSNIATVTYLADDKSKTWKLTRGAFYHKSGIKKQKKQQEKRFSNMIPRWESLRENGAALSTSRTDDISAYLKNYATFSDEWWRMALLRRESRDNFQRYIGKRKAMDSFWAGIKRNMKLDHPDLRVRVAYGSALTTLKATGPGEVAVPTGSMFASCKRLFKEEVHVTDEFKTTLMSWETGAKKECVYKIPSVQITTEGQIRLGYELLGHTPLKETPKVSYRDQLAVRVYCTRKQIQEKHRRGGLAPSLVDNNSIKRYPEVRGLRFSPETSTYSDRDRSSALTIARLHCMELLGQGRPLPFCRDACC

SEQ ID NO: 1003 - protein, 329 aa, Chlamydomonas sp.
CFILALVTQRWNTHPLLMGVVQDKGDDDINISVVKKTLNSLCMDVSRHQISSRIQSMVLLINHAVAEAYLFANFHITRCLDDGDFDVKQLPHLDRNFYYRCLLAVSTSNVRKDTLGQSFQRYIGKRKAMDSFWAGIKRNMELDHPDLRVRVAYGSAITKLKATGPGEVAVPTGSMFASCKRLFKEEVHVTDEFKTTLMSWETGAKKECVYKIPSVQITTEGQIRLGYELLGHTPLKETPKVSYRDQLAVRVYCTRKQIQEKHRRGGLAPSLVDNNSIKRYPEVRGLRFSPETSTYSDRDRSSALTIARLHCMELLGQGRPLPFCRDACC

SEQ ID NO: 1004 - protein, 343 aa, Chlamydomonas sp.
KRKTTKKRPRLFSILPRKSGFTISYVPISSMTLMKLLSMGDSPLESFRGDGRHENHSMLWRKYFNVQGLETKGSRFDNRILSDGKGVSVQMKHQASEDVAVDNAGYPKDAILEDCQDASLRVGVDPGMTDIVTVASSDGRVESFSSARFSEAAGYNTSNRRTNKWNVDTQDLVKSIPSPTTSSMHDMQDHVRGYLSALPTLLQHRASRGYRSMRFFRYVGKQKTIEKVCDLIAPKAQKKTIEEKVCDVIAPRAQTTVVGFGNWSNQGYGISRSCSGPIKEIRRCLSRRKNVLFKNVDERKHFLYLPRLLPEARQHEGRQRRLAQSSKRAPLPHQRGSYNNNND

SEQ ID NO: 1005 - protein, 617 aa, Chlamydomonas sp.
YVTVTHVHLQCQMSGNKKHFTLQLERLLSLQDSTPKRFGKWLTRRKFFATEHLPDKEELICKIFKKCVIIIFMIKRSKLFKKKISSMLEYPLKSKWTIFLDKLNSSEDQNTIAIYLFKIFVQESISREKVLQPFWTPAYKIISETLLLPIETGYVDSGSSSSNHWSQKQEDKSQFLTVQTRKLVNKSSQKIYCQSSMSSLAGKWAKEAILEERIKPLKTIQMKIFPTKKQKTILDEFINTSRYVSNKAIECVENGHKPHFPSLRDLLVTSNTKKHSGTYKKLSKEIEDLHTLKHNTVDKLDKQKIIQEINTKNSTMRDEMKEIAYEKNHNLQGFETITPKKIRANAVKSVCDAYKSAFTNLNNGILKILPRTFKDDCILKISNKNTKKHKNLTIENNVDIVRYKGEYFAHILDVVVKNVKNESKDYTMCGIDPGVRSFATVYSCSILDNGKVSSYNTGDYTHRIDLLKKLNKKKSDMMTRRVVRKKQYNKMEKKKKDVVDCLHWETINHVLNHHDIVFYGDIKSQDITKGNKNKTLNQDLNDLKFYIFKNRLEYKASVLQKKVVIMNECYTTKTCSSCGTLNDDVGNKKAFTCPICNLVTGRDANASKNILMKGLLS

SEQ ID NO: 1006 - protein, 737 aa, Chlamydomonas sp.
PRMEHVCDVCIKSSVMYKLCKMATKPPTVAKLKELLKLAEVAYSSKDKKDDIVRLCEDNGLIARPPPEYKTVEKMCVVKCALKKAMSLDDEEFGKFREHVDQLVNVVSRMLRRSSLVLTFHITSLLEKGLDIPDLYNMKDTYWKDWLRIGVDGIFPDEESKISYEAVKDSIGDVIGNDDADYIKSYPIYFDQVLTYAGHTLSTVVSNNAWVPLIPRLARLTSTTFNKLNAPKTLDTSKIIRGYDVMQAIQQEVQNMEGWPESVQEYVNEVREMLSVPDGSRVYDNYGKDMDFPTMVRFNYWIQTRLEDMDARRIRLMPIFNVQRVHVRLDLKTLVNLFRHMFPNDQNIVELSKWEHVKNPDSFMLSQRPAQKKKKSCGPGEWEAYKSVMKQYDDDVKDIKATDEYRHAKGLYDTLLNARKTVAGSFFRKPPVKNGWVFDCSICTDGVSLSMQYSKTVQVLVSDLKKTCKNPRKEEGIKIAEKYDGSLKTILPDMGIVVLGVDPGRSNIATVTYLADDKNKTWKLTRGAFYHKSGIKKQTRQKELRFADMIPMWESLRENGAALSTSRTDKISAYLSNYAKFSDEWWRLALRRRESRDNLQRYIGKRKVKDSFWAGIKRCMMKELPDMKVCVAYGSAITKLKPTGPGEVAVPTGAMFASCKRIFKEDVSVTDEFKTTLMSWETGKEKERVYKIPSVCSADVKLRLGGERFGHTKSKTMPKVADCDHLGVRLYNKRKGA

SEQ ID NO: 1007 - protein, 348 aa, Chlamydomonas sp.
FTWTCRAPSCSRAHEYVTTDEGGIVSFLDNVVVAAVDPGVTDIVTVTGLNGGTRSYSSAKYYRKGLIFKSQRQTDVWNLETADIVGGIIPDRDSSSSEQIGAYARFYMGAAPILLAHRASRGYRNLRFRRYCKKQKLIVEIADFVAPRKKSAKVLVGFGDWKGLGATPISRRTCGPLQAIRFELRSRENVIMEDIDEFRTSQRCSCCENHLYNMVALTHRKKQDGTGWECTEGRKRIHKILHCKSSQSGAPRQQSGGMLHCGKTWDRDVNASRNILMLTLHQVFGRERPLAFRRDAPRSSSTTPPPDTDMGTQTVERFTKEATRNIFENLFNLLHPPTLPKSNDLQSG

SEQ ID NO: 1008 - protein, 621 aa, Chlamydomonas sp.
QCIRNLHVLNIRMPCMATKASVKLARPPMPLVSPGPSSVDGQIMARSERSGLQATNVSLTQAASKATSLSRKNNPAVVKSFSTHVCPHTNNNPTCSDSNCSCKPIFLTNIPDASKSLKSRTSDQGSTSSAQDFYEYWDSSRQDLYRQLLWLPKTGSQGLVSSSLNGFARSTPARSSFSITKTEPLKTSLEKTSCPSFKYIVADGTVEDATKSNAKPKLRTLKLKLNPTKAQKSMLAEFAGCSRFMYNKAVAARLGVGSTHKSVFRIRDRYVTNKVRAKGKMPNPYFKNRQWLLQCPKSVRQSAIKSALANIKACFSNLKAGNIKQFSAPFRRKKTELERGWVIEMDQKNVSKDGDKLFIFKEILGNMRYFGSKQLHKLMPEENPTHDPKVQKSRFGEYFLVLSVAARDRRAERKPVNPDKVATASIDPGVRKTMVTYSPENEESFMLGQGQASDLVKLLLVHDKLQSRLDTEKTLRSKERMKIKKLMIRIRKTIFYLKKEFRDQTTNFLAARYDVLLVPQLETAKMTISAERELTTKVARQMLTLSHSVLFNRLKEKCEEYGTVFLHVLEHYTSQTCPMCGFLNKCGETYTCKNCQFTCDRDIVGAAGIFLKAVRTENPCS

SEQ ID NO: 1009 - protein, 794 aa, Chlamydomonas sp.
ECSREPVCRSRLHQNVFGVQFVMENGIGESSSLVHEADQHDDVAELVDYEGEEDGECAPGRAICVVKMKLSTFIPHDWLRNKIDTLVLDMNKLLGEGYIFANFHIARLFENGIAVPPVNRNFFYRCLIAVSTNKCKGSTLGEDFESSRLLFDLLREPGQSKVDIRGSVKNQIIADLSILMATMASNHLWTNLERRITTYLKWKYPQIAKRLRSDIVAALIKCPTKNLDVIFKMSPHTTKLPTKLPTSRLRSGKSAVALAKKRVGRKEPEGSPLRVRLTKLQERLEKLSEAWLSSKNLRVDADNAKRFFAREVAFCLRGVLPLPSGNTFASRAHMTLPLYHKILSETIEEKRKTKNEKHRTFSLLPYKSGFTLSHIPISKMAFFYMVNECHFDSCKADVASKNHQGIWERFANLKKVETVSRKFGYRIVTDGFAVSILMNKPTCLTCSMPADAFSTRAHEYVTTDEGGIVSFLDNVVVAAVDPGVTDIVTVTGLNGGTRSYSSAKYYRKGLIFKSQRQTDVWNLETADIVGGIIPDRDSSSSEQIGAYARFYMGAAPILLAHRASRGYRNLRFRRYCKKQKLIVEIADFVAPRKKSAKVLVGFGNWKGLGATPISRRTCGPLQAIRFELRSRENVIMEDIDEFRTSQRCSCCENHLCNMVALTHRKKQDGTGWECTEGRKRIHKILHCKSSQSGAPRQQSGGMLHCGKTWDRDVNASRNILMLTLHQVFGRERPLAFRRDAPRSSSTTPPPPPDTDMGTQTVERFTKEATRNIFENLFNLLHPPTLPKSNDLQSG

SEQ ID NO: 1010 - protein, 794 aa, Chlamydomonas sp.
ECSREPVCRSRLHQNVFGVQFVMENGIGESSSLVHEADQHDDVAELVDYEGEEDGECAPGRAICVVKMKLSTFIPHDWLRNKIDTLVLDMNKLLGEGYIFANFHIARLFENGIAVPPVNRNFFYRCLIAVSTNKCKGSTLGEDVESSRLLFDLLREPGQSKVDIRGRVKNQIIADLSILMATMASNHLWTNLERRITTYLKWKYPQIAKRLRSDIVAALIKCPTKNLDVIFKMSPHTTKLPTKLPTSRLRSAKSAVALAKKRVGRKEPEGSPLRVRLTKLQERLEKLSEAWLSSKNLRVDADNAKRFFAREVAFCLRGVLPLPSGNTFASRAHMTLPLYHKILSETIEEKRKTKNEKHRTFSLLPYKSGFTLSHIPISKMAFFYMVNECHFDSCKADVASKNHQGIWERFANLKKVETVSRKFGYRIVTDGFAVSILMNKPTCLTCSMPADAFSTRAHEYVTTDEGGIVSFLDNVVVAAVDPGVTDIVTVTGLNGGTRSYSSAQYYRKGLIFKSQRQTDVWNLETADIVGGIIPDRDSSSSEQIGAYARFYMGAAPILLAHRASRGYRNLRFRRYCKKQKLIVEIADFVAPRKKSAKVLVGFGDWKGLGATPISRRTCGPLQAIRFELRSRENVIMEDIDEFRTSQRCSCCENHLCNMVALTHRKKQDGTGWECTEGRKRIHKILHCKSSQSGAPRQKSGGMLHCGKTWDRDVNASRNILMLTLHQVFGRERPLAFRRDAPRSSSTTPPPPPDTDMGTQTVERFTKEATRNIFENLFNLLHPPTLPKSNDLQSG

SEQ ID NO: 1011 - protein, 651 aa, Chlamydomonas sp.
YINKVTVTNILLQCQMSGKKKQFTFQLERLLSLQGSTPKQFGKWLTRRKFFATEHLPGKEELICKIFKKCVVIIFMIKRSKLFKKKISSMLEYPLKSNWTIFLDKLNSSEDQNMIAIYLFKIYVQESISREKALQPFWTPAYKTISETLLLPIETDCVDSGLSSSNHWSQKQEEKSQFLTVQTKKLVNKSSQKIYCQSSMSSLVGKWANEAILEEKIKPLKTIQMKLFPTKKQKQILDEFINTSRYVSNKAIEYVDKGHKPHFQTLRDLLVTSNTKKNSNTYKKLSKEIEDLHTLKQDTVDQSDKQKIIEEIKTKNKIMRDEMKEIAYEKNHNLQGFETFTPKEIRANAVKSVCDAYKSAFTNLKNGNIKFFKMKYKTKKNSRQTVELAPSSISFNNGILRILPNTFKDDCVLKISNKNRKKHKNLTIKNNVDIVRHKGQYVIHILDTILNNIDNETNEYTMCGVDPGVRCFATTYSCSIKNNGEVSSYNTRDYTHRIDLLKKLNKKRRDIMERKAVRKKQYNKIEKKKKNIVDCLHWETIHHVLKHNDFVFYGDIKSQDITKGNKNNTLNQDFNDLKFYIFKTRLEYKASVLKRKVVIMNECYTTKTCSNCGTLNNDVGSKKVFTCPICNLVAGRDANASKNILMKGLLS

SEQ ID NO: 1012 - protein, 650 aa, Chlamydomonas sp.
KMATKPPTVAKLKELLKLAEVPYSSKSNKDDLVRLCEDNGLIARPPPEYKTVEKMCVVKCALKKAMSLDDEEFGKFREHVDQLVNVVSRMLRRSSPVLTFHITSLLEKGLEIPDLYNMKDTYWKDWLRIGVDGIFPDEESKISYEAVKDSIGDVIGNDDADYIKSYPIYFDQVLNYAGHTLSTVVSNNAWVPLIPRLARLTSTTLNKLNAPKTLDTSKIIRGYDVMQAIQQEVQNMEGWPESVQEYVNEVREMLSVPDGSRVYDNYGKDMDFPTMVRFNYWIQKRLEDMDARRIRLMPIFNVQRVHVRLDLKTLMNLFRHMFPTDKNIVELSKWEHVKNPDSFMLPQRPAQKKKKSCCPGEWEAYKSVLKQYDDDVKDIKATDEYRHAKGLYDTLVNARKTVAGSFFRKPPVKNGWVFDCSICTDGVSLSMQYSKTVQVLVSDLKKTCKKPRKEEGIKIAEKYDGSLKTIFPDMGIVVLGVDPGRSNIATVTYLADDKNKTWKLTLGAFYHKSGIKKQTRQKELRFADIIPMWESLRENGAALSTSRTDDISAYLSNYAKFSDEWWRLALRRRESRDNLQRYIGKRKVKDSFWAGIKRCMMKELPDMKVCVAYGSAITKLKPTGPGEVAVNGRSCFRTDFQSYDHFLGVF

SEQ ID NO: 1013 - protein, 648 aa, Chlamydomonas sp.
AVKDSIGDVIGNDDADYIKSYPIYFDQVLNYAGHTLSTVVSNNAWVPLIPRLARLTSTTLNKLNAPKTLDTSKIIRGYDVMQAIQQEVQNMEGWPESVQEFVNEVREMLSVPDGSRVYDNYGKDMDFPTMVRFNYWIQTRLEDMDARRIRLMPIFNVQRVHVRLDLKTLVNLFRHMFPNDQNIVELSKWEHVKNPDSFMLPQRPAQKKKKSCGPGEWEAYKSVMKQYDDDVKDIKATDEYRHAKGLYDTLVNARKTVAGSSFRKPPVKNGWVFDCSICTDGVSLSMQYSKTVQVLVSDLKKTCKKPRKEEGIKIAEKYDGSLKTLLPDMGIVVLGVDPGRSNIATVTYLADDKNKTWTLTRGAFYHKSGIKKQTRQKELRFADMIPMWESLRENGAALSTSRTDKISAYLSNYAKFSDEWWRLALRRREYCDNLQRYIGKRKVKDSFWAGIKRCMMKELPDMKVCVAYGSAITKLKPTGPGEVAVPTGAMFASCKRIFKEDVSVTDEFKTTLMSWETGKEKERVYKIPSVCSADVKLRLGGERFGHTKSKTMPKVADCDHLGVRLYNKRKGAQEKHRRGGFATSLVDSQKSIERYPVVRGLRFSPETCIYSDRDRSSALTIARLHCMELMGLGRPLPFAHSSSVVVDE

SEQ ID NO: 1014 - protein, 615 aa, Chlamydomonas sp.
QCIRNLHVLDIRMPCMATNASVKLARPPMPVVSPGPSSVDGRIMARSGLQETNVSLTQAASKATSLSRKKKTAVVKSFSTHVCPHTNNNPTCSDSNCSCKPIFLTNIPDASKSRTSDQGSTSSAQDFYEYWDSSRQDLYRQLLWLPKTGTQGLVSSSFNGFAHSTLTRSSFSITKTEPLKTSLEKTSCPSFKYIVTDGTVEDATKSNAKPKLRTLKLKLNPTKAQKSMLAEFAGCSRFMYNKAVAARLGVGSTHKSVFRIRDRYVTNKVRGEGKMPNPYFKNRQWLLQCPKSVRQSAIKAALANIKACFSNLKAGNIKQFSAPFRRKKTELERGWAIEMDQKNVSKDGDKLFIFKDILGNMRYFGSKQLHKLMPEENPTHDPKVHKSRFGEYFLVLSVAATDRRAERKPVHPDKVATASIDPGVRKTMVTYSPENEESFMLGQGQASDLVKLLLVHDKLQSRLDTEKTLRSKERMKIKKHMIRIRKRIFYLKKEFRDQTTNFLAARYDVLLVPQLETAKMTISAERELTTKVARQMLTLSHSVLFNRLKEKCAEYGTVFLHVLEHYTSQTCPMCGFLNKCGETYTCKNCQFTCDRDIVGAAGIFLKAVRTENPCS

SEQ ID NO: 1015 - protein, 813 aa, Chlamydomonas sp.
PRMEHVCDVCIKSSVMYKLCKMATKPPTVAKLKELLKLAEVAYSSKDKKDDIVRLCEDNGLIARPPPEYKTVEKMCVVKCALKKAMSLDDEEFGKFREHVDQLVNVVSRMLRRSSLVLTFHITSLLEKGLDIPDLYNMKDTYWKDWLRIGVDGIFPDEESKISYEAVKDSIGDVIGNDDADYIKSYPIYFDQVLNYAGHTLSTVVSNNAWVPLIPRLARLTSTTLNKLNAPKTLDTSKIIRGYDVMQAIQQEVQNMEGWPESVQEYVNEVREMLSVPDGSRVYDNYGKDMDFPTMVRFNYWIQTRLEDMDARRIRLMPIFNVQRVHVRLDLKTLVNLFRHMFPNDQNIVELSKWEHVKNPESFMLSQRPAQKKKKSCGPGEWEAYKSVMKQYDDDVKDIKATDEYRHAKGLYDTLVNARKTVAGSFFRKPPVKNGWVFDCSICTDGVSLSMQYSKTVQVLVSDLKKTCKNPRKEEGIKIAEKYDGSLKTILPDMGIVVLGVDPGRSNIATVTYLADDKNKTWKLTRGAFYHKSGIKKQTRQKELRFADMIPMWESLRENGAALSTSRTDKISAYLSNYAKFSDEWWRLALRRRESRDNLQRYIGKRKVKDSFWAGIKRCMMKELPDMKVCVAYGSAITKLKPTGPGEVAVPTGAMFASCKRIFKEDVSVTDEFKTTLMSWETGKEKERVYKIPSVCSADVKLRLGGERFGHTKSKTMPKVADCDHLGVRLYNKRKGAQEKHRRGGFATSLVNSQKSIERYPEVRGLRFSPETCIYSDRDRSSALTIARLHCMELMGLGRPLPFAHSSSVVVDK

SEQ ID NO: 1016 - protein, 341 aa, Chlamydomonas sp.
TCVYNACKRTGWSIAFYLISQLIIYTLNHFIHRRYSNLKAGNIKQFSAPFRRKKTELERGWVIEMDQKNVSKDGDKLFIFKEILGNMRYFGSKQLHKLMPEENPTHDPKVQKSRFGEYFLVLSVAARDRRAERKPVNPDKVATASIDPGVRKTMVTYSPENEESFMLGQGQASDLVKLLLVHDKLQSRLDTEKTLRSKERMKIKKLMIRIRKTIFYLKKEFRDQTTNFLAARYDVLLVPQLETAKMTISAERELTTKVARQMLTLSHSVLFNRLKEKCEEYGTVFLHVLEHYTSQTCPMCGFLNKCGETYTCKNCQFTCDRDIVGAAGIFLKAVRTENPCS

SEQ ID NO: 1017 - protein, 655 aa, Chlamydomonas sp.
ISNQDLEPPERLASLRHKHQGITNPLHTMFRNQSKSAGSQERPLCTKYQNAMYGNQSFCKIGKASDALGVSRTVLRRWADNGTIRTIRTPGNQRLFDPSSIQGYLIEQEKKTSSRQVILYARVSSHKQQHDLLRQQLFLQTHISDKHSGCEQVKDVGSGLNFKRPGLYEYWDSSRQDMYRQLLWLPKTGTQGLVSSSFNGFAHSTPTRSSFSITKTEPLKTSLENTSCPSFKYIVTDGTVEDATKSNAKPKLRTLKLKLNPTKAQKSMLAEFAGCSRFMYNKAVAARLGVGSTHKSVFRIRDRYVTNKVRGEGKMPNPYFKNRQWLLQCPKSVRQSAIKSALANIKACFSNLKAGNIKQFSAPFRRKKTELERGWVIEMDQKNVSKDGDKLFIFKEILGNMRYFGSKQLHKLMPEENPTHDPKVQKSRFGEYFLVLSVAARDRRAERKPVNPDKVATASIDPGVRKTMVTYSPENEESFMLGQGQASDLVKLLLVHDKLQSRLDTEKTLRSKERMKIKKLMIRIRKTIFYLKKEFRDQTTNFLAARYDVLLVPQLETAKMTISAERELTTKVARQMLTLSHSVLFNRLKEKCEEYGTVFLHVLEHYTSQTCPMCGFLNKCGETYTCKNCQFTCDRDIVGAAGIFLKAVRTENPCS

SEQ ID NO: 1018 - protein, 793 aa, Chlamydomonas sp.
KMATKPPTVAKLKELLKLAEVPYSSKSNKDDLVRLCDDNGLIARPPPEYKTVEKMCVVKCALKKAMSLDDEEFGKFREHVDQLVNVVSRMLRRSSLVLTFHITSLLEKGLDIPDLYNMKDTYWKDWLRIGVDGIFPDEESKISYEAVKDSIGDVIGNDDADYIKSYPIYFDQVLNYAGHTLRTVVSNNAWVPLIPRLARLTSTTLNKLNAPKTLDTSKIIRGYDVMQAIQQEVQNMEGWPESVQEYVNEVREMLSVPDGSRVYDNYGKDMDFPTMVRFNYWIQTRLEDMDARRIRLMPIFNVQRVHVRLDLKTLVNLFRHMFPNDQNIVELSKWEHVKNPDSFMLPQRPAQKKKKSCGPGEWEAYKSVLKQYDDDVKDIKATDEYRHAKGLYDTLVNARKTVAGSFFRKPPVKNGWVFDCSICTDGVSLSMQYSKTVQVLVSDLKKTCKKPRKEEGIKIAEKYDGSLKTILPDMGIVVLGVDPGRSNIATVTYLADDKNKTWTLTRGAFYHKSGIKKQTRHKELRFADMIPMWESLRENGAALSTSRTDKISAYLSNYAKFSDEWWRLALRRRESRDNLQRYIGKRKVKDSFWAGIKRCMMKELPDMKVCVAYGSAITKLKPTGPGEVAVPTGAMFASCKRIFKEDVSVTDEFKTTLMSWETGKEKERVYKIPSVCSADVKLRLGGERFGHTKSKTMPKVADCDHLGVRLYNKRKGAQEKHRRGGFATSLVDSQKSIERYPEVRGLRFSPETCIYSDRDRSSALTIARLHCMELMGLGRPLPFAHSSSVVVDE

SEQ ID NO: 1019 - protein, 793 aa, Chlamydomonas sp.
KMATKPPTVAKLKELLKLAEVPYSSKSNKDDLVRLCEDNGLISRPPPEYKTVEKMCVVKCALKKAMSLDDEEFGKFREHVDQLVNVVSRILRRSSLVLTFHITSLLEKGLEIPDLYNMKDTYWKDWLRIGVDGIFPDEESKISYEAVKDSIGDVIGNDDADYIKSYSIYFDQVLNYAGHTLSTVVSNNAWVPLIPRLARLTSTTLNKLNSPKTLDTSKIIRGYDVMQAIQQEVQNMEGWPESVQEYVNEVREMLSVPDGSRVYDNYGKDMDFPTMVRFNYWIQTRLEDMDARRIRLMPIFNVQRVHVRLDLKTLVNLFRHMFPNDQNIVELSKWEHVKNPDSFMLPQRPAQKKKKSCGPGEWEAYKSVLKQYDDDVKDIKATDEYRHAKCLYDTLVNARKTVAGSFFRKPPVKNGWVFDCSICTDGVSLSMQYSKTVQVLVSDLKKTCKKPRKEEGIKIAEKYDGSLKTILPDMGIVVLGVDPGRSNIATVTYLADDKNKTWKLTRGAFYHKSGIKKQTRQKELRFADMIPMWESLRENGAALSTSRTDKISAYLSNYAKFSDEWWRLALRRRESRDNLQRYIGKRKVKDSFWAGIKRCMMKELPDMKVCVAYGSAITKLKPTGPGEVAVPTGAMFASCKRISKEDVSVTDEFKTTLMSWETGKEKERVYKIPSVCSADVKLRLGGERFGHTKSKTMPKVADCDHLGVRLYKKRKRAQEKHRRGGFATSLVDSQKSIERYPEVRGLRFSPETCIYSDRDRSSALTIARLHCMELMGLGRPLPFAHSSSVVVDE

SEQ ID NO: 1020 - protein, 239 aa, Chlamydomonas sp.
CYSILNQLQFSMYNLDRRSIVVHMYTLLQSLRSPKRTSLESFDAYVTVMVNHWDSRWGEMSKSRWGAQRLRLYGGKKRVLARFFNEVQADVGERKTIVIAYGSSKFAPGGKGELSVPTTSAFNAFRDRFKGRVAVIDEFRTTKIWHKDSTTVLQSVQSEKKGRTVRGLLWCSSTMENSKLFVNRDLNAAINIHNCFTMYPTRPGILARPKKYCKLEVVVGRTIDYKLTGSLQNAVSSEV

SEQ ID NO: 1021 - protein, 688 aa, Chlamydomonas sp.
GNVGAILYHQKKKNTHPLLMGVVQDKGDDDINISVVKKTLNSLCMDVSRHQISSRIQSMVLLINHAVAEAYLFANFHITRCLDDGDFDVKQLPHLDRNFYYRCLLAVSTSNVRKDTLGQSFNDTMVAFDALRPAGYVKVDVRPWGQVIADVSIQMATMACNSVWANVDWVVIKYLRLKHPSLKKHFKKIVKAVVQYPESKIDTIIPEGLVHAIHIKEVVSHLRALFPLPRGKQFNTRAHLTMRLFHHVLTELGEVGRVDPKDKKTKQSHPRLLSILPRKNGFTISYVPISSMTFMKLLSMGDSPLESVSGDGRYENHTMLWRKYFNVQGLETKRSRFDNRILSDGKGVSVQMKKKGKEEVVEEGENAGYPKDANIVECKDAVGALRVGVDPGMTDIVTVASSAGRIESFSSARFSEVAGYNTSKRRTYKWNDETQDLVKSIPSPNTSNMVDLQDHVRAYLKALPILLQHRANKGYRSMRFYRYVGKQKTIEKVCDVIAPRAQTTVVGFGNWSNQGYGISRSCSGPIKEIRRCLSRRKNVLFKNVDERYTSCKCHGCFQRLVNMKAGSVVWRGVCKESPIDGSITVEKQKMVVKNVKVHKVLHCRDSVKSASSNVRCGATWNRDVNAAKNLLLLLTTWMDGRERPEAFCVPSPPPKTTVSIEASVSAIPTDPPGFVSSLPCYPLGQLKC

SEQ ID NO: 1022 - protein, 760 aa, Chlamydomonas sp.
HTHQRTRRTILSVYAKTMVSSPDPLHEYKTVEKMCVVKCALKKAMSLDDEEFGKFREHVDQLVNVVSRMLRRSSLVLTFHVTRLMEGDLPIPNMYDMKDTYWKDWLRIGVDGVFPDEESRISYESVKDVIGKVLGSDDPDYINSYPIYFDQVLNYAGHTLSTVVSNNAWVPLVPRLTRLTKATLNALEAPKTIRVYDVMRVIQQEIQEMESWPESVQKYVREVRVRLKVPDGSRLYDNYGKDMDFPTMVRFNYWMQTRLEAIGARRIRLMPIFNVQRAHVRLDMKTLVNLFRHVFPKDPNIVELSKWKDVKDPDRFMLPLKPAFKKKKSCGPGEWEAYKLAQQKYDADVNDIKDTDEYRHAKGRYDTLVNARKTVAGSFFKKPPVKTGWVFDCSICTDGVSLSMQYSKTVQVRVSDLKKTSKRSRDDEGMSVSEQYDHKLKTTLPDMGIVVLGVDPGRSNIATVTYLADDKSKTWKLTRGAFYHKSGIKKQKKQQEKRFSDMIPRWESLRENGAALSTSRTDDISAYLKNYDTFSDEWWRMALLRRESRDNFQRYIGKRKAMDSFWAGIKRNMKLDHPDLRVRVAYGSAITTLKATGPGEVAVPTGSMFASCKRLFKEEVHVTDEFKTTLMSWETGAKKECVYKIPSVQITTEGQIRLGYELLGHTPLKETPNVSYRDQLAVRVYCTRKQIQEKHRRGGLSPSLVDNNSIKRYPEVRGLRFSPETSTYSDRDRSSALTIARLHCMELLGQGRPLPFCRDA

SEQ ID NO: 1023 - protein, 801 aa, Chlamydomonas sp.
PRMEHVCDVCIKSSVMYKLCKMATKPPTVAKLKELLKLAEVAYSSKDKKDDIVRLCEDNGLIARPPPEYKTVEKMCVVKCALKKAMSLDDEEFGKFREHVDQLVNVVSRMLRRSSLVLTFHVTRLMEGDLPIPNMYDMKDTYWKDWLRIGVDGVFPDEESRISYESVKDVIGKVLGSDDPDYINSYPIYFDQVLNYAGHTLSTVVSNNAWVPLVPRLTRLTKATLNALEAPKTIRVYDVMRVIQQEIQEMESWPESVQKYVREVRVRLKVPDGSRLYDNYGKDMDFPTMVRFNYWMQTRLEAIGARRIRLMPIFNVQRAHVRLDMKTLVNLFRHVFPKDPNIVELSKWKDVKDPDRFMLPLKPAFKKKKSCGPGEWEAYKLAQQKYDADVNDIKDTDEYRHAKGRYDTLVNARKTVAGSFFKKPPVKTGWVFDCSICTDGVSLSMQYSKTVQVRVSDLKKTSKRSRDDEGMSVSEQYDHKLKTTLPDMGIVVLGVDPGRSNIATVTYLADDKSKTWKLTRGAFYHKSGIKKQKKQQEKRFSDMIPRWESLRENGAALSTSRTDDISAYLKNYDTFSDEWWRMALLRRESRDNFQRYIGKRKAMDSFWAGIKRNMKLDHPDLRVRVAYGSAITTLKATGPGEVAVPTGSMFASCKRLFKEEVHVTDEFKTTLMSWETGAKKECVYKIPSVQITTEGQIRLGYELLGHTPLKETPKVSYRDQLAVRVYCTRKQIQEKHRRGGLAPSLVDNNSIKRYPEVRGLRFSPETSTYSDRDRSSALTIARLHCMELLGQGRPLPFCRDA

SEQ ID NO: 1024 - protein, 801 aa, Chlamydomonas sp.
PRMEHVCDVGIKSSVMYKLCKMATKPPTVAKLKELLKLAEVAYSSKDKKDDIVRLCEDNGLIAKPPPEYKTVEKMCVVKCALKKAMSLDDEEFGKFREHVDQLVNVVSRMLRRSSLVLTFHVTRLMEGDLPIPNMYDMKDTYWKDWLRIGVDGVFPDEESRISYESVKDVIGKVLGSDDPDYINSYPIYFDQVLNYAGHTLSTVVSNNAWVPLVPRLTRLTKATLNALKAPKTIRVYDVMRVIQQEIQEMESWPESVQEYVREVRVRLKVPDGSRLYDDYGKDMDFPTMVRFNYWMQTRLESIGARRIRLMPIFNVQRAHVRLDMKTLVNLFRHVFPKDPNIVELSKWKDVKDPDRFMLPLKPAFKKKKSCGPGEWEACKLAQQKYDADVNDIKDTDEYRHAKGRYDTLVNARKTVAGSFFKKPPVKTGWVFDCSICTDGVSLSMQYSKTVQVRVSDLKKTSKRSRDDEGMSVSEQYDHKLKTTLPDMGIVVLGVDPGRSNIATVTYLADDKSKTWKLTRGAFYHKSGIKKQKKQQEKRFSDMIPRWESLRENGAALSTSRTDDISAYLKNYDTFSDEWWRMALLRRESRDNFQRYIGKRKAMDSFWAGIKRNMKLDHPDLRVRVAYGSAITTLKATGPGEVAVPTGSMFASCKRLFKEEVHVTDEFNTTLMSWETGAKKECVYKIPSVQITTEGQIRLGYELLGHTPLKETPKVSYRDQLAVRVYCTRKQIQEKHRRGGLSPSLVDNNSIKRYPEVRGLRFSPETSTYSDRDRSSALTIARLHCMELLGQGRPLPFCRDA

SEQ ID NO: 1025 - protein, 351 aa, Chlamydomonas sp.
HNKPSKNARRIRLMPIFNVQRVHVRLDLKTLVNLFRHMFPTDKNIIELSKWEHVKNPDSFMLPQRPAQKKKKSCCPGEWEAYKSVLKQYDDDVKDIKATDEYRHAKGLYDTLVNARKTVAGSFFRKPPVKNGWVFDCSICTDGVSLSMQYSKTVQVPVSDLKKTCKKPRKEEGIKIAEKYDGSLKTILPDMGIVVLGVDPRRSNIATVTYLADDKNKTWTLTRGAFYHKSGIKKQTRQKELRFADMIPMWESLRENGAALSTSRTDNISAYLSNYAKFSDEWWRLALRRRESRDNLQRYIGKRKVKDSFWAGIKRCMMKELSDMKVCVAYGSAITKLKPTGPGEVSKRTFL

SEQ ID NO: 1026 - protein, 617 aa, Chlamydomonas sp.
YHQKKKNTHPLLMGVVQDKGDDDINISVVKKTLNSLCMDVSRHQISSRIQSMVLLINHAVAEAYLFANFHITRCLDDGDFDVKQLPHLDRNFYYRCLLAVSTSNVRKDTLGQSFNDTMVAFDALRPAGYVKVDVRPWGQVIADVSIQMATMACNSVWANVDRVVIKYLRLKHPSLKKHFKKIVKAVVQYPESKIDTIIPEGLVHAIHIKEVVSHLRALFPLPRGKQFNTRAHLTMRLFHHVLTELGEVGRVDPKDKKTRKSHPRLFSILPRKNGFTISYVPISSMTFMKLLSMGDSPLESVSGDGRYENHTMLWRKYFNVQGLETKRSRFDNRILSDGKGVSVQMKKKGKEEVVEEGENAGYPKDANIVECKDAVGALRVGVDPGMTDIVTVASSAGRIESFSSARFSEVAGYNTSKRRTYKWNDETQDLVKSIPSPNTSNMSDLQDHVRAYLKALPILLQHRANKGYRSMRFFRYVGKQKTIEKVCDVIAPRAQTTVVGFGNWSNQGYGISRSCSGPIKEIRRCLSRRKNVLFKNVDERNTSCKCHGCFQRLVNMKADSVVWRGVCKESPIDGSISVEKQKMVVKNVKVHKVLHCRDSVKSASSNVRCGATPGTET

SEQ ID NO: 1027 - protein, 607 aa, Chlamydomonas sp.
LFANFHVTRCLDDLTFDVKCLPKLDRNFYYRCLLAVSRSNIRKGTLGKSLTDSMDAFDALCPEGWSKTDVRPWGQVIADLSIQMATMACNSVWSNLSKIVVKYLRLKYPSLKKHYGRILKAVVQFPKSVINNFVPSTLGNVVEIKAVINHLRSLLPSFTGTQFNTRAHLTMRLFHSVLAELISFSSSEHNRRAPRLFSLLPRKIGFTISYIPISSMTFMKILSMGSTPLEKIRGDGRLEDHDRLWRNYFNVGSVETKASRFDGRILTEGKGVSIQMRRELGQCLIDTSGYPKDSGIGECLNATTYRNARCVGVDPGMTDIATVAFSRDGGTQSYSSSHFSHKAGYKTSKRRTDKWNVETAELDKSIPTSMTTSMDEMERHIQAYLVALPILLQHRTNKGYRSMRFFRYVGKQKAIEDVCDMIAPRDTPTVVGFGNWLNQGNGISRPCSGPLKEIRKRLSQRKDVLFKNIDERNTSCTCHGCFEPLVNMKANSVRWKRVRQVGVAVKEKVMVKNVKVHKILHCCNSVGSAPSVRCGTTWNRDVNAAKNILLLLMTWVSGQERPAAFCDPSKNNNTTSREATEMLRPVVHPLGSIGHTQLLSSVHQLQC

SEQ ID NO: 1028 - protein, 607 aa, Chlamydomonas sp.
LFANFHVTRCLDDLTFDVKCLPKLDRNFYYRCLLAVSRSNIRKGTLGKSLTDSMDAFDALCPEGWSKTDVRPWGQVIADLSIQMATMACNSVWSNLSMIVVKYLRLKYPSLKKHYGRILKAVVQFPKSVINNFVPSTLGNVVEIKAVINHLRSLLLSFTGTQFNTRAHLTMRLFHSVLAELISFSSSEHNRRAPRLFSLLPRKIGFTISYIPISSMTFMKILSMGSTPLEKIRGDGRLEDHDRLWRNYFNVGSVETKASRFDGRILTDGKGVSIQMRRELGQCLIDTSGYPKDSSIGECLNATTYRNAICVGVDPGMTDIATVAFSRDGGTQSYSSSHFSHKAGYKTSKRRTDKWNVETAELDKSIPTSMTTSMDEMERHIQAYLVALPILLQHRTNKGYRSMRFFRYVGKQKAIEDVCDMIAPRDTPTVVGFGNWLNQGNGISRPCSGPLKEIRKRLSQRKDVLFKNIDERNTSCTCHGCFEPLVNMKANSVRWKRVRQVGVAVEEKVMVKNVKVHKILHCCNSVGSAPSVRCGTTWNRDVNAAKDILLLLMTWVSGQERPAAFCDPSKNNNTTSREATEMLRPVVHPLGSIGHTQLLSSVHQLQC

SEQ ID NO: 1029 - protein, 532 aa, Chlamydomonas sp.
TSHKASTDVIMYEWMVLQNGPSSKETSFHDALHINKDPVFFWATVLGKNLRVDADNAKRFFARDVAFCLRGVLPLPSGNTFASRAHMTLPLYHKILSETIEEKRKTKSEKHRTFSLLPYKSGFTLSHIPISKMAFFYMVNECHFDSCKADVASKNHQGIWERFANLKKVETVSRKFGYRIVTDGIAVSILMNKPTCLTCSMPADAFSTRAHEYVTTDEGGIVSFLDNVVVAAVDPGVTDIVTVTGLNGGTRSYSSAQYYRGGLIFKSQRQTDFGTSRRLISSVVSFRIETLRVLNRLVRTPDSTWVPPQSFLPIVLRGYRFRRYCKKQKLIVEIADFVAPREKSAKVLVGFGDWKDLQAIRFELRSRENVIMEDIDEFRTSQRCSCCENHLCNMVALTHRKKQDGTGWECTEGRKRIHKILHCKSSQSGAPRQQSGGRLHCGKTWDRDVNASRNILMLTLHQVFGRERPLAFRRDAPRSSSTPPPPPPPPDTDMGTQTVERFTKEATRNIFENLFNLLHPPTLPKSNDLQSG

SEQ ID NO: 1030 - protein, 621 aa, Chlamydomonas sp.
QCIRNLHVLNIRMPCMATKASVKLARPPMPLVSPGPSSVDGRIMARSERSGLQATNVSLTQAASKATSSSRKKKPAVVKSFSTHVCPHTNNNPTCSDSNCSCKPIFLTNIPDASKSLKSRTSDQGSTSSAQDFYEYWDSSRQDLYRQLLWLPKTGSQGLVSSSLNGFARSTPARSSFSITKTEPPKTSLEKTSCPSFKYIVADGTVEDATKSNAKPKLRTLKLKLNPTKAQKSMLAEFAGCSRFMYNKAVAARLGVGSTHKSVFRIRDRYVTNKVKGAGKMPNPYFKNRQWLLQCPKSVRQSAIKSALANIKACFSNLKAGNIKQFSAPFRRKKTELERGWFIEMDQHNISKDGDKLFIFKDTLGNMRYFGSKQLQKLLPEKNPTHDPKVQKSRFGEYFLVLSVAASDRREERKPVHPGKVATASIDPGVRKTMVTYSPENEESFMLGQGQASDLVKLLLVHDKLQSRLDTEKTLRSKERMKIKKLMIRIRKRIFYLKKEFRDQTTNFLAARYDVLLVPQLETAKMTISAERELTTKVARQMLTLSHSVLFNRLKEKCEEYGTVFLHVLEHYTSQTCPMCGFLNKCGETYTCKKCQFTCDRDIVGAAGIFLKAVRTENPCS

SEQ ID NO: 1031 - protein, 917 aa, Chlamydomonas sp.
KRFGVNRKRREFVSKLFETNKDLLKSFLLSTKCTTAIGVVAFFKSTHNLRLSTKTVYRFIKLLRFTRKRSKLRGQCKGDLVPLVNEFCSRYKETINAGKILVSVDECGFSERLKPHYGYSPVGKPVIVKTTGGWVHHSLLMAVFSDGRKEFVVKKGSVKKTDFASFIDSLSLCNNSVISHPYRVQGGGKDVRREMCSEKGMSLDEEEFGVFRGHVDQLVNIVSRMFRRSSLVLAFHVTRLMEDDLPIPDMYEMEDTYWKDWLRIGVDGVFPDEESRISYESVKDVIGKVLDSDDTEYIKSYPIYFDQVLNYACHTLSTVVSNNAWVPLVPRLTRLTKATLKALKAPTTIRLYDVMRVIRQEVQEMEYWPDSVQKYVREVRVRLKVPDGDRLYDDYGKCVDFQTMVRFNYWMQTRLETMEERRIRLMPIFSVHRVHVRLDLKTLVNMFRHYFPKDPNIAELSKWNHAKNPDNFMLPQRPAQKKKKSCGPGEWEVYKSALKQYDDDVKDIKATEEYRHAKGLYDTLVNVWKTVAGSFFKNPPVKNGWVFDCSICTDRVSLSMQYSKQVKVRVSDLKKTSMSSRDNEGLIIAEQYDRKLETTLTEMGIVVLGVDPGRSNIATVTYLAKGKSKTWKLTLGAFYHKSGIKKQKKQQEKRFSDMIPRWESLRENGAALSTSRKDDISAYLTNYATFSDEWWRMALRRRESRDNFQRYIGKRKTMDSFWAGIKRNMKLDHPDLRVRIAYGSAIKTMKATGPGEVAVPTGSMFASCKRLFKEDVHVTDEFKTTLMSWETGAKKECVYKIPSVQITTAGQIRLGYELLGHTPLKEPPQVSYRDQVAVRMYCTRKQIQEKHRRGGFAPSLVDNKLIKRYPEVRGLRFSPETSTYSDRDRSSALTIARLHCMELLGQGRPLPFCRDAA

SEQ ID NO: 1032 - protein, 424 aa, Chlamydomonas sp.
IDYIDKYIVADGTVEDATKSNAKPKLRTLKLKLNPTKAQKSMLAEFAGCSRFMYNTAVAARLGVGSTHKSVFRIRDRYVTNKVRGKGKMPNPYFKNRQWLLQCPKSVRQSAIKSALANIKACFSNLKAGNIKQFSAPFRRKKTELERGWAIEMDQKNVSKDGDKLFIFKEILGNMRYFGSKQLHKLMPEENPTHDPKVQKSRFGEYFLALSVAARDRRAERKPVHPDNVATASIDPGVQKTMVTYSPENEESFMLGQGQASDLVKLLLVHDKLQSRLDTEKTLRSKERMKIKKLMIRIRKTIFYLKKEFRDQTTNFLAARYDVLLVPQLETAKMTISAERELTTKVSRQMLTLSHYVLFNRLKEKCEEYGTVFLHVLEHYTSQTCPMCGFLNKCGETYTCKNCHFTCDRDIVGAAGIFLKAVRS

SEQ ID NO: 1033 - protein, 575 aa, Chlamydomonas sp.
KWDTLSSGASEKLTGVVNNRAVSDLCINHDDAALLLWGIRKLWCIMISQQETNTHSLSMGVVTNNGDDDDLGIMVVKKTLNSLCMDVSRQQLCSRIQSMVLVINHAVAEAYLFANFHITRCLDDGDFDVKQLPHLDRNFYYRCILAVSISNVRNDTLDQSLKDSMVAFDALRPAGYAKVDVRPWGQVIADVSIQMATMACNSVGANVDRIVIKYLSLKHPSLKRHFNKIVKAVVQYPESDIDKIIPASRVHANLIKDVVRRLRALLPLPRGKKFNTRAHLTMRLFHHVLTELGADLKEKTTKKRPRLFSILPRKSGFTISYVPISSVTLMKLLSMGDSPLESVRGDGRHENHSMLWRKYFNVQGLETKRSRFDNRILSDGKGVSVQMKHQVGEDVAGEGGDNAGYPKDASIEDCQDASLRLGALRVGVDPGMTDIVTVASSDGRVESFSSARFSEAAGYNTSNRCTNKWIADTQDLVKSIPSPTTSSMPDMQDHVRGYLSALPTLLQHRASRGYRSMRFFRYVGKQKTIEKVCDVIATKAKKTVVGFGNWSNQGYGISRLCSGPVKEIRKCLSRR

SEQ ID NO: 1034 - protein, 624 aa, Chlamydomonas sp.
VNLTVYKEFACTKYQNAMYGNQSFCKIGKASDALGVSRTVLRRWADNGTIRTIRTPGNQRLFDPSSIQGYLIEQEKKPSSRQVILYARVSSHKQQPNLLRQQLFLQTHILTNIPDASKLLKSRTSDQGSTSSGQDFYEYWDSSRQDLYRQLMWLPKTGSQGLVLSSLNGFARSTPVRLSFSITKTEPPKTSLEKTSCPSFKYIVADGTVEDATKSNAKPKLRTLKLKLNPTKAQKSMLAEFAGCSRFMYNKAVAARLGVGSTHKSVFRIRDRYVTNKVKGAGKMPNPYFKNRQWLLQCPKSVRQSAIKSALANIKACFSNLKAGNIKQFSAPFRRKKTELERGWAIEMDQHNISKDGEKLFIFKDTLGNMRYFGSKQLQKLMPEKNPTHDPKVQKSRFGEYFLVLSVSARDRREERKPVHSGKVATASIDPGVRKTMVTYSPENEESFMLGQGQASDLVKLLLVHDKLQSRLDTEKTLRSKERMKIKTQMIRIRKRIFYLKKEFRDQTTNFLAARYDVLLVPQLETAKMTISAERELTTKVARQMLTLSHSVLFNRLKEKCEEYGTVFLHVLEHYTSQTCPMCGFLNKCGETYTCKNCQFTCDRDIVGAAGIFLKAVRTENPCS

SEQ ID NO: 1035 - protein, 795 aa, Chlamydomonas sp.
LWKMATKPPTVAKLKELLKLAEVPYSSKSNKDDLVRLCEDNGLIARPPPEYKTVEKMCVVKCALKKAMSLDDEEFGKFREHVDQLVNVVSRMLRRSSLVLTFHITSLLEKGLEIPDLYNMKDTYWKDWLRIGVDGIFPDEETKISYEAVKDSIGDVIGNDDADYIKSYPIYFDQVLNYAGHTLSTVVSNNAWVPLIPRLARLTSTTLNKLNAPKTLDTSKIIRGYDVMRAIQQEVQNMEGWPESVQEYVNEVREMLSVPDGSRVYDNYGKDMDFPTMVRFNYWIQTRLEDMDARRIRLMPIFNVQRVHVRLDLKTLVNLFRHMFPNDQNIVELSKWEHVKNPDSFMLPQRPAQKKKKSCGPGEWEAYMSVLKQYDDDVKDIKATDEYRHAKGLYDTLVNARKTVAGSFFRKPPVKNGWVFDCSICTDGVSLSMQYSKTVQVLVSDLKKTCKKPRKEEGIKIAEKYDGSLKTILPDMGIVVLGVDPGRSNIATVTYLADDKNKTWTLTRGAFYHKSGIKKQTRQKELRFADMIPMWESLRENGAALSTSRTDKISAYLSNYAKFSDEWWRLALRRRESRDNLQRYIGKRKVKDSFWAGIKRCMMKELPDMKVCVAYGSAITKLKPTGPGEVAVPTGAMFASCKRIFKEDVSVTDEFKTTLMSWETGKEKERVYKIPSVCSADVKLRLGGERFGHTKSKTMPKVADCDHLRVRLYNKRKGAQEKHRRGGFSTSLVDSQKSIERYPEVRGLRFFPETCIYSDRDRSSALTIARLHCMELMGLGRTLPFAHSSSVVVDE

SEQ ID NO: 1036 - protein, 280 aa, Chlamydomonas sp.
KTVAGSFFRKPPIKNGWVFDCSICTDGVSLSMQYSKTVQVLVSDLKKTCKKPRKEEGIKIAEKYDGSLKTILPDMGIVVLGVDPGRSNIATVTYLADDKNKTWTLTRGAFYHKSGIKKQTRQKELRFADMIPMWESLRENGAALSTSRTDKISAYLSNYAKFSDEWWRLALRRRESRDNLQRYIGKRKVKDSFWAGIKRCMMKELPDMKVCVAYGSAITKLKPTGPGEVAVPTGAMFASCKRIFKEDVSVTDEFKTTLMSWETCKEKNVFTRSQAFVKQT

SEQ ID NO: 1037 - protein, 390 aa, Chlamydomonas sp.
KTVAGSFFKKPPVKTGWVFDCSICTDGVSLSMQYSKTVQVRVSDLKKTSKRSRDEEGMSVSEQYDHKLKTTLPDMGIDVLGVDPGRSNIATVTYLADDKSKTWKLTRGAFYHKSGIKKQKKQQEKRFSDMIPRWESLPENGAALSTSRKDDISAYLKNYATFSDEWWRMALRRRESRDNFQRFIGKRKAMDSFWAGIKRNMELDHPDLRVRVAYGSAITKLKATGPGEVAVPTGSMFASCKRLFKEEVHVTDEFKTTLMSWETGAKKVCVCKIPSVQITTEGQIRLGYELLGHTPLKETPKVSYRDQLAVRVYCTRKKIQENHRRGGLAPSLVDNNSIKRYPEVRGLRFSPETSTYSDRDRSSALTIARLHCMELLGQGRPLPFCRDACC

SEQ ID NO: 1038 - protein, 640 aa, Chlamydomonas sp.
DISTKESQIRSIPCFATSQNQPGGRNAHYITRCLDDGDFDVKQLPHLDRNFYYRCLLAVSTSNVRKDTLGQSFNDTMVAFDALRPAGYVKVDVRPWGQVIADVSLQMATMACNSVWANVDRFVIKYLRLKHPSLKKHFKKIVKAVVQYPESKIDTIIPEGLVHAIHIKEVVSLLRALFPLPRGKQFNTRAHLTMRLFHHVLTELGEVGRVDPKDKKTKKSHPRLFSILPRKNGFTISYVPISSMTFMKLLSMGDSPLESVSGDGRYENHTMLWRKYFNVQGLETKRSRFDNRILSDGKGVSVQMKQKGKEEVVEEGENAGYPKDANIVECKDAVGALRVGVDPGMTDIVTVASSAGRIESFSSARFSEVAGYNTSKRRTYKWNDETQDLVKSIPSPNTSNMVDLQDHVRAYLKALPILLQHRANKGYRSMRFFRYVGKQKTIEKVCDVIAPRAQTTVVGFGNWSNQGYGISRSCSGPIKEIRRCLSRRKNVLFKNVDKRNTSCKCHGCFQRLVNMKADSVVWRGVCKESPIDGSITVEKQKMVVKNVKVHKVLHCRDSVKSASSNVRCGATWNRDVNAAKNLLLLLTTWMDGRERPEAFCVPSPPPKTTVSIEASVSAKPTDPPGFVSSLPCYPLGQLKC

SEQ ID NO: 1039 - protein, 688 aa, Chlamydomonas sp.
GSVGAILYHQKKKNTHPLLMGVVQDKGDDDINISVVKKTLNSLCMDVSRHQISSRIQSMVLLINHAVAEAYLFANFHITRCLDDGDFDVKQLPHLDWNFYYRCLLAVSTSNVRKDTLGQSFNDTMVAFDALRPAGYVKVDVCPWGQVIADVSIQMATMACNSVWANVDRVVIKYLRLKHPSLKKHFKKIVKAVVQYPESKIDTIIPEGLVHAIHIKEVVSHLRALFPLPRGKQFNTRAHLTMRLFHHVLTELGEVGRVDPKDKKTRKSHPRLFSILPRKNGFTISYVPISSMTFMKLLSMGDSPLESVSGDDGYENHTMLWRKYFNVQGLETKRSRFDNRILSDGKGVSVQMKQKGKEEVVEEGENAGYPKDANIVECKDAVGALRVGVDPGMTDIVTVASSAGRIESFSSARFSKVAGYNTSKRRTYKWNDETQDLVKSIPSPNTSNMSDLQDHVRAYLKALPILLQHRANKGYRSMRFFRYVGKQKTIEKVCDVIAPRAQTTVVGFGNWSNQGYGISRSCSGPIKEIRRCLSRRKNVLFKNVDERNTSCKCHGCFQRLVNMKADSVVWRGVCKESPIDGSITVEKQKMVVKNVKVHKVLHCRDSVKSASSNVRCGATWNREVTPAKNLLLLLTTWMDGRERPEAFCVPSPPPKTTVSIEASVSAKPTDPPGFVSSLPCYPLGQLKC

SEQ ID NO: 1040 - protein, 341 aa, Chlamydomonas sp.
SFSAWVIRHSRASLAMDVTRTIQCCGESTLMSKVLRRKGFRFDNRILSDGKGVSVQMKQKGKEEVVEEGENAGYPKDANIVECKDAVGALRVGVDPGMTDIVTVASSAGRIESFSSARFSKVAGYNTSKRRTYKWNDETQDLVKSIPSPNTSNMSDLQDHVRAYLKALPILLQHRANKGYRSMRFFRYVGKQKTIEKVCDVIAPRAQTTVVGFGNWSNQGYGISRSCSGPIKEIRRCLSRRKNVLFKNVDERNTSCKCHGCFQRLVNMKADSVVWRGVCKESPIDGSITVEKQKMVVKNVKVHKVLHCRDSVKSASSNVRCGATWNRDVNAAKNLLLLLTT

SEQ ID NO: 1041 - protein, 238 aa, Chlamydomonas sp.
GIKRVESGVFKSRGPTKKWLSNIQDCLEDLKDNSPKRTSLVSYDAYVTVMVNHWDSRWGEMSKSRWGAQRLRLYGGKKRVLSRFFNEVQADVGERKTIVVAYGSAKFAPGGKGELSVPTTSAFKAFSDRFKGRVAVIDEFRTTKIWHKDSTTVLQSVQSEKEGRAVRGLLWCSSTMENSKLFVNRDLNAAINIHNCFTMYPIRPGILARPKKYCKLEVVVGRKIDYKLTGSLQNAVSS

SEQ ID NO: 1042 - protein, 528 aa, Chlamydomonas sp.
PCLCTTRYCRRPSKKNEKHRTFSLLPYKYGFTLSHIPISKMAFFYMVNECHFDSCKADVASKNHQGIWERFANLKKVETISRKFGYRIVTDGFAVSILMNKPTCVTCSIPADAFSTRAHEYVTTDEGGIVSFRDNVVVAAVDPGVTDIVTVTGLDGGTRSYSSAQYYRKGLIFKSQRQTDVWNLETAGIVGGIIPDRDSSSSEQIGAYARFYMGAAPILLAHCASRGYRNLRFRRYCKKHIVEIADFVAPREKSAKVLVGFGDWKGLGATPISRRTCGPLQAIRFELRSRENVIMEDIDEFRTSQRCSCCENHLCNMVALTHRKKQDGTGWECTEGRKRIHKMLHCKSSQSGAQRQQSGGRLHCGKTWDRDVNASRNILMLTLHQVFGRERPLAFRRDAPRSSSKTPPPPPDTEMGTQTVERFTKEATRNIFENLFNLPTLFENNCNTPPHQNIGNEKQEVPSRHSHTRSTIQREKVDTPPLRDDNVRSSPTSYDPDLLMLSMPPKPKKSRGTHLKKKKNKKGTLKQV

SEQ ID NO: 1043 - protein, 382 aa, Chlamydomonas sp.
QQTRVALYPSLTMWSWPAVDPGVTDIVTVTGLNGGTRSYSSAQYYRKGLIFKSQRQTDVWNLETADIVGGIIPERDSSSSEQIGAYARFYMGAAPILLAHRASRGYRNLRFRRYCKKQKLIVEIADFVSPREKSAKVLVGFGDWKGLGATPISRRTCGPLQAIRFELRSRENVIMEDIDEFRTSQRCSCCENHLCNMVALTHRKKQDGTGWECTEGRKRIHKILHCKSSQSGAPRQQSGGMLHCGKTWDRDVNASRNILMLTLHQVFGRERPLAFRRDAPRSSSTTPPPPPPPDTDMGTQTVERFTKEACISSVVNSTSTTVAASSSAVKSSYDLANAALPKNGGSHESRQQDGNNVHFNKMGYPARIFILRVNVCCGYAPM

SEQ ID NO: 1044 - protein, 692 aa, Chlamydomonas sp.
RNVGATLYHQKKKNTHPLLMGVVQDKGDDDINIRVVKKTLNSLCMDVSRHQISSRIQSMVLLINHAVAEAYLFANFHITRCLDDGDFDVKQLPHLDRNFYYRCILAVSTSNVRKDTLGQSLKDSMVAFDALRPAGYVKVDVRPWGQVIADVSIQMATMACNSIWANVDRVVIKYLRLKHPSLKKHFKKIVKAVVQYPESKIDTIIPEGLVHAIHIKEVVSHLRALFPLPRGKQFNTRAHLTMRLFHHVLTELGEVGRVDPKDKKTRKSHPRLFSILPRKNGFTISYVPISSMTFMKLLSMGDSPLESVSGDGRYENHTMLWRKYFNVQGLETKRSRFDNRILSDGKGVSVQMKQKGKEEVVEEGENAGYPKDANIVECNDAVGALRVGVDPGMTDIVTVASSAGRIESFSSARFSEVAGYNTSKRRTYKWNDETQDLVKSIPSPNTSNMSDLQDHVRAYLKALPILLQHRANKGYRSMRFFRYVGKQKTIEKVCDVIAPRAQTTVVGFGNWSNQGYGISRSCSGPIKEIRRCLSRRKNVLFKNVDERNTSCTCHGCFQKLVNMKADSVVWRRVQNEPPSLINGAPTTTIEKQKTVVKNVKVHKVLHCRNSVKSASSNVRCGATWNRDVNAAKNLLLLLTTWMDGKERPATFCVPSSSPTPKTTVSGEANVGAQPTDPPGSVSSLQLLSSGPA

SEQ ID NO: 1045 - protein, 423 aa, Chlamydomonas sp.
KTRKSHPRLFSILPRKNGFTISYVPISSMTFMKLLSMGDSPLESVSGDGRYENHTMLWRKYFNVQGLETKRSRFDNRILSDGKGVSVQMKQKGKEEVVEDGENADYPKDANIVECKDAVGALRVGVDPGMTDIVTVASSAGRIESFSSARFSEVAGYNTSKRCTYKWNDETQDLVKSIPSPNTSNMVDLQDHVRAYLKALPILLQHRANKGYRSMRFFRYVGKQKTIEKVCDVIAPRAQTTVVGFDNWSNQGYGISRSCSGPIKEIRRCLSRRKNVLFKNVDERNTSCKYHGCFQRLVNMKADSVVWRGVCKESPIDGSITVEKQKMVVKNVKVHKVLHCRDSVKSASSNVRCGATWNRDVNAAKNLLLLLTTWMDGRERHEAFCVPSPPPKTTVSIEASVSAKPTDPPGFVSSLQLLSFGPA

SEQ ID NO: 1046 - protein, 688 aa, Chlamydomonas sp.
GNVGAILYHQKKKNTHPLLMGVVQDKGDDDINISVVKKTLNSLCMDVSRHQISSRIQSMVLLINHAVAEAYLFANFHTTRCLDDGDFDVKQLPHLDRNFYYRCLLAVSTSNVRKDTLGQSFNDTMVAFDALRPAGYVKVDVRPWGQVIADVSIQMATMACNSVWANVDRVVIKYLRLKHPSLKKHFKKIVKAVVQYPESKIDTIIPEGLVHAIHIKEVVSHLRALFPLPRGKQFNTRAHLTMRLFHHVLTELGDVGRVDPKYKKTRKSHPRLFSILPRKNGFTISYVPISSMTFMKLLSMGDSPLESVSGDGRYENHTMLWRKYFNVQGLETKRSRFDNRILSDGKGVSVQMKQKGKEEVVDEGENAGYPKDANIVECKDAVGALRVGVDPGMTDIVTVASSARRIESFSSARFSEVAGYNTSKRRTYKWNDETQDLVKSIPSPNTSNMSDLQDHVRAYLKALPILLQHRANKGYRSMRFFRYVGKQKTIEKVCDVIAPRAQTTVVGFGNWSNQGYGISRSCSRPIKEIRRCLSRRKNVLFKNVDERNTSCKCHGCFQRLVNMKADSVVWRGVCKESPMDGSITVEKQKMVVKNVKVHKVLHCRDSVKSASSNVRCGATWNRDVNAAKNLLLLLTTWMDGRERPEAFCVPSPPPKTTVSTEASVSAKPTDPPGFVSSLPCYPLGQLKC

SEQ ID NO: 1047 - protein, 579 aa, Chlamydomonas sp.
GNVGAILYHQKKKNTHPLLMGVVQDKGDDDINISVVKKTLNSLCMDVSRHQISSRIQSMVLLINHAVAEAYLFANFHITRCLDDGDFDVKQLPHLDRNFYYRCLLAVSTSNVRKDTLGQSFNDTMVAFDALRPAGYVKVDVRPWGQVIADVSIQMATMACNSVWANVDKVVIKYLRLKHPSLKKHFKKIVKAVVQYPESKIDTIIPEGLVHAIHIKEVVSHLRALFPLPRGKQFNTRAHLTMRLFHHVLTELGDVGRVDPKYKKTRKSHPRLFSILPRKNGFTISYVPISSMTFMKLLSMGDSPLESVSGDGRYENHTMLWRKYFNVQGLETKRSRFDNRILSDGKGVSVQMKQKGKEEVVEEGENAGYPKDANIVECKDAVGALRVGVDPGMTDIVTVASSARRIESFSSARFSEVAGYNTSKRRTYKWNDETQDLVKSIPSPNTSNMSDLQDHVRAYLKALPILLQHRANKGYRSMRFFRYVGKQKTIEKVCDVIAPRAQTTVVGFGNWSNQGYGISRSCSGPIKEIRRCLSRRKNVLFKNVDERNTSCKCHGCFQRLVNMKARSLQRVPNRRVYNC

SEQ ID NO: 1048 - protein, 782 aa, Chlamydomonas sp.
DGNETSDSREIEGATKIGRSSILLKGQEGRYCPFMRRQWLIARPPPEYKTVEKMCVVKCALKKAMSLDDEEFGKFRGHVDQLVNVVSRMLRRSSLVLTFHVTRLMEGDLPIPNMYDMKDTYWKDWLRIGVDGVFPDEESRISYEAVKDVIGKVLGSDDPDYINSYPIYFDQVLNYAGHTLSTVVSNNAWVPLVPRLTRLTKATLNVLGAPKTIRVYDVMRVIRQEIQEMESWPESVQEYVREVRVRLKVPDGSRLYDDYGKDMDFPTMVRFNYWMQTRLEAMGARRIRLMPIFNVQRAHVRLDMKTLVNLFRHVFPKDPNIVELSKWENVKDPDRFMLPLKPAVKKKKSCGPGEWEAYKLAQQKYDADVKDIKATDVYRHAKGRYDTLVNARKTVAGSFFKKPPVKTGWVFDCSICTDGVSLSMQYSKTVQVRVSDLKKNSKRSRDEEGMSVAEQYDHKLKTTLPDMDVVVLGVDPGRSNIATVTYLADNKSKTWKLTRGAFYHKSGIKKQKKQQEKSFSDMIPRWESLRENGAALSTSRKDDISTYLKNYATFSDEWWRMALRRRESRDNFQRYIGKRKAMDSFWAGIKRNMKLDHPDLRVRVAYGSAITKLKATGPGEVAVPTGSMFASCKRLFKEEVHVTDEFKTTLMSWETGAKKECVYKIPSVQITTEGQIRLGYELLGHIPLKETPKVSYRDQLAVRVYCTRKKIQEKHRRGGLAPSLVNNKSIERYPEVRGLRFSPETSTYSDRDRSSALTIARLHCMELLGQGRPLPFCRDACC

SEQ ID NO: 1049 - protein, 219 aa, Chlamydomonas sp.
LHQGHRRPLLASANWSNQGYGISRSCSGPIKEIRRCLSRRKNVLFKNVDERNTSCKCHGCFQRLVNMKADSVVWRGVCKESPIDGSITVEKQKMVVKNVKVHKVLHCRDSVKSASSNVRCGATWNRDVNAAKNLLLLLTTWMDGRERPEAFCVPSPPPKTTLHYITLHVKVYLTPRGCMRLCALNKKKKHPQSKKPHYIRGVSRTNKPNSQPPFWWRRY

SEQ ID NO: 1050 - protein, 793 aa, Chlamydomonas sp.
ECSREPVCRSRLHQNVFGVQFVMENEVGESSSLEHEADQHDDVAELVDYEGDEDEERAPGRAICVVKMKLSTFIPHDWLRRKIDTLVLDMNKLLGEGYIFANFHIARLFENGIAVPPVNRNFFYRCLLAVSTNKCMGSTLGEDFENSRLLFDLLREPGQSKVDIRGRVNNQIIADLSILMATMASNHLWTNLERRITTYLKWKYPQITKRLRSDIVAAVIKCPTKNLDVIFKMSPHVAKLPTKLPTARLRSAKSAVALAKKRVGRKEPEVSPLQVRLTKLQARFEKLSEAWLSSKNLRVDEDNAKRFFACDVAFCLRGVLPLPSGNTFASRAHMTLPLYHKILSETIEEKRKTKNEKLRTFSLLPYKSGFTLSHIPISKMAFFYMVNECHFDSCKADVASKNHQGIWERFANLKKVETVSRKFGYRIVTDGFAVSILMNKPTCLTCSMPADAFSTRAHEYVTTDEGGIVSFRENVVVAAVDPGVTDIVTVTGLDGGTRSYSSAQYYRKGLIFKSQRQTDVWNLETADIVGDIIPDRDSSRSEQIGAYARFYMGAAPILLAHRASRGYRNLRFRRYCKKQKLIVEIADFVAPREKSAKVLVGFGDWKGLGATPISRRTCGLLQAIRFELRSRENVIMEDVDEFRTSQRCSCCETRLCNMVALTHRKKQDGTGWECTEGRKRIHKILHCKSSQSGAPRQQSGGRLHCRKTWDRDVNASRNILMLTLHQVFGRERPLAFRRDAPRGSSKNPPTPDTDMGTQTVERFTKEATRNIFENLFNLLHPPTLPKSNDLQSG

SEQ ID NO: 1051 - protein, 663 aa, Chlamydomonas sp.
GRKNGEENVVKCTLSRIIADKDNKDSIIKVIGERVDSVSKRTYIAGVAVNRILKEVFEGVPDSQLHTVGVPNVGQNFIRQLMLGSRQAQKETRDATVANFFHNNAWFREKIEGRDVIVANKKMYVGSIARHDGDRNLYCHASKKYLTNFNNHYRVHLSTWIKKFVYSTENRRWAKEIKDEHGIEETVFHRYLLYDLHSWGVKDDLLVVHSVLPERTKMLLNVQHSIIGRDEINRKWLKSVSNSAKMIRYNVFVNRYLETTEDEGYAKLVNIAPIPTVKHAFITIDTDGLLGVLKDVGLIKSLVKTLTNKEYWESVFDVENLRSEGKGVFTGTIDTDGVMACTHFLRAEKRAISIKDDGAAIKKHTKALRDFLESDPNVVVVANDPGRCNIAFLTWKKNKVDGKEAGSRKRKRHCEFGSKRLTRERYYVESGVFKSRGSIKKWLSNIQEYLDDLKDNSPKRTSLASFDTFVAVVVNHWDSRWGEMSKTRWGAQRMRLYGGKKRVFARFFNEVQKDVGVRKKIVIAYGSAKFAPGGKGELCVPTTGAFKAFTDRFNGRVAAIDEFRTTKVWHKDSTTVLQGVHSKKEGCTVRGLLWCSSTMENSKLFVNRDLNAAINIHNCFTMYPTRPGILARPNKYCKLEVKVGRMIDYKLTGSLQNAVSSEV

SEQ ID NO: 1052 - protein, 622 aa, Chlamydomonas sp.
QCIRNLHVLNIRMPCMANNAFVKLARPPMPLVSPGPSSVDGRIMARSERSGLQATNVSLTQAASKATSSSRKKNQAVVKSFSTHVCPHTNNNPTCSDSNCSCKPIFLTNIPDASKSLKSRTSDQGSTSSAQDFYEYWDSSRQDLYRQLLWLPKTGSQGLMSSSLNGFARSTPARSSFSITKTDPLKTSLEKTSCPSFKYIVADGTVEYATKSNAKPKLRTLKLKLNPTKAQKSMLAEFAGCSRFMYNKAVAARLGVGSTHKSVFRIRDRYVTNKVRGEGKMPNPYFKNRQWLLQCPKSVRQSAIKAALANIKACFSNLKAGNIKQFSAPFRRKTTEIERGWAIEMDQKNVSKDGDKLFIFKNILGNMRYFGSKQLHKLMPEENPTHDPKVQKSRFGEYFLVLSVAARDRRAERKPVHPDKVATASIDPGVRKTMVTYSPENEESFMLGQGQASDLVKLLLVHDKLQSRLDTEKTLRSKERMKIKKQMIRIRKRIFYLKKEFRDQTTNFLAARYDVLLVPQLETAKMTISAERELTTKVARQMLTLSHSVLFIRLKEKCEEYGTVFLHVLEHYTSQTCPMCGFLNKCGGETYTCKNCQFTCDRDIVGAAGIFLKAVRTENPCS

SEQ ID NO: 1053 - protein, 300 aa, Chlamydomonas sp.
RHCSIFCRSRRVESFSSARFSEAAGYNTSNRRTNKWNADTQDLVKSIPSPTTSSMPDMQDHVRGYLSALPTLLQHRASRGYRSMRFFRYVGKQKTIEKVCDVIAPKAQKTVVGFGNWSNQGYGISRSCSGPVKEIRKCLSRRQNVLFKNVDERNTSCTCHGCFQKLVNMKANSVVWRRVHNESPALIDGAITTTTTFEKQKTVVKNVKVHKVLHCRNSVKSASSNVRCGATWNRDVNAAKNILLLLTTWMDGKERPVAFCVPSSSPTPKTTVSGEANVSAQPTDPPGSVGSLQLLSFGPA

SEQ ID NO: 1054 - protein, 806 aa, Chlamydomonas sp.
PRMELVCDVGIKCSVMYKLRTMATKPPTVAKLKELLKLAEVKYSSKDKKDDLVRLCEDNGLIARPPPEYKTVEKMCVVKCALKKAMSLEDEEFGKFRGHVDQLVNVVSRMLRRSNLVLTFHVTRLMEGDLPIPNMYDMKDTYWKDWLRIGVDGVFPDEESRISYEAVKDVIGKVLGSDDPDYINSYPIYFDQFLNYAGHTLSTAVSNNAWVPLVPRLTRLTKATLNALGSPKTIRVYDVMRVIQQETQEMESWPESVQEYVREVRGRLKVPHGSRLYDDCGKDMDFPTMVRFNYWMQTRLEAMGARRIRLMPIFNVQRAHVRLDMKTLVNLFRHMFPKDPNIVELSKWENVKDPDRFMLPLKPAVEKKKSCGPGEWEAYKLVQQKYDADVKDIKATEEYIHAKGRYDTLVNARKTVAGSFFKKPPIKTGWVFDCSICTDGVSLSRQYSKTVQVRVSDLKKTSKRSRDDEGMRVAEQYDHKLKTTLPDMGIVVLGVDPGRSNIATVTYMADDKSKTWKLTRGAFYHKSGIKKQKRQQEKRFADMIPMWASLRENGAALSTSKMDDISVYLSNYATFSDEWWRLALRRRESRDNLQRYIGKRKAMDSFWAVIKRNMMVDHPDLRVRVAYGSAITKLKATGPGEVAVPTGSMFASCKHIFKEEVRVTDEFKTTLMSWETGAKKECVYKIPSVSLNAEGQIRIGECLLCHTLLKRPPNVAERDQLSVRVYCVRKKIQEKHRRGGLATFLVDVNQSIKQYPEVRGLRFSPETSTYSDRDRSSALTIARLHCMELLGLGRPLPFSRCKTACC

SEQ ID NO: 1055 - protein, 714 aa, Chlamydomonas sp.
TTAWCLTSASIMMPRSYCGIRKLWFIMISQQETNSHSLSMGVVINNGDDEDLGIMVVKKTLNSLCMDVSRQQLCSRIQSMVLVINHAVAEAYLFANFHITRCLDDGDFDVKQLPHLDRNFYYRCILAVSTSNVRKDTLGQSLKDSMVAFDALRPTGYAKVDVRPWGQVIADVSIQMATMACNSVWANVDRIVIKYLRLKHPSLKRHFKKIVKAVVQFPESDMDKIIPASLVHANLIKDVVRRLRALLPLPRGKQFNTQAHLTMRLFHHVLTELGADLKEKTTKKRPRLFSILPRKSGFTISYVPISSMTLMKLLSMGDSPLESVRGDGRHENHSMLWRKYFNVQGLETKRSRFDNRILSDGKGVSVQMKHQAGEDVAGEGGDNAGYPKDASIEDCQDASLRLGALRVGVDPGMTDIVTVASSAGRVESFSSARFSEAAGYNTSNRRTNKWNTDTQDLVKSIPSPTTSSMPDMQDHVRGYLSALPTLLQHRASRGYRSMRFFRCVGKQKTIEKVCDVIAPKAQKTVVGFGNWSNQGYGISRSCSGPVKEIRKCLSRRQNVLFKNVDERNTSCTCHGCFQKLVNMKANSVVWRRVHNESPALIDGAITTTTTFEKQKTVVKNVKVHKVLHCRNSVKSASSNVRCGATRNRDVNAAKNLLLLLTTWMDGKERPVAFCVPSSSPTPKTTVSGEANVSAQPTDPPGSVGSLQLLSFGPA

SEQ ID NO: 1056 - protein, 686 aa, Chlamydomonas sp.
METSDQKKPPDKRTRPDRAAKLQGRKNGEENVVKCTLSRIIADKDNKDAIIKVIGERVDSVSKRTYIAGVAVNRILKEVFEGVPDSQLHTVGVPNVDQNFIRQLMLGSRQAQKETRDATVANFFHNNAWFREKIEGRDVIVANKKMYVGSIARHDGDRNLYCHASKKYLTNFNNHYRVHLSTWIKKFVYSTENRRLAKEIKDEHGIEETVFHRYLLYDLHSWGVKDDLLVVHSVLPERTKMLLKVQHSIIGRDEINRKWLKSVSNSAKMIRYNVFVNRYLEATEDEGYAKLVNIAPIPTVKHAFITINTDGLLGVLKDVGLIKSLVKTLTNKEYWESVFDVENLRSEGKGVFTGTIDTDGVMACTHFLRAEKRAISIKDDGAAIKKQTKALRDFSESDPNVVVVANDPGRCNIAFLTWKKNKVDGKEEGSRKRKRHCEFGSKRLTRERYYVESGVFKSRGSTKKWLSNIQECLDDLKDNSPKRTSLASFDTFVAVVVNHWDSRWGEMSKTRWGAQRMRLYGGKKRVFARFFNEVQKDVGVRKKIVIAYGSAKFAPGGKGELCVPTTGAFKAFTDRFKGRVAAIDEFRTTKVWHKDSTTVLQGVHSKKEGCTVRGLLWCSSTMENSKLFVNRDLNAAINIHNCFTMYPTLPGILARPKKYCKLEVKVGRMIDYKLTGSLQNAVSSEV

SEQ ID NO: 1057 - protein, 243 aa, Chlamydomonas sp.
CLRKTRPTIRRSKKSRFGEYFLVLSVAARDRRAERKPVNPDKVATASIDPGVRKTMVTYSPENEESFMLGQGQASDLVKLLLVHDKLQSRLDTEKTLRSKERMKIKKLMIRIRKTIFYLKKEFRDQTTNFLAARYDVLLVPQLETAKMTISAERELTTKVARQMLTLSHSVLFNRLKEKCEEYGTVFLHVLEHYTSQTCPMCGFLNKCGETYTCKNCQFTCDRDIVGAAGIFLKAVRTENPCS

SEQ ID NO: 1058 - protein, 535 aa, Chlamydomonas sp.
VNLTVYKEFACTKYQNAMYGNQRFCKIGKASDALGVSRTVLRRWADNGTIRTIRTPGNQRLFDPSSIQGYLIEQEKKPSSRQVILYARVSSHKQQPDLLRQQLFLQTHISDKHSGCEQVIEVNDVGSGLNFKRPGLLRVLGLVTAGIVSSIVVASKDRLARFGFELIEWICSQHSCSIIVLDHQYGAPEDVFGKDLMSIVQVYCCRWNGRRRCKVKCQTQVEDLKAEAEPNQGSEIDAGSAPFRRKKIELERGWAIEMDQKNVSKDGDKLFIFKDILGNMRYFGSKQLHKLMPEENPTHDPKVQKSRFGEYFLVLSVVARDRRAERKPVHPDKVATASIDPGVRKTMVTYSPENEESFMLGQGQASDLVKLLLVHDKLQSRLDTEKTLRSKERMKIKKQMIRIRKRIFYLKKEFRDQTTNFLAARYDVLLVPQLETAKMTIRAERELTTKVARQMLTLSHSVLFNRLKEKCVEYGTVFLHVLEHYTSQTCPMCGFLNKCGGETYTCKNCQFTCDRDIVGAAGIFLKAVRTENPCS

SEQ ID NO: 1059 - protein, 325 aa, Chlamydomonas sp.
TQNDISRYGYRRSGCGRSNIATVTYLADDKGKTWKLTRGAFYHKSGIKKQKRQQEKRFTDMIPMWACLRENGAALSTSRMDDISVYLSNYATFSDEWWRLALRRRESRDNLRRYIGKRKAMDSFWAGIKRNMMMDHPDLRVRVAYGSAITKLKATGPGEVAVPTGSMFASCKRIFKEEVRVTDEFKTTLMSWETGAKKECVYKIPSVSLNAEGQISIGDEWLLCHTLLKKPPKVAERDLSAVRVYCTRKKIQEKHRRGGLATSLVDVNKSIKRYPEVRGLRFSPETSTYSDRDRSSALTIARLHCMELLGLGRPLPFSRCKAACC

SEQ ID NO: 1060 - protein, 621 aa, Chlamydomonas sp.
QCIRNLHVLNIRMPCMATNASVKLARPPMPLVSPGPSSVDGRIMAQSERSGLQATNVSLTQAASKATSSSRKKNPAVVKSFSTHVCPHTNNNPTCSDSNCSCKPIFLTNIPDASKSLKSRTSDQGSTSSAQDFYEYWDSSRQDLYRQLLWLPKTGSQGLVSSSLNGFARSTPARSSFSITKTEPLKTSLEKTSCPSFKYIVADGTVEDATKSNAKPKLRTLKLKLNPTKAQKSMLAEFAGCSRFMYNKAVAARLGVGSTHKSVFRIRDRYVTNKVRGEGKMPNPSFKNRQWLLQCPKSVRQSAIKAALANIKACFSNLKAGNIKQFSAPFRLKKTELERGWAIEMDQKNVSKDGDKLFIFKDILGNMRYFGSKQLHKLMPEENPTHDPKVQKSRFGEYFLVLSVAARGRRAERKPVHPDKVATASIDPGVRKTMVTYSPENEESFMLGQGQASDLVKLLLFHDKLQSRLDTEKTLRSKERMKIKMQMIRIRKRIFYPKKEFRDQTTNFLAARYDVLLVPQLETAKMTISAERELTTKVARQMLTLSHSVLFNRLKEKCEEYGTVFLHVLEHYTSQTCPMCGFLNKCGETYTCKNCQFTCDRDIVGAAGIFLKAVRTENPCS

SEQ ID NO: 1061 - protein, 701 aa, Chlamydomonas sp.
NNNHSLSMGVVTNNGDDDDLDIMVVKKTLNSLCMDVSRQQICSRIQSMVLVINQAVAEAYLFANFHITRCLDDGDFDVNQLPHLDRNFYYRCILAVSTSNVRKDTLGQSLKDSMVAFDALRPAGYLKVDVRQWGQVIADVSIQMATMACNSVWANVDRVVIKYLRLKHPSLKKHFNKIVKAVVQYPDSDIDKIIPAGLVHANLIKDVVRRLRDLLPLPRGKQFNTRAHLTMRLFHHVLTELGADLKEKTTKKRPRLFSILPRKSGFTISYVPISSMTLMKLLSMGDSPLESVRGDGRHENHSMLWRKYFNVQGLETKGSRFDNRILSDGKGVSIQMKHQVGKDIAGEGEGGGDNAGYPKDASIEDCQDASLRQGALRVGIDPGMTDIVTIASSDGRVESFSSARFSEAAGYNTSNRRTNKWNADTQDLVKSIPSPTTSSMQDHVRGYLSALPTLLQHRANRGYRSMRFFRYVGKQKTIEKVCDLIAPKAQKKTIEEKGCDVIAPKAKKTVVGFGNWSNQGYGISRSCSGPVKEIRKCLSRRQNVLFKNVDERNTSCTCHGCFQKLVNMKADSVVWRRVQNEPSTLIDGAPTTTTTTTFEKQKTVVKNVKVHKKLHCRNSVKSASSNVRCGATWNRDVNAAKNLLLLLTTWMDGKERPAAFCVPSSSPTPKTTVSGEANVGAQPTDPPGSVSSLQLLSSGPA

SEQ ID NO: 1062 - protein, 803 aa, Chlamydomonas sp.
PRMEHVCDVCIKSSVMYKLCKMATKPPTVAKLKELLKLAEVAYSSKDKKDDIVRLCEDNGLIARPPPEYKTVEKMCVVKCALKKAMSLDDEEFGKFREHVDQLVNVVSRMLRRSSLVLTFHVTRLMEGDLPIPNMYDMKDTYWKDWLRIGVDGVFPDEESRISYESVKDVIGKVLGSDDPDYINSYPIYFDQVLNYAGQTLSTVVSNNAWVPLVPRLTRLTKATLNALGAPKTIRVYDVMRVIQQEIQEMESWPESVQEYVREVRVRLKVPDGSRLYDDYGKDMDFPTMVRFNYWMQTRLEAIGARRIRLMPIFNVQRAHVRLDMKTLVNLFRHVFPKDPNIVELSKWKNVKDPDRFMLPLKPAVKKKKSCGPGECEAYKLAQQKYDADVNDIKDTDEYRHAKGRYDTLVNARKTVAGSFFKKPPVKTGWVFDCSICTDGVSLSMQYSKTVQVRVSDLKKTSKRSRDDEGMSVSEQYDHKLKTTLPDMGIVVLGVDPGRSNIATVTYLADDKSKTWKLTRGAFYHKSGIKKQKKQQEKRFSDMIPRWESLCENGAALSTSRTDDISAYLKNYATFSDEWWRMALLRRESRDNFQRYIGKRKAMDSFWAGIKRNMKLDHPDLRVRVAYGSAITTLKATGPGEVAVPTGSMFASCKRLFKEEVHVTDEFKTTLMSWETGAKKECVYKIPSVQITTEGQIRLGYELLGHTPLKETPKVSYHDQLAVRVYCTRKQIQEKHRRGGLAPSLVDNNSIKRYPEVRGLRFSPETSTYSDRDRSSALTIARLHCMELLGQGRPLPFCRDACC

SEQ ID NO: 1063 - protein, 683 aa, Chlamydomonas sp.
YYITKRKRILTPLLMGVVQDKGDDDINISVVKKTLNSLCMDVSRHQISSRIQSMVLLINHAVAEAYSFANFHITRCLDDGDFDVKQLPHLDRNFYYRCLLAVSTSNVRKDTLGQSFNDTMVAFDALRPAGYVKVDVRPWGQVIADVSIQMATMACNSVWENVDRVVIKYLRLKHPSLKKHFKKIVKAVVQYPESKIDTIIPEGLVHAIHIKEVVSHLRALFPLPRGKQFNTRAHLTMRLFHHVLTELGEVGRVDPKDKKTRKSHPRLFSILPRKNGFTISYVPISSMTFMKLLSMGDSPLESVSGDGRYENHTMLWRKYFNVQGLETKRSRFDNRILSDGKGVSVQMKQKGKEEVVEEGENAGNPKDANIVECKDAVGALRVGVDPGMTDIVTVASSAGRIESFSSARFSKVAGYNTSKRRTYKWNDETQDLVKSIPSPNTSNISDLQDHVRAYLKALPILLQHRANKGYRSMRFFRYVGKQKTIEKVCDVIAPRAQTTVVGFGNWSKQGYGISRSCSGPIKEIRRCLSRRKNVLFKNVDERNTSCKCHGCFQRLVNMKADSVVWRGVCKESPIDGSITVEKQKMVVKNVKVHKVLHCRDSVKSASSNVRCGATWNRDVNAAKNLLLLLTTWMDGRERPEAFCVPSPPPKTTVSIEASVSAKPTDPPGFVSSLPCYPLGQLKC

SEQ ID NO: 1064 - protein, 713 aa, Chlamydomonas sp.
GNCQLVWYHQNNNHSLSMGVVTNNGDDDDLDIMVVKKTLNSLCMDVSRQQICSRIQSMVLVINHAVAEAYLFAIFHITRCLDDGDFDVKQLPHLDRNFYYRCILAVSISNVRNDTLDQSLKDSMVAFDALRPAGYVKVDVRPWGQVIADVSIQMATMACNSVWANVDRIVIKYLRLKHPSLKKHFKKIVKAVVQYPDSDIDKIIPAGLVHANLIKDVVRRLRDLLPLPRGKQFNTRAHLTMSLFHHVLTELGADLKEKTTKKRPRLFSILPRKSGFTISYVPISSMTLMKLLSMGDSPLESVRGDGRHENHSMLWRKYFNVQGLETKGSRFDNRILSDGKGVSVQMKHQVGKDIAGEGGGDNAGYPKDASIEDCQDASLRQGALRVGIDPGMTDIVTIASSDGRVESFSSARFSEAAGYNTSNRRTNKWNADTQDLVKSIPSPTTSSMHDMQDHVRGYLSALPTLLQHRANRGYRSMRFFRYVGKQKTIEKVCDLIAPKAQNKTIEEKVCDVTTPKAKKTVVGFGNWSNQGYGISRSCSGPVKEIRKCLSRRQNVLFKNVDERNTSCTCHGCFQKLVNMKADSVVWRRVQNEPSALIDGAPTTTTTTTSFEKQKTVVKNVKVHKVLHCRNSVKSASSNVRCGATWNRDVNAAKNLLLLLTTWMDGKERPAAFCVPSSSPTPKTTVSGEANVGAQPTDPPGSVSSLQLLSSGPA

SEQ ID NO: 1065 - protein, 933 aa, Chlamydomonas sp.
GPSPRQGPLLKENYSRRNSKMKHISDGRKEFVVKKTDFAAFIDSLSLCNNSVVIMDNASIHKNLVLRSPVNICYTPPYSPEFNAIDLCFAKVKKDFRRLNYIPNDTNTHVSDMISLAFSNLTDKIIMGCFDHVWNTYEICIKSSVMYKLCKMATKPPTVAKLKELLKLAEVAYSSKDKKDDIVRLCEDNGLIARPPPEYKTVEKMCVVKCALKKAMSLDDEEFGKFRGHVDQLVNVVSRMLRRSSLVLTFHVTRLMEGDLPIPNMYDMKDTYWKDWLRIGVDGVFPDEESRISYEAVKDVIGKVLGSDDPDYINSYPIYFDQVLNYAGHTLSTVVSNNAWVPLVPRLTRLTKATLNAMGAPKTIRVYDVMRVIQQEIQEMESWPESVQEYVREVRVRLKVPDGSRLYDDYGKDMDFPTMVRFNYWMQTRLEAIGARRIRLMPIFNVQRAHVRLDMKTLVNLFRHVFPKDPNIVELSKWKNVKDPDRFMLPLKPAFKKKKSCGPGEWEAYKLAQQKYDADVNDLKDTDEYRHAKGRYETLVNAQKTVAGSFFKKPPVKTGWVFDCSICTDGVSLSMQYSKTVQVRVSDLKKTSKRSRDDEGMSVSEQYDHKLKTTLPDMGIVVLGVDPGRSNIATVTYLADDKSKTWKLTRGAFYHESGIKKQKKQQEKRFSDMIPRWESLRENGAALSTSRKDDISAYLKNYATFSDEWWRMALRRRESRDNFQRYIGKRKAMDSFWAGIKRNMKLDHPDLRVRVAYGSAIMTLKATGPGEVAVPTGSMFASCKRLFKEEVHVTDEFKTTLMSWETGAKKECVYKIPSVQITTEGQIRLGYELLGHTPLKETPKVSYRNQLAVRVYCTRKQIQEKHRRGGLAPSLVDNNSIKRYPEVRGLRFSPETSTYSDRDRSSALTIARLHCMELLGQGRPLPFCRDACC

SEQ ID NO: 1066 - protein, 688 aa, Chlamydomonas sp.
RNVGTILYHQKKKNTHPLLMGVVQDKGDDDINIRVVKKTLNSLCMDVSRHQISSRIQSMVLLINHAVAEAYLFANFHITRCLDDGDFDVKQLPHLDRNFYYRCLLAVSTSNVRKDTLGQSFNDTMVAFDALRPAGYVKVDVRPWGHVIADVSIQMATMACNSVWANVDRVVIKYLRLKHPSLKKNFKKIVKAVVQYPESKIDTIIPEGLVHAIHIKEVVIHLRALFPLPRGKQFNTRAHLTMRLFHHVLTELGEVGRVDPKDKKTRKSHPRLFSILPRKNGFTISYVPISSMTFMKLHSMGDSPLESVSGNGRYENHTMLWRKYFNVQGLETKRSRFDNRILSDGKGVSVQMKQKGKEEVVEEGENAGYPKDANIVECKDAVGALRVGVDPGMTDIVTVASSAGRIESFSSARFSEVAGYNTSKRRTYKWNDETQDLVKSIPSPNTSNMSDLQDHVRAYLKALPILLQHRANKGYRSMRFFRYVGKQKTIEKVCDVIAPRAQTTVVGFGNWSNQGYGISRSCSGPIKEIRRCLSRRKNVLFKNVDERNTSCKCHGCFQRLVNMKADSVVWRGVCKESPIDGSITVEKQKMVVKNVKVHKVLHCRDSVKSASSNVRCGATWNRDVNAAKNLLLLLTTWMDGRERPEAFCVPSPPPKTTVSIEASVSAKPIDPPGFVSSLHCYPLGQLKC

SEQ ID NO: 1067 - protein, 711 aa, Chlamydomonas sp.
CPKILSLLDESEENVPRLISCCVHFFLLRRSDGSSKNHQGIWERFANLKKVETVSRKFGYRIVTDGFAVSILMNKPTCLTCSMPADAFSTRAHEYVTTDEGGIVSFLDNVVVAAVDPGVTDIVTVTGLNGGTRSYSSAQYYRKGLIFKSQRQTDVWNLETADIVGGIIPDRDSSSSEQIGAYARFYMGAAPILLAHRASRGYRNLRFRRYCKKQKLIVEIADFVAPRKKSAKVLVGFGDWKGLGATPISRRTCGPLQAIRFELRSRENVIMEDIDEFRTSQRCSCCENHLCNMVALTHRKKQDGTGWECKEGRKRIHKILHCKSSQSGAPRQQSGGMLHFENLFILLHPPTLPKSNDLDAVWMIIKFPTLFKNNCMHRKKKLKCLDLFSGIGGNALALRSICKTIAYCEIDPFARDVLEANMKRKNLDKAPIFEDVTTLKAVDVPELPDVITASFPCQDISSAGKGAGITGEHSGLYKHIFRLVKEFRRHRNHRISVIVMENSPMIKNRGLEKIESDLRSLGFRFQSVYRKASDFGARHERRRWCMVAIDKQSDLDLPCTYFRHNFDNLDNIPVLLKREGKASANFIRYGALGNAVVPKFIASVWDELICSVPFDSQDINRYPLLSYNTPHVTATRRLWPTPLYSRQQWTMRPFIRVGRREWSNMANRVFHEEGVMRKYNYNDANQAYHTYMINPEWVEALMGYPTGWTGT

SEQ ID NO: 1068 - protein, 415 aa, Chlamydomonas sp.
AKFLWILALSIITTELLHKLNESINAAKSVAGSFFKKPPVKTGWVFDCSICTDGVSLSMQYSKTVQVRVSDLKKTSKRSRDDEGMSVSEQYDHKLKTTLPDMGIVVLGVDPGRSNIATVTYLADDKSKTWKLTRGAFYHKSGIKKQKKQQEKRFSDMIPRWESLRENGAALSTSRTDDISAYLKNYDTFSDEWWRMALLRRESRDNFQRYIGKRKAMDSFWAGIKRNMKLDHPDLRVRVAYGSAITTLKATGPGEVAVPTGSMFASCKRLFKEEVHVTDEFKTTLMSWETGAKKECVYKIPSVQITTEGQIRLGYELLGHTPLKETPKVSYRDQLAVRVYCTRKQIQEKHRRGGLAPSLVDNNSIKRYPEVRGLRFSPETSTYSDRDRSSALTIARLHCMELLGQGRPLPFCRDA

SEQ ID NO: 1069 - protein, 355 aa, Chlamydomonas sp.
SYSISARYERRLTPDGKGFPISVVSYVGTLQHVGHGPHRGKSGACTELDQKLSMQHRSQPSISLEPPQRELERGWVIEMDQKNVSKDGDKLFIFKEILGNMRYFGSKQLHKLMPEENPTHDPKVQKSRFGEYFLVLSVAARDRRAERKPVNPDKVATASIDPGVRKTMVTYSPENEESFMLGQGQASDLVKLLLVHDKLQSRLDTEKTLRSKERMKIKKLMIRIRKTIFYLKKEFRDQTTNFLAARYDVLLVPQLETAKMTISAERELTTKVARQMLTLSHSVLFNRLKEKCEEYGTVFLHVLEHYTSQTCPMCGFLNKCGETYTCKNCQFTCDRDIVGAAGIFLKAVRTENPCS

SEQ ID NO: 1070 - protein, 792 aa, Chlamydomonas sp.
ECSREPVCRSRLNQNVFGVQFVMENGIGESSSLVHEADQHDDVAELVDYEGEEDGECAPGRAICVVKMKLSTFIPHDWLRNKIDTLVLDMNKLLGEGYIFANFHIARLFENGIAVPPVNRNFFYRCLIAVSTNKCKGSTIGEDFESSRLLFDLLREPGQSKVDIRGNVKNQIIADLSILMATMASNHLWTNLERRITTYLKWKYPQIAKRLRSDIVAALIKCPTKNLDVIFKMSPHTTKLPTKLPTSRLRSAKSAVALAKKRVGRKEPEGSPLRVRLTKLQERLEKLSEAWLSSKNLRVDADNAKRFFAREVAFCLRGVLPLPSGNTFASRAHMTLPLYHKILSETIEEKRKTKNEKHRTFSLLPYKSGFTLSHIPISKMAFFYMVNECHFDSCKADVASKNHQGIWERFANLKKVETVSRKFGYRIVTDGFAVSILMNKPTCLTCSMPADAFSTRAHEYVTTNEGGIVSFLDNVVVAAVDPGVTDIVTVTGLNGGTRSYSSAQYYRKGLIFKSQRQTDVWNLETADIVGGIIPDRDSSSSEQIGAYARFYMGAAPILLAHRASRGYQNLRFRRYCKKQKLIVEIADFVAPREKSAKVLVGFGDWKGLGATPISRRTCGPLQAIRFELRSRENVIMEDIDEFRTSQRCSCCENHLCNMVALTHRKKQDGTGWECTEGRKRIHKILHCKSSQSGAPRQQSGGMLHCGKTWDRDVNASRNILMLTLHQVFGRERPLAFRRDAPRSSSTTPPPDTDMGTQTVERFTKEATRNIFENLFNLLHPPTLPKSNDLQSG

SEQ ID NO: 1071 - protein, 455 aa, Chlamydomonas sp.
RIPTASCFPRGLHRRRKNHGPGEWEAYKSVLKQYDDDVKDIKATDEYRHAKGLYDTLVNARKTVAGSFFRKPPVKNGWVFDCSICTDGVSLSMQYSKTVQVLVSDLKKTCKKPRKEEGIKIAEKYDGSLKTILPDMGIVVLGVDPGRSNIATVTYLADDKNKTWKLTRGAFYHKSGIKKQTRQKELRFADMIPMWESLRENGAALSTSRTDKISAYLSNYAKFSDEWWRLALRRRESRDNLQRYIGKRKVKDSFWAGIKRCMMKELPDMKVCVAYGSAITKLKPTGPGEVAVPTGAMFASCKRIFKEDVSVTDEFKTTLMSWETGKEKERVYKIPSVCSADVKLRLGGERFGHTKSKTMPKVADCDHLGVRLYNKRKGAQEKHRRGGFATSLVDSQKSIERYPEVRGLRFSPETCIYSDRDRSSALTIARLHCMELMGLGRPLPFAHSSSVVVDE

SEQ ID NO: 1072 - protein, 792 aa, Chlamydomonas sp.
ECSIKPVCRSRLHQNVFGVQFVMENGIGESSSLVHEADQHDDVAELVDYEGEEDGECAPGRAICVVKMKLSTFIPHDWLRNKIDTLVLDMNKLLGEGYIFANFHIARLFENGIAVPPVNRNFFYRCLIAVSTNKCKGSTLGEDFESSRLLFDLLREPGQSKVDIRGSVKNQIIADLSILMATMASNHLWTNLERRITTYLKWKYPQIAKRLRSDIVAALIKCPTKNLDVIFKMSPHTTKLPTKLPTSRLRSAKSAVALAKKRVGRKEPEGSPLRVRLTKLQERLEKLSEDWLSSKNLRVDADNAKLFFAREVAFCLRGVLPLPSGNTFASRAHMTLPLYHKILSETIEEKRKTKNEKHRTFSLLPYKSGFTLSHIPISKMAFFYMVNECHFDSCKADIASKNHQGIWERFANLKKVETVSRKFGYRIVTDGFAVSILMNKPTCLTCSMPADAFSTRAHEYVTTDEGGIVSFLDNVVVAAVDPGVTDIVTVTGLNGGTRSYSSAKYYRKGLIFKSQRQTDVWNLETADIVGGIIPDRDSSSSEQIGAYARYYMGAAPILLAHRASRGYRNLRFRRYCKKQKLIVEIADFVAPRKKSAKVLVGFGDWKGLGATPVSRRTCGPLQAIRFELRSRENVIMEDIDEFRTSQRCSCCENHLCNMVALTHHKKQDGTGWECTEGRKRIHKILHCKSSQSGAPRQQSGGMLHCGKTWDRDVNASRNILMLTLHQVFGRERPLAFRRDAPRSSSTSPPPDTDMGTQTVERFTKEATRNIFENLFNLLHPPTLPKSNDLQSG

SEQ ID NO: 1073 - protein, 249 aa, Chlamydomonas sp.
QQLHKLMPEENPTHDPKVQKSRFGEYFLVLSVAARDRRAERKPVNPDKVATASIDPGVRKTMVTYSPENEESFMLGQGQASDLVKLLLVHDKLQSRLDTEKTLRSKERMKIKKLMIRIRKTIFYLKKEFRDQTTNFLAARYDVLLVPQLETAKMTISAERELTTKVARQMLTLSHSVLFNRLKEKCEEYGTVFLHVLEHYTSQTCPMCGFLNKCGETYTCKNCQFTCDRDIVGAAGIFLKAVRTENPCS

SEQ ID NO: 1074 - protein, 751 aa, Chlamydomonas sp.
GRNTRAVLLDRLPHDFRLHSAEEQRRPHRGRSLARGRNLSRGNRWRRSCRRHSPRAELSRNQSPQDERDIPDLYNMKDTYWKDWLRIGVDGIFPDEESKISYEAVKDSIGDVIGNDDADYIKSYPIYFDQVLNYAGHTLSTVVSNNAWVPLIPRLARLTSTTLNKLNAPKTLDTSKIIRGYDVMQAIQQEVQNMEGWPESVQEYVNEVREMLSVPDGSRVYDNYGKDMDFPTMVRFNYWIQKRLEDMDARRIRLMPIFNVQRVHVRLDLKTLVNLFRHMFPNDQNIVELSKWEHVKNPDSFMLPQRPAQKKKKSCGPGEWEAYKSVLKQYDDDVKDVKATDEYRHAKGLYDTLVNARKTVAGSFFRKPPVKNGWVFDCSICTDGVSLSMQYSKTVQVLVSDLKKTCKKPRKEEGIKIAEKYDGSLKTILPVMGIVVLGVDPGRSNIATVTYLADDKNKTWTLTRGAFYHKSGIKKQTRQKELRFADMIPMWESLRENGAALSTSRTDKISAYLSNYAKFSDEWWRLALRRRESRDNLQRYIGKRKVKDSFWAGIKRCMMKELPDMKVCVAYGSAITKLKPTGPGEVAVPTGAMFASCKRIFKEDVSVTDEFKTTLMSWETGKEKERVYKIPSVCSADVKLRLGGERFGHTKSKTMPKVADCDHLGVRLYNKRKGAQEKHRRGGFATSLVDSQKSIERYPEVQGLRFSPETCIYSDRDRSSALTIARLHCMELMGLGRPLPFAHSSSVVVDE

SEQ ID NO: 1075 - protein, 793 aa, Chlamydomonas sp.
ECSREPVCRSRLHQNVFGVQFVMENGIGESSSLVHEADQHDDVAELVDYEGEEDEECAPGRAICVVKMKLSTFIPHDWLRKKIDTLVLDMNKLLGEGYIFANFHIARLFENGIAVPPVNRNFFYGCLIAVSTNKCKGSTLGKDFESSRLLFDLLREPGQSKVDIRGNVKNQIIADLSILMATMASNHLWTNLERRITTYLKWKYPQIAKRLRSDIVAPVIKCPTKNLDVIFKMSPHTTKLPTKLPTARRSAKSAVALAKKRVGRKEPEGSPLRVRLTKLQERLEKLSEAWLSSKNLRVDADNAKRFFARDVAFCLRRVLPLPSGNTFASRAHMTLPLYHKILSETIKEKRKTKNEKHRTFSLLPYKSGFTLSHIPISKMAFFYMVNECHFDSCKADVASKNHQGIWERFANLKKVKTVSRKFGYRIVTDGFAVSILMNKPTCLTCSMPADVFSTRAHEYVTTDEGGIVSFLDNVVVAAVDPGVTDIVTVTGLNGGTRSYSSAQYYRKGLIFKSQRQTDVWNLETADIVGGIIPDRDSSSSEQICAYARFYMGAAPILLAHRASRGYRNLRFRRYCKKQKLIVEIADFVAPREKSAKVLVGFGDWKGLGATPISRRTCGPLQAIRFELRSRENVIMEDIDEFRTSQRCSCCENHLCNMVALTHRKKQDGTGWECTEGRKRIHKILHCKSSQSGAPRQQSGGMLHCGKTWDRDVNASRNILMLTLHQVFGRERPLAFRRDAPRSSSTPPPPPPDTDMGTQTVERFTKEATRNIFENLFNLLHPPTLPKSNDLQSG

SEQ ID NO: 1076 - protein, 795 aa, Chlamydomonas sp.
LWKMATKPPTVAKLKELLKLAEVPYSSKSNKDDLVRLCEDNGLIARPPPEYKTVEKMCVVKCALKKAMSLDDEEFGKFREHVDQLVNVVSRMLRRSSLVLTFHITSLLEKGLEIPDLYNMKDTYWKDWLRIGVDGIFPDEESKISYEAVKDSIGDVIGNDDADYIKSYPIYFDQVLNYAGHTLSTVVSNNAWVPLIPRLARLTSTTLNKLNAPKTLDTSKIIRGYDVMQAIQQEVQNMEGWPESVQEYVNEVREMLSVPDGSRVYDNYGKDMDFPTMVRFNYWIQTRLEDMDARRIRLMPIFNVQRVHVRLDLKTLVNLFRHMFPNDQNIVELSKWEHVKNPDSFMLPQRPAQKKKKSCGPGEWEAYKSVLKQYDGDVKDIKATDEYRHAKGLYDTLVNARKTVAGSFFRKPPVKNGWVFDCSICTDGVSLSMQYSKTVQVLVSDLKKTCKNPRKEEGIKIAEKYDGSLKTILPDMGIVVLGVDPGRSNIATVTYLADDKNKTWTLTRGAFYHKSGIKKQTRQKELRFADMIPMWESLRENGAALSTSRTDKISAYLSNYAKFSEEWWRLALRRRESRDNLQRYIGKRKVKDSFWAGIKRCMMKELPDMKVCVAYGSAITKLKPTGPGEVAVPTGAMFASCKRIFKEDVSVTDEFKTTLMSWETGKEKERVYKIPSVCSADVKLRLGGERFGHTKSKTMPKVVDCDHLGVRLYNKRKGAQEKHRRGGFATSLVDSQKSIERYPEVRGLRFSPETCIYSDRDRSSALTIARLHCMELMGLGRPLPFAHSSSVVVDE

SEQ ID NO: 1077 - protein, 579 aa, Chlamydomonas sp.
VLTMKNSVREHVDQLVNVVSRMLRRSSLVLTFHITSLLEKGLDIPDLYNMKDTYWKDWLRIGVDGIFPDEESKISYEAVKDSIGDVIGNDDADYIKSYPIYFDQVLNYAGHTLSTVVSNNAWVPLIPRLARLTSTTLNKLNAPKTLDTSKIIRGYNVMQAIQQEVQNMEGWPESVQEYVNEVREMLSVPDGSRVYDNYGKDMDFPTMVRFNYWIQTRLEDMDARRIRLMPIFNVQRVHVRLDLKTLVNLFRHMFPNDQNIVELSKWEHVKNPDSFMLPQRPAQKKKKSCGPGEWEAYKSVLKQYDDDVKDIKATDEYRHAKGLYDTLVNARKTVAGSFFRKPPVKNGWVFDCSICTDGVSLSMQYSKTVQVLVSDLKKTCKKPRKEEGIKIAEKYDGSLKTILPDMGIVVLGVDPRRSNIATVTYLADDKNKTWTLTRGAFYHKSGIKKQTRQKELRFADMIPMWESLRENGAALSTSRTDKISAYLSNYAKFSDEWWRLALRRRESRDNLQRYIGKRKVKDSFWAGIKRCMMKELPDMKVCVAYGSAITKLKPTGPEEVAVPTGAMFCIVVKRIQSET

SEQ ID NO: 1078 - protein, 643 aa, Chlamydomonas sp.
DISTKESQIRSMPCFATSQNRPGGRNAHYVLNIRMPCMATKASVKLARPPMPLVSPGPSSVDGRIMARSERSGLQATNVSLTQAASKATSLSRKKKPAVVKSFSTHVCPHTNNNPTCSDSNCSCKPIFLTNIPDASKSLKSRTSDQGSTSSAQDFYEYWDSSLQDLYRQLLWLPKTGSQGLVSSSLNGFARSTPARSSFSITKTEPLKTSLEKTSCPSFKYIVTDGTVEDATKSNAKPKLRTLKLKLNPTKAQKSMLAEFAGCSRFMYNKAVAARLGVGSTHKSVFRIRDRYVTNKVRGKGKMPNPYFKNRQWLLQCPKSVRQSAIKSALANIKACFSNLKAGNIKQFSAPFRRKKTELERGWVIEMDQKNVSKDGDKLFIFKEILGNMRYFGSKQLHKLMPEENPTHDPKVHKSRFGEYFLVLSVAARDRRAERKPVHPDKVATASIDPGVRKTMVTYSPENEESFMLGQGQASDLVKLLLVHDKLQSRLDTEKTLRSKERMKIKKHMIRIRKRIFYLKKEFRDQTTNFLAARYDVLLVPQLETAKMTISAERELTTKVARQMLTLSHSVLFNRLKEKCEEYGTVFLHVLEHYTSQTCPMCGFLNKCGETYTCKNCQFTCDRDIVGAAGIFLKAVRTENPCS

SEQ ID NO: 1079 - protein, 242 aa, Chlamydomonas sp.
YEQHVRPAGPCQSLSQSAPNPPTTQSQQRLPIYAILSFGKQKTIEKVCDVIAPRAQTTVVGFGNWSNQGYGISRSCSGPIKEIRRCLSRRKNVLFKNVDERNTSCKCHGCFQRLVNMKADSVVWRGVCKESPIDGSITFEKQKMVVKNVKVHKVLHCRDSVKSASSNVRCGATWYRDVNAAKNLLLLLTTWMDGRERPKAFCVPSPPPKTTVSIEASVSAKPTDPPGFVSSLPCYPLGQLKC

SEQ ID NO: 1080 - protein, 327 aa, Chlamydomonas sp.
CPKSVRQSAIKAALANIKACFSNLKAGNIKQFSAPFRRKKTELERGWAIEMDQKNVSKDGDKLFIFKDILGNMRYFGSKQLHKLMPEENPTHDPKVHKSRFGEYFLVLSVAARDRRAERKPVHPDKVATASIDPGVRKTMVTYSPENEESFMLGQGQASDLVKLLLVHDKLLSRLDTEKTLRSKERMKIIMQMIRIRKIIFYLKKEFRDQTTNFLAARYDVLLVPQLETAKMTISAERELTTKVARQMLTLSHSVLFNRLKEKCEEYGTVFLHVLEHYTSQTCPMCSFLNKCGETYTCKNCQFTCDRDIVGAAGIFLKAVRTENPCS

SEQ ID NO: 1081 - protein, 428 aa, Chlamydomonas sp.
KSVLKLYDDDVKDIKATDEYRHAKGLYDTLVNARKTVAGSFFRKPPVKNGWVFDCSICTDGVSLSMQYSKTVQVLVSDLKKTCKNPRKEEGIKIAEKYDGSLKTILPDMGIVVLGVDPGRSNIATVTYLADDKNKTWTLTRGAFYHKSGIKKQTRQKELRFADMIPMWESLRENGAALSTSRTDKISAYLSNYAKFSEEWWRLALRRRESRDNLQRYIGKRKVKDSFWAGIKRCMMKELPDMKVCVAYGSAITKLKPTGPGEVAVPTGAMFASCKRIFKEDVSVTDEFKTTLMSWETGKEKGRVYKIPSACSADVKLRLGGERFGHTKSKTMPKVADCDHLGVRLYNKRKGAQEKHRRGGFAISLVDSQKSIERYPEVRGLRFSPETCICSDRDRSSALTIARLHCMELMGLGRPLPFAHSSSVVVDE

SEQ ID NO: 1082 - protein, 638 aa, Chlamydomonas sp.
ECSREPVCRSRLHQNVFGVQFVMENGIGESSSLVHEADQHDDVAELVDYEGEEDGECAPGRAICVVKMKLSTFIPHDWLRNKIDTLVLDMNKLLGEGYIFANFHIARLFENGIAVPPVNRNFFYRCLIAVSTNKCKGSTLGEDVESSRLLFDLLREPGQSKVDIRGRVKNQIIADLSILMATMASNHLWTNLERRITTYLKWKYPQIAKRLRSDIVAALIKCPTKNLDVIFKMSPHTTKLPTKLPTSRLRSAKSAVALAKKRVGRKEPEGSPLRVRLTKLQERLEKLSEAWLSSKNLRVDADNAKRFFAREVAFCLRGVLPLPSGNTFASRAHMTLPLYHKILSETIEEKRKTKNEKHRTFSLLPYKSGFTLSHIPISKMAFFYMVNECHFDSCKADVASKNHQGIWERFANLKKVETVSRKFGYRIVTDGFAVSILMNKPTCLTCSMPADAFSTRAHEYVTTDEGGIVSFLDNVVVAAVDPGVTDIVTVTGLNGGTRSYSSAQYYRKGLIFKSQRQTDVWNLETADIVGGIIPDRDSSSSEQIGAYARFYMGAAPILLAHRASRGYRNLRFRRYCKKQKLIVEIADFVAPRKKSAKVLVGFGDWKGLGATPISRRTCGPLQAIRFELRSRENVIMEE

SEQ ID NO: 1083 - protein, 803 aa, Chlamydomonas sp.
PRMEHVCDVCIKSSVMYKLCKMATKPPTVAKLKELLKLAEVAYSSKDKKDDIVRLCEDNGLIARPPPEYKTVEKMCVVKCALKKAMSLDDEEFGKFREHVDQLVNVVSRMLRRSSLVLTFHVTRLMEGDLPIPNMYDMKDTYWKDWLRIGVDGVFPDEESRISYESVKDVIGKVLGSDDPDYINSYPIYFDQVLNYAGHTLSTVVSNNAWVPLVPRLTRLTKATLNALGAPKTIRVYDVMRVIQQEIQEMESWPESVQEYVREVRVRLKVPDGSRLYDDYGKDMDFPTMVRFNYWMQTRLEAIGARRIRLMPIFNVQRSHVRLDMKTLVNLFRHVFPKDPNIVELSKWKDVKDPDRFMLPLKPAVKKKKSCGPGEWEAYKLAQQKYDADVNDIKDTDEYRHAKGRYDTLVNARKTVAGSFFKKPPVKTGWVFDCSICTDGVSLSMQYSKTVQVRVSDLKKTSKRSRDDEGMSVSEQYDHKLKTTLPDMGIVVLGVDPGRSNIATVTYLADDKSKTWKLTRGAFYHKSGIKKQKKQQEKRFSDMIPRWESLRENGAALSTSRTDDISAYLKNYDTFSDEWWRMALLRRESRDNFQRYIGKRKAMDSFWAGIKRNMKLDHPDLRVRVAYGSAITTLKATGPGEVAVPTGSMFASCKRLFKEEVHVTDEFKTTLMSWETGAKKECVYKIPSVQITTEGQIRLGYELLGHTPLKETPKVSYRDQLAVRVYCTRKQIQEKHRRGGLAPSLVDNNSIKRYPEVRGLRFSPETSTYSDRDRSSALTIARLHCMELLGQGRPLPFCRDACC

SEQ ID NO: 1084 - protein, 459 aa, Chlamydomonas sp.
TCLCTTRYCRTIEEKLKTKNEKHRTFSLLPYKSGFTLSHIPISKMAFFYMVNECHFDSCKADVASKNHQGIWERFANLKKVETVSRKFGYRIVTDGFAVSILMNKPTCLTCSMPADAFSTRAHEYVTTDEGGIVSFLDNVVVAAVDPGVTDIVTVTGLNGGTRSYSSAQYYRKGLIFKSQRQTDVWNLETADIVGGIIPDRDSSSSEQIGAYARFYMGAAPILLAHRASRGYRNLRFRRYCKKQKLIVEIADFVAPRKKSAKVLVGFGDWKGLGATPISRRTCGPLQAICFELRSRENVIMEDIDEFRTSQRCSCCENHLCNMVALTHRKKQDGTGWECTEGRKRIHKILHCKSSQSGAPRQQSGGMLHCGKTWNRDVNASRNILMLTLHQVFGRERPLAFRRDAPRSSSTTPPPPPDTDMGTQTVERFTKEATRNIFENLFNLLHPPTLPKSNDLQSG

SEQ ID NO: 1085 - protein, 579 aa, Chlamydomonas sp.
NADEATRSERSGLQATNVSLTQAASKATSLSRKNNPAVVKSFSTHVCPHTNNNPTCSDSNCSCKPIFLTNIPDASKSRTSDQGSTSSALDFYEYWDSSRQDMYRQLLWLPKTGTQGLVSSSFNGFAHSTPTRSSFSITKTEPLKTSLEKTSCPSFKYIVTDGTVEDATKSNAKPKLRTLKLKLNPTKAQKSMLAEFAGCSRFMYNKAVAARLGVGSTHKSVFRIRDRYVTNKVRGEGKMPNPYFKNRQWLLQCPKSVRQSAIKSALANIKACFSNLKAGNIKQFSAPFRRKKTELERGWVIEMDQKNVSKDGDKLFIFKEILGNMRYFGSKQLHKLMPEENPTHDPKVQKSRFGEYFLVLSVAARDRRAERKPVNPDKVATASIDPGVRKTMVTYSPENEESFMLGQGQASDLVKLLLVHDKLQSRLDTEKTLRSKERMKIKKLMIRIRKTIFYLKKEFRDQTTNFLAARYDVLLVPQLETAKMTISAERELTTKVARQMLTLSHSVLFNRLKEKCEEYGTVFLHVLEHYTSQTCPMCGFLNKCGETYTCKNCQFTCDRDIVGAAGIFLKAVRTENPCS

SEQ ID NO: 1086 - protein, 220 aa, Chlamydomonas sp.
RLEPETADIVGGIIPDRDFRVLEQMVRRQILHGCRPVLLAHRASRGYRNLRFRRYCKKQKLIVEIADFVAPREKSAKVLVGFGDWKGLGSTPISRRTCGPLQAIRFELRSRENVIMEDIDEFRTSQRCSCCENHLCNMVALTHRKKQDGTGWECTEGRKRIHKILHCKSSQSGAPRQQSGGMLHCGKTWDRDVNASRNILMLTLHQVFGREVLSRFAERD

SEQ ID NO: 1087 - protein, 801 aa, Chlamydomonas sp.
PRMEHVCDVCIKSSVMYKLCKMATKPPTVAKLKELLKLAEVAYSSKDKKDDIVRLCEDNGLIARPPPEYKTVEKMCVVKCALKKAMSLDDEEFGKFREHVDQLVNVVSRMLRRSSLVLTFHVTRLMEGDLPIPNMYDMKDTYWKDWLRIGVDGVFPDEESIISYESVKDVIGKVLGSDDPDYINSYPIYFDQVLNYAGHTLSTVVSNNAWVPLVPRLTRLTKATLNALGAPKTIRVYDVMRVIQQEIQEMESWPESVQEYVREVRVRLKVPDGSRFYDDYGKDMDFPTMVRFNYWMQTRLEAIGARRIRLMPIFNVQRAHVRLDMKTLVNLFRHVFPKDPNIVELSKWKDVKDPDRFMLPLKPAVKKKKSCGPGEWEAYKLAQQKYDADVNDIKDTDEYRHAKGRYDTLVNARKTVAGSFFKKPPVKTGWVFDCSICTDGVSLSMQYSKTVQVRVSDLKKTSKRSRDDEGMSVSEQYDHKLKTTLPDMGIVVLGVDPGRSNIATVTYLADDKSKTWKLTRGAFYHKSGIKKQKKQQEKRFSDMIPRWESLRENGAALSTSRTDDISAYLKNYDTFSDEWWRMALLRRESRDNFQRYIGKRKAMDSFWAGIKRNMKLDHPDLRVRVAYGSAITTLKATGPGEVAVPTGSMFASCKRLFKEEVHVTDEFKTTLMSWETGAKKECVYKIPSVQITTEGQIRLGYELLGHTPLKETPKVSYRDQLAVRVYCTRKQIQEKHRRGGLAPSLVDNNSIKRYPEVRGLRFSPETSTYSDRDRSSALTIARLHCMELLGQGRPLPFCRDA

SEQ ID NO: 1088 - protein, 813 aa, Chlamydomonas sp.
PRMEHVCDVCIKSSVMYKLCKMATKPPTVAKLKELLKLAEVAYSSKDKKDDIVRLCEDNGLIARPPPEYKTVEKMCVVKCALEKAMSLDDEEFGKFREHVDQLVNVVSRMLRRSSLVLTFHITSLLEKGLDIPDLYNMKDTYWKDWLRIGVDGIFPDEESKISYEAVKDSIGDVIGNDDADYIKSYPIYFDQVLNYAGHTLSTVVSNNAWVPLIPRLARLTSTTLNKLNAPKTLDTSKIIRGYDVMQAIQQEVQNMEGWPESVQEYVNEVREMLSVPDGSRVYDNYGKDMDFPTMVRFNYWIQTRLEDMDARRIRLMPIFNVQRVHVRLDLKTLVNLFRHMFPNDQNIVELSKWEHVKNPESFMLPQRPAQKKKKSCGPGEWEAYKSVLKQYDDDVKDIKATDEYRHAKGLYDTLVNARKTVAGSFFRKPPVKNGWVFDCSICTDGVSLSMQYSKTVQVLVSDLKKTCKKPRKEEGIKIAEKYDGSLKTILPDMGIVVLGVDPGRSNIATVTYLADDKNKTWTLTRGEFYHKSGIKKQTRQKELRFADMIPMWESLRENGAALSTSRTDKISAYLSNYAKFSDEWWRLALRRRESRDNLQRYIGKRKVKDSFWAGIKRCMMKELPDMKVCVAYGSAITKLKPTGPGEVAVPTGTMFASCKRIFKEDVSVTDEFKTTLMSWETGKEKERVYKIPSVCSADVKLRLGGERFGHTKSKTMPKVADCDHLGVRLYNKRKGAQEKHRRGGFATSLVDSQKSIERYPEVRGLRFSPETCIYSDRDRSSALTIARLHCMELMGLGRPLPFAHSSSVVVDE

SEQ ID NO: 1089 - protein, 605 aa, Chlamydomonas sp.
RMGSFDTTSDQTHFHHLKKLNAPKTLDTSKIIRGYDVMRAIQQEVQNMEGWPESVQEYVNEVWEMLSVPDGSRVYDNYGKDMDFPTMVRFNYWIQTRLEDMDARRIRLMPIFNVQRVHVRLDLKTLVNLFRHMFPNDQNIVELSKWEHVKNPDSFMLPQRPAQKKKKSCGPGEWEAYKSVLKQYDDDVKDIKATDVYRHAKGLYDTLVNARKTVAGSFFRKPPVKNGWVFDSSICTDGVSLSMQYSKTVHVLVSDLKKTCKKPRKEEGIKIAEKYDGSLKTILPDMGIVVLGVDPGRSNIATVTYLADDKNKTWTLTRGAFYHKSGIKKQTRQKELRFSDMIPMWESLRENGAALSTSRTDKISVYLSNYANFSDEWWRLALRRRESRDNLQRYIGKRKVKDSFWAGIKRCMMKELPDMKVCVAYGSAITKLKPTGPGEVAVPTGAMFASCKRIFKEDVSVTDEFKTTLMSWETGKEKERVYKIPSVCSADVKLRLGGERFGHTKSKTMPKVADCDHLGVRLYNKRKGAQEKHRRGGFATSLVDSQKSIERYQEVRGLRFSPETCIYSDRDRSSALTIARLHCMELMGLGRPLPFAHSSSVVVDE

SEQ ID NO: 1090 - protein, 615 aa, Chlamydomonas sp.
QCIRNLHVLNIRMPCMATNASVKLARSPMPVVSPGPSSVDGRIMARSGLQATNVSLTQAASKATSSSRKKKPAVVKSFSTHVCPHTNNNPTCSDSNCSCKPIFLTNIPDASKSRTSDQGSTSSSLDFYEYWDSSRQDLYRQLLWLPKTGTQGLVSSSFNGFAHSTPTRSSFSITKTEPLKTSLEKTSCPSFKYIVTDGTVEDATKSNAKPKLRTLKLKLNPTKAQKSMLAEFAGCSQFMYNKAVAARLGVGSTHKSVFRIRDRYVTNKVRGKGKMPNPYFKNRQWLLQCPKSVRQSAIKSALANIKACFSNLKAGNIKQFSAPFRRKKTELERGWVIEMDQKNVSKDGDKLFIFKEILGNMRYFGSKQLHKLMPEENPTHDPKVQKSRFGEYFLVLSVAARDRRAERKPVNPDKVATASIDPGVRKTMVTYSPENEESFMLGQGQASDLVKLLLVHDKLQSRLDTEKTLRSKERMKIKKLMIRIRKTIFYLKKEFRDQTTNFLAARYDVLLVPQLETAKMTISAERELTTKVARQMLTLSHSVLFNRLKEKCEEYGTVFLHVLEHYTSQTCPMCGFLNKCGETYTCKNCQFTCDRDIVGAAGIFLKAVRTENPCS

SEQ ID NO: 1091 - protein, 243 aa, Chlamydomonas sp.
MPEENPTHDPKVQKSRFGEYFLVLSVAARDRRAERKPVHPDKVATASIDPGVRKTMVTYSPENEESFMLGQGQASDLVKLLLVHDKLQSRLDTEKTLRSKERMKIKKHMIRIRKRIFYLKKEFRDRTTNFLAARYDVLLVPQLETAKMTIRAERQLTTKVARQMLTLSHSVLFNRLEEKCAEYGTVFLHVLEHYTSQTCPMCGFLNKCGETYTCKNCQFTCDRDIVGAAGIFLKAVRTENPCS

SEQ ID NO: 1092 - protein, 349 aa, Chlamydomonas sp.
HVMPADAFSTRAHEYVTTDEGGIVSFLDNVVVAAVDPGVTDIVTITGLNGGTRSYSSAQYYRKGLIFKSQRQTDVWNLETADIVGGIIPDRDSSSSEQIGAYARFYMGAAPILLAHRTSRGYRNLRFRRYCKKQKLIVEIADFVAPREKSAMVLVGFGDWKGLGAAPISRRTCGPLQAIRFELRSQENVIMEDIDEFRTSQRCSCCENQLCNMVALTHRKKQDGTGWECTEGRKRIHKIIHCKSSQSGAPRQQSGGMLHCGKTWDRDVNASRNILMLTLHQVFGRERPLAFRRDTPRSSSTTPPPPPDTDMGTQTVERFTKEATRNIFENLFNLLHPPTLPKSNDLQSG

SEQ ID NO: 1093 - protein, 251 aa, Chlamydomonas sp.
GHSIPSPNTSNMVDLQDHVRAYLKALPILLQHRANKGYRSMRFFRYVGKQKTIEKVCDVIAPRAQTTVVGFGNWSNQGYGISRSCSGPIKEIRRCLSRCKNVLFKNVDERNTFCKCHGCFQRLVNMKADSVVWRGVCKESPIDGSITVEKQKMVVKNVKVHKVLHCRDSVKSASSNVRCGATWNRDVNAAKNLLLLLTTWMDGRERPEAFCVPSPPPKTTVSIEASVSAKPTDPPGFVSSLPCYPLGQLKC

SEQ ID NO: 1094 - protein, 630 aa, Chlamydomonas sp.
ECSREPVCRSRLHQNVFGVQFVMEHGVVLVHEADQHDDVAELVDYEGDEDEERAPGRAICVVKMKLSTFIPHDWLRRKIDTLVLDMNKLLGEGYIFANFHIARLFENGIAVPPVNRNFFYRCLLAVSTNKCNGSTLGEDFESIRLLFDLLREPGQSKVDIRGNVKNQIIADLSILMATMASNHLWTNLERRITTYLKWKYPQIAKLLRSDIVAAVIKCPTKNLDVIFKMSPHVAKLPTKLPTARLCLAKSAVALAKKRVGRKEPEVSPLRVRLTKLQARFEKLSEAWLSSKNLRVDEDNAKRFFARDVAFCFRGVLPLPSGNTFASRAHMTLPLYHKILSETIEERKTKNEKLRTFSLLPYKSRFTLSHIPISKMAFFYMVNECHFDSCKADVASKNHQGIWERFANLKKVETVSRKFGYRIVTDGFAVSILMNKPTCLTCSMPADAFSTRAHEYVTTDEGGIVSFRDNVVVAAVDPGVTDIVTVTGLDGGTRSYSSAQYYRKGLIFKSQRQTDVWNLETADIVGDIIPDRDSSRSEQIGAYARFYMGAAPIILAHRASRGYRNLRFRRYCKKQKLIVEIADFVATREKSAKVLVGFGDWKGLGATPISRRTCGPLQAIRFELRYGDTDG

SEQ ID NO: 1095 - protein, 688 aa, Chlamydomonas sp.
GNVGAILYHQKKKNTHPLLMGVVQDKGDDIINISVVKKTLNSLCMDVSRHQISSRIQSMVLLINHAVAEAYLFANFHITRCLDDGDFDVKQLPHLDRNFYYRCLLAVSTSNVRKDTLGQSFNDTMVAFDALRPAGYVKVDVRPWEQVIADVSIQMATMACNSVWANVDRVVIKYLRLKHPSLKKHFKKIVKAVVQYPESKIDTIIPEGLVHAIHVKEVVSHLRALFPLPRGKQFNTRAHLTMRLFHHVLTELGEVGRVDPKDKKTKKSHPRLFSILPRKNGFTIPYVPISSMTFMKLLSMGDSPLESVSGDGRYENHTMLWRKYFNVQGLETKRSRFDNRILSDGKGVSVQMKQKGIEEVVEEGENAGYPKDANIVECKDAVGALRVGVDPGMTDIVTVASSAGRIESFSSARFSEVAGYNTSKRRTYKWNDETQDLVKSIPSPNTSNMVDLQDHVRAYLKALPILLQHRANKGYRSMRFFRYVGKQKTIEKVCDVIAPRAQTTVVGFGNWSNQGYGISRSCSGPIKEIRRCLSRRKNVLFKNVDERNTSCKCHGCFQRLVNMKADSVVWRGVCKESPIDGSITVEKQKMVVKNVKVHKVLHCRDSVKSASSNVRCGATWNRDVNAAKNLLLLLTTWMDGRERPEAFCVPSPPPKTTVSIEASVSAKPTDPPGFVSSLPCYPLGQLKC

SEQ ID NO: 1096 - protein, 686 aa, Chlamydomonas sp.
METIVNKEPPDKRTRPDRAAKIKDRKNGEENVVKCTLSRIIADKDNKDVITKVIKERVDSVSKRTYLAGVAVNRILKEVFEGVPDAQLHTVSVPSVDQNFIRQLMVGSRQAHMETRDATVERFFHNNYWFREKIEGREVIVKKKKQYVGAIARYDGDRNLYSHASKKYLTNFNNHYRVHLSTWIKKFVYSKENRILAKEFKDEHGIDETVFHRYLLYDIHSWGVKEDLIAIHSLLPERTKMLLKIQHSIIGQDEINRQWLKSVSNSAKMIRYNVFINRYLEATEDEGYAKLVNIAPIPTVKHSFITIDTDGLLGVLKDVGLVESLEKTLTNKEHWESVFDVENIRSTGKGVFTCTIDTDGVMACTHFLRAEKKKISIKDDGTAIKKQTKTLREFSESDPNVVVVANDPGRCNIAFLTWKKNKVEEKDKGGRKRKRHCEFGSKRLTRERYYVESGVFKSRGPTKKWLSNIQDCLDDLKDNSPKRTSLESFDAYVTVMVNHWDSRWGEMSKSRWGAQRLRLYGGKKRVLARFFNEVQADVGERKTIVIAYGSSKFAPGGKGELSVPTTSAFNAFRDRFKGRVAVIDEFRTTKIWHKDSTTVLQSVQSEKKGRTVRGLLWCSSTMENSKLFVNRDLNAAINIHNCFTMYPTRPGILARPKKYCKLEVVVGRTIDYKLTGSLQNAVSSEV

SEQ ID NO: 1097 - protein, 615 aa, Chlamydomonas sp.
QCIRNLHVLNIRMPCMATNASVKLARSPMPVVSPGPSSVDGRIMARSGLQATNVSLTQAASQATSSSRKKKPAVVKSFSTHVCPHTNNNPTCSDSNCSCKPIFLTNIPDASKSRTSDQGSTSSSLDFYEYWDSSRQDLYRQLLWLPKTGTQGLVSSSFNGFAHSTPTRSSFSITKTEPLKTSLEKTSCPSFKYIVTDGTVEDATKSNAKPKLRTLKLKLNPTKAQKSMLAEFAGCSRFMYNKAVAARLGVGSTHKSVFRIRDRYVTNKVRGKGKMPNPYFKNRQWLLQCPKSVRQSAIKSALANIKACFSNLKAGNIKQFSAPFRRKKTELERGWVIEMDQKNVSKDGDKLFIFKEILGNMRYFGSKQLHKLMPEENPTHDPKVQKSRFGEYFLVFSVAARDRRAERKPVNPDKVATASIDPGVRKTMVTYSPENEESFMLGQGQASDLVKLLLVHDKLQSRLDTEKTLRSKERMKIKKLMIRIRKTIFYLKKEFRDQTTNFLAARYDVLLVPQLETAKMTISAERELTTKVARQMLTLSHSVLFNRLKEKCEEYGTVFLHVLEHYTSQTCPMCGFLNKCGETYTCKNCQFTCDRDIVGAAGIFLKAVRTENPCS

SEQ ID NO: 1098 - protein, 630 aa, Chlamydomonas sp.
KKLRFTGGTYLAGVAVNRILKEVFEGVPDAQLHTVSVPSVDQNFIRQLMVGSRQAHMETRDATVERFFHNNYWFREKIEGREVIVKKKKQYVGAIARYDGDRNLYSHASKKYLTNFNNHYRVHLSTWIKKFVYSKENRILAKEFKDEHGIDETVFHRYLLYDIHSWGVKEDLIAIHSLLPERTKMLLKIQHSIIGRDEINRQWLKSVSNSAKMIRYNVFINRYLEATEDEGYAKLVNIAPIPTVKHSFITIDTDGLLGVLKDVGLVESLEKTLTNKEHWESVFDVENIRSTGKGVFTCTIDTDGVMACTHFLRAEKKKISIKDDGTAIKKQTKTLREFSESDPNVVVVANDPGRCNIAFLTWKKNKVEEKDNGGRKRKRHCEFGSKRLTRERYYVESGVFKSRGPTKKWLSNIQDCLDDLKDNSPKRTSLESFDAYVTVMVNHWDSRWGEMSKSRWGAQRLRLYGGKKRVLARFFNEVQADVGERKTIVIAYGSSKFAPGGKGELSVPTTSAFNAFRDRFKGRVAVIDEFRTTKIWHKDSTTVLQSVQSEKKGSTVRGLLWCSSTMENSKLFVNRDLNAAINIHNCFTMYPTRPGILARPKKYCKLEVVVGRTIDYKLTGSLQNAVSSEV

SEQ ID NO: 1099 - protein, 680 aa, Chlamydomonas sp.
VPPVNRNFFYRCIIAVSTNKCKGSTLGEDFESSRLLFDLLREPGQSKVDIRGNVKNQIIADLSILMATMASNHLWTNLERRITTYLKWKYPQIAKRLRSDIVAALIKCPTKNLDVIFKMSPHTTKLPTKLPTSRLRSAKSAVALAKKRVGRKEPEGSPLRVRLTKLQERLEKLSEAWLSSKNLRVDADNAKRFFAREVAFCLRGVLPLPSGNTFASRAHMTLPLYHKILSETIEEKRKTKNEKHRTFSLLPYKSGFTLSHIPISKMAFFYMVNECHFDSCKADVASKNHQGIWERFANLKKVETVSRKFGYRIVTDGFAVSILMNKPTCLTCSMPADAFSTRAHEYVTTNEGGIVSFLDNVVVAAVDPGVTDIVTVTGLNGGTRSYSSAQYYRKGLIFKSQRQTDVWNLETADIVGGIIPDRDSSSSEQIGAYARFYMGAAPILLAHRASRGYRNLRFRRYCKKQKLIVEIADFVAPREKSAKVLVGFGDWKGLGAKPISRRTCGPLQAIRFELRSRENVIMEDIDEFRTSQRCSCCENHLCNMVALTHRKKQDGTGWECTEGRKRIHKILHCKSSQSGAPRQQSGGMLHCGKTWDRDVNASRNILMLTLHQVFGRERPLAFRRDAPRSSSTTPPPPPDTDMGTQTVERFTKEATRNIFENLFNLLHPPTLPKSNDLQSG

SEQ ID NO: 1100 - protein, 820 aa, Chlamydomonas sp.
NHYGLFLPRMEHVCDVCIKSSVMYKLCKMATKPPTVAKLKELLKLAEVAYSSKDKKDDIVRLCEDNGLIARPPPEYKTVEKMCVVKCALKKAMSLDDEEFGKFREHVDQLVNVVSRMLRRSSLVLTFHITSLLEKGLDIPDLYNMKDTYWKDWLRIGVDGIFPDEESKISYEAVKDSIGDVIGNDDADYIKSYPIYFDQVLNYAGHTLSTVVSNNAWVPLIPRLARLTSTTLNKLNAPKTLDTSKIIRGYDVMQAIQQEVQNMEGWPESVQEYVNEVREMLSVPDGSRVYDNYGKDMDFPTMVRFNYWIQTRLEDMDARRIRLMPIFNVQRVHVRLDLKTLVNLFRHMFPNDQNIVELSKWEHVKNPESFMLPQRPAQKKKKSCGPGEWDAYKSVLKQYDDDVKDIKATDEYRHAKGLYDTLVNARKTVAGSFFRKPPVKNGWVFDCSICTDGVSLSMQYSKTVQVLVSDLKKTCKKPRKEEGIKIAEKYDGSLKTILPDMGIVVLGVDPGRSNIATVTYLADDKNKTWKLTRGAFYHKSGIKKQTRQKELRFADMIPMWESLRENGAALSTSRTDKISAYLSNYAKFSDEWWRLALRRRESRDNLQRYIGKRKVKDSFWAGIKRCMMKELPGMKVCVAYGSAITKLKPTGPGEVAVPTGAMFASCKRIFKEDVSVTDEFKTTLMSWETGKEKERVYKIPSVCSADVNLRLGGERFGHTKSKTMPKVADCDHLGVRLYNKRKGAQEKHRRGGFATSLVDSQKSIERYPEVRGLRFSPETCIYSDRDRSSALTIARLHCMELMGLGRPLPFAHSSSVVVDE

SEQ ID NO: 1101 - protein, 409 aa, Chlamydomonas sp.
RETLLCTRRGILSQGGSPFTIRKHFCVSGSHDPASVPQDIVGDHQRKTKNEKRKTSHILVVALQIWIHSVAHSDFENGLFLYGQRVPLRFMQGRRCFANLKKVETVSRKFGYRIVTDGFAVSILMNKPTCLTCSMPADSFSTRAHEYVTTDEGGIVSFRDNVVVAAVDPGVTDIVTVTGLDGGTRSYSSAQYYRKGLIFKSQRQTDVWNLETADIVGDIIPDRDSSRSEQIGAYARFYMGAAPILLAHRASRGYRNLRFRRYCKKQKLIVEIADFVAPREKSAKVLVGFGDWKGQSLGGLVALSKLFVSSFVAEETSSWRTSMSSEHLNDAAAVRTAFATWWHSLIVRSKTVLVGNVQKDASGFTRFSTAKAVKAERHANRAVVGSTAGRLGTAITLHYITLHYMLKST

SEQ ID NO: 1102 - protein, 424 aa, Chlamydomonas sp.
KLAQQKYDADVKDIKATDEYRHAKGRYDTLVNARKTVAGSFFKKPPVKTGWVFDCSICTDGVSLSMQYSKTVQVRVSDLKKTSKRSRDEEGMSVSEQYDHKLKTTLPDMGIVVLGVDPGRSNIATVTYLADDKSKTWKLTRGAFYHKSGIKKQKKQQEKRFSDMIPRWESLRENGAALSTSRKDDISAYLKNYATFSDEWWRMALRRRESRDNFQRYIGKRKAMDSFWAGIKRNMKLDHPNLRVRVAYGSAITKLKATGPGEVAVPTGSMFASCKRLFKEEVHVTDEFKTTLVSWETGAKKECVYKIPSVQITTEGQICLGYELLGHTPLKETPKVSYRDQLAVRVYCTRKKIQEKHRRGGLAPSLVDNKSIKRYPEVRGLRFSPETSTYSDRDRSSALTIARLHCMELLGQGRPLPFCRDACC

SEQ ID NO: 1103 - protein, 302 aa, Chlamydomonas sp.
GLDGGTRSYSSAQYYRKGLIFKSQRQTDVWNLETADIVGDIIPDRDSSRSEQIGAYARFYMGAAPILLAHRASRGYRNLRFRRYCKKQKLIVEIADFVAPMEKSAKVLVGFGDWKGLGAMPISRRTCGPLQAIRFELRSRGNVIMEDVDEFRTSQRCSCCENRLCNMVALTHRKKQDGTGWECTEGRKRIHKILHCKSSQSGAPRQQSGGRLHCGKTWDRDVNASRNILMLTLHQVFGRERPLAFRRDAPRSSSKTPPAPDTDMGTQTVERFTKEATRNIFENLFNLLHPPTLPKRNDLQSG

SEQ ID NO: 1104 - protein, 688 aa, Chlamydomonas sp.
GNVGAILYHQKKKNIHLLLMGVVQDKGDDDINISVVKKTLNSLCMDVSRHQISSRIQSMVLLINHAVAEAYLFANFHITRCLDDGDFDVKQIPHLDRNFYYRCLLAVSTSNVRKDTLGQSFNDTMVAFDALRPAGYVKVDVRPWGQVIADVSIQMATMACNSVWANVDRVVIKYLRLKHPSLKKHFKKIVKAVVQYPESKIDTIIPEGLVHVIHIKVVVSHLRALFPLPRGKQFNTRAHLTMRLIHHVLTELGEVGRVDPKDKKTKKSHPRLFSILPRKNGFTISYVPISSMTFMKLLSMGDSLLESVSGDGRYENHTMLWRKYFNVQGLETKRSRFDNRILSDGKGVSVQMKQKGKEEVVEEGENAGYPKDANIVECKDAVGALRVGVDPGMTDIVTVASSAGRIESFSSARFSEVAGYNTSKRRTYKWNDETQDLVKSIPSPNTSNMVDLQDHVRAYLKALAILLQHRANKGYRSMRFFRYVGKHKTIEKVCDVIAPRAQTTVVGFGNWSNQGYGISRSCSGPIKEIRRCLSRRKNVLFKNVDERNTSCKCHGCFHRLVNMKADSVVWRGVCKESPIDGSITVEKQKMVVKNVKVHKVLHCRDSVKSASSNVRCGATWNRDVNAAKNLLLLLTTWMDGRERPEAFCVPSPPPKTTVSIEASVSAKPTDPPGFVSSLPWYPLGQLKC

SEQ ID NO: 1105 - protein, 624 aa, Chlamydomonas sp.
VNLTVYKEFACTKYQNAMYGNQRFCKIGKASDALGVSRTVLRQWADNGTIRTIRTPGNQRLFDPSSIQGYLIEQEKNPAVVKSFSTHVCPHTNNKPTCSDSNCSCKPIFLTNIPDASKSLKSRTSDQGSTSSAQDFYEYWDSSRQDLYRQLLWLPKTGSQGLVSSSLNGFARSTPARSSFSITKTEPLKTSLEKTSCPSFKYIVADGTVEDATKSNAKPKLRTLKLKLNPTKAQKSMLAEFAGCSRFMYNKAVAARLGVGSTHKSVFRIRDRYVTNKVRGEGKMPNPYFKNRQWLLQCPKSVRQSAIKAALANIKACFSNLKAGNIKQFSAPFRRKKTELARGWAIEMDQKNVSKDGDKLFIFKDILGNMRYFGSKQLHKLMPEENPTHDPKVQKSRFGEYFLVLSVAARDRRAERKPVHPDKVATASIDPGVRKTMVTYSPENEESFMLGQGQASDLVKLLLVHDKLQSRLDTEKTLLSKERMKIKKQIIRIRKRIFYLKKEFRDQTTNFLAARYDVLLVPQLETAKMTISAERELTTKVARQMLTLSHSVLFNRLKEKCEEYRTVFLHVLEHYTSQTCPMCGFLNKCGETYTCKNCQFTCDRDIVGAAGIFLKAVRTENPCS

SEQ ID NO: 1106 - protein, 791 aa, Chlamydomonas sp.
KMATKSPTVAKLKELLKLAEVPYSSKSNKDDLVRLCEDNGLIARPPPEYKTVEKMCVVKCALKKAMSLDDEEFGKFREHVDQLVNVVSRMLRRSSLVLTFHITSLLEKGLDIPDLYNMKDTYWKDWLRIGVDGIFPDEESKISYEAVKDSIGDVIGNDDADYIKSYPIYFDQVLNYAGHTLSTVVSNNAWVPLIPRLARLTSTTLNKLNAPKTLDTSKIIRGYDVMQAIQQEVQNMEGWPESVQEYVNEVREMLSVPDGSRVYDNYGKDMDFPTMVRFNYWIQTRLEDMDARRIRLMPIFNVQRVHVRLDLKTLVNLFRHMFPNDQNIVELSKWEHVKNPESFMLPQRPAQKKKKSCGPGEWEAYKSVLKQYDDDVKDIKATDEYRHAKGLYDTLVNARKTVAGSFFRKPPVKNGWVFDCSICTDGVSLSMQYSKTVQVLVSDLKKTCKKPRKEEGIKIAEKYDGSLKTILPDMGIVVLGVDPGRSNIATVTYLADDKNKTWKLTRGAFYHKSGIKKQTRQKELRFADMIPMWESLRENGAALSTSRTDKISAYLSNYAKFSDEWWRLALRRRESRDNLQRYIGKRKVKDSFWAGIKRCMMKELPDMKVCVAYGSAITKLKPTGPGEVAVPTGAMFASCKRIFKEDVSVTDEFKTTLMSWETGKEKERVYKIPSVCSADVNLRLGGERFGHTKSKTMPKVADCDHLGVRLYNKRKGAQEKHRRGGFATSLVDSQKSIERYPEVRGLRFSPETCIYSDRDRSSALTIARLHCMELMGLGRPSSIFPQQLCCC

SEQ ID NO: 1107 - protein, 608 aa, Chlamydomonas sp.
VLNIRMPCMATNASVKLARSPMPVVSPGPSSVDGRIMARSGLQATNVSLTQAASKATSSSRKKKPAVVKSFSTHVCPHTNNNPTCSDSNCSCKPIFLTNIPDASKSRTSDQGSTSSSLDFYEYWDSSRQDLYRQLLWLPKTGTQGLVSSSFNGFAHSTPTRSSFSITKTEPLKTSLEKTSCPSFKYIVTDGTVEDATKSNAKPKLRTLKLKLNPTKAQKSMLAEFAGCSRFMYNKAVAARLGVGSTHKSVFRIRDRYVTNKVRGKGKMPNPYFKNRQWLLQCPKSVRQSAIKSALANIKACFSNLKAGNIKQFSAPFRRKKTELERGWVIEMDQKNVSKDGDKLFIFKEILGNMRYFGSKQLHKLMPEENPTHDPKVQKSRFGEYFLVLSVAARDRRAERKPVNPDKVATASIDPGVRKTMVTYSPENEESFMLGQGQASDLVKLLLVHDKLQSRLDTEKTLRSKERMKIKKLMIRIRKTIFYLKKEFRDQTTNFLAARYDVLLVPQLETAKMTISAERELTTKVARQMLTLSHSVLFNRLKEKCEEYGTVFLHVLEHYTSQTCPMCGFLNKCGETYTCKNCQFTCDRDIVGAAGIFLKAVRTENPCS

SEQ ID NO: 1108 - protein, 812 aa, Chlamydomonas sp.
PRMEHVCDVCIKSSVMYKLCKMATKPPTVAKLKELLKLAEVAYSSKDKKDDIVRLCEDNDLIARPPPEYKTVEKMCVVKCALKKAMSLDDEEFGKFREHVDQLVNVVSRMLRRSSLVLTFHITSLLEKGLDIPDLYSMKDTYWKDWLRIGVDGIFPDEEKISYEAVKDSIGDVIGNDDADYIKSYPIYFDQVLNYAGHTLSTVVSNNAWVPLIPRLARLTSTTLNKLNAPKTLDTSKIIRGYDVMQAIQQEVQNMEGWPESVQEYVNEVREMLSVPDGSRVYDNYGKDMDFPTMVRFNYWIQTRLEDMDARRIRLMPIFNVQRVHVRLDLKTLVNLFRHMFPNDQNIVELSKWEHVKNPDSFMLPQRPAQKKKKSCGPGEWEAYKSVMKQYDDDVKDIKATDEYRHAKGLYDTLVNARKTVAGSFFRKPPVKNGWVFDCSICTDRVSLSMQYSKTVQVLVSDLKKTCKKPRKEEGIKIAEKYDGSLKTILPDMGIVVLGVDPGRSNIATVTYLADDKNKTWTLTRGEFYHKSGIKKQTRQKELRFADMIPMWESLRENGAALSTSRTDKISAYLSNYAKFSEEWWRLALRRRESRDNLQRYIGKRKVKDSFWAGIKRCMMKELPDMKVCVAYGSAITKLKPTGPGEVAVPTGAMFASCKRIFKEDVSVTDEFKTTLMSWETGKEKERVYKIPSVCSADVKLRLGGERFGHTKSKTMPKVADCDHLGVRLYNKRKGAQDKHRRGGFATSLVDSQKSIERYPEVRGLRFSPETCIYSDRDRSSALTIARLHCMELMGLGRPLPFAHSSSVVVDE

SEQ ID NO: 1109 - protein, 795 aa, Chlamydomonas sp.
LWKMASKPPTVAKLKELLKLAEVAYSSKDKKDDIVRLCEDNGLIARPPPEYKTVEKMCVVKCALKKAMSLDDEEFGKFREHVDQLVNVVSRMLRRSSLVLTFHITSLLEKGLDIPDLYNMKDTYWKDWLRTGVDGIFPDEESKISYEAVKDSIGDVIGNDDADYIKSYPIYFDQVLNYAGHTLSTVVSNNAWVPLIPRLARLTSTILNKLNAPKTLDTSKIIRGYEVMQAIQQEVQNMEGWPESVQEYVNEVREMLSVPDGSRVYDNYGKDMDFPTMVRFNYWIQTRLEDMDARRIRLMPIFNVQRVHVRLDLKTLVNLFRHMFPNDQNIVELSKWEHVKNPDSFMLSQRPAQKKKKSCGPGEWEAYKSVMKQYDDDVKDIKATDEYRHAKGLYDTLVNARKTVAGSFFRKPPVKNGWVFDCSICTDRVSLSMQYSKTVQVLVSDLKKTCKKPRKEEGIKIAEKYDGSLKTILPDMGIVVLGVDPGRSNIATVTYLADDKNKTWTLTRGAFYHKSGIKKQTRQKELRFADMIPMWESLRENGAALSTSRTDKISAYLSNYAKFSEEWWRLALRRRESRDNLQRYIGKRKVKDSFWAGIKRCMMKELPDMKVCVAYGSAITKLKPTGPGEVAVPTGAMFASCKRIFKEDVSVTDEFKTTLMSWETGKEKERVYKIPSVCSADVKLRLGGERFGHTKSKTMPKVADCDHLGVRLYNKRRGAQDKHRRGGFATSLVDSQKSIERYPEVRGLRFSPETCIYSDRDRSSALTIARLHCMELMGLGRPLPFAHSSSVVVDE

SEQ ID NO: 1110 - protein, 458 aa, Chlamydomonas sp.
PCLCTTRYCRRPSKKNEKLKTKNIAHSRCCLTNLDSLCRTFRFLKWPFSIWSTSATLIHARQTLLPKTIKEYGSASQNLKKVETVSRKFGYRIVTDGFAVSILMNKPTCLTCSMPAGAFSTRAHEYVTTDEGGIVSFLDNVVVAAVDPGVTDIVTVTGLNGGTRSYSSAKYYRKGLIFKSQRQTDVWNLETADIVGGIIPDRDSSSSEQIGAYARFYMGAAPILLAHRASRGYRNLRFRRYCKKQKLIVEIADFVAPRKKSAKVLVGFGDWKGLGATPISRRTCGPLQAIRFELRSRENVIMEDIDEFRTSQRCSCCENHLCNMVALTHRKKQDGTCWECTEGRKRIHKILHCKSSHSGAPRQQSGGMLHCGKTWDRDVNASRNILMLTLHQVFGRERPLAFRRDAPRSSSTTPPPDTDMGTQTVERFTKEATRNIFENLFNLLHPPTLPKSNDLQSG

SEQ ID NO: 1111 - protein, 802 aa, Chlamydomonas sp.
PRMEHVCDVCIKSSVMYKLCKMATKPPTVAKLKELLKLAEVAYSSKDKKDDLVRLCEDNGLIARPPPEYKTVEKMCVVKCALKKAMSLDDEEFGKFREHVDQLVNVVSRMLRRSSLVLTFHVTRLMEGDLPIPNMYDMKDTYWKDWLRIGVDGVFPDEESRISYEAVKDVIGKVLGSDDPDYINSYPIYFDQVLNYAGHTLSTVVSNNAWVPLVPRLTRLTKATLNALKAPKTIRVYDVMRVIQQEIQEMESWPESVQEYVRREVRVRLKVPDGSRLYDDYGKDMDFPTMVRFNYWMQTRLEDMDARRIRLMPIFNVQRAHVRLDMKTLVNLFRHVFPKDPNIVELSKWKDVKDPDRFMLPLKPAVKKKKSCGPGEWEAYKLAQQKYDADVNDIKDTDEYRHAKGRYDTLVNARKTVAGSFFKKPPVKTGWVFDCSICTDGVSLSMQYSKTVQVRVSDLKKTSKRSRDDEGMSVSEQYDHKLKTTLPDMGIVVLGVDPGRSNIATVTYLADDKSKTWKLTRGAFYHKSGIKKQKKQQEKRFSDMIPRWESLRENGAALSTSRTDDISAYLKNYDTFSDDWWRMALLRRESRDNFQRYIGKRKAMDSFWAGIKRNMKLDHPDLRVRVAYGSAITTLKATGPGEVAVPTGSMFASCKRLFKEEVHVTDEFKTTLMSWETGAKKECVYKIPSVQITTEGQIRLGYELLGHTPLKETPNVSYRDQLAVRVYCTRKQIQEKHRRGGLAPSLVDNKSIKRYPEVRGLRFSPETSTYSDRDRSSALTIARLHCMELLGQGRPLPFCRDA

SEQ ID NO: 1112 - protein, 802 aa, Chlamydomonas sp.
PRMEHVCDVCIKSSVMYKLCKMATKPPTVAKLKELLKLAEVAYSSKDKKDDIVRLCEDNGLIARPPPEYKTVEKMCVVKCALKKAMSLDDEEFGKFREHVDQLVNVVSRMLRRSSLVLTFHVTRLMEGDLPIPNMYDMKDTYWKDWLRIGVDGVFPDEESRISYEAVKDVIGKVLGSDDPDYINSYPIYFDQVLNYAGHTLSTVVSNNAWVPLVPRLTRLTKATLNALEAPKTIRVYDVMRVIQQEIQEMESWPESVQEYVREVRVRLKVPDGSRLYDDYGKDMDFPTMVRFNYWMQTRLEAIGARRIRLMPIFNVQRAHVRLDMKTLVNLFRHVFPKDPNIVELSKWKDVKDPDRFMLPLKPAFKKKKSCGPGGWEAYKLAQQKYDAGVNDIKDTDEYRHAKGRYDTLVNARKTVAGSFFKKPPVKTGWVFDCSICTDGVSLSMQYSKTVQVRVSDLKKTSKRSRDDEGMSSEQYDHKLKTTLPDMGIVVLGVDPGRSNIATVTYLADDNSKTWKLTRGAFYHKSGIKKQKKQQEKRFSDMIPRWESLRENGAALSTSRTDDISAYLKNYDTFSDEWWRMALLRRESRDNFQRYIGKRKAMDSFWAGIKRNMKLDHPDLRVRVAYGSAITTLKATGPGEVAVPTGSMFASCKRLFKEEVHVTDEFKTTLMSWETGAKKECVYKIPSVQITTEGQIRLGYELLGHTPLKETPKVSYRDQLAVRVYCTRKQIQEKHRRGGLAPSLVDNNSIKRYPEVRGLRFSPETSTYSDRDRSSALTIARLHCMELLGQGRPLPFCRDACC

SEQ ID NO: 1113 - protein, 347 aa, Chlamydomonas sp.
GGRGRKMPNPYFKNRQWLLQCPKSVRQSAIKSALANIKACFSNLKAGNIKQFSAPFRRKKTELERGWVIEMDQKNVSKDGDKLFIFKEILGNMRYFGSKQLHKLMPEENPTHDPKVHKSRFGEYFLVLSVAARDRRAERKPVNPDKVATASIDPGVRKTMVTYSPENEESFMLGQGQASDLVKLLLVHDKLQSRLDTEKTLRSKERMKIKKLMIRIRKTIFYLKKEFRDQTTNFLAARYDVLLVPQLETAKMTISAERELTTKVARQMLTLSHSVLFNRLKEKCEEYGTVFLHVLEHYTSQTCPMCGFLNKCGETYTCKNCQFTCDRDIVGAAGIFLKAVRTENPCS

SEQ ID NO: 1114 - protein, 248 aa, Chlamydomonas sp.
RVTDKISAYLSNYAKFSDEWWRLALRRRESRDNLQRYIGKRKVKDSFWAGIKRCMMKELPGMKVCVAYGSAITKLKPTGPGEVAVPTGAMFASCKRIFKEDVSVTDEFKTTLMSWETGKEKERVYKIPSVCSADVNLRLGGERFGHTKSKTMPKVADCDHLGVRLYNKRKGAQEKHRRGGFATSLVDSQKSIERYPEVRGLRFSPETCIYSDRDRSSALTIARLHCMELMGLGRPLPFAHSSSVVVDE

SEQ ID NO: 1115 - protein, 793 aa, Chlamydomonas sp.
KMATKPPTVAKLKELLKLAEVPYSSKSNKDDLVRLCEDNGLIARPPPEYKTVEKMCVVKCALKKAMSLDDEEFGKFREHVDQLVNVVSRMLRRSSLVLTFHITSLLEKGLDIPDLYNMKDTYWKDWLRIGVDGIFPDEESKISYEAVKDSIGDVIGNDDADYIKSYPIYFDQVLNYAGHTLSTVVSNNAWVPLIPRLARLTSTTLNKLNAPKTLDTSKIIRGYDVMQAIQQEVQNMEGWPESVQEYVNEVREMLSVPDGSRVYDNYGKDMDFPTMVRFNYWIQTRLEDMDARRIRLMPIFNVQRVHVRLDLKTLVNLFRHMFPNDQNIVELSKWEHVKNPDSFMLPQRPAQKKKKSCGPGEWEAYKSVLKKYDDDVKDIKATDEYRHAKGLYDTLVNARKTVAGSFFRKPPVKNGWVFDCSICTDGVSLSMQYSKTVQVLVSDLKKTCKKPRKEEGIKIAEKYDGSLKTILPDMGIVVLGVDPGRSNIATVTYLADDKNKTWTLTRGAFYHKSGIKKQTRQKELRFADMIPMWESLRENGAALSTSRTDKISAYLSNYAKFSDEWWRLALRRRESRDNLQRYIGKRKVKDSFWAGIKRCMMKELPDMKVCVAYGSAITKLKPTGPGEVAVPTGAMFASCKRIFKEDVSVTDEFKTTLMSWETGKEKERVYKIPSVCSADVKLRLGGERFGHTKSKTMPKVADCDHLGVRLYNKRKGAQEKHRRGGFATSLVDSQKSIERYPEVRGLRFSPETCIYSDRDRSSALTIARLHCMELMGLGRPLPFSHSSSVVVDE

SEQ ID NO: 1116 - protein, 307 aa, Chlamydomonas sp.
GCGRPLPTLRHDVLQQESVIIKKYRFEYMTVTCTFRRLRSLRKVCNIYNVSKSSLHRWVNADQVGKSKRLKRKRKELSMLLRSTISNNIAEIIPDRDSSSSEQIGAYARFYMGAAPILLAHRASRGYRNLRFRRYCKKQKLIVEIADFVAPRKKSAKVLVGFGDWKGLGATPISRRTCGPLQAIRFELRSRENVIMEDIDEFRTSQRCSCCENHLCNMVALTHRKKQDGTGWECTEGRKRIHKILHCKSSQSGAPRQQSGGMLHCGKTWDRDVNVPPTVMVSLCESTRHVPPTVMVSLCESTRHVPP

SEQ ID NO: 1117 - protein, 428 aa, Chlamydomonas sp.
ILYVHSDSAKMIRYNVFINRYLEATEDEGYAKLVNIAPIPTVKHSFITIDTDGLLGVLKDVGLVESLEKTLTKKEHWESVFDVENIRSTGKGVFTCTIDTDGVMACTHFLRAEKKKISIKDDGTAIKKQTKTLREFSESDPNVVVVANDPGRCNIAFLTWKKNKVEEKDKGGRKWKRHCEFGSKRLTRERYYVESGVFKSRGPTKKWLCNIQDCLDDLKDNSPKRTSLESFDAYVTVMVNHWDSRWGEMSKSRWGAQRLRIYGGKKRVLARFFNEVQADVGERKTIVIAYGSSKFAPGGKGELSVPTTSAFNAFRDRFKGRVAVIDEFRTTKIWHKDSTTVLQSVQSEKEGRTVRGLLWCSSTMENSKLFVNRDLNAAINIHNCFTMYPTRPGILARPKKYCKLEVVVGRTIDYKLTGSLQNAVSSEV

SEQ ID NO: 1118 - protein, 507 aa, Chlamydomonas sp.
AKLGSPRRTLGWTQITRNASLHAKWHSVSGGVLPLPSGNTFASRAHMTLPLYHKILSETIEEKRKTKNEKHRTFSLLPYKSGFTLSHIPISKMAFFYMVNECHFDSCKADVASKNHQGIWERFANLKKVETVSRKFGYRIVTDGFAVSILMNKPTCLTCSMPAGAFSTRAHEYVTTDEGGIVSFLDNVVVAAVDPGVTDIVTVTGLNGGTRSYSSAQYYRKGLIFKSQRQTDVWNLETADIVGGIIPDRDSSSSEQIGAYARFYMGAAPILLAHRASRGYRNLRFRRYCKKQKLIVEIADFVAPRKKSAKVLVGFGDWKGLGATPISRRTCGPLQAIRLELRSRENVIMEDIDEFRTSQRCSCCENHLCNMVALTHRKKQDGTGWECTEGRKRIHKILHCKSSQSGAPRQQSGGMLHCGKTWDRDVNASRNILMLTLHQVFGRERPLAFRRDAPRSSSTTPPPPPDTDMGTQTVERFTKEATRNIFENLFNLLHPPTLPKSNDLQSG

SEQ ID NO: 1119 - protein, 404 aa, Chlamydomonas sp.
VPLRFMQGRRCFQKPSSKMERFANLKIVETVSRKFGYRIVTDGFAVSILMNKPTCLTCSMPGDALSTRAHEYMTTDEGGILSFRDNVVVAAVDPGVTDIVTVTGLDGSTNSYSSAQYYRKGLIFKSQRQTDVWNLKTADIFGDVIPDIDSPMSQHIGAYARFYMGAAPILLAHRASRGYRNLRFRRYCKKQKLIVEIADFVAPREKSTKVLVGFGDWKGLGATPISRRTCGPLQAIRFELRSRENVIMEDVDEFRTSQRCSCCETRLCNMVALTHRKKQDGTWECTEGRKRIHKILHCKSSQSGAPRQQSGGRLHCGKTWDRDVIASKNILMLTLHQVFGRERPLAFRRDAPRGSPKKTPIPDTDMGTQTVERFTTEATRNIFENLFNLLHPPTLPKRNDLQFG

SEQ ID NO: 1120 - protein, 686 aa, Chlamydomonas sp.
METIVNKEPPDKRTRPDRAAKIKDRKNGEENVVKCTLSRIIADKDNKDVITKVIKERVDSVSKRTYLAGVAVNRILKEVFEGVPDAKLHTVSVPSVDQNFIRQLMVGSRQAHMETRDATVERFFHNNYWFREKIEGREVIVKKKKQYVGAIARYDGDRNLYSHASKKYLTNFNNHYRVHLSTWIKKFVYSKENRILAKEFKDEHGIDETVFHRYLLYDIHSWGVKEDLIAIHSLLPERTKMLLKIQHSIIGRDEINRQWLKSVSNSAKMIRYNVFINRYLEATEDEGYAKLVNIAPIPTVKHSFITIDTDGLLGVLKDVGLVESLEKTLTNKEHWESVFDVENIRSTGKGVFTCTIDTDGVMACTHFLRAEKKKISIKDDGTAIKKQTKTLRKFSESDPNVVVVANDPGRCNIAFLTWKKNKVEEKDNGGRKRKRHCEFGSKRLTRERYYVESGVFKSRGPTKKWLSNIQDCLDDLKDNSPKRTSLESFDAYVTVMVNHWDSRWGEMSKSRWGAQRLRLYGGKKRVLARFFNEVQADVGERKTIVIAYGSSKFAPGGKGELSVPTTSAFNAFRDRFKGRVAVIDEFRTTKIWHKDSTTVLQSVQSEKKGRTVRGLLWCSSTMENSKLFVNRDLNAAINIHNCFTMYPTRPGILARPKKYCKLEVVVGRTIDYKLTGSLQNAVSSEV

SEQ ID NO: 1121 - protein, 279 aa, Chlamydomonas sp.
SSTMMMLRISRLLTSTDMQRGLYDTLVNARKTVAGSFFRKPPVKNGWVFDCSICTDGVSLSMQYSKTVQVLVSDLKKTRKKPRKEEGIKIAEKYDGSLKTILPDMGIVVLGVDPGRSNIATVTYLADDKNKTWKLTRGAFYHKSGIKKQTRQKELRFADMIPMWESLRENGAALSTSRTDKISAYLSNYAKFSDEWWRLALRRRESRDNLQRYIGKRKVKDSFWAGIKRCMMKELPDMKVCVAYGSAITKLKPTGPGEVAVPTGAMFASCKRISKRTFL

SEQ ID NO: 1122 - protein, 491 aa, Chlamydomonas sp.
RETLLCTRSGILSQGGSTFTIRKHFCVSGSHDPASVPQDIVGDHRRKRKTKNEKHRTFSLLPYKSGFTLSHIPISKMAFFYMVNECHFDSCKADVASKNHQGIWERFANLKKVETVSRKFGYRIVTDGFAVSILMNKPTCLACSMPAGAFSTRAHEYVTTDEGGIVSFLDNVVVAAVDPDVTDIVTVTGLNGGTRSYSSAQYYRKGLIFKSQRQTDVWNLETADIVGGIIPDRDSSSSEQIGAYARFYMGAAPILLAHRASRGYRNLRFRRYCKKQKLIVEIADFVAPRKKSAKVLVGFGDWKGLGATPISRRTCGPLQAIRFELRSRENVIMEDIDEFRTSQRCSCCENHLCNMVALTHRKKQDGTGWECTEGRKRIHKILHCKSSQSGAPRQQSGGMLHCGKTWDRDVNASRNILMLTLHQVFGRERPLAFRRDAPRSSSTTPPPPPDTDMGTQTVERFTKEATRNIFENLFNLLHPPTLPKSNDLQSG

SEQ ID NO: 1123 - protein, 643 aa, Chlamydomonas sp.
PRMEHVCDVCIKSSVMYKLCKMATKPPTVAKLKELLKLAEVAYSSKDKKDDIVRLCEDNGLIARPPPEYKTVEKMCVVKCALKKAMSLDDEEFGKFREHVDQLVNVVSRMLRRSSLVLTFHITSLLEKGLDIPDLYNMKDTYWKDWLRIGVDGIFPDEESKISYEAVKDSIGDVIGNDDADYIKSYPIYFDQVLNYAGHTLSTVVSNNAWVPLIPRLARLTSTTLNKLNAPKTLDTSKIIRGYDVMQAIQQEVQNMEGWPESVQEYVNEVREMLSVPDGSRVYDNYGKDMDFPTMVRFNYWIQTRLEDMDARRIRLMPIFNVQRVHVRLDLKTLVNLFRHMFPNDQNIVELSKWEHVKNPESFMLPQRPAQKKKKSCGPGEWEAYKSVLKQYDDDVKDIKATDEYRHAKGLYDTLVNARKTVAGSFFRKPPVKNGWVFDCSICTDGVSLSMQYSKTVQVLVSDLKKTCKKPRKEEGIKIAEKYDGSLKTILPDMGIVVLGVDPGRSNIATVTYLADDKNKTWTLTRGEFYHKSGIKKQTRQKELRFANMIPMWESLRENGAALSTSRTDKISSYLSNYAKFSDEWWRLALRRRESRDNLQRYIGKRKVKDSFWAGIKRCMMKKLPDMKVCVAYGSAITKLKPT

SEQ ID NO: 1124 - protein, 687 aa, Chlamydomonas sp.
GNVGAILYHQKKKNTHPLLMGVVQDKGDDDINISVVKKTLNSLCMDVSRHQISSRIQSMVLLINHAVAEAYLFANFHITRCLDDGDFDVKQLPHLDRNFYYRCLLAVSTSNVRKDTLGQSFNDTMVAFDALRPAGYVKVDVRPWGQVIADVSIQMATLACNSVWANVDRVVIKYLRLKHPSLKKHFKKIVKAVVQYPESKIDTIIPEGLVHAIHIKEVVSHLRALFPLPRGKQFNTRAHLTMRLFHHVLTELGEVGRVNPKEKIKKKSPPSVQYPSSQERLHKTYVSISSMTFMKLLSMGDSPLESVSGDGRYENHTMLWRKYFNVQGLKTKRSRFDNRILSDGKGVSVQMKQKGKEEVVEEGENAGYPKDANIVECKDAVGALRVGVDPGMTDIVTVVSSAGRIESFSSARFSEVAGYNTSKRHTYKWNDETQDFVKSIPSPNTSNMVDLQDHVRAYLKALPILLQHRANKGYRSMRFFRYVGKQKTIEKVCDVIAPRAQTTVVGFGNWSNQGYGISRSCSGPIKEIRRCLSRRKNVLFKNVDERNTFCKCHGCFQRLVNMKADSVVWRGVCKESPINGSITVEKQKMVVKNVKVHKGLHCRDSVKSASSNVRCGATWNRDVNAAKNLLLLLTTWMDGRERPEAFCVPSPPPKTTVSIEASVSAKSTDPPGFVSSLPCYPLGQLKC

SEQ ID NO: 1125 - protein, 643 aa, Chlamydomonas sp.
LHQLLPYFDQVLNYAGHTLSTVVSNNAWVPLVPRLTRLTKATLNALGAPKTIRVYDVMRVIQQEIQEMESWPESVQEYVREVRVRLKVPDGSRLYDDYGKDMDFPTMVRFNYWMQTRLEAIGARRIRLMPIFNVQRAHVCLDMKTLVNLFRHVFPKDPNIVELSKWENVKDPDRFMLPLKPAVKKKKSCGPGEWEAYKLAQQKYDADVKDIKATDEYRHAKGRYDTLVNFRKTVAGSFFKKPPVKTGWVFDCSICTDGVSLSMQYSKTVQVRVSDLKKTSKRSRDDEGMSVSEQYDHKLKTTLPDMGIVVLGVDPGRSNIATVTYLADDKSKTWKLTRGAFYHKSGIKKQKKQQEKRFSDMIPRWESLRENGAALSTSRKDDISAYLKNYATFSDEWWRMALRRRESRDNFQRYIGKRKAMDSFWAGIKRNMKLDHPDVRVRVAYGSAITKLKATGPGEVAVPTGSMFASFKRLFKEEVHVTDEFKTTLMSWETGAKKECVYKIPSVQITTEGQIRLGYELLGHTPLKETPKVSYRDQLAVRVYCTRKRIQEKHRRGGLAPSLVDNNSIKRYPEVRGLRFSPETSTYSDRDRSSALTIARLHCMELLGQGRPLPFCRDACCWATKKHDGVPLQYGLLHNKVTP

SEQ ID NO: 1126 - protein, 686 aa, Chlamydomonas sp.
METIVNKEPPDKRTRPDRAAKIKDRKNGEENVVKCTLSRIIADKDNKDVITKVIKERVDSVSKRTYLAGVAVNRILKEVFEGVPDAQLHTVSVPSVDQNFIRQLMVGSRQAFMETRDATVERFFHNNYWFREKIEGREVIVKKKKQYVGAIARYDGDRNLYSHASKKYLTNFNNHYRVHLSTWIKKFVYSKENRILAKEFKDEHGIDETVFHRYLLYDIHSWGVKEDLIAIHSLLPERTKMLLKIQHSIIGQDEINRQWLKSVSNSAKMIRYNVFINRYLEATEDEGYAKLVNIAPIPTVKHSFITIDTDGLLGVLKDVGLVESLEKTLTNKEHWESVFDVENIRSTGKGVFTCTIDTDGVMACTHFLRAEKKKISIKDDGTAIKKQTKTLREFSESDPNVVVVANDPGRCNIAFLTWKKNKVEEKDNGGRKRKRHCEFGSKRLTRERYYVESGVFKSRGPTKKWLSNIQDCLDDLKDNSPKRTSLESFDAYVTVMVNHWDSRWGEMSKSRWGAQRLRLYGGKKRVLARFFNEVQADVGERKTIVIAYGSSKFAPGGKGELSVPTTSAFNAFSDRFKGRVAVIDEFRTTKIWHKDSTTVLQSVQSEKKGRTVRGLLWCSSTMENSKLFVNRDLNAAINIHNCFTMYPTRPGILARPKKYCKLEVVVGRTIDYKLTGSLQNAVSSEV

SEQ ID NO: 1127 - protein, 506 aa, Chlamydomonas sp.
AKLGSPRRTLGWTQITKRFFAREVAFCLRGVLPLPSGNTFASRAHMTLPLYHKILSETIEEKRKTKNEKHRTFSLLPYKSGFTLSHIPISKMAFFYMVNECHFDSCKADVASKNHQGIWERFANLKKVETVSRKFGYRIVTDGFAVSILMNKPTCLTCSMPADAFSTRAHEYVTTDEGGIVSFLDNVVVAAVDPGVTDIVTVTGLNGGTRSYSSAQYYRKGLIFKSQRQTDVWNLETADIVGGIIPDRDSSSSEQIGAYARFYMGAAPILLAHRASRGYRNLRFRRYCKKQKLIVEIADFVAPRKKSAKVLVGFGDWKGLGATPISRRTCGPLQAIRFELRSRENVIMEDIDEFRTSQRCSCCENHLCNMVALTHRKKQDGTGWECTEGRKRIHKILHCKSSQSGAPRQQSGGMLHCGKTWDRDVNASRNILMLTLHQVFGRERPLAFRRDAPRSSSTTPPPPPDTDMGTQTVERFTKEATRNIFENLFNLLHPPTLPKSNDLQSG

SEQ ID NO: 1128 - protein, 283 aa, Chlamydomonas sp.
HKSGIKKQTRQKELRFADMIPMWESLRENGAALSTSRTDKISAYLSNYAKFSDEWWRLALRRRESRDNLQRYIGKRKVKDSFWAGIKRCMMKELPGMKVCVAYGSAITKLKPTGPGEVAVPTGAMFASCKRIFKEDVSVTDEFKTTLMSWETGKEKERVYKIPSVCSADVNLRLGGERFGHTKSKTMPKVADCDHLGVRLYNKRKGAQEKHRRGGFATSLVDSQKSIERYPEVRGLRFSPETCIYSDRDRSSALTIARLHCMELMGLGRPLPFAHSSSVVVDE

SEQ ID NO: 1129 - protein, 813 aa, Chlamydomonas sp.
PRMEHVCDVCIKSSVMYKLCKMATKPPTVAKLKELLKLAEVAYSSKDKKDDIVRLCEDNGLIARPPPEYKTVEKMCVVKCALKKAMSLDDEEFGKFREHVDQLVNVVSRMLRRSSLVLTFHITSLLEKGLDIPDLYNMKDTYWKDWLRIGVDGIFPDEESKISYEAVKDSIGDVIGNDDADYIKSYPIYFDQVLNYAGHTLSTVVSNNAWVPLIPRLARLTSTTLNKLNAPKTLDTSKIIRGYDVMQAIQQEVQNMEGWAESVQEYVNEVREMLSVPDGSRVYDNYGKDMDFPTMVRFNYWIQTRLEDMDARRIRLMPIFNVQRVHVRLDLKTLVNLFRHMFPNDQNIVELSKWEHVKNPESFMLPQRPAQKKKKSCGPGEWDAYKSVLKQYDDDVKDIKATDEYRHAKGLYDTLVNARKTVAGSFFRKPPVKNGWVFDCSICTDGVSLSMQYSKTVQVLVSDLKKTCKKPRKEEGIKIAEKYDGSLKTILPDMGIVVLGVDPGRSNIATVTYLADDKNKTWKLTRGAFYHKSGIKKQTRQKELRFADMIPMWESLRENGAALSTSRTDKISAYLSNYAKFSDEWWRLALRRRESRDNLQRYIGKRKVKDSFWAGIKRCMMKELPGMKVCVAYGSAITKLKPTGPGEVAVPTGAMFASCKRIFKEDVSVTDEFKTTLMSWETGKEKERVYKIPSVCSADVNLRLGGERFGHTKSKTMPKVADCDHLGVRLYNKRKGAQEKHRRGGFATSLVDSQKSIERYPEVRGLRFSPETCIYSDRDRSSALTIARLHCMELMGLGRPLPFAHSSSVVVDE

SEQ ID NO: 1130 - protein, 280 aa, Chlamydomonas sp.
SSSLSVKLTFGTSRRLISSVVSFRIETLRVLNRLVRTPDSTCAPILLAHRASRGYRNLRFRRYCKEQKLIVEIADFVAPRKKSAKVLVGFGDWKGLGATPISRRTCGPLQAIRFELRSRENVIMEDIDEFRTYQRCSCCENHLCNMVALTHRKKQDGTGWECIEGRKRIHKILHCKSSQSGAPRQQSGGMLHCGKTWDRDVNASRNILMLTLHQVFGRERPLAFRRDAPRSSSTPPPPDTDMGTQTVERFTKEATRNIFENLFNLLHPPTLPKSNDLQSG

SEQ ID NO: 1131 - protein, 601 aa, Chlamydomonas sp.
QCIRNLHVLNIRIPCMATTSVKLARPPMPLVSPGPSSVDGRIMARSERSGLQATNVSLTQAASKATSSSRKKNPAVVKSFSTHVCPHTNNNPTCSDSNCSCKPIFLTNIPDASKSLKSRTSDQGSTSSAQDFYEYWDSSRQDLYRQLLWLPKTGSQGLVSSSLNGFARSTPARSSFSITKTEPLKTSLEKTSCPSFKYIVADGTVEDATKSNAKPKLRTLKLKLNPTKAQKSMMAEFAGCSRFMYNKAVAARLGVGSTHKSVFRIRDRYVTNKVRGEGKMPNTYFKNSQWLLQCPKSVRQSAIKAALANIKACFSNLKAGNIKQFSAPFRWKKTELERGWAIDMDQKNVSKDGDKLFIFKDILGNMRYFGSKQLHKLMPEENPTHDPKVKKSRFGEYFLVLSVAARDRRAERKPVHPDKVATASIDPGVRKTMVTYSPENEESFMLGQGQASDLVKLLLVYDKLQSRLDTEKTLRSKERMKIKMQMIRIRKRIFYLKKEFRDQTTNFLAARYDVLLVPQLETAKMTISAERELTTKVARQMLTLSHSMLFNRLKEKCEEYGTVFLHVLEHYTSQTCPMCVTCGIKKNKLETWNNPEYMTVL

SEQ ID NO: 1132 - protein, 621 aa, Chlamydomonas sp.
QCIRNLHVLNIRMPCMATKASVKLARPPMPLVSPGPSSVDGRIMARSERSGLQATNVSLTQAASKATSLSRKKKPAVVKSFSTHVCPHTNNNPTCSDSNCSCKPIFLTNIPDASKSLKSRTSDQGSTSSAQDFYEYWDSSRQDLYRQLLWLPKTGSQGLVSSSLNGFARSTPARSSFSITKTEPLKTSLEKTSCPSFKYIVADGTVEDATKSNAKPKLRTLKLKLNPTKAQKSMLAEFAGCSRFMYNKAVAARLGVGSTHKSVFRIRDRYVTNKVRGKGKMPNPYFKNRQWLLQCPKSVRQSAIKSALANIKACFSNLKAGNIKQFSAPFRRKKTELERGWVIEMDQKNVSKDGDKLFIFKEILGNMRYFGSKQLHKLMPEENPTHDPKVQKSRFGEYFLVLSVAARDRRADRKPVHPDKVATASIDPGVRKTMVTYSPENEESFMLGQGQASDLVKLLLVHDKLQSRLDTEKTLRSKERMKIKKLMIRIRKTIFYLKKEFRDQTTNFLAARYDVLLVPQLETAKMTISAERELTTKVARQMLTLSHSVLFNRLKEKCEEYGTVFLHVLEHYTSQTCPMCGFLNKCGETYTCKNCQFTCDRDIVGAAGIFLKAVRTENPCS

SEQ ID NO: 1133 - protein, 503 aa, Chlamydomonas sp.
YMMISRQEKNTPSSVRRLRDLLPLPRGKQFNTRAHLTMRLFHHVLTELGADLKEKTTKKRPRLFSILPRKSGFTISYVPISSMTLMKLLSMGDSPLESFRGDGRHENHSMLWRKYFNVQGLETKGSRFDNRILSDGKGVSVQMKHQASEDVAVEGRDNAGYPKDAILEDCQDASLRVGVDPGMTDIVTIASSDGRVESFSSAHFSEAAGYNTSNRRTNKWNADTQDLVKSIPSPTTSSMHDMQDHVRGYLSALPTLLQHRANRGYRSMRFFRYVGKQKTIEKVCDLIAPKAQKKTIEEKVCDVIAPKAKKTVVGFGNWSNQGYGISRSCSGPVKEIRKCLSRRQNVLFKNVDERNTSCTCHGCFQKLVNMKADSVAWRRVKNEPSALIDGAPTTTTTTTFEKQKTVVKNVKVHKVLHCRNSVKSASSNVRCGATWNRDVNAAKNLLLLLTTWMDGKERPAAFCVPSSSPTPKTTVSGEANVGAQPTDPPGSVSSLQLLSSGPA

SEQ ID NO: 1134 - protein, 682 aa, Chlamydomonas sp.
SIKSLRTSVRDRTGRPKLRTGKRRQENVVKCTLSRIIADKDNKDVITKVIKDRVDSVSKRTYLAGVAVNRILKEVFEGVPDAQLHTVSVPSVDQNFIRQLMVGSRQAHMETRDATVERFFHNNYWFREKIEGREVIVKKKKQYVGAIARYDGDRNLYSHASKKYLTNFNNHYRVHLSTWIKKFVYSKENRILAKEFKDEHGIDDIVFHRYLLYDIHSWGVKEDLIAIHSLLPERTKMLLKIQHSIIGRDEINRQWLKSVSNSAKMIRYNVFINRYLEATEDEGYAKLVNIAPIPTVKHSFITIDTDGLLGVLKDVGLVESLEKTLTNKEHWESVFDVENIRSTGKGVFTCTIDTDGVMACTHFLRAEKKKISIKDDGTAIKKQTKTLREFSESDPNVVVVANDPGRCNIAFLTWKKNKVEEKDKGGRKRKRHCEFGSKRLTRERYYVESGVFKSRGPTKKWLSNIQDCLDDLKDNSPKRTSLESFDAYVTVMVNHWDSRWGEMSKSRWGAQRLRLYGGKKRVLARFFNEVQADVGEWKTIVIAYGSSKFAPGGKGELSVPTTSAFNAFSDRFKGRVAVIDEFRTTKIWHKDSTTVLQSVQSEKEGRTVRGLLWCSSTMENSKLFVNRDLNAAINIHNCFTMYPTRPGILARPKKYCKLEVVVGRKIDYKLTGSLQNAVSSEV

SEQ ID NO: 1135 - protein, 310 aa, Chlamydomonas sp.
SPERSSVATSAMSTNNAHYYVVQRENMNSGQILRVNSIMVTWKKNKVEEKDKGGRKRKRHCEFGSKRLTRERYYVESGVFKSRGPTKKWLSNIQDCLDDLKDNSPKRTSLESFDAYVTVMVNHWDSRWGEMSKSRWGAQRLRLYGGKKRVLARFFNEVQADVGERKTIVIAYGSSKFAPGGKGELSVPTTSAFNAFSDRFKGRVAVIDEFRTTKIWHKDSTTVLQSVQSEKKGRTVRGLLWCSSTMENSKLFVNRDLNAAINIHNCFTMYPTRPGILARPKKYCKLEVVVGRTIDYKLTGSLQNAVSSEV

SEQ ID NO: 1136 - protein, 832 aa, Chlamydomonas sp.
NHYGLFSPRMEHVCDVCIKSSVMYKLCKMATKPPTVAKLKELLKLAEVAYSSKDKKDDIVRLCEDNGLIARPPPEYKTVEKMCVVKCALKKAMSLDDEEFGKFRGHVDQLVNVVSRMLRRSSLVLTFHVTRLMEGDLPIPNMYDMKDTYWKDWLRIGVDDVFPDEESRISYEAVKGVIGKVLGSDDPDYINSYPIYFDQVLNYAGHTLSTVVSNNAWVPLVPRLTRLTKDTLKALGAPKTIRVYDVMRVIQQEIQEMESWPESVHEYVREVRVRLKVPDGSRLDDDYGKDMDFPTMVRFNYWMQTRLEAIGARRIRLMPIFNVQRAHVRLDMKTLVNLFRHVFPKDPNIVELSKWENVKDPDRFMLPLKPSVKKKKSCGPREWEAYKLAQQKYDADVKDIKATDEYRHAKGRYDTLVNAQKTVAGSFFKKPPVKTGWVFDCSICTDGVSLSMQYSKTVQVRVSDLKKTSKRSRDEEGMSVSEQYDHKLKTTLPDMDIVVLGVDPGRSNIATVTYLADDKSKIWKLTRGAFYHKSGIKKQKKQQEKRFSDMIPRWESLRENGAALSTSRKDDISAYLKNYATFSDEWWRMALRRRESRDNFQRYIGKRKAMDSFWAGIKRNMKLDHPDLRVRVAYGSAITKLKATGPGEVAVPTGSMFASCKRLFKEEVHVTDEFKTTLMSWDTGAKKECVYKIPSVQITTKGQIRLGYELLGHTPLKETPKVSYRDQLAVRVYCTRKKIQEKHRRGGLAPSLVDNNSIKRYPEVRGLQFSPETSTYSDRDRSSALTIARLHCMELLGQGRPLPFCRDACCWATKKHDGVPLQCGLLHHKVTP

SEQ ID NO: 1137 - protein, 326 aa, Chlamydomonas sp.
CNVKNPDSFMLPQRPAHKKKKSCGPGEWEAYKSVLKQYDDDVKDIKATDEYRHAKGLYDTLVNARKTVAGSFFRKPPVKNGWVFDSSICTDGVSLSMQYSKTVHVLVSDLKKTCKKPRKEEGIKIAEKYDGSLKTILPDMGIVVLGVDPGRSNIATVTYLADDKNKTWTLTRGAFYHKSGIKKQTRQKELRFADMIPMWESLRENGAALSTSRTDNISAYLSNYAKFSDEWWRLALRRRESRDNLQRYIGKRKVKDSFWAGIKRCMIKELPDMKVCVAYGSAITKLKPTGPGEVAVPTGAMFASCKRIFKEDVSVTDEFKTTLMSW

SEQ ID NO: 1138 - protein, 621 aa, Chlamydomonas sp.
QCIRNLHVLNIRMPCMATNASVKLARPPMPLVSPGPSSVDGRIMARSERSGLQATNVSLTQAASKATSSSRKKKPAVVKSFSTHVCPHTNNNPTCSDSNCSCKPIFLTNIPDASKSLKSRTSDQGSTSSAQDFYEYWDSSRQDWYRQLLWLPKTGSQGLVSSSLNGFARSTPARSSFSITKTEPLKTSLDKTSCPSFKYIVADGTVEDATKSNAKTKLRTLKLKLNPTKAQKSMLAEFAGCSRFMYNKAVAARLGVGSTHKSVFRIRDRYVTNKVRGKGKMPNPYFKNRQWLLQCPKSVRQSAIKAALANIKACFSNLKAGNIKQFSAPFRRKKTELERGWAIEMDQKNVSKDGDKLFIFKDILGNMRYFGSKQLHKLMPEENPTHDPKVQKSRFGEYFLVLSVAARDRRAERKPVHPDKVATASIDPGVRKTMVTYSPENEESFMLGQGQASDLVKLLLVHDKLQSRLDTEKTLRSKERMKIKKQMIRIRKRIFYLKKEFRDQTKNFLAARYDVLLVPQLETAKMTISAERELTTKVARQMLTLSHSVLFNRLKEKCAEYGTVFLHVLEHYTSQTCPMCGFLNKCGETYTCKNCQFTCDRDIVGAAGIFLKAVRTENPCS

SEQ ID NO: 1139 - protein, 547 aa, Chlamydomonas sp.
YYITKRKIILTPLLMGVVQDKGDDDINISVVKKTLNSLCMDVSRHQISSRIQSMVLLINHAVAEAYLFANFHITRCLDDGDFDVKQLPHLDRNFYYRCLLAVSTSNVRKDTLGQSFNDTMVAFDALRPAGYVKVDVPPWGQVIADVSIQMATMACNSVWANVDRVVIKYLRLKHPSLKKHFKKIVKAVVQYPESKIDTIIPEGLVHAIHIKEVVSHLRALFPMPRGKQFNTRAHLTMRLFHHVRTELGEVGRVDPKDKKTRKSHPRLFSILPRKNGFTISYVPISSMTFMKLLSMGDSPLESVSGDGRYENHTMLWRKYFNVQGLETKRSRFDNRILSDGKGVSVQMKQKGKEEVVEEGENAGYPKDANIVECKDAVGALRVGVDPGMTDIVTVASSAGRIESFSSARFSEVAGYNTSKRRTYKWNDETQDLVKSIPSPNTSNKSDLQDHVRAYLKALPILLQHRANKGYRSMRFFRYVGKQKTIEKVCDVIAPRAQTTVVGFGNWSNQGYGISRSCSGPIKEIRRCLSRRKNVLFKNVDERNTSCK

SEQ ID NO: 1140 - protein, 256 aa, Chlamydomonas sp.
IPTMRYFGSKQLHKLMPEENPTHDPKVHKSRFGEYFLVLSVAARDRRAERKPVHPDKVATASIDPGVRKTMVTYSPENEESFMLGQGQASDLVKLLLVHDKLQSRLDTEKTLRSKERMKIKMQMIRIRKRIFYLKKEFRDQTTNFLAARYDVLFVPQLETAKMTISAERELTTKVARQMLTLSHSVLFNRLKEKCEEYGTVFLHVLEHYTSQTCPMCGFLNKCGETCKNCQFTCDRDIVGAAGIFLKAVRTENPCS

SEQ ID NO: 1141 - protein, 546 aa, Chlamydomonas sp.
YGITKIIMGVVTNNGDDDNLDIMVVKKTLNSLCMDVSRQQICSRIQSMVLVINHAVAEAYLFANFHITRCLDDGDFDVKQLPHLDRNFYYRCILAVSTSNVRKDTLGQSLKDSMVAFDALRPAGYLKVDVRQWGQVIADVSIQMATMACNSVWANVDRVVIKYLCLKHPSLKKHFNKIVKAVVQYPESDIDKIIPASLVHANLIKDVVRRLRDLLPVPRGKQFNTRAHLTMRLFHHVLTELGADLKEKTTKKRPRLFSILPRKSGFTISYVPISSMTLMKLLSMGDSPLESVRGDGRHENHSMLWRKYFNVQGPETKGSRFDNRILSDGKGVSVQMKHQVGKDIAGEGGGGNAGYPKDASTEDCQDASLRQGALRVGIDPGMTDIVTIASSDGRVESFSSAHFSEAAGYNTSNRRTNKWNADTQDLVKSIPSPTTSSMHDMQDHVRGYLSALPTLLQHRANRGYRSMRFFRYVGKQKTIEKVCDLIAPKAQKKTIEEKVCDVIAPKAKKTVVGFGDWSNQGYGISRSCSGPVKEIRKCLSRRQNVL

SEQ ID NO: 1142 - protein, 631 aa, Chlamydomonas sp.
QCIRNLHVLNIRMPCMATNVSVKLARPPMPLVSPGPSSVDGRIMARSERSGLQATNVSLTQAASKATSSNRKKKPAVIKSFSTHVCPHTNNNPTCSDSNCSCKPIFLTNIPDASKSLKSRTSDQGSNSSAQDFYEYWDSSRQDLYRQLLWLPKTGSQGLVSSSFNGFARSTPARSTPARSTPARSSFSITKTEPLKTSLEKTSCPSFEYIVADGTVEDATKSNAKPKLRTLKLKLNPTKAQKSMLAEFAGCSRFMYNKAVAARLGVGSTHKSVFRIRDRYVTNKVRGEGRMPNPYFKNRQWLLQCPKSVRQSAIKAALANIKACFSNLKAGNIKQFSAPFRRKKTELERGWVIEMDQKNVSKDGDKLFIFKDILGNMRYFSSKQLHKLMPELNPTHDPKVHKSRFGEYFLVLSVAARDRRAERKPVHPDKVATASIDPSVRKTMVTYSPENEESFMLGQGQASDLVKLLLVHDKLQSRLDTEKTLRTKERMKIKMQMIRIRKRIFYLKKEFRDQTTNFLAARYNVLLVPQLETAKMTISSERELTTKVARQMLTLSHSVLFNRLKEKCEEYGTVFLHVLEHYTSQTCPMCGFLNKCGETYTCKNCQFTCDRDIVGAAGIFLKAVRTENPCS

SEQ ID NO: 1143 - protein, 688 aa, Chlamydomonas sp.
RNVGAILYHQKKKNTHPLLMGVVQDKGDDDINISVVKKTLNSLCMDVSRHQISSRIHSMVLLINHAVAEAYLFANFHITRCLDDGDFDVKQLPHLDQNFYYRCLLAVSTSNVRKDTLGQSFNNTMVAFDALRPAGYVKVDVRPWGQVIADVSIQMATMACNSIWANVDRVVIKYLRLKHPSLKKHFKKIVKAVVQYPESKIDTIIPEGLVHAIHIKEVVSHLRALFPLPRGKQFNTRAHLTMRLFHHVLTELGEVGRVDPKDKKTRKSHPRLFSILPRKNGFTISYVPISSMTFMKLLSMGDSPLESVSGDGRYENHTMLWRKYLNVQGLETKRSRFDNRILSDGKGVSVQMKQKGKEEVVEEGENAGYPQDANIVECKDAVGALRVGVDPGMTDIVTVASSAGRIESFSSARFSEVAGYNTSKRRTYKWNDETQDLVKSIPSPNTSNMSDLQDHVRAYLKVLPILLQHRANKGYRSMRFFRYVGKQKTIEKVCDVIAPRAQTTVVGFGNWSNQGSGISRSCSGPIKEIRRCLSRRKNFLFKNVDERNTSCKCHGCFQRLANMKADSVVWRGVCKESPIDGSITVEKQKMVVKNVKVHKVLHCRDSVKSASSNVRCGATWNRDVNAAKNLLVLLTTWMDGRERPEAFCVPSPPPKTTVSIEASVSAKPTDPPGFVSSLPCYPLGQLKC

SEQ ID NO: 1144 - protein, 287 aa, Chlamydomonas sp.
MGVSRENGAALSTSRKDDISAYLKNYATFSDEWWRMALRRRESRDNFQRYIGKRKAMDSFWAGIKRNMKLDHPDLRVSIAYGSAIKTMKATGPGKLVPTDLGLPTGSMFASCKRLFKEEVHVTDEFKTTLMSWETGAKKECVYKIPSVQITTEGQIRLGYELLGHTPLKETPKVSYRDQLAVRVYCTRKKIQEKHRRGGLAPSLVDNNSIKRYPEVRGLRFSPETSTYSDRDRSSALTIARLHCMELLGQGRPLPFSRCKAACCCWATKKHDGVPLQCGLLHHKVTP

SEQ ID NO: 1145 - protein, 801 aa, Chlamydomonas sp.
PRMEHVCDVGIKSSVMYKLCKMATKPPTVAKLKELLKLAEVAYSSKDKKDDIVRLCEDNGLIARPPPEYKTVEKMCVVKCALKKAMSLDDEEFGKFREHVDQLVNVVSRMLRRSSLVLTFHVTRLMEGDLPIPNMYDMKDTYWKDWLRIGVDGVFPDEESRISYEAVKDVIGKVLGSDDPDYINSYPIYFDQVLNYAGHTLSTVVSNNAWVPLVPRLTRLTKATLNALKAPKTIRVYDVMRVIQQEIQEMESWPESVQEYVREVRVRLKVPDGSRLYDDYGKDMDFPTMVRFNYWMQTRLESIGARRIRLMPIFNVQRAHVRLDMKTLVNLFRHVFPKDPNIVELSKWKDVKDPDRFMLPLKPAVKKKKSCGPGEWEAYKLAQQKYDADVNDIKDTDEYRHAKGRYDTLVNARKTVAGSFFKKPPVKTGWVFDCSICTDGVSLSMQYSKTVQVRVSDLKKTSKRSRDDEGMSVSEQYDHKLKTTLPDMGIVVLGVDPGRSNIATVTYLADDKSKTWKLTRGAFYHKSGIKKQKKQQEKRFSDMIPRWESLRENGAALSTSRTDDISAYLKNYDTFSDEWWRMALLRRESRDNFQRYIGKRKAMDSFWAGIKRNMKLDHPDLRVRVAYGSAITTLKATGPGEVAVPTGSMFASCKRLFKEEVHVTDEFKTTLMSWETGAKKECVYKIPSVQITTEGQIRLGYELLGHTPLKETPNVSYRDQLAVRVYCTRKQIQEKHRRGGLAPSLVDNKSIKRYPEVRGLRFSPETSTYSDRDRSSALTIARLHCMELLGQGRPLPFCRDA

SEQ ID NO: 1146 - protein, 618 aa, Chlamydomonas sp.
QCIRNLHVLNIRMPCMATKASVKLARPPMPLVSPGPSSVDGQIMARSERSGLQATNVSLTQAASKATSSSRKKKPAVVKSFSTHVCPHTNNNTTCSDSNCSCKPIFLTNIPDASKSRTSDQGSTSSALDFYEYWDSSRQDMYCQLLWLPKTGTQGLVSSSFNGFAHSTPTRSSFSITKTEPLKTSLEKTSCPSFKYIVTDGTVEDATKSNAKPKLRTLKLKLNPTKAQKSMLAEFAGCSRFMYNKAVAARLGVGSTHKSVFRIRDRYVTNKVRGEGKMPNPYFKNRQWLLQCPKSVRQSAIKSALANIKACFSNLKAGNIKQFSAPFRRKKTELERGWVIEMDQKNVSKDGDKLFIFKEILGNMRYFGSKQLHKLMPEENPTHDPKVQKSRFGEYFLVLSVAARDRRAERKPVNPDKVATASIDPGVRKTMVTYSPENEESFMLGQGQASDLVKLLLVHDKLQSRLDTEKTLRSKERMKIKKLMIRIRKTIFYLKKEFRDQTTNFLAARYDVLLVPQLETAKMTISAERELTTKVARQMLTLSHSVLFNRLKEKCEEYGTVFLHVLEHYTSQTCPMCGFLNKCGETYTCKNCQFTCDRDIVGAAGIFLKAVRTENPCS

SEQ ID NO: 1147 - protein, 615 aa, Chlamydomonas sp.
QCIRNLHVLNIRMPCMATNASVKLARSPMPVVSPGPSSVDGRIMARSGLQATNVSLTQAASQATSSSRKKKPAVVKSFSTHVCPHTNNNPTCSDSNCSCKPIFLTNIPDASKSRTSDQGSTSSSLDFYEYWDSSRQDLYRQLLWLPKTGTQGLVSSSFNGFAHSTPTRSSFSITKTEPLKTSLEKTSCPSFKYIVTDGTVEDATKSNAKPKLRTLKLKLNPTKAQKSMLAEFAGCSRFMYNKAVAARLGVGSTHKSVFRIRDRYVTNKVRGKGKMPNPYFKNRQWLLQCPKSVRQSAIKSALANIKACFSNLKAGNIKQFSAPFRRKKTELERGWVIEMDQKNVSKDGDKLFIFKEILGNMRYFGSKQLHKLMPEENPTHDPKVQKSRFGEYFLVLSVAARDRRAERKPVNPDKVATASIDPGVRKTMVTYSPENEESFMLGQGQASDLVKLLLVHDKLQSRLDTEKTLRSKERMKIKKLMIRIRKTIFYLKKEFRDQTTNFLAARYDVLLVPQLETAKMTISAERELTTKVARQMLTLSHSVLFNRLKEKCEEYGTVFLHVLEHYTSQTCPMCGFLNKCGETYTCKNCQFTCDRDIVGAAGIFLKAVRTENPCS

SEQ ID NO: 1148 - protein, 462 aa, Chlamydomonas sp.
PCLCTTRYCRRPSKKNEKRKTKNEKHRTFSLLPYKSGFTLSHIPISKMAFFYMVNECHFNSCKADVASKNHQGIWERFANLKKVETVSRKFGYRIVTDGFAVSILMNKPTCLTCSMPADAFSTRAHEYVTTDEGGIVSFLDNVVVAAVDPGVTDIVTVTGLNGGTRSYSSAKYYRKGLIFKSQRQTDVWNLETADIVGGIIPDRDSSSSEQIGAYARFYMGTAPILLAHRASRGYRNLRFRRYCKKQKLIVEIADFVAPRKKSAKVLVGFGDWKGLGATPISRRTCGPLQAIRFELRSRENVIMEDIDEFRTSQRCSCCENHLCNMVALTHRKKQDGTGWECTEGRKRIHKILHCKSSQSGAPRQQSGGMLHCGKTWNRDVNASRNILMLTLHQVFGRERPLAFRRDAPRSSSTTPPPPPDTDMGTQTVERFTKEATRNIFENLFNLLHPPTLPKSNDLQSG

SEQ ID NO: 1149 - protein, 813 aa, Chlamydomonas sp.
PRMEHVCDVCIKSSVMYKLCKMATKPPTVAKLKELLKLAEVAYSSKDKKDDIVRLCEDNGLIARPPPEYKTVEKMCVVKCALKKAMSLDDEEFGKFREHVDQLVNVVSRMLRRSSLVLTFHITSLLEKGLDIPDLYNMKDTYWKDWLRIGVDGIFPDEESKISYEAVKDSIGDVIGNDDADYIKSYPIYFDQVLNYAGHTLSTVVSNNAWVPLIPRLARLTSTTLNKLNAPKTLDTSKIIRGYDVMQAIQQEVQNMEGWPESVQEFVNEVREMLSVPDGSRVYDNYGKDMDFPTMVRFNYWIQTRLEDMDARRIRLMPIFNVQRVHVRLDLKTLVNLFRHMFPNDQNIVELSKWEHVKNPDSFMLSQRPAQKKKKSCGPGEWDAYKSVMKQYDDDVKDIKATDEYIHAKGLYDTLVNARKTVAGSFFKKPPVKNGWVFDCSICTDGVSLSMQYSKTVQVLVSDLKKTCKNPRKEEGIKIAEKYDGSLKTILPDMGIVVLGVDPGRSNIATVTYLADDKNKTWKLTRGAFYHNSGIKKQTRQKELRFADMIPMWESLRENGAALSTSRTDKISAYLSNYAKFSDEWWRLALRRRESRDNLQRYIGKRKVKDSFWAGIKRCMMKELPDMKVCVAYGSAITKLKPTGPGEVAVPTGAMFASCKRIFKEDVSVTDEFKTTLMSWETGKEKERVYKIPSVCSAYVKLRLGGERFGHTKSKTMPKVADCDHLGVRLYNKRKGAQEKHRRGGFATSLVDSQKSIERYPEVRGLRFSPETCIYSDRDRSSALTIARLHCMELMGLGRPLPFAHSSSVVVDE

SEQ ID NO: 1150 - protein, 258 aa, Chlamydomonas sp.
GGRKRKRHCEFGSKRLTRERYYVESGVFKSRGPTKKWLSNIQDCLDDLKDNSPKRTSLVSFDAYVTVMVNHWDSRWGEMSKSRWGAQRLRLYGGKKRVLARFFNEVQADVGERKTIVVAYGSAEFAPGGKGELSVPTTSAFKAFSDRFKGRVAVIDEFRTTKIWHKDSTTVLQSVQSEKEGRTVRGLLWCSSTMENSKLFVNRDLNAAINIHNCFTMYPIRPGILARPKKYCKLEVVVGRKIDYKLTGSLQNAVSSEV

SEQ ID NO: 1151 - protein, 207 aa, Chlamydomonas sp.
YVGKQKTIEKVCDVIAPRAQTTVVGFGNWSNQGYGISRSCSGPIKEIRRCLSRRKNVLFKNVDERNTSCKCHGCFQRLVNMKADSVVWRGVCKESPIDGSITVEKQKMVVVKNVKVHKVLHCRDSVKSASSNVRCGATWNRDVNAAKNLLLLLTTWMDGRERPEAFCVPSPPPKTTVSIEASVSAKPTDPPGFVSSLPCYPLGQLKC

SEQ ID NO: 1152 - protein, 465 aa, Chlamydomonas sp.
SLQLRRKNHVVLVNGRHTSWPNRSTMLTLRISRLLTSTDMQRVGMKTVAGSFFKKPPVKTGWVFDCSICTDGVSLSMQYSKTVQVRVSDLKKTSKRSRDEEGMSVSDQYDHKLKTTLPDMGIVVLGVDPGRSNIATVTYLADDKSKTWKLTRGAFYHKSGIKKQKKQQEKRFSDMIPRWESLRENGAALSTSRKDDVSAYLKNYATFSDEWWRMALRRRESRDNFQRYIGKRKAMDSFRAEIKRNMKLDHLDLRVCVAYGSAITKLKATGPGEVAVPTGSMFASCKRLFKEEVHVTDEFKTTLMSWETGAKKECVYKIPSVQITTEGQIRLGYELLGHTPLKETPKVSYRNQLAVRVYCTRKKIQEKHRRGGLAPSFVDNNSIKRYPEVRGLRFSPETSTYSDRDRSSALTIARLHCMELLGQGRPLPFCRDACCWATKKHDGVPLQCGLLHHKVYRTLQKAVSF

SEQ ID NO: 1153 - protein, 622 aa, Chlamydomonas sp.
QCIRNLHVLNIRMPCMATNASVKLARPPMPLVSPGPSSVDGRIMARSERFGLQATNVSLTQAASKATSSSRKKNPAVVKSFSTHVCPHTNNNPTCSDSNCSCKPIFLTNIQDASKSLKSRTSDQGSTSSAQDFYEYWDSSRQDLYRQLLWLPKTGSQGLVSSSLNGFARSTPARSSFSITKTEPLKTRLDKTMSCPSFKYIVADGTVEDATKSNAKPKLRTLKLKLNPTKDQKSMLAEFAGCSRFMYNKAVAARLGVGSTHKSVFRIRDRYVTNKVRGKGKIPNPYFKNRQWLLQCPKSVRQSAIKAALANIKACFSNLKAGNIKQFSAPFRRKKTEPERGWAIEMDQKNVSKDGDKIFIFKDILGNMRYFGSKQLHKLMPEENPTHDPKVQKSRFGEYFLVLSVAARDRRAERKPVHPDKVATASIDPGVRKTMVTYSSGNEESFMLGQGQASDLVKLLLVHDKLQSRLDTEKTLRSKERMKIKKQMIRIRKIIFYLNKEFRDQTTNFLAARYDVLLVPQLETAKMTISAERELTTKVARQMLTLSHSVLFNWLKVKCEEYGTVFLHVLEHYTSQTCPMCGFLNKCGETYTCKNCQFTCDRDIVGAAGIFLKAVRTENPCS

SEQ ID NO: 1154 - protein, 686 aa, Chlamydomonas sp.
GNVGAILYHEKKKNTLPLLMGVVQDKGDDDINISVVKKTLNSLCMDVSRHQISSRIQSMVLLINHAVAEAYLFANFRITRCLDDGDFDVKQLPHLDRNFYYRCLLAVSTSNVRKDTLGQSFNDTMVAFDALRPAGYVKVDVRPWGQVIADVSIQMATMACNSVWANVDRVVIKYLRLKHPSLKKHLKKIVKAVVQYPESKIDTIIPEGLVHAIHIKEVVSHLRALFPLPRGKQFNTRAHLTMRLFHHVLTELGEVGRVDPKDKKTKKSHPRLFSILPRKNGFTISYVPISSMTFMKLLSMGDSPLESVSGDGRYENHTMLWRKYFNVQGLETKRSRFDNRILSYGKGVSVQMKQKGKEEVVEKGENAGYPKDANIVECKDAVGALRVGVDPGMTDIVTIASSAGRIESFSSARFSEVAGYNTSKRRTYKWNDETQDLVKSIPSPNTSNMVDLQDHVRAYLKALPILLQHRANKGYRSMRFFRYVGKHKTIEKVCDVIAPRAQTTVVGFGNWSNQGYGISRSCSGPIKEIRRCLSHRKNVLFKNVDERNTSCKCHGCFQRLVNMKADSVVWRGVCKESPIDGSITVEKQKMVVKNVKVHKVLHCRDSVKSASSNVRCGATWNRDVNAAKNLLLLLTTWMDGRERPEAFCVPSPPPKTTVSIGASVSAKPNRPTWVCQQLALLSFGPA

SEQ ID NO: 1155 - protein, 267 aa, Chlamydomonas sp.
RADVHNKTTNNKKYHLYEVCIVFDVVVAVNGRSSLPGRFLLVAKHGLERNCDSSVLISQASESFLGATPISRRTCGPLQAIRFELRSRENVIMEDVDEFRTSQRCSCCETRICNMVALTHRKKQDGTWECTEGRKRIHKILHCKSSQSGTPRQQSGGRLHCGKTWDRDVNASRNILMLTLHQVFGRERPLAFRREVPRKTHQHLILIWGHRRLNGLPQRRLGISSRTSSTCCTPQRCPNATICSLDDYKVCPTLFENNCMYYHGRAQ

SEQ ID NO: 1156 - protein, 322 aa, Chlamydomonas sp.
TPTALLGVLKDVGLVESLEKTLTNKEHWESVFDVENIRSTGKGVFTCTIDTDGVMACTHFLRAEKKKISIKDDGTAIKKQTKTLREFSESDPNVVVVANDPGRCCNIAFLTWKKNKVEEKIRGGRKRKRHCEFGSKRLTRERYYVESGVFKSRGPTKKWLSNIQDCLDDLKDNSPKRTSLESFDAYVTVMVNHWDSRWGEMSKSRWGAQRLRLYGGKKRVLARFFNEVQADVGERKTIVIAYGSSKFAPGGKGELSVPTTSAFNAFRDRFKGRVAVIDEFRTTKIWHKDSTTVLQSVQSEKKGARFEACYGAVPPWRTASCL

SEQ ID NO: 1157 - protein, 621 aa, Chlamydomonas sp.
QCIRNLHVLNIRMPCMATKASVKLARPPMPLVSPGPSSVDGRIMARSERSGLQATNVSLTQAASKATSLSRNNNPAVVKSFSTHVCPHTNNNPTCSDSNCSCKPIFLTNIPDASKSLKSRTSDQGSTSSAQDFYEYWDSSRQDLYRQLLWLPKTGSQGLVSSSLNGFARSTPARSSFSITKTEPLKTSLEKTSCPSFKYIVADGTVEDATKSNAKPKLRTLKLKLNPTKAQKSMLAEFAGCSRFMYNKAVAARLGVGSTHKSVFRIRDRYVTNKVRGKGKMPNPYFKNRQWLLQCPKSVRQSAIKSALANIKACFSNLKAGNIKQFSAPFRRKKTELERGWVIEMDQKNVSKDGDKLFIFKEILGNMRYFGSKQLHKLMPEENPTHDPKVQKSRFGEYFLVLSVAARDRRAERKPVNPDKVATASIDPGVRKTMVTYSPENEESFMLGQGQASDLVKLLLVHDKLQSRLDTEKTLRSKERMKIKKLMIRIRKTIFYLKKEFRDQTTNFLAARYDVLLVPQLETAKMTISAERELTTKVARQMLTLSHSVLFNRLKEKCEEYGTVFLHVLEHYTSQTCPMCGFLNKCGETYTCKNCQFTCDRDIVGAAGIFLKAVRTENPCS

SEQ ID NO: 1158 - protein, 621 aa, Chlamydomonas sp.
QCIRNLHVLNIRMPCMATKASVKLARPPMPLVSPGPSSVDGQIMARSERSGLQATNVSLTQAASKATSLSRKNNPAVVKSFSTHVCPHTNNNPTCSDSNCSCKPIFLTNIPDASKSLKSRTSDQGSTSSAQDFYEYWDSSRQDLYRQLLWLPKTGSQGLVSSSLNGFARSTPARSSFSITKTEPLKTSLEKTSCPSFKYIVADGTVEDATKSNAKPKLRTLKLKLNPTKAQKSMLAEFAGCSRFMYNKAVAARLGVGSTHKSVFRIRDRYVTNKVRAKGKMPNPYFKNRQWLLQCPKSVRQSAIKSALANIKACFSNLKAGNIKQFSAPFRRKKTELERGWVIEMDQKNVSKDGDKLFIFKEILGNMRYFGSKQLHKLMPEENPTHDPKVQKSRFGEYFLVLSVSARDRRAERKPVNPDKVATASIDPGVRKTMVTYSPENEESFMLGQGQASDLVKLLLVHDKLQSRLDTEKTLRSKERMKIKKLMIRIRKTIFYLKKEFRDQTTNFLAARYDVLLVPQLETAKMTISAERELTTKVARQMLTLSHSVLFNRLKEKCEEYGTVFLHVLEHYTSQTCPMCGFLNKCGETYTCKNCQFTCDRDIVGAAGIFLKAVRTENPCS

SEQ ID NO: 1159 - protein, 620 aa, Chlamydomonas sp.
QCIRNLHVLNIRMPCMATNASVKLARPPMPLVSPGPSSVDGRIMARSERSGLQATNVSLTQAASKATSSSRKKKPTVVKSFSTHVCPHTNNNPTCSDSNCSCKPIFLTNIPDAKSLKSRTSDQGSTSSAQDFYEYWDSSRQDLYRQLLWLPKTGSQGLVSSSLNGFARSTPARSSFSITKTEPLKTSLDKTSCPSFKYIVADGTVEYATKSNAKPKLRTLKLKLNPTKAQKSMLAEFAGCSRFMYNKAVAARLGVGSTHKSVFRIRGRYVTNKVRGKGKMPNPYFKNRQWLLQCPKSVRQSAIKAALANIKACFSNLKVGNIKQFSAPFRRKKTELERGWAIEMDQKNISKDGDKLFIFKDILGNMRYFGSKQLHKMMPEENPTHDPKVRKSRFDEYFLVLSVAARDRRAERKPVHPDKVANASIDPGVRKTMVTYSPENEESFMLGQGQASDLVKLLLVHDKLQSRLDTEKTLRSKERMKIKKQMIRIQKIIFYLKKEFRDQTTNFLAARYDVLFVPQLETAKMTISAERELTTKVARQMLTLSHSVLFNRLKEKCEEYGTVFLHVLEHYTSQTCPMCGFLNKCGETYTCKNCQFTCDRDIVGAAGIFLKAVRTENPCS

SEQ ID NO: 1160 - protein, 385 aa, Chlamydomonas sp.
IGVLHTLSPLSGVLSKLIKPSVKKKKSCGPGEWEAYKLAQQKYDADVKDIKATDEYRHAKGRYDTLVNARKTVAGSFFKKPPVKTGWVFDCSICTDGVSLSMQYSKTVQVRVSDLKKTSKRSRDEEGMSVSEQYDHKLKTTLPDMGIVVLGVDPGRSNIATVTYLADDKSKTWKLTRGAFYHKSGIKKQKKQQEKRFSDMIPRWESLRENGAALSTSRKDDISAYLKNYATFSDEWWRMALRRRESRDNFQRYIGKRKAMDSFWAGIKRNMKLDHPDLRVRVAYGSAITKLKATGPGEVAVPTGSMFASCKRIFKEEVHVTDEFKTTLMSWETGAKKECVYKIPSVQITTEGQIRLGRVVGSHPIEGDSKGLLSRPVGGEGVLHT

SEQ ID NO: 1161 - protein, 688 aa, Chlamydomonas sp.
GNVGAILYHQKKKNTHPLLMGVVQDKGDDDINISVVKKTLNSLCMDVSRHQISSRIQSMVLLINHAVAEAYLFANFHITRCLDDGDFDVKQLPHLDRNFYYRCLLAVSTSNVRKDTLGQSFNDTMVAFDALRPAGYVKVDVRPWRQVIADVSIQMATMACNSVWANVDRVVIKYLRFKHPSLKKHFKKIVKAVVQYPESKIDTIIPEGLVHAIHIKEVVSHLRALFPLPRGKQFNTRAHLTMRLFHHVLTELGEVGRVDPKDRKTKKSHPRLFSILPRKNGFTISYVPISSMTFMKLLSMGDSPLESVSGDGRYENHTMLWRKYFNVQGLETKRSRFDNRILSDGKEVSVQMKQKGKEEVVEEGENAGYPKDANIVECKDAVGALRVGVDPGMTDIVTVASSAGRIESFSSARFSEVAGYNTSKRRTYKWNDETQDLVKSIPSPNTSNMVDLQDHVRAYLTALPILLQHRANKGYRSMRFFRYVGKQKTIEKVCDVIAPRAQTTVVGFGNWSNQGYGISRSCSGPIKEIRRCLSLRKNVLFKNVDERNTSCKCHGCFQRLVNMKADIVVWRGVCKESPIDGSITVGKQKMVVKNVKVHKVLHCRDSVKSASSNVRCGATWNRDVNAAKNLLLLLTTWMDGRERPEAFCVPSPPPKTTVSIEASVSAKPTDPPGFVTSLPCYPLGQLKC

SEQ ID NO: 1162 - protein, 342 aa, Chlamydomonas sp.
STCPLNLPNSSSSRLIAFFRAHFTTHIFSTVLYSGGGLAMRPLSSHKRIISSFLSFEEYATSANFSSSFNFATVGGFVAILHNFYITELFIQTWVPPQFYMGAAPILLAHRASRGYRNLRFRRYCKKQKLIVEIADFVAPREKSAKVLVGFGDWKGLGATPISRRTCGPLQAIRFELRSRGNVIMEDVDEFRTSQRCSCCENRLCNIVALTHRKKQDGTGWECTEGRKRIHKILHCKSSQSGAPRQQSGGRLHCGKTWDRDVNASRNILMLTLHQVFGRERPLAFRRDAPRSSSKTPPPPDTDMGTQTVERFTKEATRNIFENLFNLLHPPMLPKRNDLQSG

SEQ ID NO: 1163 - protein, 786 aa, Chlamydomonas sp.
KLCKMATKPPTVAKLKELLKLAEVAYSSKDKKDDIIRLCEDNGLIARPPPEYKTVEKMCVVKCALKKAMSLDDEEFGKFRGHVDQLVNVVSRMLRRSSLVLTFHVTRLMEGDLPIPNMYDMKDTYWKDWLRIGVDGVFPDEESRISYEAVKDIIGKVLGSDDPDYINSYPIYFDQVLNYAGHTLSTVVSNIAWVPLVPRLTRLTKATLNALGAPKTIRVYDVMRVIQQEIQEMESWPESVQEYVREVRVRLKVPDGSRLYDDYGKDMDFPTMVRFNYWMQTRLEAMGARRIRLMPIFNVQRAHVRLDMKTLVNLFRHVFPKDPNIVELSKWENVKDPDRFMLPLKPAVKKKKSCGPGEWEAYKLAQQKYDADVKDIKATDEYRHAKGRYDTLVNARKTVAGSFFKKPPVKTGWVFDCSICTDGVSLSMQYSKTVQVRVSDLKKTSKRSRDEEGMSVSEQYDHKLKTTLPDMGIVVLGVDPGRSNIATVTYLADDKSKTWKLTRGAFYHKSGIKKQKKQQEKRFSDMIPRWESLRENGAALSTSRKDDISAYLKNYATFSDEWWRMALRRRESRDNFQRYIGKRKAMDSFWAGIKRNMKLDHPDLRVRVAYGSAITKLKASGPGEVAVPTGSMFASCKRLFKEEVHVTDEFKTTLMSWETGAKKECVYKIPSVQITTEGKIRLGYELLGHTPLKETPKVSYRDQLAVRVYCTRKKIQEKHRRGGLAPTLVDNKSIKRYPEVRGLRFSPETSTYSDRDRSSALTIARLHCMELLGQGRPLPFCRDACC

SEQ ID NO: 1164 - protein, 686 aa, Chlamydomonas sp.
METIVNKEPPDKRTRPDRAAKIKDRKNGEENVVKCTLSRIIADKDNKGVIIKVIKERVNSVSKRTYLAGVAVNRMLKEVFEGVPDAQLHTVSVPSVDQNFIRQLMVGSRQAHMETRDATVERFFHNNYWFREKIEGREVIVKKKKQYVGAIARYDGDRNLYSHASKKYLTNFNNHYRVHLSTWIKKFVYSKENRILAKEIKDEHGIDETVFHLYLLYDIHSWGVKEDLIAIHSLLPERTKMLLKIQHSILGRDEINRQWLKSVSNCAKMILYNVFINRYLEATEDEGYAKLVNIAPIPTVKHAFITIDTDGLLGVLKDVGLMERLEKTLTNKEHWESVFDVENIRSTGKGVFTCTIDTDGVMACTHFLRAEKKKISIKDDGTAIKKQTKTLREFSESDPNVVVVANDPGRCNIAFLTWKKNKVEEKDKGGRKRKRHCEFGSKRLTRERYYVESGVFKSRGPTKKWLSNIQDCLDDLKDNSPKRTSLVSFDAYVTVMVNHWDSRWGEMSKSRWGAQRLRLYGGKKRVLARFFNEVQEDVGERKTIVVAYGSAKFAPGGKGELSVPTTSAFNAFSDRFKGRVAIIDEFRTTKIWHKDSTTVLQSVQSEKEGRTVRGLLWCSSTMENSKLFVNRDLNAAINIHNCFTMYPIRPGILARPKKYCKLEVVVGRKIDYKLTGSLQNAVSSEV

SEQ ID NO: 1165 - protein, 422 aa, Chlamydomonas sp.
PFLCTTRYCRRPSKKNECHFESCKADVASKNHQGIWERFANLKKVEAVSRKFGYRIVTDGFAVSIMMNKPTCLTCSMPADSFSTRAHEYVTTDEGGIVSFRDNVVVAAVDSGVTDIVTVTGIDGGTRSYSSAQYYRKGLIFKSQLQTDVWNLETADIVGDIIPDRDSSRSEQIGAYARFYMGAAPILLAHRASRGYRNLRFRRYCKKQKLIVEIADFVAPREKSAKVLVGFGDWKGLGATPISRRTCGPLQAIRFELRSRGNVIMEGVDEFRTSQRCSCCENRLCNMVALTHRKKQDGTGWECTEGRKRIHKILHCKSSQSGAPRQQSGGRLHCGKTWDRNVNASRNILMLTLHQVFGRERPLAFRRDAPRSSSKTPPPPDTDMGTQTVERFTKEATRNIFENLFSLLHPPTLPKSNDLQSG

SEQ ID NO: 1166 - protein, 793 aa, Chlamydomonas sp.
KMATKPPTVAKLKELLKLAEVPYSSKSNKDDLVRLCEDNGLIARPPPEYKTVEKMCVVKCALKKAMSLDDEEFGKFREHVDQLVNVVSRMLRRSSLVLTFHITSLLEKGLDIPDLYNMKDTYWKDWLRIGVDGIFPDEESKISYEAVKDSIGDVIGNDDADYIESYPIYFDQVLNYAGHTLSTVVSNNAWVPLIPRLARLTSTTLNKLNAPKTLDTSKIIRGYDVMQAIQQEVQHMEGWPESVQEYVNEVREMLSVPDGSRVYDNYGKDMDFPTMVRFNYWIQTRLEDMDARRIRLMPIFNVQRVHVRLDLKTLVNLFRHMFPNDQNIVELSKWEHVKNPDSFMLPQRPAQKKKKSCGPGEWEAYKSVLKQYDDDVKDIKATDEYRHAKGLYDTLVNARKTVAGSFFRKPPVKNGWVFDCSICTDGVSLSMQYSKTVQVLVSDLKKTCKKPRKEEGIKIAEKYDGSLKTILPDMGIVVLGVDPGRSNIATVTYLADDKNKTWKLTRGAFYHKSGIKKQTRQKELRFADMIPMWESLRENGAALSTSRTDKISAYLSNYAKFSDEWWRLALRRRESRDNLQRYIGKRKVKDSFWAGIKRCMMKELPDMKVCVAYGSAITKMKPTGPGEVAVPTGAMFASCKRIFKEDVSVTDEFKTTLMSWETGKEKERVYKIPSVCSADVKLRLGGERFGHTKSKTMPKVADCDHLGVRLYNKRKGAQEKHRRGGFATSLVDSQKSIERYPEVRGLRFSPETCIYSDRDRSSALTIARLHCMELMGLGRPLPFAHSSSVVVDE

SEQ ID NO: 1167 - protein, 342 aa, Chlamydomonas sp.
GNCLTMRLFHHVLTELGADLKEKTTKKRPRLFSILPRKGGFTISYVPISSMTLMKLLSMGDSPLESVRGDGRHENHSMLWRKYFNVQGLETKGSRFDNRILSDGKGVSVQMKHQVGKDIAGEGGGDNAGYSKDASIEDCQDASLRQGALRVGIDPGMTDIVTIASSDGRVESFSSARFSEAAGYNTSNRRTNKWNADTQDLVKSIPSPTTSSMHDMQDHVRGYLSALPTLQHRANRGYRSMRFFRYVGKQKTIEKVCYLIAPKAQKKTIEEKVCDVIAPKAKKTVVGFGNWSNQGYGISRSCSGPVKEIRKCLSRRQNVLFKNVDERNTSCTCHGCFQKLVT

SEQ ID NO: 1168 - protein, 622 aa, Chlamydomonas sp.
METIVNKEPPDKRTRPDRAAKIKDRKNGEENVVKCTLSRIIADKDNKDVITKVIKERVDSVSKRTYLAGVAVNRILKEVFEGVPDAQLHTVSVPSVDQNFIRQLMVGSRQAHMETRDATVERFIHNNYWFREKIEGREVIVKKKKQYVGAIARYDGDRNLYSHASKKYLTNFNNHYRVHLSTWIKKFVYSKENRILAKEFKDEHGIDETVFHRYLLYDIHSWGVKEDLIAIHSLLPERTKMLLKIQHSIIGRDEINRQWLKSVSNSAKMIRYNVFINRYLEATEDEGYAKLVNIAPIPTVKHSFITIDTDGLLGVLKDVGLVESLEKTLTNKEHWESVFDVENIRSTGKGVFTCTIDTDGVMACTHFLRAEKKKISIKDDGTAIKKQTKNLREFSESDPNVVVVANDPGRCNIAFLTWKKNKVEEKDNGGRKRKRHCEFGSKRLTRERYYVESGVFKSRGPTKKWLSNIQDCLDDLKDNSPKRTSLESFDAYVTVMVNHWDSRWGEMSKSRWGAQRLRLYGGKKRVLARFFNEVQADVGERKTIVIAYGSSKFAPGGKGELSVPTTSAFNAFRDRFKGRVAVIDEFRTTKIWHKDSTTVLQSVQSEKKGARFEACYGAVPPW

SEQ ID NO: 1169 - protein, 686 aa, Chlamydomonas sp.
METIVNKEPPDKRTRPDRAAKIKDRKNGEENVVKCTLSRIIADKDNKDVITKVIKERVDSVSKRTYLAGVAVNRILKEVFEGVPDAKLHTVSVPSVDQNFIRQLMVGSRQAHMETRDATVERFFHNNYWFREKIEGREVIVKKKKQYVGAIARYDGDRNLYSHASKKYLTNFNNHYRVHLSTWIKKFVYSKENRILAKEFKDEHGIDETVFHRYLFYDIHSWGVKEDLIAIHSLLPERTKMLLKIQHSIIGRDEINRQWLKSVSNSAKMIRYNVFINRYLEATEDEGYAKLVNIAPIPTVKHSFITIDTDGLLGVLKDVGLVESLEKTLTNKEHWESVFDVENIRSTGKGVFTCTIDTDGVMACTHFLRAEKKKISIKDDGTAIKKQTKTLREFSESDPNVVVVANDPGRCNIAFLTWKKNKVEEKDNGGRKRKRHCEFGSKRLTRERYYVESGVFKSRGPTKKWLSNIQDCLDDLKDNSPKRTSLESFDAYVTVMVNHWDSRWGEMSKSRWGAQRLRLYGGKKRVLARFFNEVQADVGERKTIVIAYGSSKFAPGGKGELSVPTTSAFNAFRDRFKGRVAVIDEFRTTKIWHKDSTTVLQSLKSEKKGRTVRGLLWCSSTMENSKLFVNRDLNAAINIHNCFTMYPTRPGILARPKKYCKLEVVVGRTIDYKLTGSLQNAVSSEV

SEQ ID NO: 1170 - protein, 241 aa, Chlamydomonas sp.
NEMEYHVLEYIGQYYENDGFVVITINILLNTHLIFKSQRQTDFWNLETADIVGGIIPDRDSSSSEQIGAYARFYMGAAPILLAHRASRGYRNLRFRRYCKKQKLIVEIADFVAPREKSTKVLVGFGDWKGLGATPISRRTCGPLQAIRFELRSRENVIMEDIDEFRTSQRCSCCETRLCNMVALTHRKKQDGTGWECTEGRKRIHKILHCKSSQSDRPLQNRAAVASTAGKTWDRATELFP

SEQ ID NO: 1171 - protein, 621 aa, Chlamydomonas sp.
QCIRNLHVLNIRMPCMATNASVKLARPPMPLVSPGPSSVDGRIMARSERSGLQATNVSLTQAASKATSSSRKKNPAVVKSFSTHVCPHINNNPTCSDSNCSCKPIFLTNIPDASKSLKSRTSDQGSTSSAQDFYEYWDSSRQDVYRQLLWLPKTGSQGLVSSSLNGFARSTPARSSFSITKTEPLKTSLEKTSCPSFKYIVADGTVEDATKSNAKPKLRTLKLKLNPTKAQKSMLAEFAGCSRFMYNKAVAARLGVGSTHKSVFRIRDRYVTNKVRGKGKIPNPYFKNRQWLLQCPKSVRQSAIKAALANIKACFSNLKAGNIKQFSAPFRRKKTELERGWAIEMDQKNVSKDGDKLFIFKDTLGNMRYFGSKQLHKLMPEENPTHDPKVQKSRFGEYFLVLSVAARDRRAERKPVHPDKVATASIDPGVRKTMVTYSPENEESFMLGQGQASDLVKLLLVHDKLQSRLDTEKTLRSKERMKIKKQMIRIRKRIFYLKKEFRDQTTNFLAARYDVLLVPQLETAKMTISAERELTTKVARQMLTLSHSVLFNRLKEKCEEYGTVFLHVLEHYTSQTCPMCGCLNKCGETYTCKNCQFTCDRDIVGASGIFLKAVRTENPCS

SEQ ID NO: 1172 - protein, 803 aa, Chlamydomonas sp.
PRMEHVCDVCIKSSVMYKLCKMATKPPTVAKLKELLKLAEVACSSKDKKDDIVRLCEDNGLIARPPPEYKTVEKMCVVKCALKKAMSLDDEEFGKFREHVDQLVNVVSRILRRSSLVLTFHVTRLMEGDLPIPNMYDMKDTYWKDWLRIGVDGVFPDEESRISYESVKDVIGKMLGSDDPDYINSYPIYFDQVLNYAGHTLSTVVSNNAWVPLVPRLTRLTKATLNALEAPKTIRVYDVMRVIQQEIQEMESWPESVQEYVRKVRVRLKVPDGSRLYDDYGKDMDFPTMVRFNYWMQTRLEAIGARRIRLMPIFNVQRAHVRLDMKTLVNLFRHVFPKDPNIVELSKWKNVKDPDRFMLPLKPAVKKKKSCGPGEWEAYKLAQQKYDADVNDIKDTDEYRHAKGRYDTLVNARKTVASSFFKKPPVKTGWVFDCSICTDGVSLSMQYSKTVQFRVSDLKKTSKRSRDDEGMSVSEQYDHKLKTTLPDMGIVVLGVDPGRSNIATVTYLADDKSKTWKLTRGGFYHKSGIKKQKKQQEKRFSDMIPRWESLRENGAALSTSRTDDISAYLKNYATFSDEWWRMALLRRESRDNFQRYIGKRKAMDSFWSGIKRNMKLDHPDLRVRVAYGSAITTLKATGPREVAVPTESMFASCKRLFKEEVHVTDEFKTTLMSWETGAKKECVYKIPSVQITTEGQIRLGYELLGHTPLKETPKVSYRDQLAVRVYCTRKQIQEKHRRGGLAPSLVDNNSIKRYPEVRGLRFSPETSTYSDQDRSSALTIARLHCMELMGQGRPLPFCRDACC

SEQ ID NO: 1173 - protein, 406 aa, Chlamydomonas sp.
YSVLPIWRKYFNVQGLETKGSRFDNRILSVGKGVSVQMKHQVGKDIAGEGGGDNAGYPKDASIEDCQDASLRQDALRVGIDPGMTDIVTIASSDGRVESFSSARFSEAAGYNTSNRRTNKWNADTQDLVKSIPSPTTSSMHDMQDHVRGYLSALPTLLQHRANRGYRSMRFFRSVGKQKTIEKVCDLIAPKAQKKTIEEKVCDVIAPKAKKTVVGFGNWSNQGYGIIRSCSGPVKEIRKCLSRRQNVLFKNVDERNTSCTCHGCFQKLVNMKADSVAWRRVQNEPSALIDGAPTTTTTTTFEKQKTVVKNVKVHKVLHCHNSVKSASSNVRCGATWNRDVNAAKNLLLLLTTWMDGKERPAAFCVPSSSPTPKPQFPERQMWALNQPNHLGQLAAYNCYPLGQLKC

SEQ ID NO: 1174 - protein, 803 aa, Chlamydomonas sp.
PRMEHVCDVCIKSSVMYKLCKMATKPPTVAKLKELLKLAEVAYSSKDKKDDIVRLCEDNGLIARPPPEYKTVEKMCVVKCALKKAMSLDDEEFGKFREHVDQLVNVVSRMLRRSSLVLTFHVRRLMEGDLPIPNMYDMKDTYWKDWLRIGVDGVFPDEESRISYESVKDVIGKVLGSDDPDYINSYPIYFDQVLNYAGHTLSTVVSNNAWVPLVPRLTRLTKATLNALEAPKTIRVYDVMRVIQQEIQEMESWPESVQEYVREVRVRLKVPDGSRLYDDYGKDMDFPTMVRFNYWMQTRLEAIGARRIRLMPIFNVQRAHVRLDMKTLVNLFRHVFPKDPNIVELSKWKNVKDPDRFMLPLKPAVKKKKSCGPGEWEAYKLAQQKYDADVNDIKDTDEYRHAKGRYDTLVNARKTVASSFFKKPPVKTGWVFDCSICTDGVSLSMQYSKTVQFRVSDLKKTSKRSRDDEGMSVSEQYDHKLKTTLPDMGIVVLGVDPGRSNIATVTYLADDKSKTWKLTRGGFYHKSGIKKQKKQQEKRFSDMIPRWESLRENGAALSTSRTDDISAYLKNYATFSDEWWRMALLRRESRDNFQRYIGKRKAMDSFWAGIKRNMKLDHPDLRVRVAYGSAITTLKATGPGEVAVPTGSMFASCKRLFKEEVHVTDEFKTTLMSWETGAKKECVYKIPSVQITTEGQIRLGYELLGHTALKETPKVSYRDQLAVRVYCTRKQIQEKHRRGGLAPSLVDNNSIKRYPEVRGLRFSPETSTYSDWDRSSALTIARLHCMELMGQGRPLPFCRDACC

SEQ ID NO: 1175 - protein, 237 aa, Chlamydomonas sp.
NYAKFSDEWWRLALRRRESRDNLQRYIGKRKVKDSFWAGIKRCMMKEPPDMKVCVAYGSAITKLKPTGPGEVAVPTGAMFASCKRIFKEDVSVTDEFKTTLMSWETGKEKERVYKIPSVCSADVKLRLGGERFGHTKSKTMPKVADCDHLGVRLYNKRKGAQEKHRRGGFATSLVDSQKSIERYPEVRGLRFSPETCIYSDRDRSSALTIARLHCMELMGLGRPLPFAHSSSVVVDE

SEQ ID NO: 1176 - protein, 308 aa, Chlamydomonas sp.
DMTLTLCAFYHKSGIKKQTRQKELRFADMIPMWESLRENGAALSTSRTDKISAYLSNYAKFSEEWWRLALRRRESRDNLQRYIGKRKVKDSFWAGIKRCMMKELPDMKVCVAYGSTIMKLKPTGPGEVAVPTGGMFASCKRIFKEDVSVTDEFKTTLMSWKTGKEKERVYKIPSVCSADVKLRLGGERFGHTKSKTMPKVADCDHLGVRLYNKRKGAQEKHRRGGFATSLVDSQKSIERYPEIRGLRFSPETCIYSDRDRSSALTIARLHCMELMGLGRPLPFAHSSSVVVDYITLHYITLHYMLKST

SEQ ID NO: 1177 - protein, 773 aa, Chlamydomonas sp.
ECSREPVCRSRLHQNVFGVQFLMENGIGASSSLVHEADQHDDVAELVDYEGEEDGECAPGRAICVVKMKLSTFIPHDWLRNKIDTLVLDMNKLLGEGYIFANFHIARLFENGIAVPPVNRNFFYRCLIAVSTNNCKGSTLGEDFESSRLLFDLLREPGQSKVDIRGSVKNQIIADLSILMATMASNHLWTNLERRITTYLKWKYPQIAKRLRSDIVAALIKCPTKNLDVIFKMSTHTTKLPTKLPTSRLRSAKSAVALAKKRVGRKEPEGSPLRVRLTKLQERLEKLSEAWLSSKNLRVDADNAKRFFAREVAFCLRGVLPLPSGNTVASRAHMTLPLYHKILSETIEEKRKTKNEKHRTFSLLPYKSGFTLSHIPISKMAFFYMVNECHFDSCKADVASKNHQGIWERFANLKKVETVSRKFGYRIVTDGFAVSILMNKPTCLTCSMPADAFSTRAHEYVTTDEGGIVSFLDNVVVAAVDPGVTDIVTVTGLNGGTRSYSSAQYYRKGLIFKSQRQTDVWNLETADIVGGIIPDRDSSSSEQIGAYARFYMGAAPILLAHRASRGYRNLRFRRYCKKQKLIVEIADFVAPRKKSAKVLVGFGDWKGLGATPISRRTCGPLQAIRFELRSRENVIMEDIDEFRTSQRCSCCENHLCNMVALTHRKKQDGTGWECTEGRKRIHKILHCKSSQSGAPRQQSGGMLHCGKTWDRDVNASRNILMLTLHQVFGRERPLAFRRDAPRSSSTTPPPDTDMGTQTVTLHYITLHYMLKST

SEQ ID NO: 1178 - protein, 794 aa, Chlamydomonas sp.
ECSREPVCRSRLHQNVFGVQFVMENGIGESSSLVHEADQHDDVAELVDYEGEEDEECAPGRAICVVKMKLSTFIPHDWLRKKIDTLVLDMNKLLGEGYIFANFHIARLFENGIAVPPVNRNFFYRCLIAVSTNKCKGSTLGEDFESSRLLFDLLREPGQSKVDIRGKVKNQIIADLSILMATMASNHLWTNLERRITTYLKWKYPQIAKRLRSDIVTAVIKCPTKNLDVIFKMSPHTTKLPTKLPTTRLRSAKSAVALAKKRVGRKEPEGSPLRVRLTKLQERLEKLSESWLSSKNIRVDADNAKRFFARDVAFCLRGVLPLPSGNTFASRAHMTLPLYHKILSETIEEKRKTKNEKHRTFSLLPYKSGFTLSHIPISKMAFFYMVNECHFDSCKADVASKNHQGIWERFANLKKVETVSRKFGYRIVTDGFAVSILMNKPTCLTCSMPADAFSTRAHEYVTTDEGGIVSFLDNVVVAAVDPGVTDIVTVTGLNGGTRSYSSAQYYRKGLIFKSQRQTDVWNLETADIVGGIIPDRDSSSSEQIGAYARFYMGAAPILLAHRASRGYRNLRFRRYCKKQKLIVEIADFVAPREKSAKVLVGFGDWKGLGATPISRRTCGPLQAIRFELRSRENVIMEDIDEFRTSQRCSCCENHLCNMVALTHRKKQDGTGWECTEGRKRIHKILHCKSSQSGAPRQQSGGMLHCGKTWDRDVNASRNILMLTLHQVFGRERPLAFRRDAPRSSSTTPPPPPDTDMGTQTVERFTKEATRNIFENLFNLLHPPTLPKSNDLQSG

SEQ ID NO: 1179 - protein, 686 aa, Chlamydomonas sp.
METIVNKEPPDKRTRPDRAAKIKDRKHGEENVVKCTLSRIIADKDNKDVITKVIKERVDSVSKRTYLAGVAVNRILKEVFEGVPDAQLHTVSVPSVDQNFIRQLMVGSRQAHMETRDATVERFFHNNYWFREKIEGREVIVKKKKQYVGAIARYDGDRNLYSHASKKYLTNFNNHYRVHLSTWIKKFVYSKENRILAKEFKDEHGIDETVFHRYLLYDIHSWGVKEDLIAIHSLLPERTKMLLKIQHSIIGRDEINRQWLKSVSNSAKMIRYNVFINRYLEATEDEGYAKLVNIAPIPTVKHSFITIDTYGLLGVLKDVGLVESLEKTLTNKEHWESVFDVENIRSTGKGVFTCTIDTDGVMACTHFLRAEKKKISIKDDGTAIKKQTKTLREFSESDPNVVVVANDPGRCNIAFLTWKKNKVEEKDKGGRKRKRHCEFGSKRLTRERYYVESGVFKSRGPTKKWLSNIQDCLDDLKDNSPKRTSLESFDAYVTVMVNHWDSRWGEMSKSRWGVQRLRLYGGKKRVLARFFNEVQADVGERKTIVIAYGSSKFAPGGKGELSVPTTSAFNAFSDRFKGRVAVIDEFRTTKIWHKDSTTVLQSVQSEKEGRTVRGLLWCSSTMENSKLFVNRDLNAAINIHNCFTMYPTRPGILARPKKYCKLEVVVGRTIDYKLTGSLQNAVSSEV

SEQ ID NO: 1180 - protein, 794 aa, Chlamydomonas sp.
ECSREPVCRSRLHQNVFGVQFVMENGIGESSSLVYEADQHDDVAELVDYEGEEDGECAPGRAICVVKMKLSTFIPHDWLRNKIDTLVLDMNKLLGEGYIFANFHIARLFENGIAVPPVNRNFFYRCLIAVSTNKCKGSTLGEDFESSRLLFDLLREPGQSKVDIRGSVKNQIIADLSILMATMASNHLWTNLERRITTYLKWKYPQIAKRLRSDIVAALIKCPTKNLDVIFKMSPHTTKLPTKLPTSRIRSAKSAVALAKKRVGRKEPEGSPFRVRLTKLQERLEKLREAWLSSKNLRVDADNAKLFFAREVAFCLRGGLPLPSGNTFASRAHMTLPLYHKILSETIEEKRKTKNEKHRTFSLLPYKSGFTLSHIPISKMAFFYMVNECHFDSCKADVASKNHQGIWERFANLKKVETVSRKFGYRIVTDGFAVSILMNKPTCLTCSMPADAFSTRAHEYVTTDEGGIVSFLDNVVVAAVDLGVTDIVTVTGLNGGTRSYSSAKYYRKGLIFKSQRQTDVWNLETADIVGGIIPDRDSSSSEQIGAYARFYMGAAPILLAHRASRGYRNLRFRRYCKKQKLIVEIADFVAPRKKSAKVLVGFGDWKGLGATPISRRTCGPLQAIRFELRSRENVIMEDIDEFRTSQRCSCCENHLCNMVALTHRKKQDGTGWECTEGRKRIHKILHCKSSQSGAPRQQSGGMLHCGKTWDRHVNASRNILMLTLHQVFGRERPLAFRRDAPRSSSTTPPPPPDTDMGTQTVERFTKEATQNIFENLFNLLHPPTLPKSNDLQSG

SEQ ID NO: 1181 - protein, 543 aa, Chlamydomonas sp.
VSGWWASTQMATMACNSVWANVDRVVIKYLRLKHPSLKKHFKKIVKAVVQYPESKIDTIISEGLVHAIHIKEVVSHLRALFPMPRGKQFNTRAHLTMRLFHHVLTELGEVGRVDPKDKKTRKNHPRLFSILPRKNGFTISYVPISSMTFMKILSMGDSPLESVSGDGRYENHTMLWRKYFNVQGLETKRSRFDNRILSDGKGVSVQMKQTGKEEVVEEGENAGYPKDANIVECKDAVGALRVGVDPGMTDIVTVASSAGRIESFSSARFSEVAGYNTSKRRTYKWNDETQDLVKSIPLPNTSNMSDLQDHVRTYLKALPILLQHRANKGYRSMRFFRYVGKQKTIEKVCDVIAPRAQTTVVGFGNWSNQGYGISRSCSGPIKEIRRCLSRRKNVLFKNVDERNTSCKCHGCFQRLVNMKADSVVWRGVCKESPIEGSITVEKQKMVVKNVKVHKVLHCRDSVKSASSNVRCGATWNRDVNAAKNLLLLLTTWMDGRERPEAFCVPSPPPKTTVSIEASVSAKPTDPPGFVSSLPCYPLGQLKC

SEQ ID NO: 1182 - protein, 688 aa, Chlamydomonas sp.
RNVGTILYHQKKKNTHPLLMGVVQDKGDDDINISVVKKTLNSLCMDVSRHQISSRIQSMVLLINHAVAVAYLFANFHITRCLDDGDFDVKQLPHLDRNFYYRCLLAVSTSNVRKDTLGQSFNDTMVAFDALRPAGYVKVDVRPWGQVIADVSIQMATMACNSVWANVDRVVIKYLRLKHPSLKKHFKKIVKAVVQYPESKIDTIISEGLVHAIHIKEVVSHLRALFPMPRGKQFNTRAHLTMRLFHHVLTELGEVGRVDPKDKKTRTNHPRLFSILPRKNGFTISYVPISSMTFMKILSMGDSPLESVSGDGRYENHTMLCRKYFNVQGLETKRSRFDNRILSDGKGVSVQMKQTGKEEVVEEGENAGYPKDANIVQCNDAVGALRVGVDPGMTDIVTVASSAGRIESFSSARFSEVAGYNTSKRRTYKWNDETQDLVKSIPSPNTSNMSDLQDHVRAYLKALPILLQHRANKGYRSMRFFRYVGKQKTIEKVCDVIAPRAQTTVVGFGNWSNQGYGISRSCSGPIKEIRRCLSRRKNVLFKNVDERNTSCKCHGCFQRLVNMKADSVVWRGVCKESPIEGSITVEKQKMVVKNVKVHKVLHCRDSVKSASSNVRCGATWNRDVNAAKNLLLLLTTWMDGRERPVAFCVPSPPPKTTVSIEASVSAKPTDPPGFVSSLPCYPLGQLKC

SEQ ID NO: 1183 - protein, 621 aa, Chlamydomonas sp.
QCIRNLHVLNIRMPCMATKASVKLARPPMPLVSPGPSSVDGRIMARSERSGLQATNVSLTQAASKATSLSRKKNPAVVKSFSTHVCPHTNNIPTCSDSNCSCKPIFMTNIPDASKSLKSRTSDQGSTSSAQDFYEYWDSSRQDLYRQLLWLPKTGSQGLVSSSLNGFARSTPARSSFSITKTEPLKTSLEKTSCPSFKYIVADGMVEDATKSNAKPKLRTLKLKLNPTKAQKSMLAEFAGCSRFMYNKAVAARLGVGSTHKSVFRIRDRYVTNKVRGKGKMPNPYFKNRQWLLQCPKSVRQSAIKSALANIKACFSNLKAGNIKQFSAPFRRKKTELERGWVIEMDQKNVSKDGDKLFIFKEILGNMRYFGSKQLHKLMPEENPTHDPKVQKSRFGEYFLVLSVAARDRRADRKPVHPDKVATASIDPGVRKTMVTYSPENEESFMLGQGQASDLVKLLLVHDKLQSRLDTEKTLRSKERMKIKKLMIRIRKTIFYLKKEFRDQTTNFLAARYDVLLVPQLETAKMTISAERELTTKVARQMLTLSHSVLFNRLKEKCEEYGTVFLHVLEHYTSQTCPMCGFLNKCGETYTCKNCQFTCDRDIVGAAGIFLKAVRTENPCS

SEQ ID NO: 1184 - protein, 517 aa, Chlamydomonas sp.
FLTNIPDASKSLKSRTSDQGSTSSAQDFYEYWDSSRQDLYRQLLWLPKTGSQGLVSSSLNGFARSTPARSSFSITKTEPLKTSLEKTSCPSFKYIVADGTVEDATKSNAKPKLRTLKLKLNPTKAQKSMLAEFAGCSRFMYNKAVAARLGVGSTHKSVFRIRDRYVTNKVRGEGKMPNPYFKNRQWLLQCPKSVRQSAIKAALANIKACFSNLKAGNIKQFSAPLRRKKTELERGWAIEMDQKNVSKDGDKLFIFKDILGNMRYFGSKQLHKLMPEENPTHDQKVQKSRFGEYFLVLSVAARDRRAERKPVHPDKVATASIDPGVRKTMVTYSPENEESFMLGQGQASDLVKLLLVHDKLQSRLDTEKTLRSKERMKIKMQMIRIRKRIFYLKKEFRDQTTNFLAARYDVLLVPQLETAKMTISAERELTTKVARQMLTLSHSVLFNRLKEKCEEYGTVFLHVLEHYTSQTCPMCGFLNKCGGETYTCKNCQFTCDRDIVGAAGIFLKAVRTENPCS

SEQ ID NO: 1185 - protein, 795 aa, Chlamydomonas sp.
LWKMATKPPTVAKLKELLKLAEVPYSSKSNKDDLVRLCEDNGLIARPPPEYKTVEKMCVVKCALKKAMSLDDEEFGKFREHVDQLVNVVSRMLRRSSLVLTFHITSLLEKGLEIPDLYNMKDTYWKDWLRIGVDGIFPDEESKISYEAVKDSIGDVIGNDDADYIKSYPIYFDQVLNYAGHTLSTVVSNNAWVPLIPRLARLTSTTLNKLNAPKTMDTSKIIRGYDVMQAIQQEVQNMEGWPESVQEYVNEVREMLSVPDGSRVYDNYGKDMDFPTMVRFNYWIQTRLEDMDARRIRLMPIFNVQRVHVRLDLKTLVNLFRHMLPNDQNIVELSKWEYVKNPDSFMLPQRPAQKKKKSRGPGEWEAFKSVLKQYDDDVKDIKATDEYRHAKGLYDTLVNARKTVAGSFFRKPPVKNGWVFDCSICTDGVSLSMQYSKTVQVLVSDLKKTCKNPRKEEGIKIAEKYDGSLKTILPDMGIVVLGVDPGRSNIATVTYLADDKNKTWTLTRGAFYHKSGIKKQTRQKELRFADMIPMWESLRENGAALSTSRTDKISAYLSNYAKFSEEWWRLALRRRESRDNLQRYIGKRKVKDSFWAGIKRCMMKELPDMKVCVAYGSAITKLKPTGPGEVAVPTGAMFASCKRIFKEDVSVTDEFKTTLMSWETGKEKERVYKIPSVCSADVKLRLGGERFGHTKSKTMPKVADCDHLGVRLYNKRKGAQEKHRRGGFATSLVDSQKSIERYPEVRGLRFSPETCIYSDRDRSSALTIARLHCIELMGLGRPLPFAHSSSVVVDE

SEQ ID NO: 1186 - protein, 566 aa, Chlamydomonas sp.
ERSGLQATNVSLTQEGIEQEKKNQQSSSHSLRTCPHTNNNPTCSDSNCSCKPIFLTNIPDASKSRTSDQGSTSSAQDFYEYWDSSRQDLYRQLLWLPKKGSQGLVSSSLNGFARSTPVRSSFSITKTEPLKTSLEKTSCPSFKYIVADGTVEDATKSNAKPKLRTLKMKLNPTKAQKSMLAEFAGCSRFMYNKAVAARLGVGSTHKSVFRIRDRYVTNKVKGEGKMPNPYFKNRQWLLQCPKSVRQSAIKAALANIKACFSNLKAGNIKQFSAPFRRKKTELERGWAIEMDQHNISKDGDKLFIFKDTLGNMRYFGRKQLQKLMPEKNPTHDQKVQKSRFGEYFLVLSVAARDRREERKPVHPGKVATASIDPGVRKTMVTYSPENEESFMLGKGQASDLVKLLLVHDKLHSRLDTEKTLRSKERMKIKMQMIRIRKRIFYLKKEFRDQTTNFLAARYDVLLVPQLETAKMTISAERELTTKVARQMLTLSHSVLFNRLKEKCEEYGTVFLHVLEHYTSQTCPMCGFLNKCGEPYTCKNCQFTCDRDILGAAGIFLKAVRTENPCS

SEQ ID NO: 1187 - protein, 616 aa, Chlamydomonas sp.
KNRPGGRNAHYVLYQNAMYGNQRFCKIGKASDALGVSRTVLRRWADNGTIRTIRTPGNQRLFDPRRNRAGKKNQQSSSHSLRTCPHTNNNPTCSDSNCSCKPIFLTNIPDASKSRTSDQGSTSSAQDFYEYWDSSRQDLYRQLLWLPKKGSQGLVSSSLNGFARSTPVRSSFSITKTEPLKTSLEKTSCPSFKYIVADGTVEDATKSNAKPKLRTLKMKLNPTKAQKSMLAEFAGCSRFMYNKAVAARLGVGSTHKSVFRIRDRYVTNKVKGEGKMPNPYFKNRQWLLQCPKSVRQSAIKAALANIKACFSNLKAGNIKQFSAPFRRKKTELERGWAIEMDQHNISKDGDKLFIFKDTLGNMRYFGRKQLQKLMPEKNPTHDQKVQKSRFGEYFLVLSVAARDRREERKPVHPGKVATASIDPGVRKTMVTYSPENEESFMLGKGQASDLVKLLLVHDKLHSRLDTEKTLRSKERMKIKMQMIRIRKRIFYLKKEFRDQTTNFLAARYDVLLVPQLETAKMTISAERELTTKVARQMLTLSHSVLFNRLKEKCEEYGTVFLHVLEHYTSQTCPMCGFLNKCGEPYTCKNCQFTCDRDILGAAGIFLKAVRTENPCS

SEQ ID NO: 1188 - protein, 576 aa, Chlamydomonas sp.
KIIRGYVVMQAIQQEVQNMEGWPESVQEYVNEVREMLSVPDGSRVYDNYGKDMDFPTMVRFNYWIQTRLEDMDARRIRLMPIFNVQRVHVRLDLKTLVNLFRHMFPNDQNIVELSKWEHVKNPDSFMLPQRPAQKKKKSCGPGEWEAYKSVLKQYDDDVKDIKATDEYKHAKGLYDTLVNARKTVAGSFFRKPPVKNGWVFDCSICTDGVSLSMQYSKTVQVLVSDLKKTCKKPRKEEGIKIAEKYDGSLKTILPDMGIVVLCVDPGRSNIATVTYLADDKNKTWTLTRGAFYHKSGIKKQTRQKELRFADMIPMWESLRENGAALSTSRTDKISAYLSNYAKFSDEWWRLALRRRESRDNLQRYIGKRKVKDSFWAGIKRCMMKELPDMKVCVAYGSAITKLKPTGPGEVAVPTRAMFASCKRIFKEDVSVTDEFKTTLMSWETGKEKERVYKIPSVCSADVKLRLGGERFGHTKSKTMPKVADCDHLGVRLYNKRKGAQEKHRRGGFATSLVDSQKSIERYPEVRGLRFSPETCIYSDRDRSSALTIARLHCMELMGLGRPLPFAHSSSVVVDE

SEQ ID NO: 1189 - protein, 380 aa, Chlamydomonas sp.
SRFMYNKAVAARLGVGSTHKSVFRIRDRYVTNKVRGEGKLPNPYFKNRQWLLQCPKSVRQSAIKAALANIKACFSNLKAGNIKQFSAPFRRKKTELERGWVIEMDQKNVSKDGDKLFIFKDILGNMRYFGSKQLHKLMPEVNPTHDPKVHKSRFGEYFLVLSVAAMDRRAERKPVHPDKVATASIDPGVRKTMVTYSPENEESFMLGQGQASDLVKLLLVHDKLQSRLDTEKTLRTKERMKIKMQMIRIRKRIFYLKKEFRDQTTNFLAARYDVLLVPQLETAKMTISAERELTTKVARQMLTLSHSVLFNRLKEKCEEYGTVFLHVLEHYTSQTCPMCGFLNKCGETYTCKNCQFTCDRDIVGAAGIFLKAVRTENPCS

SEQ ID NO: 1190 - protein, 504 aa, Chlamydomonas sp.
SQGRRIRDQLQAPRTFTSIGTRHGRTGIVNCCGLPKTGSQGLVSSSLNGFARSTPARSSFSITKTEPLKTSLDKTSCPSFKYIVADGTVEDATKSNAKTKLRTLKLKLNPTKAQKSMLAEFAGCSRFMYNKAVAARLGVGSTHKSVFRIRDRYVTNKVRGKGKMPNPYFKNRQWLLQCPKSVRQSAIKAALANIKACFSNLKAGNIKQFSAPFRRKKTELERGWAIEMDQKNVSKDGDKLFIFKDILGNMRYFGSKQLHKLMPEENPTHDPKVQKSRFGEYFLVLSVAARDRRAERKPVHPDKVATASIDPGVRKTMVTYSPENEESFMLGQGQASDLVKLLLVHDKLQSRLDTEKTLRSKERMKIKKQMIRIRMRFFYLKKEFSDQTTNFLAARYDVLLVPQLETAKMTISAEQELTTKVARQMLTLSHSVLFNRLKEKCAEYGTVFLHVLEHYTSQTCPMCGFLNKCGETYTCKNCQFTCDRDIVGAAGIFLKAVRTENPCS

SEQ ID NO: 1191 - protein, 698 aa, Chlamydomonas sp.
YQDKKRTLPPSISMGVVTNNGDDDDDLDIMVVKKTLNSLCMDVSRQQICSRIQSMVLVINHAVAEAYLFANFHITRCLDDVDFDVKQLPHLDRNFYYRCILAVSTSNVRKDTLGQSLKDSMFAFDALRPAGYLKVDVRQWGHVIADVSIQMATMACNSVWANVDRVVIKYLRLKHPSLKKHFNKIVKAVVQYPESDIDKIIPGSLVHANLIKDVVRRLRDLLPLPRGKQFNTRAHLTMRLFHHVLTELGADLKEKTTKKRPRLFSILPRKSGFTISYVPISSMTLMKLLSMGDSPLESFRGDGRHENHSMLWRKYFNVQGLETKGSRFDNRILSDGKGVSVQMKHQASEDVAVDNAGYPKDAILEDCQDASLRVGVDPGMTDIVTVASSDGRVESFSSARFSEAAGYNTSNRRTNKWNVDTQDLVKSIPSPTTSSMHDMQDHVRGYLSALPTLLQHRASRGYRSMRFFRYVGKQKTIEKVCDLIAPKAQKKTIEEKVCDVIAPRAQTTVVGFGNWSNQGYGISRSCSGPIKEIRRCLSRRKNVLFKNVDERNTSCTCHGCFQKLVNMKADSVVWRRVQNEPPSLINGAPTTTTTIEKQKTVVKNVKVHKVLHCRNSVKSASSKVRCGATWNRDVNAAKNLLLLLTTWMDGKERPATFCVPSSSPTPKTTVSGEANVGAQPTDPLGSVSSLQLLSSGPA

SEQ ID NO: 1192 - protein, 792 aa, Chlamydomonas sp.
ECSREPVCRSRLHQNVFGVQFVMENGIGESSSLVHEADQHDDVAELVDYEGEEDGECAPGRAICVVKMKLSTFIPHDWLRNKIDTLVLDMNKLLGEGYIFANFHIARLFENGIAVPPVNRNFFYRCLIAVSTNKCKGSTLGEDFESSRLLFDLLREPGQSKVDIRGSVKNQIIADLSILMTTMSSNHLWTNLERRITTYLKWKYPQIAKRLRSDIVAALIKCPTKNLDVIFKMSPHTTKLPTKLPTSRLRSAKSAVALAKKRVGRKEPEGSPLRVRLTKLQERLEKLSEAWLSSKNLRVDADNAKRFFAREVAFCLRGVLPLPSGNTFASWAHMTLPLYHKILSETIEEKRKTKNEKHRTFSLLPYKSGFTLSHIPISKMAFFYMVNECHFDSCKADVASKNHQGIWERFANLKKVETVSRKFGYRIVTDGFAVSILMNKPTCLTCSMPADAFSTRAHEYVTTDEGGIVSFLDNVVVAAVDPGVTDIVTVTGLNGGTRSYSSAQYYRKGLIFKSQRQTDVWNLETADIVGGIIPDRDSSSSEQIGAYARFYMGAAPILLAHRASRGYRNLRFRRYCKKQKLIVEIADFVAPRKKSAKVLVGFGDWKGLGATPISRRTCGPLQAIRFELRSRENVIMEDIDEFRTSQRCSCCENHLCNMVALTHRKKQDGTGWECTEGRKRIHKILHCKSSQSGAPRQQSGGMLHCGKTWDRDVNASRNILMLTLHQVFGRERPLAFRRDAPRSSSTTPPPDTDMGTQTVERFTKEATRNIFENLFNLLHPPTLPKSNDLQSG

SEQ ID NO: 1193 - protein, 621 aa, Chlamydomonas sp.
QCIRNLHVLNIRMPCMATKASVKLARPPMPLVSPGPSSVDGRIMARSERYGLQATNVSLTQAASKATSLSRKNNPAVVKSFSTHVCPHTNNNPTCSDSNCSCKPIFLTNIPDASKSLKSRTSDQGSTSSAQDFYEYWDSSRQDLYRQLLWLPKTGSQGLVSSSLNGFARSTPAQSSFSITKTEPLKTSLEKTSCPSFKYIVADGTVEDATKSNAKPKLRTLKLKLNPTKAQKSMLAEFAGCSRFMYNKAVAARLGVGSTHKSVFRIRDRYVTNKVRGKGKMPNPYFKNRQWLLQCPKSVRQNAIKSALANIKACFSNLKAGNIKQFSAPFRRKKTELERGWVIEMDQKNVSKDGDKLFIFKEILGNMRYFGSKQLHKLMPEENPTHDPKVQKSRFGEYFLVLSVAARDRRAERKPVNPDKVATASIDPGVRKTMVTYSPENEESFMLGQGQASDLVKLLLVHDKLQSRLDTEKTLRSKERMKIKKLMIRIRKTIFYLKKEFRDQTTNFLAARYDVLLVPQLETAKMTISAERELTTKVARQMLTLSHSVLFNRLKEKCEEYGTVFLHVLEHYTSQTCPMCGFLNKCGETYTCKNCQFTCDRDIVGAAGIFLKAVRTENPCS

SEQ ID NO: 1194 - protein, 603 aa, Chlamydomonas sp.
GHLTLNSLWMDVSRQQICSRIQSMVLVINHAVAEAYLFANFHITRCLDDGDFDVKQLPHLDRNFYYRCILAVSISNVRNDTLDQSLKDSMVAFDALRPAGYVKVDVRPWGQVIADVSIQMATMACNSVWANVDRVVIKYLRLKHPSLKKHFKKIVKAVVQYPDSDIDKIIPAGLVHANLIKDVVRRLRDLLPLPRGKQFNTRAHLTMRLFHHVLTELGADLKEKTTKKRPRLFSILPRKSGFTISYVPISSMTLMKLLSMGDSPLESVRGDGHHENHSMLWRKYFNVQGLETKGSRFDNRILSDGKGVSVQMKHQVGKDIAGEGGGDNAGYPKDASIEDGQDASLRQGALRVGIDPGMTDIVTIASSDGRVESFSSARFSEAAGYNTSNRRTNKWNADTQDLVKSIPSSTTSSMHDMQDHVRVYISALPTLLQHRANRGYRSMRFFRYVGKQKTIEKVCDLIAPEAHKKTIEEKVCDVIATKAQKTVVGFGNWSNQGYGISRSCSGPVKEIRKCLSRRQNVLFKNVDERNTSCTCHGCFQKLVNMKADSVVWRRVQNEPSALIDGSITVEKQKTVVKNVKVHKVLHCRNSVKSASSNVRCGAT

SEQ ID NO: 1195 - protein, 509 aa, Chlamydomonas sp.
KLSEAWLSSKNLRVDADNAKRFFARDVAFCLRGGLPLPSGNTFASRAHMTLPLYHKILSETIEEKRKTKNEKHRTFSLLPYKSGFTLSHIPISKMAFFYMVNECHFDSCKADVASKNHQGIWERFANLKKVETVSRKFGYRIVTDGFAVSILMNKPTCLTCSMPADAFSTRAHEYVTTDEGGIVSFLDNVVVAAVDPGVTDIVTVTGLNGGTRSYSSAQYYRKGLIFKSQRQTDVWNLDTADIVGGIIPDRDSSSSEQIGAYARFYMGAAPILLAHRASRGYRNLRFCRYCKKQKLIVEIADFVAPREKSAKVLVGFGDWKGLGATPLSRRTFGPLQAIRFELRSRENVIMEDIDEFRTSQRCSCCENHLCNMVALTHRKKQDGTGWECTEGRKRIHKILHCKSSQSGAPRQQSSGMLHCGKTWDRDVNASRNILMLTLHQVFGRERPLAFRRDAPRSSSTTPPPPPDTDMGTQTVERFTKEATRNIFENLFNLLHPPTLPKSNDLQSG

SEQ ID NO: 1196 - protein, 700 aa, Chlamydomonas sp.
NNNHSLSMGVVTNNGDDDDLDIMVVKKTLNSLCMDVSRQQICSRIQSMVLVINQAVAEAYLFANFHITRCLDDGDFDVKQLPHLDRNFYYRCILAVSISNVRNDTLDQSLKDSMVAFDALRPAGYLKVDVCQWGQVIADVSIQMATMACNSVWANVDRVVIKYLRLKHPSLKKHFNKIVKAVVQYPDSDIDKIIPAGLVHANLIKDVVRRLRDLLPLPRGKQFNTRAHLTMRLFHHVLTELGADLKEKTTKKRPRLFSILPRKSGFTISYVPISSMTLMKLLSMGDSPLESVRGDGRHENHSMLWRKYFNVQGLETKGSRFDNRILSDGKGVSVQMKHQVGKDIAGEGGGDNAGYPKDASIEDCQDASLRQGALRVGIDPGMTDIVTIASSDGRVESFSSARFSEAAGYNTSNRRTNKWNADTQDLVKSIPSPTTSSMHDMQDHVRGYLSALPTLLQHRANRGYRSMRFFRYVGKQKTIEKVCDLIAPKAQKKTIEEKVCDVIDPKAKKTVVGFGNWSNQGYGISRSCSGPVKEIRKCLSRRQNVLFKNVDERNTSCTCHGCFQKLVNMKADSVVWRRVQNEPSALIDGAPTTTTTYEKQKTVAKNVKVHKVLHCRNSVKSASSNVRCGATWNRDVNAAKNLLLLLTTWMDGKERPTAFCVPSSSPTPKTTVSGEANVGAQPTDPPGSVSSLQLLSSGPA

SEQ ID NO: 1197 - protein, 615 aa, Chlamydomonas sp.
QCIRNLHVLNIRMPCMATNASVKLARSPMPVVSPGPSSVDGRIMARSGLQATNVSLTQAASKATSSSRKKKPAVVKSFSTHVCPHTNNNPTCSDSNCSCKPIFLTNIPDASKSRTSDQGSTSSSLDFYEYWDSSRQDLYRQLLWLPKTGTQGLVSSSFNGFAHSTPTRSSFSITKTEPLKTSLEKTSCPSFKYIVTDGTVEDATKSNAKPKLRTLKLKLNPTKAQKSMLAEFAGCSRFMYNKAVAARLGVGSTHKSVFRIRDRYVTNKVRGKGKMPNPYFKNRQWLLQCPKSVRQSAIKSALANIKACFSNLKAGNIKQFSAPFRRKKTELERGWVIEMDQKNVSKDGDKLFIFKEILGNMRYFGSKQLHKLMPEENPTHDPKVQKSRFGEYFLVLSVAARDRRAERKPVNPDKVATASIDPGVRKTMVTYSPENEESFMLGQGQASDLVKLLLVHDKLQSRLDTEKTLRSKERMKIKKLMIRIRKTIFYLKKEFRDQTTNFLAARYDVLLVPQLETAKMTISAERELTTKVARQMLTLSHSVLFNRLKEKCEEYGTVFLHVLEHYTSQTCPMCGFLNKCGETYTCKNCQFTCDRDIVGAAGIFLKAVRTENPCS

SEQ ID NO: 1198 - protein, 642 aa, Chlamydomonas sp.
VQGACGSARQCGEPRSSLVLTFHVTRLMEGDLPIPNMYDMKDTYWKDWLRIGVDGVFPDEESRISYEAVKDVMGKVLGSDDPDYINSYPIYFDQVLNYAGHTLSTVVSNNAWVTLVPRLTRLTKATLNALGAPKTIRVYDVMRVIQQEIQEMESWPESVQEFVREVRVRLKVPDGSRLYDDYGKDMDFPTMVRFNYWMQTRLEAIGARCIRLMPIFNVQRAHVRLDMKTLVNLFRHVFPKDPNIVELSKWKNVKDPDRFMLPLKPAFKKKKSCGPGEWEAYKLAQQKYDADVKDIKSTDEYRHAKGRYDTLVNARKTDAGSFFKKPPVKTGWVFDCSICTDGVSLSMQYSKTVQVRVSDLKTTSKRSRDEEGMSVSEQYDHKLKTTLPDMGIVVLGVDPGRSNIATVTYLADDKSKTWKLTRGAFYHKSGIKKQKKQQEKRFSDMIPRWESLRENGAALSKSRKDDISAYLKNYATFSDEWWRMALRRRESRDNFQRYIGKRKAMDSFWAGIKRNMKLDHPDLRVRVAYGSAITKLKATGPGEVAVPTGSMFASCKRLFKEEVHVTDEFKTTLMSWETGAKKECVYKIPSVQITTEGQIRLGYELLGHTPLKETPKVSYRDELTVRVYCTRKKSKKNTGGVA

SEQ ID NO: 1199 - protein, 448 aa, Chlamydomonas sp.
QCDCSITCLQSWERSDEWIRKIKKTKKSHPRLFSILPRKNGFTISYVPISSMTFMKLLSMGDSPLESVSGDGRYENHTMLWRKYFNVQGLETKRSRFDNRILSDGKGVSVQMKQKGKEEVVEEGENAGYPKDANIVECKDAVGALRVGVDPGMTDIVTVASSAGRITSFSSARFSKVAGYNTSKRRTYKWNDETQDLVKSIPSPNTSNMVDLQDHVRAYLKALPILLQHRANKGYRSMRFFRYVGKQKTIEKVCDVIAPRAQTTVVGFGNWSNQGYGISRSCSGPIKEIRRCLSRRKNVLFKNVDERNTSCKCHGCFQRLVNMKADSVVWRGVCKESPIDGSITFEKQKMVVKNVKVHKVLHRRDSVKSASSNVRCGATWNRDVNAAKNLLLLLTTWMDGRERPEAFCVPSPPPKTTVSIEASVSAKPTDPPGFVSSLPCYPLGQLKC

SEQ ID NO: 1200 - protein, 686 aa, Chlamydomonas sp.
METIVNKEPPDKRTRPDRAAKIKDRKNGEENVVKCTLSRIIADKDNKDVIIKVIKERVDSVSKRTYLAGVAVNRILKEVFEGVPDAQLHTVSVPSVDQNFIRQLMVGSRQAHMETRDATVERFFHNNYWFREKIEGREVIVKKKKQYVGAIARYDGDRNLYSHASKKYLTNFNNHYRVHLSTWIKKFVYSKENRILAKEIKDEHGIDETVFHRYLLYDIHSWGVKEDLIAIHSLLPERTKMLLKIQHSILGRDEINRQWLKSVSNSAKMIRYNVFINRYLEATEDEGYAKLVNIAPIPTVKHAFITIDTDGLLGVLKDVGLIESLEKTLTNKEHWESVFDVENIRSNGKGVFTCTIDTDGVMACTHFLRAEKKKISIKDDGTAIKKQTKTLREFSESDPNVVVVANDPGRCNIAFLTWKKNKVEEKDKGGRKRKRHCEFRSKRLTRERYYVESGVFKSRGPTKKWLSNIQDCLDDLKDNSPKRTSLVSFDAYVTVMVNHWDSRWGEMSKSRWGAQRLRLYGGKKRVLARFFNEVQEDVGERKTIVVAYGSAKFAHGGKGELSVPTTSAFKAFSDRFKGRVAVIDEFRTTKIWHKDSTTVLQSVQSEKEGRTVRGLLWCSSTMENSKLFVNRDLNAAINIHNCFTMYPIRPGILARPKKYCKLEVVVGRKIDYKLTGSLQNAVSSKV

SEQ ID NO: 1201 - protein, 269 aa, Chlamydomonas sp.
SSSLSVKLTFGTSRRLISSVVSFRIETLRVLNRLVRTPDSTWVPPQSFLPIVLRGYRFRRYCKKQKLIVEIADFVAPREKSAKVLVGFGDWKDLQAIRFELRSRENVIMEDIDEFRTSQRCSCCENHLCNMVALTHRKKQDGTGWECTEGRKRIHKILHCKSSQSGAPRQQSGGRLHCGKTWDRDVNASRNILMLTLHQVFGRERPLAFRRDAPRSSSTPPPPPPPDTDMGTQTVERFTKEATRNIIFENLFNLLHPPTLPKSNDLQSG

SEQ ID NO: 1202 - protein, 632 aa, Chlamydomonas sp.
STNHAVAEAYLFANFHITRCLDDGDFDVKQLPHLDRNFYYRCLLAVSTSNVRKDTLGQSFNDTMVAFDALRPAGYVKVDVRPWGQVIADVSIQMATMACNSVWANVDRVVIKYLRLKHPSLKKHFKKIVKAVVQYPESKIDTIIPESLVHAIHIKEVVSHLRALFPMPRGKQFNTRAHLTMRLFHHVLTELGEVGRVDPKDKKTKTNHPRLFNILPCKNGFTISYVLISSMTFMKLLSMGDSPLESVSGDGRYENHTMLWRKYFNVQGLETKRSRFDNQILSDGKGVSVQMKQKGKEEVAEEGENAGYPKDANIVECKDAVGALRVGVDPRMTDIVTVASSAGRIESFSSARFSEVAGYNTSKRRTYKWNDETQDLVKSIPSPNTSNMVDLQDHVRAYLKALPILLQHRANKGYRSMRFFRYVGKQKTIEKVCDMIAPREQTTVVGFGNWSNQGYGISRSCSGPIKEIRRCLSRRKNVLFKNVDERNTSCKCHGCFQRLVNMKADSVVWRGVCKESPIDGSITVEKQKMVVKNVKVHKVLHCRDSVKSLSSNVRCGATWNRDVNAAKNLLLLLTTWMDGRERPEAFCVPSPPPKTTVSIEASVSAKPTDPPGFVSSLPCVILWASLNAEIQR

SEQ ID NO: 1203 - protein, 686 aa, Chlamydomonas sp.
METIVNKEPPDKRTRPDRAAKIKDRKNGEENVVKCTLSRIIADKDNKDVITKVIKERVDSVSKRTYLAGVAVNRILKEVFEGVPDAQLHTVSVPSVDQNFIRQLMVGSRQALMETRDATVERFFHNNYWFREKIEGREVIVKKKKQYVGAIARYDGDRNLYSHASKKYLTNFNNHYRVHLSTWIKKFVYSKENRILAKEFKDEHGIDETVFHRYLLYDIHSWGVKEDLIAIHSLLPERTKMLLKIQHSIIGQDEINRQWLKSVSNSAKMIRYNVFINRYLEATEDEGYAKLVNIAPIPTVKHSFITIDTDGLLGVLKDVGLVESLEKTLTNKEHWESVFDVENIRSTGKGVFTCTIDTDGVMACTHFLRAEKKKISIKDDGTAIKKQTKTLREFSESDPNVVVVANDPGRCNIAFLTWKKNKVEEKDNGGRKRKRHCEFGSKRLTRERYYVESGVFKSRGPTKKWLSNIQDCLDDLKDNSPKRTSLESFDAYVTVMVNHWDSRWGEMSKSRWGAQRLRLYGGKKRVLARFFNEVQADVGERKTIVIAYGSSKFAPGGKGELSVPTTSAFNAFSDRFKGRVAVIDEFRTTKIWHKDSTTVLQSVQSEKKGRTVRGLLWCSSTMENSKLFVNRDLNAAINIHNCFTMYPTRPGILARPKKYCKLEVVVGRTIDYKLTGSLQNAVSSEV

SEQ ID NO: 1204 - protein, 786 aa, Chlamydomonas sp.
KLCKMATKHPTVAKLKELLKLAKVAYSSKDKKDDIVRLCEDNGLIARPPPEYKAVEKMCVVKCALKKAMSLDDEEFGKFRGHVDQLVSVVSRMLRRSSLVLTFHVTRLMEGNLPIPNIYDMKDTYWKDLLRIGVDGVFPDEESRISYEAVKDVIGKVLGSDDPDYINSYPIYFDQVLNYAGHTLSTVVSNNAWVPLVPRLTRLTKATLNALGAPKTIRVYDVMRVIQQEIQEMESWPESVQEYVREVRVGLKVPVGSRLYDDYGKDMDFPTMVQFNYWMQTRLEANGARRIRLMPIFNVQWAHVRLDMKTLVNLFRHVFPKDPNIVELSKWKNVKDPDRFMLPLKPAFKKKKSCGPGEWEAYKLAQQKYDVDVKDIKATDEYRHAKGRYDTLVNARKTVEGSFFKKPPVKTGWVFDCSICTNGVSLSMQYSKTVQVRVSDLKKTSKRSRDEEGMSVSEQYDHKLKTTLPDMGIVVLGVDPGRSNIATVTYLADDKSKTWKLTRGAFYHKSGIKKQKKQQEKRFSDMIPRWESLRENGAALSTSRKDDISAYLKNYATFSDEWWRMALRRRESRDNFQRYIGKRKAMDSFWAGIKRNMKLDHPDLRVRVAYGSAITKLKATGPGEVAVPTGSMFASCKRLFKEEVRVTDEFKTTLMSWETGAKKECVYKIPSVQITTEGQIRLGYELLGHNPLKETPKVSYRDQLAVRVYCTRKIIQEKHRRGGLAPSLVDNNSIKRYPEVRGLRFSPETSTYSDRDRSSALTIARLHCMELLGQGRPLPFCRDACC

SEQ ID NO: 1205 - protein, 688 aa, Chlamydomonas sp.
GNVGAILYHQKKKNTHPLLMGVVQDKGDDDINISVVKKTLNSLCMDVSRHQISSRIQSMVLLINHAVAEAYLFANFHITRCLDDGDFDVKQLPHLDRNFYYRCLLAVSTSNVRKDTLGQSFNDTMVAFDALRPAGYVKVDVRPWGQVIADVSIQMATMACNSVWANVDRVVIKYLRLKHPSLKKNFKKIVKAVVQYPESKIDTIIPEGLVHAIHIKEVVSHLRALFPLPRGKQFNTRAHLTMRLFHHVLTELGEVGRVDPKDKKTRKSHPRLFSILPRKNGFTISYVPISSMTFMKLLSMGDLPLESVSGDGRYENHTMLWRKYFNVQGLETKRSRFDNRILSDGKGVSVQMKQKGKEEVVEEGENAGYPKDANILECKDAVGALRVGVDPGMTDIVAVASSAGRIESFSSARFSEVAGYNTSKRRTYKWNDETQDLVKSIPSPNTSNMSDLQDHVRAYLKALPILLQHRANKGYRSMRFFRYVGKQKTIEKVCDVIAPRAQTTVVGFGNWSNQGYGISRSCSGPIKEIRRCLSRRKNVLFKNVDERNTSCKCHGCFQRLVNMKADSVVWRGVCKESPIDGSITVEKQKMVVKNVKVHKVLHCRDSVKSASSNVRCGATWNRDVNAAKNILLLLTTWMDGRERPEAFCVPSPPPKTTVSIEASVSAKPTDPPGFVSSLPCYPLGQLKC

SEQ ID NO: 1206 - protein, 803 aa, Chlamydomonas sp.
PRMEHVCDVCIKSSVMYKLCKMATKPPTVAKLKELLKLAEVAYSSKDKKDDIVRLCEDNGLIARPPPEYKTVEKMCVVKCALKKAMSLDDEEFGKFRGHVDQLVNEVSRMLRRSSLVLTFHVTRLMEGDLPIPNMYDMKDTYWKDWLRIGVDGVFPDEESRISYEAVKDVIGKVLGSDDPDYINSYPIYFDQVLNYAGHTLSTVVSNNAWVPLVPRLTRLTKATLNALGAPKTIRVYDVMRVIQQEIQEMESWPESVQEYVREVQVRLQVPDGSRLYDDYGKDMDFPTMVRFNYWMQTRLEAIGARRIRLMPIFNVQRAHVRLDMKTLVNLFRHVFPKDPNIVELSKWENVKDPDRFMLPLKPSVKKKKSCGPGEWEAYKLAQQKYDADVKDIKATDEYRHAKGRYDTLVNARKTVAGSFFKKPPVKTGWVFDCSICTDGVSFSMQYSKTVQVRVSDLKNESKRSRDEEGMSVSEQYDHKLKTTLPDMGIVVLGVDPGRSNIATVTYLADDKSKTWKLTRGAFYHKSGIKKQKKQQEKRFSDMIPRWESLRENGAALSTSRKDDISAYLKNYATFSDEWWRMALRRRESRDNFQRYIGKRKAMDSFWAGIKRNMKLDHPDLRVRVAYGSAITKLKATGPGEVAVPMGSMFASCKRLFKEEVHVTDEFKTTLMSWETGAKKECVYKIPSVQITTEGQIRLGYELLGHTPLKETPKVSYSDQLAVRVYCTRKKIQEKHRRGGLAPSLVDNNSIKRYPEVRGLRFSPETSTYSDRDRSSALTIARLHCMELLGQGRPLPFCRDACC

SEQ ID NO: 1207 - protein, 621 aa, Chlamydomonas sp.
QCIRNLHVLNIRMPCMATNASVKLARPPMPLVSPGPSSVDGRIMARSERSGLQATNVSLTQAASKATSSSRKKNPAVVKSFSTHVCPHTNNNPTCSDSNCSCKPIFLTNIPDASKSLKSRTSDQGSTSSAQDFYEYWDSSRQDLYRQLLWLPKTGSQGLVSSSLNGFARSTPARSSFSITETEPLKTSLGKTSCPSFKYIVADGTVEYATKSNAKPKLRTLKLKLNPTKAQKSMLAEFAGCSRFMYNKAVAARLGVGSTHKSVFRIRDRYVTNKVRGKGKMTNPYFKNRQWLLQCPKSVRQSAIKAALANIKACFSNLKAGNIKQFSAPFIRKKTELERGWAIEMDQKNVSKDGDKLFIFKDIFGNMRYFGSKQLHKLMLEENPTHDPKVQKSRFGEYFLVLSVAARDRRAERKPVHPDKVAIASIDPGVRKTMVTYSPDNEESFMLGQGQASDLVKLLLVHDKLQSRLDTEKTLRSKERMKIKKQMIRIRKRIFYLKKEFRDQTTNFLAARYDVLLVPQLETAKMTISAERELTTKVARQMLTLSHSVLFNRLKEKCEEYGTVFLHVLEHYTSQTCPMCGFLNKCGETYTCKNCQFTCDRDIVGAAGIFLKAVRTENPCS

SEQ ID NO: 1208 - protein, 813 aa, Chlamydomonas sp.
PRMEHVCDVCIKSSVMYKLCKMATKPPTVAKLKELLKLAEVAYSSKDNKDDIVRLCEDNGLIARPPPEYKTVEKMCVVKCALKKAMSLDDEEFGKFREHVDQLVNVVSRMLRRSSLVLTFHITSLLEKGLDIPDLYNMKDTYWKDWLRIGVDGIFPDEESKISYEAVKDSIGDVIGNDDADYIKSYPIYFDQVLNYAGHTLSTVVSNNAWVPLIPRLARLTSTTLNKLNAPKTLDTSKIIRGYDVMQAIQQEVQNMEGWPESVQEYVNEVREMLSVPDGSRVYDNYGKDMDFPTMVRFNYWIQTRLEDMDARRIRLMPIFNVQRVHVRLDLKTLVNLFRHMFPNDQNIVELSKWEHVKNPESFMLPQRPAQKKKKSCGPGEWDAYKSVLKQYDDDVKDIKATDEYRHAKGLYDTLVNARKTVAGSFFRKPPVKNGWVFDCSICTDGVSLSMQYSKTVQVLVSDLKKTCKKPRKEEGIKIAEKYDGSLKTILPDMGIVVLGVDPGRSNIATVTYLADDKNKTWKLTRGAFYHKSGIKKQTRQKELRFADMIPMWESLRENGAALSTSRTDKISAYLSNYAKFSDEWWRLALRRRESRDNLQRYIGKRKVKDSFWAGIKRCMMKELPGMKVCVAYGSAITKLKPTGPGEVAVPTGAMFASCKRIFKEDVSVTDEFKTTLMSWETGKEKERVYKIPSVCSADVNLRLGGERFGHTKSKTMPKVADCDHLGVRLYNKRKGAQEKHRRGGFATSLVDSQKSIERYPEVRGLRFSPETCIYSDRDRSSALTIARLHCMELMGLGRPLPFAHSSSVVVDE

SEQ ID NO: 1209 - protein, 688 aa, Chlamydomonas sp.
GNVGAILYHQKKKNTHPLLMWVVQDKGDDDINISVVKKTLNSLCMDVSRHQISSRIQSMVLLINHAVAEAYLFANFHITRCLDDGDFDVKQLPHLDRNFCYRCLLAVSTSNVRKDTLGQSFNDTMVAFDALRPAGYVKVDVRPWGQVIADVSIQMATMACNSVWANVDRVVIKYLRLKHPSLKKHFKKIVKAVVQYPESKIDTIIPEGLVHAIHIKEVVSHLRALFPLPRGKQFNTRAHLTMRLFHHVLTELGEVGRVDPKDKKTKKSHPRLFSILPRKNGFTISYVPISSMTFMKLLSMGDSPLESVSGDGRYENHTMLWRKYFNVQGLETKRSRFDNRILRDGKGVSVQMKQKGKEEVVEEGENEGYPKDANIVECKDAVGALRVGVDPGMTDIVTVASSAGRIESFSSARFSEVAGYNTSKRRTYKWNDETQDLVKSIPSPNTSNMVDLQDHVRAYLKALPILLQHRANKGYRSMRFFRYVGKQKTIEKVCDVIAPRAQTTVVGFGNWPNQGYGISRSCSGPIKEIRRCLSRRKNVLFKNVDERNTSCKCHGCFQRLVNMKADSVVWRGVCKESPIDGSITVEKQKMVVKNVKVHKVLHCRDSVKSASSNVRCGATWNRDVNAAKNLLLLLTTWMDGRERPEAFCVPSPPPKTTVSIEASVSAKPTDPPGFVSSLPCYPLGQLKC

SEQ ID NO: 1210 - protein, 695 aa, Chlamydomonas sp.
RVRIRVSGNWYHQKKNNTPSLLMGVVSDQGDDDDLNIMVVKKTLNSLCMDVSRQQICSRIQSMVLLINHAVAEAYLFAIFHITRCLDDVDFDVKQLPHLDRNFYYRCILAVSTSNVRKDTLGQSLKDSMVAFDALRPAGYVKVDVRPWGQVIADVSIQMAMMACNSVWANVDRVVIKYLRLKHPSLKKHFKKIVKAVVQYPESVVDKIIPAGLVHASHIKEVVRHLRTLLPLPRGKQFNTRAHLTMRLFHHVLTELGEVGRAEPKENKTKKSRPRLFSILPRKSGFTMSYVPISSMTLMKLLSMGDSPLESICGDGRHANHNMLWRKYFNVRGLETKMSRFDNRILSDGKGVSVQMKQKGKDDVADEGDNAGYPKDAGIKECKDASLRMGALRVGVDPGMTDIVTVASSAGCVESFSSARFSEAAGYKTSKRRTDKWNAETEDLVKSIPSPTTSSMSDLRGHVIGYLAALPILLHHRGSRGYRSMRFFRYVGKQKTIEKVCDVIAPRAQTTVVGFGNWSNQGYGISRSCSGPVKEIRKCLSRRKNVLFKNVDERNTSCTCHGCFQRLVNMKADSVVWRGDYRESPIDGTITFEKQKTVVKNVKVHKVLHCRDSVKSASSNVRCGATWNRDVNAAKNLLLLLTTWMDGRERPVAFCVPSPPPESPVSREASVSAQPTDPHGSVSSLPCYPLGQLNC

SEQ ID NO: 1211 - protein, 625 aa, Chlamydomonas sp.
RARIRVSGNWYHQKKNNTPSLLMGVVSDQGDDDDLNIMVVKKTLNSLCMDVSRQQICSRIQSMVLLINHAVAEAYLFANFHITRCLDDVDFDVKQLPHLDRNFYYRCILAVSTSNVRKDTLGQSLKDSMVAFDALRPAGYVKVDVRPWGQVIADVSIQMATMACNSVWANVDRVVIKYLRLKHPSLKKHFKKIVKAVVQYPESVVDKIIPAGLVHASHIKEVVRHLRTLFPLPRGKQFNTRAHLTMRLFHHVLTELGEVGRAEPKENKTKKSRPRLFSILPRKSGFTMSYVPISSMTLMKLLSMGDSPLESICGDGRHANHNMLWRKYFNVRGLETKMSRFDNRILSDGKGVSVQMKHKGKDDVADEGDNAGYLKDAGIKESTSSMSDLRDHVIGYLAALPILLHHRGSRGYRSMRFFRYVGKQKTIEKVCDVIAPRAQTTVVGFGNWSNQGYGISCSCSGPVKEIRKCLSRRKNVLFKNVDERNTSCTCHGCFQRLVNMKADSVVWRGDYRESPIDGTITFEKQKTVVKNVKVHKVLHCRDSVKSASSNVRCGATWNRDVNAAKNLLLLLTTWMDGRERPVAFCVPSPPPETPVSREASVSAQPTDPHGSVSSLPCYPLGQLNC

SEQ ID NO: 1212 - protein, 223 aa, Chlamydomonas sp.
RTTILQLSLVSPKEASLSRFMEFLDLWKSSRDTLYAEYSKSCWSEQRLRLYGGKKRVFAKFLNRVEKGKSGDLPDTRPVVLAYGSAKFAPTGRGELSVPTSTAFKECKNRFECVLVDEFRTSKMYHEDGTLLQQVGVCSDPKEAAEADEGPENKESRQRVVVRGLLWCSSTSNNNGKFFVNRDLNAAVNILNCAGSPKRLSWLRRTPGLPPLEKQRVAKLIIC

SEQ ID NO: 1213 - protein, 454 aa, Chlamydomonas sp.
SAPDDATVPSRAYRVGGGRTSGAKRKKNKKSRPRLFSILPRKSGFTMSYVPISSMTLMKLLSMGDSPLESICGDGRHANHNMLWRKYFNVRGLETKMSRFDNRILSDGKGVSVQMKQKGKDDVADEGENAGYPKDAGIEECKDASLRMGALRVGVDPGMTDIVTVASSAGRVKSFSSARFSEAAGYKTSKRRTDKWNAETEELVKSIPSPTTSSMSDLRDHAIGYLAALPILLHHRGSRGYRSMRFFRYVGKQKTIEKVCDVIAPRAQTTVVGFGNWYNQGYGISRSCSGPVKEIRKCLSRHKNVLFKNVDERNTSCTCHGCFQRLVNMKADSVVWRRDYRESPIVGTITFEKQKTVVKNVKVHEVLHCRDSVKSASSNVRCGATWNRDVNAAKNLLLLLTTWMDGRERPVAFCVPSPPPETPVSREASVSAQPTDPHGSVSSLHCYPLGQLNC

SEQ ID NO: 1214 - protein, 436 aa, Chlamydomonas sp.
IKVLASLQVPLWPSGRYSQVVPVGVPLDGQLPHLREAYLFTNFHITRCLDDVDFDVKQLPHLDQNFYYRCILAVSTSNVRKDTLGQSLKDSMVSVQMKQKGKDDVADEGDNAGYPKDAGIEECKDASLRMGALRVGVDPGMTDIVTVASSAGRVESFSSARFSKAAGYKTSKRRTDKWNAETEDLVKSIPSPTTSSMSDLRDHVIGYLAALPILLHHRGSRGYRSMRFFRYVGKQKTIVKVCDVIAPRAQTTVVGFGNWSNQGYGISRSCSGPVKEIRKCLSLCKNVLFKNVDERNTSCTCHGCFQRLVNMKADSVVWRGDYRESPIDGTITFEKQKTVVKNVKVHEVLHCRDSVKSASSNVRCGATWNRDVNAAKNLLLLLTTWMDGRERPVAFCVPSPPPETPVSREASVSAQPTDPHGSVSSLHCYPLGQLNC

SEQ ID NO: 1215 - protein, 205 aa, Chlamydomonas sp.
VGKQKTIEKVCDVIAPRAQTTVVGFGNWSNQGYGISRSCSGPVKEIRKCLSRRKNVLFKNVDERNTSCTCHGCFQRLVNMKADSVVWRGDYRESPIDGTITFEKQKTVVKNVKVHKVLHYRDSVKSASSNVRCGATWNRDVNAAKNLLLLLTTWMDGRERPVAFCVPSPPPETPVSREASVSAQSTDPHGSVSSLPCYPLGQLNC

SEQ ID NO: 1216 - protein, 710 aa, Chlamydomonas sp.
GNCQLVWYHQNNNHSLSMGVVTNNGDDDDLDIMVVKKTLNSLCMDVSRQQICSRIQSMVLVINHAVAEAYLFANFHITRCLDDGDFDVKQLPHLDRNFYYRCILAVSISNVRNDTLDQSLKDNMVAFDALRPAGYVKVDVRPWGQVIADVSIQMATMACNSVWANVDRVVIKYLRLKHPSLKKHFKKIVKAVVQYPDSDIDKIIPAGLVHANLIKDVVRRLRDLLPLPRGKQFNTRAHLTMRLFHHVLTELGADLKEKTTKKRPRLFSILPRKSGFTISYVPISSMTLMKLLSMGDSPLESVRGDGRHENHSMLWRKYFNVQGLETKGSRFDNRILSDGKGVSVQMKHQVGKDIAGEGGGDNAGYPKDASIEDCQDASLRQGALRVGIDPGMTDIVTIASSDGRVESFSSARFSEAAGYNTSNRRTNKWNADTQDLVKSIPSPTTSSMHDMQDHVRGYLSALPTLLQHRANRGYRSMRFFRYVGKQKTIEKVCDLIAPKAQKKTIEEKACDVIAPKAKKTVVAFGNWSNQGYGISRSCSGPVKEIRKCLSRRQNVLFKNVDERNTSCTCHGCFQKLVNMKADSVAWRRVQNEPSALIDGAPTTTTTFEKQKTVVKNVKVHKVLHCRNSVKSASSNVRCGATWNRDVNAAKNLLLLLTTWMDGKERPAAFCVPSSSPTPKTTVSREANVGAQPTDPPGSVSSLQLLSSGPA

SEQ ID NO: 1217 - protein, 437 aa, Chlamydomonas sp.
CGPGEWGAYKSVMKQYDDDVKDIKATDEYRHAKGLYDTLVNARKTVAGSFFRKPPVKNGWVFDCSICTDGVSLSMQYSKTVQVLVSDLKKTCKNPRKEEGIKIAEKYDGSLKTILPDMGIVVLGVDPGRSNIATVTYLADDKNKTWKLTRGAFYHKSGIKKQTRQKELRFADMIPMWESLRENGAALSTSRTDKISAYLSNYAKFSEEWWRLALRRRESRDNLQRYIGKRKVKDSFWAGIKRCMMKELPDMKVCVAYGSAITKLKPTGPGEVAVPTGAMFASCKRIFKEDVSVTDEFKTTLVSWETGKEKERVYKIPSVCSADVKLRLGGERFGHTKSKTMPKVADCDHLGVRLYNERKGAQEKHRRGGFATSLVDSQKSIERYPEVRGLRFSPETCIYSDRDRSSALTIARLHCMELMGLGRPLPFAHSSSVVVDE

SEQ ID NO: 1218 - protein, 794 aa, Chlamydomonas sp.
ECSREPVCRSRLHQNVFGVQFVMENGIGESSSLVHEADQHDDVAELVDYEGEEDEECAPGRAICVVKMKLSTFIPHDLLRNKIDTLVLDMNKLLGEGYIFANFHIARLFENGIAVPPVNRNFFYRCLIAVSTNKCKGSTLGEDFESSRLLFDLLREPGQSKVDIRGNVKNQIIADLSILMATMASNHLWTNLERRITTYLKWKYPQIAKRLRSDIVAALIKCPTKNLDVIFKMSPHTTKLPTKLPTSRLRSAKSAVALAKKRVGRKEPEGSPLRVRLTKLQERLEKLSEAWLSSKNLRVDADNAKRFFAREVAFCLRGVLPLPSGNTFASRAHMTLPLYHKILSETIEEKRKTKNEKHRTFSLLPYKSGFTLSHIPISKMAFFYMVNECHFDSCKADVASKNHQGIWERFANLKKVETVSRKFGYRIVTDGFAVSILMNKPTCLTCSMPADAFSTRAHEYVTTDEGGIVSFLDNVVVAAVDPGVTDIVTVTGLNGGTRSYSSVQYYRKGLIFKSQRQTDVWNLETADIVGGIIPDRDSSSSEQIGAYARFYMGAAPILLAHRASRGYRNLRFRRYCKKQKLIVEIADFVAPREKSAKVLVGFGDWKGLGATPISRRTCGPLQAIRFELRSRENVIMEDIDEFRTSQRCSCCENHLCNMVALTHRKKQDGTGWECTEGRKRIHKILHCKSSQSGAPRQQSGGMLHCGKTWDRDVNASRNILMLTLHQVFGRERPLAFRRDAPRSSSTTPPPPPDTDMGTQTVERFTKEATRNIFENLFNLLHPPTLPKSNDLQSG

SEQ ID NO: 1219 - protein, 702 aa, Chlamydomonas sp.
YQDKKRTLPPSISMGVVTNNGDDDDDLDIMVVKKTLNSLCMDVSRQQICSRIQSMVLVINHAVAEAYLFANFHITRCLDDVDFDVKQLPHLDRNLYYRCILAVSTSNVRKDTLGPSLKDSMVAFDALRPAGYLKVDVRQWGQVIADVSIQMATMACNSVWANVDRVVIKYLRLKHPSLKKHFNKIVKAVVQYPESDINKIIPASLVHANLIKDVVRRLRDLLPLPRGKQFNTRAHLTMRLFHHVLTELGADLKEKTTKKRPRLFSILPRKSGFTISYVPISSMTLMKLLSMGDSPLESFLGDGRHENHSMLWRKYFNVQGLETKGSRFDNRILSDGKGVSVQMKHQESEDVAVDNAGYPKDAILEDCQDASLRVGVDPGMTDIVTVASSAGRVESFSSARFSEAAGYNTSNRRTNKWNVDTQDLVKSIPSPTTSSMHDIQDHVRGYLSALPTLLRHRASRGYRSMRFFRYVGKKKTIEKVCDLIAPKAQKKTIKEKVCDVIAPRAQTTVVGFGNWSNQGYGISRSCSGPIKEIRRCLSRRKNVLFKNVDERNTSCTCHGCFQKLVNMKADSVVWRRVQNEPPSLINGAPTTTTTTTIEKQKTVVKNVKVHKVLHCRNSVKSASSKMRCGATWNRDVNAAKNLLLLLTTWMDGKERPATFCVPSSSPTPKPQFPERQMWALNQPTHLGQLAAYNCYPLGQLKC

SEQ ID NO: 1220 - protein, 305 aa, Chlamydomonas sp.
EQHRYSHVSGRRQKQDMEAYTRSFLPQVWYQETEKNSKKKRFSDMIPRWESLRENGAALSTSRTDDISAYLKNYATFSDEWWRMALLRRESRDNFQRYIGKRKAMDSFWAGIKRNMKLDHPDLRVRVAYGSAITTLKATGPGEVAVPTGSMFASCKRLFKEEVHVTDEFKTTLMSWETGAKKECVYKIPSVQITTEGQIRLGYELLGHTPLKETPKVSYRDQLAVRVYCTRKQIQEKHRRGGLAPSLVDNNSIKRYPEVRGLRFSPETSTYSDRDRSSALTIARLHCMELLGQGRPLPFCRDACC

SEQ ID NO: 1221 - protein, 586 aa, Chlamydomonas sp.
LRRHRIPVRRGFQEPCCRNDQGTSTPLSIHTEDWEMVCRLRTTLGVRDDDVTFYPPKKTPFSRGVLLLHLFIVKFGKGERSYLPISTRGQKYGYLDTKITTSLFAQAVRQSNKRRKEAAAEEAREVKAARLASGEKRPRKKKIETNAPPIASPPTLAPPPVDGEGDMEEDVGSTSVGELLGLTEESFKRRRKELRKVLRLQTRKAHRAERPGAKKTRLAKAKRRWANIGMGSLPKGCRIDSVETDGVGLRLCVKTKIDMRHYIRRVPPPVMTDDGASMSSGAQLTSRKKKAKTRGLPETPYFTPKDASDDRLPRPLVLGVDTGRAKLFVAAISKSAVQKPTSVVFTRHRYYYEMGHTRHRRWDLARREQNPAINAALLQLSESGGLRNCDPEKWAAYLNADQDNDAVLDAEYVLLVERARWRMRMFRSKKRSLDRAVNDLIEKATVGERMDRPLVFGIGDGGFPSSGPGELPAPTSALAVAFKRGLRRHATKGRVVVVLVLDEFRTTMCCCACGSVTTPTQVEYLGKDGTRQWKASNRLRACTTCNTTGKLRDRDVRAARNITWPTYNKYYGQDRPEYLKRGRQMG

SEQ ID NO: 1222 - protein, 236 aa, Chlamydomonas sp.
LVASIPSSKVASLDGMSAHVSGYLSVLKQLLVHRATRGYRSMRFLRYSGKQRTIEKVCDMISPRDKAVVVGFGNWANNGCGISRMCSGPIKEIRQRLASRLNVMFKNIDEFKTSCMCHACFEKLVNMKASSVKRKRAENGNWEKVALTSGKVHKVLHCHNSVCGATWNRDVNAAKDILLLLDTWMDGKGRPLPFNRNPVSPEACVANYRVPPTMDAWVSSACYPEDLPSMAEIQND

SEQ ID NO: 1223 - protein, 263 aa, Chlamydomonas sp.
RKRQGSSSTRIILAVNAYAGRCKSAGRRPRRRNDPLLRMAIQALSCWTWKTTHVMCFEKMLGVQAMVNDILVAEYIEDTWYARWKMLLWRRKRSVIMQHYAATIRHVALPGTPVVYGYGDAGFAACRRGEQAVPTTGKIYLLHRVASCLRDVNPSIATPVDEMRTTMCCHGCGEVMVDIKPPKRFAAEKVPALRGLKLCRGCGVNGNGHRLVASEMVAEDEEGGLVREALNAMISGGERPEYLRPRPRAKRPPRIRSGTIVAS

SEQ ID NO: 1224 - protein, 833 aa, Chlamydomonas sp.
YGQGLQVLGFIRWCDTYIKTLVDDIIHPMPLGCRQGYVTKDVLVARLVSAVPEGGALENKPARVLLGHAIFHGVVTANEVNETTERVETTIPCYLFSYVEDPLKRQAIEKYVLAASQLFRRGTIIANLVAIETLGAHTDLPVGSRPRFDMASSMPFGELADFYMEQDVRSSEAKHVFLPERWPTLNVQRSPRVQAVLSAYGDRIPRLPDWQIVMKPCGWDNAINRMATKFLGNLKVQAMKNLRDAVVDYVGVVSLYDEGSRSLVAGMIKGRLRPLSIHTEDWEMVCRLRTTLGVRDDDVTFYPPKKTPFSRGVLLLHLFIVKFGKGERSYLPISTRGRKYGYLDTKITTSLFALAVRQSNKRRKEAAAEEAREAKAARLASGEKRPRKKKIETNAPSIASPPTLAPPPVDGKGDMEEDVGSTSVGELLGLTEESFKRRRKELRKVLRLQTRKAHRAERPGAKKTRLAKAKRRWANIGMGSLPKGCRIDSVETDGVGLRLCVKTKIDMRPYIRRVPPPVMTDDGASTSSGAQLTSRKKKAKTRGLPETPYFTPKDASDDRLPRPLVLGVDTGRAKLFVAANSKSAVQKPTSVVFTRHRYYEMGHTRHRRWDLARREQNPAIKAALLQLSESGGLRNCDPEKWAAYLNADQDNDAVLDAEYVLLVERARWRMRMFRSKKRSLDRAVNDLIEKAAVGERMDRPLVFGIGDGGFPSTGPGELPAPTSALAVAFKRGLRRQATKGRVAVVLVLDEFRTTMCCCACGSVTTPPQVEYLGKDGTRQWKASNRLRACTTCNTTGKLRDRDVQAARNITWLTYNKYYGQDRPEYLKRGRQMG

SEQ ID NO: 1225 - protein, 535 aa, Chlamydomonas sp.
QYSSLDILLRLPLSFGVISVRLKLARLARTLHRWVTCQTDKATRRITRRRKLTEEIVNTIRQMLVENHGVMNRNHIQILLLECNGVRLCIPTISIAVRKLCGFSKKRTSRRFGGKRDADMHQRLVNTFETSIRERFGDPHRVVSIDECYFSEKVLPLYGYSLVGSKCVVTSPTTSWKKRSLLLAVADDGSKHFRVYEGSINKLRFFDFIMGLECPPKTTIILDNVAFHKDVTPMIDDFHTYHSRRQHLRWTLQERRQKAEVERRRNDPLLRLAIQALSCWTWKTTHVMCFEKMLGVQAMVNDILVAEYIEDTWYARWKMLLWRRKRSVIMQHYAATIRHVALPGTPVVYGYGDAGFAACGRGEQAVPTTGKIYLLRRVASCLRDVNPSIATPVDEMRTTMCCHGCGEVMVDIKPPNRFAAEKVPALRGLKLCRDCGVNGNGHRLVAIEMVAGVPGAMPMQDEEGELVRDLLLCVAAEGGNMLHACRVRNRDKNASRNIWEALNAMISGEERPEYLRPRPRAKRPPRIRSGTIVAS

SEQ ID NO: 1226 - protein, 331 aa, Chlamydomonas sp.
DVAERRMHEIASHDNWTKTALVASLGACNIGTRRRAMASYSAIVGNRVILLSLRIFVSHRARASAFLCGLDKVHRECAMYIKFYIRPTHVMCFEKMLGVQAMVNDILVAEYIEDTWYARWKMLLWRRKRSVIMQHYAATIRHVALPGTPVVYGYGDAGFAACGRGEQAVPTTGKIYLLRRVASCLRDVSPSIATPVDEMRTTMCCHGCGEVMVDIKPPNRFAAELRGLKLCRGCGVNGNGHRLVSIEMVAGVPGAMPLKDEEGELVRDLLLCVAAEGGNMLHACRVRNRDKNASRNIWEALNAMIKRPEYLRPRPRAKRPPRIRSGTIVAS

SEQ ID NO: 1227 - protein, 358 aa, Chlamydomonas sp.
QISCPCHLQRRYVHLAYHLLFYRYMTTDESGLVSFRDNVVVAAIDPGVTNILTVTGLDGCTRSYSSAQYYRKGLIFKSQRQTGIWNLETTDIVADVPDRDSSNSEQIRQYTRFYMGAAPMLLAHRAERGYRNLRFRRHCRKQKLIVEIADFVAPREKRTKVLVGFGDWKGLGATPISRRTSGPLQAIKFELRSRGNVIMEDVDEFRTSQRCSCCESSLCNMVALTHRKMQDGTGWECTEGRKRIHKILHCKSSQSGAPRQQSGGRLHCGKTWDRDVNDSRNILMLTLHQVFGRERPLAFRRDAPRSSLKSPQPPPDTDLGTQTVERFPVEATRNIFEHLSNLLHPPTLRKSNDLQVRL

SEQ ID NO: 1228 - protein, 788 aa, Chlamydomonas sp.
ECSREAVCRSRLHQNVYRIQSVMENGIGVSSEVHEVDQHDAVAELVDYEREDEDCALGRAICVVKMKLSTFIPHDGIRRKIDTLVMEMNKLLGEGYIFANFHIARLLENGIAVPPVNRNFFYRCLLAVSTNKCHGSTLGEDFESSRILFDLLREPGQSKVDIRGSMKNQIIADLTIIMATMASNHLWTNLERRIMTYLNWKYPKISKHLRADIVAAVIKCPTKYLDVIFKMSAHVVKLPTKLPTARLRVAKYAVDLAKKSVGRKEPKGSHLREKLAKLQARFKKLSEAWISSKNLRVDEDNVKRFIARDVAFCLRGVIPLPSGNNFSSRAHMTLPLYHKILSETIASGNEKLCTFSLLPYKSGFTISHIPISKMAFLYLVKECKLDSCKVDVASKNHHGIWERFANLKMVETVSRKFGYRIVTDGFAVSILMNKPTSLTCSMPKDEFSKRANEYMTTDESGLVSFRDNVVVAAIDPGVTDILTVTGLDGCTRSYSSAQYYRKGLIFKSQRQTGIWNLETTDIVADIPDRDSSNSEQIGQYARFYMGAAPMLLAHRAERGYRNLRFRRHCRKQKLIVEIADFVAPREKRTKVLVGFGDWKGLGATPISRRTSGPLQAIKFELRSRGNVIMEDVDEFKTSQRCSCCESSLCNMVALTHRKKQDGTGWECTEGRKRMHKILHCKSSQSGAPRQQSGGRLHCGKTWDRDVNASRNILMLTLHQVFGRERPLAFCRDAPRSSLKSPQPPPDTDLGTQTVERFPVEATRNIFEHLSNLLHPPTLRKSNDLQVRL

SEQ ID NO: 1229 - protein, 362 aa, Chlamydomonas sp.
NLRSTLVVCWHLVRHSVPPSGHHQEFLVYSGECKGEIVCLVKECDLDSCKVDVASKNHHGIWERFANLKMVETVYRKFGYRIVTDGFAVSILMNKPTCMTCSMPEDAFSKRANEYMTTDESGLVSFRDNVVVAAIDPGVTDILTVTGLDGCTRSYSSEQYYRKGLIFKSQRQTGIWNLETTDIVADVLDRDSSNSEQIGAYARFYMGAAPMLLAHRAVRGYRNLRFHRYCRKQKLIVEIADFVAPREKRTKVLVGFGDWKGLGATPISRRTSGPLQSIRFELRSRGNVIMEDVDEFRTSQRCSCCESPLCNMVALTHRKKQDGTGWECTEGRKRIHKILHCKSSQSGAPRQQSGGRFHCGKT

SEQ ID NO: 1230 - protein, 575 aa, Chlamydomonas sp.
SERSGLQATNVSLTQAASKATSSSRKKNPAVVKSFSTHVCPHTNNNPTCSDSNCSCKPIFLTNIPDASKSLKSRTSDQGSTSSAQDFYEYWDSSRQDLYRQLLWLPKTGSQGLVSSSLNGFARSTPARSSFSITKTEPLKTSLEKTSCPSFKYIVADGTVEDATKSNAKPKLRTLKLKLNPTKAQKSMLAEFAGCSRFMYNKAVAARLGVGSTHKSVFRIRDRYVTNKVRGEGKMPNPYFKNRQWLLQCPKSVRQSAIKAALANIKACFSNLKAGNIKQFSAPFRRKKTELDRGWAIEMDQKNVSKDGDKLFIFKDILGNMRYFGSKQFHKLMPEENPTHDPKVQKSRFGEYFLVLSVAARDRRADRKPVHPDKVATASIDPGVRKTMVTYSPENEESFMLGQGQASDLVKLLLVHDKLQSRLDTEKTLRSKERMKIKMQMIRIRKRIFYLKKEFRDQTTNFLAARYDVLLVPQLETAKMTISAERELTTKVARQMLTLSHSVLFNRLKEKCEEYGTVFLHVLEHYTSQTCPMCGFLNKCGETYTCKNCQFTRDRDIVGAAGIFLKAVRTENPCS

SEQ ID NO: 1231 - protein, 622 aa, Chlamydomonas sp.
PCIRNLHVLNIRMPCMATNASVKLARPPMPLVSPGPSSVDGRIMARSERSGLQATNVSLTQAASKATSSSRKKNPAVVKSFSTHVCPHTNNNPTCSDSNCSCKPIFLTNIPDASKSLKSRTSDQGSTSSAQDFYEYWDSSRQDLYRQLLWLPKTGSQGLVSSSLNGFARSTPARSSFSITKTEPLKTSLEKTSCPSFKYIVADGTVEDATKSNAKPKLRTLKLKLNPTKAQKSMLAEFAGCSRFMYNKAVAARLGVGSTHKSVFRIRDRYVTNKVRGEGKMPNPYFKNRQWLLQQCPQSVRQSAIKAALANIKACFSNLKAGNIKQFSAPFRRKKTELDRGWAIEMDQKNVSKDGDKLFIFKDILGNMRYFGSKQFHKLMPEENPTHDPKVQKSRFGEYFLVLSVAARDRRADRKPVHPDKVATASIDPGVRKTMVMYSPENEESFMLGQGQASDLVKLLLVHDKLQSRLDTEKTLRSKERMKIKMQMIRIRKRIFYLKKEFRDQTTNFLAARYDVLLVPQLETAKMTISAERELTTKVARQMLTLSHSVLFNRLKEKCEEYGTVFLHVLEHYTSQTCPMCGFLNKCGETYTCKNCQFTRDRDIVGAAGIFLKAVRTENPCS

SEQ ID NO: 1232 - protein, 306 aa, Chlamydomonas sp.
DCKSVRKQERPLDDKSKTWKLTRGAFYHKSGIKKQKKQQEKRFSDMIPRWESLRENGAALSTSRKDDISAYLKNYTTFSNEWWRMALRRRESRDNFQRYIGKRKAMDSFWAGIKRNMKLDHPDLKVRVAYGSAITKLKATGPGEVAVPTGSMFASCKRLFKEEVQMTDEFKTTLMSWETGAKKECVYKIPSVQITTEGQIRLGYELLGHTPLKETPKVSYRDQLAVRVYCTRKKIQEKHRRGGLAPSLVDNQSIKRYPEVRGLRFSPETSTYSDWDRSSALTIARLHCMELLGQGRPLPFCRDACC

SEQ ID NO: 1233 - protein, 493 aa, Chlamydomonas sp.
ISREKVLQPFWTPAYKIISETLLLPIETGYVDSGSSSSNHWSQKQEDKSQFLTVQTRKLVNKSSQKIYCQSSMSSVAGKWAKEAILEERIKPLKTIQMKIFPTKKQKTILDEFINTSRYVSNKAIECVENGHKPHFPSLRDLLVTSNTKKHSGTYKKLSKEIEDLHTLKHNTVDKLDKQKIIQEINTKNSPMRDEMKEIAYEKNHNLQGFETITPKKIRANAVKSVCDAYKSAFTNLNNGILKILPRTFKDDCILKISNKNTKKHKNLTIENNVDIVRYKGEYFAHILDVVVKNVKNESKDYTMCGIDPGDRSFATVYSCSILDNGKVSSYNTGDYTHRIDLLKKLNKKKSDMMTRRVVRKKQYNKIEKKKKDVVDCLHWETINHVLNHNDIVFYGDIKSQDITKGNKNKTLNQDFNDLKFYIFKNRLEYKASVLEKKVVIMNECYTTKTCSSCGTLNDDVGNKKVFTCPICNLVTGRDANASKNILMKGLLS

SEQ ID NO: 1234 - protein, 229 aa, Chlamydomonas sp.
SRFGEYFLVLSVADRDRRAERKPVHPDKVATASIDPGVRKTMVTYSPENEESFMLGQGQASDLVKLLLVHDKMQSRLDTEKTLRSKERMKIKKQMIRIRKRIFYLKKEFRDQTTNFLAARYDVLLVPQLETAKMTISAERELTTKVARQMLTLSHSVLFNRLKEKCAEYGTVFLHVLEHYTSQTCPMCGSLNKCGETYTCKNCQFTCDRDIVGAAGIFLKAVRTENPCS

SEQ ID NO: 1235 - protein, 713 aa, Chlamydomonas sp.
RETRRGFFSKVIEYNFWTLIQGNGDKMETIVNKEPPDKRTLPDRASKIKDRNNGEENVVKCTLSRIIADKDNKDVIIKVIKERVDSVSKRTYLAGVAVNRILKEVFKGVPDAQLHTVSVPSVDQNFIRQLMVGSRQAHMETRDATVERFFHNNYWFREKIEGREVIVKKKKQYVGAIARYDGDRNLYSHASKKYLTNFNNHYRVHLSTWIKKFVYSKENRILAKEIKDEHGIDETVFHRYLLYDIHSWGVKELDLIALHSLLPERTKMLLKIQHSILGRDEINRQWLKSVSNSAKMIWYNVFINRYLEATEDEGYAKLVNIAPIPTVKHAFITIDTDGLLGVLKDVGLIESLEKTLTNKEHWESVFDVENIRSAGKGVFTCTVDTDGVMACTHFLRAEKKKISIKNDGTAIKKQTKTLREFSESDPNVVVVANDPGRCNIACLTWKKNKVEEKYKGGRKRKRHCEFGSKRLTRERYYVESGVFKSRGPTKKWLSNIQECLDDLKDNSPKRTSLVSFDAYVAVMVNHWDSRWGEMSKSRWGAQRLRLYGGKKRVLARFFNEVQEAVGERKTIVVAYGSAKFAPGGKGELSVPTTSAFKAFSDRFKGRVAVIDEFRTTKIWHKDSTTVLQSVQSEKEGRTVRGLLWCSSTMENSKLFVNRDLNAAINIHNCFTMYPVRPGILARPKKYCKLEVVVGRKIDYKLTGSLQNAVSSEV

SEQ ID NO: 1236 - protein, 360 aa, Chlamydomonas sp.
SVFRIRDRYVTNKVRGKGKMPNPYFKNRQWLLQCPKSVRQSAIKAALANIKACFSNLKAGNIKQFSAPFRGKKTELERGWAIEMDQKNVSKDGDKLFIFKDILGNMRYFGSKQLHKLMPEENPTHDPKVQKSRFGEYFLVLSVAARDRRAERKPVHPDKVATASIDPGVRKTMVTYSPENEESFMLGQGQASDLVKLLLVHDKLQSRLDTEKTLRSKERMKIKKQMIRIRKRIFYLKKEFRDQTTNFLAARYNVLLVPQLETAKMTVSAERELTTKVARQMLTLSHSVLFNRLKEKCQEYGTVFLHVLEHYTSQTCPMCGFLNKCGETHTCKNCQFTCDRDIVGAAGIFLKAVRTENPCS

SEQ ID NO: 1237 - protein, 314 aa, Chlamydomonas sp.
RSLIEQAVQQDKSLRENGAALSTSRKDDISAYLKNYATFSDEWWRMALRRRESRDNFQRYIGKRKAMDSFWAGIKRNMKLDHPDLRVRVAYGSAITKLKATGPGEVAVPTGSMFASCKRLFKEEVHVTDEFKTTLMSWETGAKKECVYKIPSVQITTEGQIRLGYELLGHTPLKETPKVSYRDQLAVRVFCTRKKIQEKHRRGGLPRSSGTLRYEDCDSLQKTALTRTGTAPLLSQSQGCTAWNCWVKGDRFHFAGMRVVDGLQKNMMVFHCNVGCYTIRLHHKVYRTLQKAVSFQYAVECNTISLTTSSSECT

SEQ ID NO: 1238 - protein, 623 aa, Chlamydomonas sp.
METIVNTEPPDKRTRPDRASKIKDRKNGEENVVKCTLGRIIADKDNKDVIIKVIKERVDSVSKRTYLAGVAVNRILKEVFEGVPDAQLHTVSVPSVDQNFIRQLMVGSRQAYMETRDATVKRFFHNNYWFREKIEGREVIVKKKKQYVGAIARYDGDQNLYSHASKKYPTNFNNHYRVHLSTWIKKFVYSKENRILAKEIKDEHGIDETVFHRYLLYDTHSWGVKEDLIAIHSLLPERTKMLLKIQHSILGRDEINRQWLKSVSNSAKMIRYNVFINRYLEATEDEGYAKLVNIAPIPTVKHAFITIDTDGLLGVLKDVGLNESLEKTLTNKEHWESVFDVENIRSTGKGVFTCTIDTDGIMACTHFLRAEKKKISIKDDGTAIKKHTKTLREFSESDPNVVVVANDPGRCNIAFLTWKKNKVDEKDKGGRKRKRHCEFGSKRLTRERYYVESGVFKSRGPTKKWLSNIQDCLDDLKDNSPKRTSLVSFDAYVTVMVNHWDSRWGEMSKSRWGAQRLRLYGGKKRVLARFFNEVQEDVGERKTILLSLPLVARVNFLSLQRARSRRLAIVSRGELPSLTNSVPQRSGTRTAPPSSRVCSPKKKGAWFEACYGAVPPWRTASCL

SEQ ID NO: 1239 - protein, 685 aa, Chlamydomonas sp.
ECSREPVCRSRLHQNVFGVQFVMENEVGESSSLVHEADQHDDVAELVDYDGEEDEECAPGRAICVVKMKLSTFIPHDWLRRKIDTLVLDMNKLLGEGHIFTNFHIARLFENGIAVPPVNRNFFYRCLLAVSTNKCMGSTLGEDFENSRLLFYLLREQGRSKVDIRGRVNNQIVADLSILMATMASNHLWTNLERRITTYLKWKYPKIAKRLRSDIVAAVIKCPTKNLDVIFKMSPHTTKLPTKLPTARLRSAKSAVALVKKRVGRKEPEGSPLRVRLTKLQARLEKLSEAWLSSKNLRVDEDNAKSFFARDVAFCLRGVLPLPSGKTFASRAHMTLPLYHKILSETIEERKTKNEKLRTFSLLPYKSGFTLSHIPISKMAFFYMVNECHFDSCKADVAYKNHQGIWERFANLKKVETISRKFGYRIVTDGFAVSILMNKPTCLTCSMPADSFSTRAHEYVTTDKGGIVSFRDNVVVAAVDPGVTDIVTVTGLDGGTRSYSSAQYYRKGLIFKSQRQTDVWNLETADIVGDIIPDRDSSRSEQIGAYARIYMGAAPILLAHRASRGYRNLRFRRYCKKQKLIVEIADFVGPREKSAKVLVGFGDWKGLGATPITRRTCGPLQAIRFELRSRGNVIMEDVDEFRTSQRCSCCENRLCNMVALTHRKKQDGTGWECTEGRMRIHKILH

SEQ ID NO: 1240 - protein, 514 aa, Chlamydomonas sp.
KNIPDASKSLKSRTSDQGSTSSAQDFYEYWDSSRQDLYRQLLWLPKTGTQGLVSSSFNGFAHITPTRSSFSITKTKPLKTSLEKTSCPSFKYIVTDGTVEDATKSNAKPKLRTLKLKLNPTKAQKSMLEEFAGCSRFMYNKAVAARLGVGSTHKSVFRIRDRYVTNKVRGEGKMPNPYFKNRQWLLQCPKSLRQSAIKAALANIKACFSNLKAGNIKQFSAPFRRKKTELERGWAIEMDQKNVSKDGDKLFIFKDILGNMRYFGSKQLHKLMPEENPTHDPKVQKSRFGEYFLVLSVASRDRRAERKPVHPDKVAPASIDPGVRKTMVTYSPENEESFMLGQGQASDLVKLLLVHDKLQSRLDTEKTLRSKERMKIKKHMIRIRKRIFYLKKEFRDQTTNFLAARYDVLLVPQLETAKMTISAERELTTKVARQMLTLSQSVLFNRLKEKCAEYGTVFLHVLEHYTSQTCPMCGFLNKCGETYTCKNCQFTCDRDIVGAGGIFLKAVRTENPCS

SEQ ID NO: 1241 - protein, 490 aa, Chlamydomonas sp.
EISCPLPRGKQFNTRAHLTMRLFHHVLTELGADLKEKTTKKRPRLFSILPRKSGFTISYVPISSMTLMKLLSMGDSPLESVRGDGRQENHSMLWRKYFNVQGLEKKGSRFDNRILSDGKGVSVQMKHQVGKDVAGEGRGDNAGYPKDASIEDCQDASLRQGALRVGIDPGMTDIVTIASSDGRVESFSSARFSEAAGYNTSNRRTKKWNADTQDLVKSIPSPTTSSMHDMQDHVRGYLSALPTLLQHRANRGYRSMRFFRYGGKQKTIEKVCDLIAPKAQKKTIEEKVCDVIAPKAKKTVVGFGNWSNQGYGISRSCSGPVKEIRKCLSRRQNVLFKNVDERNTSCTCHGCFQKLVNMKADSVVWRRVQNEPSALIDGAPTTTTTTFEKQKTVVKNVKVHKVLHCRNSVKSASSNVRCGATWNRDVNAAKNLLLLLTTWMDGKERPAAFCVPSSSPTPKTTVSGEANVGAQPTDPPGSVSSLQLLSSGPA

SEQ ID NO: 1242 - protein, 793 aa, Chlamydomonas sp.
KMATKPPTVAKLKELLKLAEIPYLSKSNKDDLVRLCEDNGLIARPPPEYKTVEKMCVVKCALKKTMSLDDEEFGKFREHVDQLVNVVSRMLRRSSLVLTFHITSLLEKGLDIPDLYNMKDTYWKDWLRIGVDGIFPDEESKISYEAVKDSIGDVIGNDDADYIKSYPIYFDQVLNYAGHTLSTVVSNNAWVPLIPRLARLTSTTLNKLNAPKTLDTSKIIRGYDVMQAIQQEVQNMEGWPESVQEYVNEVREMLSVPDGSRVYDNYGKDMDFPTMVRFNYWIQTRLEDMDARRIRLMPIFNVQRVHVRLDLKTLVNLFRHMFPNDQNIVELSKWEHVKNPDSFMLPQRPAQKKKKSCGPGEWEAYKSVLKQYDDDVNDIKATDEYRHAKGLYDTLVNARKTVAGSFFRKPPVKNGWVFDCSICTDGVSLSMQYSKTVQVLVSDLKKTCKKPRKEECIKIAEKYDGSLKTILPDMGIVVLGVDPGRSNIATVPYLADDKNKTWTLTRGAFYHKSGIKKQTRQKELRFADMIPMWESLRENGAALSTSRTDKISAYLSNYAKFSDEWWRLALRRRESRDNLQRYIGKRKVKDSFWAGIKRCMMKELPDMKVCVAYGSAITKLKPTGPGEVAVPIGAMFASCKRIFKEDVSVTDEFKTTLMSWETGKEKERVYKIPSVCSADVKLRLGGERFGHTKSKTMPKVVDCDHLGVRLYNKRKGAQEKHRRGGFATSLVDSQKSIERYPEVRGLRFSPETCIYSDRDRSSALTIARLHCMELMGLGRPLPFAHSSSVVVDE

SEQ ID NO: 1243 - protein, 842 aa, Chlamydomonas sp.
WLVPTFLGPRRKRFQSRTTERRLRSRPILSASFPSPTPMWWSLQTTLVCIKSSVMYKLCKMATKPPTVAKLKELLKLAEVAYSSKDKKDDIVRLCEDNGLIARPPPEYKTVEKMCVVKCALKKAMSLDDEEFGKFREHVDQLVNVVSRMLRRSSLVLTFHVTRLMEGDLPIPNMYDMKDTYWKDWLRIGVDGVFPDEESRISYESVKDVIGKVLGSDDPDYINSYPIYFDQVLNYAGHTLSTVVSNNAWVPLVPRLTRLTKATLNALGAPKTIRVYDVMRVIQQEIQEMESWPESVQEYVREVRVRLKVPDGSRLYDDYGKDMDFPTMVRFNYWMQTRLEAIGARRIRLMPIFNVQRAHVRLDMKTLVNLFRHVFPKDPNIVELSKWKNVKDPDRFMLPLKPAVKKKKSCGLGEWEAYKLAQQKYDTDVNDIKATDEYRHAKGRYDTLVNARKTVAGSLFKKPPIKTGWVFDCSICTDGVSLSMQYSKTVQVRVSDLKKTSKRSRYDEGMSVSEQYDHKLKTTLPDMGIVVLGVDPGRSNIATVTYLADDKSKTWKLTRGSFYHKSGIKKQKKQQEKRFSDMIPRWESLRENGAALSTSRTDDISAYLKNYATFSDEWWRMALLRRESRDNFQRYIGKRKAMDSFWAGIKRNMKLDHPDLRVRVAYGSAITTLKATGPGEVAVPTGSMFASCKRLFKEEVHVTDEFKTTLMSWETGAKKECVYKIPSVQITTEGQIRLGYELLGHPPLKETPKVSYRDQLAVRVYCTRKQIQEKHRRGGLAPSLVDNNSIKRYPEVRGLRFSPETSTYSDRDRSSALTIARLHCMELLGQGRPLPFCRDACC

SEQ ID NO: 1244 - protein, 229 aa, Chlamydomonas sp.
YVGKQKTIEKVCDLIAPKAQKKTIEEKVCDVIAPKAKKTVVGFGNWSNQGYGISRSCSGPVKEIRKCLSRRQNVLFKNVDERNTSCTCHGCFQKLVNMKADSVVWRRVQNEPSALINGAPTTTTTFEKQKTVVKNVKVHKVLHCCNSVKSASSNVRCGATWNRDVNAAKNLLLLLTTWMDGKERPAAFCVPSSSPTPKNTVSGEANVGAQPTDPPGSVSSLQLLSSGPA

SEQ ID NO: 1245 - protein, 232 aa, Chlamydomonas sp.
YVGKQKTIEKVCDLIAPKAQKKTIEEKVCDVIAPKAKKTVVGFGNWSNQGYGISRSCSGPVKEIRKCLSRRQNVLFKNVDERNTSCTCHGCFQKLVNIKADSVVWRRVQNEPAALIDGAPTTTTTTTTFEKQKTVVKNVKVHKVLHCRNSVKSASSNVRCGATWNRDVNAAKNLLLLLTTWMDGKERPAAFCVPSSSPTPKTTVSGEANVGAQPTDPPGSVSSLQLLSSGPA

SEQ ID NO: 1246 - protein, 803 aa, Chlamydomonas sp.
PRMEHVCDVCIKSSVMYKLCRMATKPPTVAKLKELLKLAEVACSSKDKKDDIVRLCEDNGLIARPPPEYKTVEKMCVVKCALKKAMSLDDEEFGKFMEHVDQLVNVVSRMLRRSSLVLTFHVTRLMEGDLPIPNMYDMKDTYWKDWLRIGVDGVFPDEESRISYESVKDVIGKVLGSDDPDYINSYPIYFDQVLNYAGHTLSTVVLNNAWVPLVPRLTRLTKATLNALGAPKTIRVYDVMRVIQQEIQEMESWPESVKEYVREVRVRLKVPDGSRLYDDYGKDMDFPTMVRFNYWMQTRLEAIGARRIRLMPIFNVQRAHVRLDMKTLVNLFRHVFPKDPNIVELTKWKNVKDPDRFMLPLKPAVKKKKSCGPGEWEAYKLAQQKYDADVNDIKDTDEYRHAKGRYDTLVNAQKTVAGSFFKKPPVKTGWVFDCSICTDGVSLSMQYSKTVQVRVSDLKKTSKRSRDDEGMSVSEQYDHKLKTTLPDMGIVVLGVDPGRSNIATVTYLADDKSKTWKLTRGAFYHKSGIKKQKKQQEKRFSDMIPRWESLRENGAALSTSRTDNISAYLKNYATFSDEWWRMALLRRESRDNFQRYIGKRKAMDSFWAGIKRNMKLDHPDLRVRVAYGSAITTLKATGPGEVAVPTGSMFASCKRLFKEEVHVTDEFKTTLMSWETGAKKECVYKIPSVQITTEGQIRLGYELLGHTPLKETPKVSYRDQLAVRVYCTRKQIQEKHRRGGLAPSLVGNNSIKRYPQVRGLRFSPETSTYSDRDRSSALTIARLHCMELLGQGRPLPFCRDACC

SEQ ID NO: 1247 - protein, 688 aa, Chlamydomonas sp.
RNVGAILYHQKKKNTHPLLMGVVQDKGDDDINISVVKKTLNSLCMDVSRHQISSRIQSMVLLINHAVAEAYLFANFHITRCLDDGDFDVKQLPHLDRNFYYRCLLAVSTSNVRKDTLGQSFNDTMVAFDALRPAGYVKVDVRPWGQVIADVSIQMATMACNSIWANVDRVVIKYLRLKHPSLKKHFKKIVKAVVQYPESKIDTIIPEGLVHAIHIKEVVSHLRALFPLPRGKQFNTRAHLTMRLFHHVLTELGEVGRVDPKDKKTRKSHPRLFSILPRKNGFTISYVPMSSMTFMKLLSMGDSPLESVSGDGRYENHTMLWRKYFNVQGLETKRSRFDNRILSDGKGVSVQMKQKGKEEVVDEGENAGYPKDANIVECKDAVGALRVGVDPGMTDIVTVASSAGRIESFSSARFSEVAGYNTSKRRTYKWNDETQDLVKSIPSPNTSNMSDLQDHVRAYLKALPILLQHRANKGYRSMRFFRYVGKQKTIEKVCDVIAPRAQTTVVGFGNWSNQGYGISRSCSGPIKEIRRCLSRRKNVLFKNVDERNTSCKCHGCFQRLVNMKADSVVWRGVCKESPIDESITVEKQKMVVKNVKVHKVLHCRDSVKSASSNVRCGATWNRDVNAAKNLLLLLTTWMDGRERPEAFCVPSPPPKTTVSIEASVSAKPTDPPGFVSSFPCYPLGQLKC

SEQ ID NO: 1248 - protein, 231 aa, Chlamydomonas sp.
YVGKQKTIEKVCDLIAPKAQKKTIEEKVCDVIAPKAKKTVVGFGNWSNQGYGISRSCSGPVKEIRKCLSRRQNVLFKNVDERNTSCTCHGCFQKLVNMKADSVVWRRVQNEPSALIDGAPTTTTTTTFEKQKTVVKNVKVHKVLHCRNSVKSASSNVRCGATWNRDVNAAKNLLLLLTTWMDGKERPAAFCVPSSSPTPKTTVSGEANVGAQPTDPPGSVSSLQLLSSGPA

SEQ ID NO: 1249 - protein, 287 aa, Chlamydomonas sp.
QGLIFKSQRQTDVWNLETADIVGGIIPDRDSSSSEQIGAYARFYMGAAPILLAHRASRGYRNLRFRRYCKKQKLIVEIADFVAPRKKGAKVLVGFGDWKGLGATPISRRTCGPLQAIRFELRSRENVIMEDIDEFRTSQRCSCCENHLCNMVALTHRKKQDGTGWECTEGRKRIHKILHCKSSQSGAPRQQSGGMLHCGKTWDRDVNASRNILMLTLHQVFGRERPLAFRRDAPRSSSTTPPPPPDTDMGTQTVERFTKEATRNIFENLFNLLHPPTLPKSNDLQSG

SEQ ID NO: 1250 - protein, 794 aa, Chlamydomonas sp.
ECSREPVCRSRLHQNVFGVQFVMENGIGESSSLVHEADQHDDVAELVDYEGEEDGECAPGRAICVVKMKLSTFIPHDWLRNKIDTLVLDMNKLLGEGYIFANFHIARLFENGIAVPPVNRNFFYRCLIAVSTNKCKGSTLGEDFESSRLLFDLLREPGQSKVDIRGSVKNQIIADLSILMATMASNHLWTNIERRITTYLKWKYPQIAKRLRSDIVAALIKCPTKNLDVIFKMSPHTTKLPTKLPTSRLRSAKSAVALAKKRVGRKEPEGSPLRVRLTKLQERLEKLSEAWLSSKNLRVDADNAKRFFAREVAFCLRGVLPLPSGNTFASRAHMTLPLYHKILSETIEEKRKTKNEKHRTFSLLPYKSGFTLSHIPISKMAFFYMVNECHFDSCKADVASKNHQGIWERFANLKKVETVSRKFGYRIVTDGFAVSILMNKPTCLTCSMPADAFSTRAHEYVTTDEGGIVSFLDNVVVSAVDPGVTDIVTVTGLNGGTRSYSSAKYYRKGLIFKSQRQTDVWNLETADIVGGIIPDRDSSSSEQIGAYARFYMGAAPILLAHRASRGYRNLRFRRYCKKQKLIVEIADFVAPRKKSAKVLVGFGDWKGLGATPISRRTCGPLQAIRFELRSRENVIMEDIDEFRTSQRCSCCENHLCNMVALTHRKKQDGTGWECTEGRKRIHKILHCKSSQSGAPRQQSGGMLHCGKTWDRDVNASRNILMLTLHQVFGRERPLAFRRDAPRSSSTTPPPPPDTDMGTQTVERFTKEATRNIFENLFNLLHPPTLPKSNDLQSG

SEQ ID NO: 1251 - protein, 618 aa, Chlamydomonas sp.
QCIRNLHVLNIRMPCMATKASVKLARPPMPLVSPGPSSVDGRIMARSGLQATNVSLTQAASKATSSSRKKKPAVVKSFSTHVCPHTNNNPTCSDSNCSCKPIFLTNIPDASKSLKSRTSDQGSTSSAQDFYEYWDSSRQDLYRQLLWLPKTGSQGLVSSSLNGFARSTPARSSFSITKTEPLKTSLEKTSCPSFKYIVADGTVEDSTKSNAKPKLRTLKLKLNPTKAQKSMLAEFAGCSRFMYNKAVAARLGVGSTHKSVFRIRDRYVTNKVRGKGKMPNPYFKNRQWLLQCPKSVRQSAIKSALANIKACFSNLKAGNIKQFSAPFRRKKTELERGWVIEMDQKNVSKDGDKLFIFKEILGNMRYFGSKQLHKLMPEENPTHDPKVQKSRFGEYFLVLSVAARDRRAERKPVNPDKVATASIDPGVRKTMVTYSPENEESFMLGQGQASDLVKLLLVHDKLQSRLDTEKTLRSKERMKIKKLMIRIRKTIFYLKKEFRDQTTNFLAARYDVLLVPQLETAKMTISAERELTTKVARQMLTLSHSVLFNRLKEKCEEYGTVFLHVLEHYTSQTCPMCGFLNKCGETYTCKNCQFTCDRDIVGAAGIFLKAVRTENPCS

SEQ ID NO: 1252 - protein, 686 aa, Chlamydomonas sp.
METIVNKEPPDKRTRPDRAAKIKDRKNGEENVVKCTLSRIIADKDNKDVITKVIKERVDSVSKRTYLAGVAVNRILKEVFEGVPDAQLHTVSVPSVDQNFIRQLMVGSRQAHMETRDATVERFFHNNYWFREKIEGREVIVKKKKQYVGAIARYDGDRNLYSHASKKYLTNFNNHYRVHLSTWIKKFVYSKENRILAKEFKDEHGIDETVFHRYLLYDIHSWGVKEDLIAIHSLLPERTKMLLKIQHSIIGRDEINRQWLKSVSNSAKMIRYNVFINRYLEATEDEGYAKLVNIAPIPTVKHSFITIDTDGLLGVLKDVGLVESLEKTLTNKEHWESVFDVENIRSTGKGVFTCTIDTDGVMACTHFLRAEKKKISIKDDGTAIKKQTKTLREFSESDPNVVVVANDPGRCNIAFLTWKKNKVEEKDKGGRKRKRHCEFGSKRLTRERYYVESGVFKSRGPTKKWLSNIQDCLDDLKDNSPKRTSLESFDAYVTVMVNHWDSRWGEMSKSRWGAQRLRLYGGKKRVLARFFNEVQADVGERKTIVIAYGSSKFAPGGKGELSVPTTSAFNAFRDRFKGRVAVIDEFRTTKIWHKDSTTVLQSVQSEKKGRTVRGLLWCSSTMENSKLFVNRDLNAAINIHNCFTMYPTRPGILARPKKYCKLEVVVGRTIDYKLTGSLQNAVSSEV

SEQ ID NO: 1253 - protein, 652 aa, Chlamydomonas sp.
PRMEHVCDVCIKSSVMYKLCKMATKPPTVAKLKELLKLAEVAYSSKDKKDDIVRLCEDNGLIARPPPEYKTVEKMCVVKCALKKAMSLDDEEFGKFREHVDQLVNVVSRMLRRSSLVLTFHVTRLMEGDLPIPNMYDMKDTYWKDWLRIGVDGVFPDEESRISYEAVKDVIGKVLGSDDPDYINSYPIYFDQVLNYAGHTLSTVVSNNAWVPLVPRLTRLTKATLNALKAPKTIRVYDVMRVIQQEIQEMESWPESVQEYVREVRVRLKVPDGSRLYDDYGKDMDFPTMVRFNYWMQTRLESIGARRIRLMPIFNVQRAHVRLDMKTLVNLFRHVFPKDPNIVELSKWKDVKDPDRFMLPLKPVVKKKKSCGPGEWEAYKLAQQKYDADVNDIKDTDEYRHAKGRYDTLVNARKTVAGSFFKKPPVKTGWVFDCSICTDGVSLSMQYSKTVQVRVSDMKKTSKRSRDDEGMSVSEQYDHKLKTTLPDMGIVVLGVDPGRSNIATVTYLADDKSKTWKLTRGAFYHKSGIKKQKKQQEKRFSDMIPRWESLRENGAALSTSRTDDISAYLKNYDTFSDEWWRMALLRRESRDNFQRYIGKRKAMDSFWAGIKRNMKLDHPDLRVRVAYGSAITTLKATGPGEVAVPTGSMFAS

SEQ ID NO: 1254 - protein, 686 aa, Chlamydomonas sp.
METIVNKEPPDKRTRPDRAAKIKDRKNGEENVVKCTLSRIIADKDNKDVITKVIKERVDSVSKRTYLAGVAVNRILKEVFEGVPDAQLHTVSVPSVDQNFIRQLMVGSRQAHMETRDATVERFFHNNYWFREKIEGREVIVKKKKQYVGAIARYDGDRNLYSHASKKYLTNFNNHYRVHLSTWIKKFVYSKENRILAKEFKDEHGIDETVFHRYLLYDIHSWGVKEDLIAIHSLLPERTKMLLKIQHSIIGRDEINRQWLKSVSNSAKMIRYNVFINRYLEATEDEGYAKLVNIAPIPTVKHSFITIDTDGLLGVLKDVGLVESLEKTLTNKEHWESVFDVENIRSTGKGVFTCTIDTDGVMACTHFLRAEKKKISIKDDGTAIKKQTKTLREFSESDPNVVVVANDPGRCNIAFLTWKKNKVEEKDKGGRKRKRHCEFGSKRLTRERYYVESGVFKSRGPTKKWLSNIQDCLDDLKDNSPKRTSLESFDAYVTVMVNHWDSRWGEMSKSRWGAQRLRLYGGKKRVLARFFNEVQADVGERKTIVIAYGSSKFAPGGKGELSVPTTSAFNAFSDRFKGRVAVIDEFRTTKIWHKDSTTVLQSVQSEKEGRTVRGLLWCSSTMENSKLFVNRDLNAAINIHNCFTMYPTRPGILARPKKYCKLEVVVGRTIDYKLTGSLQNAVSSEV

SEQ ID NO: 1255 - protein, 801 aa, Chlamydomonas sp.
PRMEHVCDVCIKSSVMYKLCKMATKPPTVAKLKELLKLAEVAYSSKDKKDDIVRLCEDNGLIARPPPEYKTVEKMCVVKCALKKAMSLDDEEFGKFREHVDQLVNVVSRMLRRSSLVLTFHVTRLMEGDLPIPNMYDMKDTYWKDWLRIGVDGVFPDEESRISYEAVKDVIGKVLGSDDPDYINSYPIYFDQVLNYAGHTLSTVVSNNAWVPLVPRLTRLTKATLNALKAPKTIRVYDVMRVIQQEIQEMESWPESVQEYVREVRVRLKVPDGSRLYDDYGKDMDFPTMVRFNYWMQTRLEDMDARRIRLMPIFNVQRAHVRLDMKTLVNLFRHVFPKDPNIVELSKWKDVKDPDCFMLPLKPAVKKKKSCGPGEWEAYKLAQQKYDADVNDIKDTDEYRHAKGRYDTLVNARKTVAGSFFKKPPVKTGWVFDCSICTDGVSLSMQYSKTVQVRVSDLKKTSKRSRDDEGMSVSEQYDHKLKTTLPDMGIVVLGVDPGRSNIATVTYLADDKSKTWKLTRGAFYHKSGIKKQKKQQEKRFSDMIPRWESLRENGAALSTSRTDDISAYLKNYDTFSDEWWRMALLRRESRDNFQRYIGKRKAMDSFWAGIKRNMKLDHPDLRVRVAYGSAITTLKATGPGEVAVPTGSMFASCKRLFKEEVHVTDEFKTTLMSWETGAKKECVYKIPSVQITTEGQIRLGYELLGHTPLKETPKVSYRDQLAVRVYCTRKQIQEKHRRGGLAPSLVNNNSIKRYPEVRGLRFSPETSTYSDRDRSSALTIARLHCMELLGQGRPLPFCRDA

SEQ ID NO: 1256 - protein, 686 aa, Chlamydomonas sp.
METIVNKEPPDKRTRPDRAAKIKDRKNGEENVVKCTLSRIIADKDNKDVITKVIKERVDSVSKRTYLAGVAVNRILKEVFEGVPDAQLHSVSVPSVDQNFIRQLMVGSRQAHMETRDATVERFFHNNDWFRKKIEGREVIVKKKKQYVGAIARYDGDRNLYSHASKKYLTNFNNHYRVHLSTWIKKFVYSKENRILAKEFKDEHGIDVTVFHRYLLYDIHSWGVKEDLIAIHSLLPERTKMFLKIQHSIIGRDEINRQWLKSVSNSAKMIRYNVYINRYLEATEDEGYAKLVNIAPIPTVKHSFITIDTDGLLGVLKDLGLVESLEKTLTNKEHWESVFDVENIRSTGKGVFTCTIDTDGVMACTHFLRAEKKKISIKDDGTAIKKQTKTLREFSESDPNVVVVANDPGRCNIAFLTWKKNKVEEKDKGGRKRKMHCKFGSKRLTRERYYVESGVFKSRGPTKKWLSNIQDCLDDLKDNSPKRTSLESFDAYVTVMVNHSDSRWGEMSKSRWGAQRLRLYGGKKRVLARFFNEVQADVGERKTIVIAYGSSKFAPGGKGELSVPTTSAFNAFSDRFKGRVAVIDEFRTTKIWHKDSTTVLQSVLSEKEGRTVRGLLWCSSTMENSKLFVNRDLNAAINIHNCFTMYPTRPGILARPKKYCKLEVVVGRTIDYKLTGSLQNAVSSEV

SEQ ID NO: 1257 - protein, 240 aa, Chlamydomonas sp.
CLRKTRPTIRRSKNPASANISSYCLSLLGTERKPVNPDKVATASIDPGVRKTMVTYSPENEESFMLGQGQASDLVKLLLVHDKLQSRLDTEKTLRSKERMKIKKLMIRIRKTIFYLKKEFRDQTTNFLAARYDVLLVPQLETAKMTISAERELTTKVARQMLTLSHSVLFNRLKEKCEEYGTVFLHVLEHYTSQTCPMCGFLNKCGETYTCKNCQFTCDRDIVGAAGIFLKAVRTENPCS

SEQ ID NO: 1258 - protein, 460 aa, Chlamydomonas sp.
PCLCTTRYCRRPSKKNGKLKTKNIAHSRCCLTNLDSLCRTFRFRKWPFSIWSTSATLIHARQTLLPKTIKEYGSASQTSRKWETVSRKFGYRIVTDGFAVSILMNKPTCLTCSMPADAFSTRAHEYVTTDEGGIVSFLDNVVVAAVDPGVTDIVTVTGLNGGTRSYSSAQYYRKGLIFKSQRQTDVWNLETADIVGGIIPDRDSSSSEQIGAYARFYMGAAPILLAHRASRGYRNLRFRRYCKKQKLIVEIADFVAPRKKSAKVLVGFGDWKGLGATPISRRTCGPLQAIRFELRSRENVIMEDIDEFRTSQRCSCCENHLCNMVALTHRKKQDGTGWECTEGRKRIHKILHCKSSQSGAPRQQSGGMLHCGKTWDRDVNASRNILMLTLHQVFGRERPLAFRRDAPRSSSTTPPPPPDTDMGTQTVERFTKEATRNIFENLFNLLHPPTLPKSNDLQSG

SEQ ID NO: 1259 - protein, 686 aa, Chlamydomonas sp.
METIVNKEPPDKRTRPDRAAKIKDRKNGEENVVKCTLSRIIADKDNKDVITKVIKERVDSVSKRTYLAGVAVNRILKEVFEGVPDAQLHTVSVPSVDQNFIRQLMVGSRQAHMETRDATVERFFHNNYWFREKIEGREVIVKKKKQYVGAIARYDGDRNLYSHASKKYLTNFNNHYRVHLSTWIKKFVYSKENRILAKEFKDEHGIDETVFHRYLLYDIHSWGVKEDLIAIHSLLPERTKMLLKIQHSIIGRDEINRQWLKSVSNSAKMIRYNVFINRYLEATEDEGYAKLVNIAPIPTVKHSFITIDTDGLLGVLKDVGLVESLEKTLTNKEHWESVFDVENIRSTGKGVFTCTIDTDGVMACTHFLRAEKKKISIKDDGTAIKKQTKTLREFSESDPNVVVVANDPGRCNIAFLTWKKNKVEEKDNGGRKRKRHCEFGSKRLTRERYYVESGVFKSRGPTKKWLSNIQDCLDDLKDNSPKRTSLESFDAYVTVMVNHWDSRWGEMSKSRWGAQRLRLYGGKKRVLARFFNEVQADVGERKTIVIAYGSSKFAPGGKGELSVPTTSAFNAFRDRFKGRVAVIDEFRTTKIWHKDSTTVLQSVQSEKKGSTVRGLLWCSSTMENSKLFVNRDLNAAINIHNCFTMYPTRPGILARPKKYCKLEVVVGRTIDYKLTGSLQNAVSSEV

SEQ ID NO: 1260 - protein, 779 aa, Chlamydomonas sp.
DGNETSDSREIEGATKIGRSSILIKGQEGRYCPFMRRQWSHRQTPSRIQDGGKMCVVKCALKKAMSLDDEEFGKFREHVDQLVNVVSRMLRRSSLVLTFHVTRLMEGDLPIPNMYDMKDTYWKDWLRIGVDGVFPDEESRISYEAVKDVIGKVLGSDDPDYINSYPIYFDQVLNYAGHTLSTVVSNNAWVPLVPRLTRLTKATLNALKAPKTIRVYDVMRVIQQEIQEMESWPESVQEYVREVRVRLKVPDGSRLYDDYGKEMDFPTMVRFNYWMQTRLESIGARRIRLMPIFNVQRAHVRLDMKTLVNLFRHVFPKDPNIVELSKWKDVKDPDRFMLPLKPAFKKKKSCGPGEWEAYKLAQQKYDADVNDIKDTDEYRHAKGRYDTLVNARKTVAGSFFKKPPVKTGWVFDCSICTDGVSLSMQYSKTVQVRVSDLKKTSKRSRDNEGMSVSEQYDHKLKTTLPDMGIVVLGVDPGRSNIATVTYLADDKSKTWKLTRGAFYHKSGIKKQKKQQEKRFSDMIPRWESLRENGAALSTSRTDDISAYLKNYDTFSDEWWRMALLRRESRDNFQRYIGKRKAMDSFWAGIKRNMKLDHPDLRVRVAYGSAITTLKATGPGEVAVPTGSMFASCKRLFKEEVHVTDEFKTTLMSWETGAKKECVYKIPSVQITTEGQIRLGYELLGHTPLKETPNVSYRDQLAVRVYCTRKQIQEKHRRGGLAPSLVDKSIKRYPEVRGLRFSPETSTYSDRDRSSALTIARLHCMELLGQGRPLPFCRDA

SEQ ID NO: 1261 - protein, 801 aa, Chlamydomonas sp.
PRMEHVCDVGIKSSVMYKLCKMATKPPTVAKLKELLKLAEVAYSSKDKKDDIVRLCEDNGLIAKPPPEYKTVEKMCVVKCALKKAMSLDDEEFGKFREYVDQLVNVVSRMLRRSSLVLTFHVTRLMEGDLPIPNMYDMKDTYWKDWLRIGVDGVFPDEESRISYEAVKDVIGKVLGSDDPDYINSYPIYFDQVLNYAGHTLSTVVSNNAWVPLVPRLTRLTKATLNALKAPKTIRVYDVMRVIQQEIQEMESWPESVQEYVREVRVRLKVPDGSRLYDDYGKDMDFPTMVRFNYWMQTRLEAIGARRIRLMPIFNVQRAHVRLDMKTLVNLFRHVFPKDPNIVELSKWKDVKDPDRFMLPLKPAFKKKKSCGPGEWEACKLAQQKYDADVNDIKDTDEYRHAKGRYDTLVNARKTVAGSFFKKPPVKTGWVFDCSICTDGVSLSMQYSKTVQVRVSDLKKTSKRSRDDEGMSVSEQYDHKLKTTLPDMGIVVLGVDPGRSNIATVTYLADDKSKTWKLTRGAFYHKSGIKKKKKQQEKRFSDMIPRWESLRENGAALSTSRTDDISAYLKNYDTFSDEWWRMALLRRESRDNFQRYIGKRKAMDSFWAGIKRNMKLDHPDLRVRVAYGSAITTLKATGPGEVAVPTGSMFASCKRLFKEEVHVTDEFKTTLMSWETGAKKECVYKIPSVQITTEGQIRLGYELLGHTPLKETPNVSYRDQLAVRVYCTRKQIQEKHRRGGLAPSLVDNNSIKRYPEVRGLRFSPETSTYSDRDRSSALTIARLHCMELLGQGRPLPFCRDA

SEQ ID NO: 1262 - protein, 801 aa, Chlamydomonas sp.
PRMEHVCDVCIKSSVMYKLCKMATKPPTVAKLKELLKLAEVAYSSKDKKDDIVRLCEDNGLIARPPPEYKTVEKMCVVKCALKKAMSLDDEEFGKFREHVDQLVNVVSRMLRRSSLVLTFHVTRLMEGDLPIPNMYDMKDTYWKDWLRIGVDGVFPDEESRISYESVKDVIGKVLGSDDPDYINSYPIYFDQVLNYAGHTLSTVVSNNAWVPLVPRLTRLTKATLNALEAPKTIRVYDVMRVIQQEIQEMESWPESVQKYVREVRVRLKVPDGSRLYDNYGKDMDFPTMVRFNYWMQTRLEAIGARRIRLMPIFNVQRAHVRLDMKTLVNLFRHVFPKDPNIVELSKWKDVKDPDRFMLPLKPAFKKKKSCGPGEWEAYKLAQQKYDADVNDIKDTDEYRHAKGRYDTLVNARKTVAGSFFKKPPVKTGWVFDCSICTDGVSLSMQYSKTVQVRVSDLKKTSKRSRDDEGMSVSEQYDHKLKTTLPDMGIVVLGVDPGRSNIATVTYLADDKSKTWKLTRGAFYHKSGIKKQKKQQEKRFSDMIPRWESLRENGAALSTSRTDDISAYLKNYDTFSDEWWRMALLRRESRDNFQRYIGKRKAMDSFWAGIKRNMKLDHPDLRVRVAYGSAITTLKATGPGEVAVPTGSMFASCKRLFKEEVHVTDEFKTTLMSWETGAKKECVYKIPSVQITTEGQIRLGYELLGHTPLKEAPNVSYRDQLAVRVYCTRKQIQEKHRRGGLAPSLVDNNSIKRYPEVRGLQFSPETSTYSDRDRSSALTIARLHCMELLGQGRPLPFCRDA

SEQ ID NO: 1263 - protein, 813 aa, Chlamydomonas sp.
PRMEHVCDVCIKSSVMYKLCKMATKPPTVAKLKELLKLAEVAYSSKDKKDDIVRLCEDNGLIARPPPEYKTVEKMCVVKCALKKAMSLDDEEFGKFREHVDQLVNVVSRMLRRSSLVLTFHITSLLEKGLDIPDLYNMKDTYWKDWLRIGVDGIFPDEESKISYEAVKDSIGDVIGNDDADYIKSYPIYFDQVLNYAGHTLSTVVSNNAWVPLIPRLARLTSTTLNKLNAPKTLDTSKIIRGYDVMQAIQQEVQNMEGWPESVQEYVNEVREMLSVPDGSRVYDNYGKDMDFPTMVRFNYWIQTRLEDMDARRIRLMPIFNVQRVHVRLDLKTLVNLFRHMFPNDQNIVELSKWEHVKNPESFMLPQRPAQKKKKSCGPGEWDAYKSVLKQYDDDVKDIKATDEYRHAKGLYDTLVNARKTVAGSFFRKPPVKNGWVFDCSICTDGVSLSMQYSKTVQVLVSDLKKTCKKPRKEEGIKIAEKYDGSLKTILPDMGIVVLGVDPGRSNIATVTYLADDKNKTWKLTRGAFYHKSGIKKQTRQKELRFADMIPMWESLRENGAALSTSRTDKISAYLSNYAKFSDEWWRLALRRRESRDNLQRYIGKRKVKDSFWAGIKRCMMKELPGMKVCVAYGSAITKLKPTGPGEVAVPTGAMFASCKRIFKEDVSVTDEFKTTLMSWETGKEKERVYKIPSVCSADVNLRLGGERFGHTKSKTMPKVADCDHLGVRLYNKRKGAQEKHRRGGFATSLVDSQKSIERYPEVRGLRFSPETCIYSDRDRSSALTIARLHCMELMGLGRPLPFAHSSSVVVDE

SEQ ID NO: 1264 - protein, 594 aa, Chlamydomonas sp.
SGSTHRLQSAWRSDIVAALIKCPTKNLDVIFKMSPHTTKLPTKLPTSRLRSAKSAIALAKKRVGRKEPEGSPLRVRLTKLQERLEKLSEAWLSSKNLRVDADNAKRFFAREVAFCLRGVLPLPSGNTFASRAHMTLPLYHKILSETIEEKRKTKNEKHRTFSLLPYKSGFTLSHIPISKMAFFYMVNECHFDSCKADVASKNHQGIWERFANLKKVETVSRKFGYRIVTDGFAVSILMNKPTCLTCSMPADAFSTRAHEYVTTDEGGIVSFLDNVVVAAVDPGVTDIVTVTGLNGGTRSYSSAKYYRKGLIFKSQRQTDVWNLETADIVGGIIPDRDSSSSEQIGAYARFYMGAAPILLAHRASRGYRNLRFRRYCKKQKLIVEIADFVAPRKKSAKVLVGFGDWKGLGATPISRRTCGPLQAIRFELRSRENVIMEDIDEFRTSQRCSCCENHLCNMVALTHRKKQDGTGWECTEGRKRIHKILHCKSSQSGAPRQQSGGMLHCGKTWDRDVNASRNILMLTLHQVFGRERPLAFRRDAPRSSSTTPPPPPDTDMGTQTVERFTKEATRNIFENLFNLLHPPTLPKSNDLQSG

SEQ ID NO: 1265 - protein, 425 aa, Chlamydomonas sp.
KNKKSHPRLFSILPRKNGFTISYVPISSMTFMKLLSMGDSPLESVSGDGRYENHTMLWRKYFNVQGLETKRSRFDNRILSDGKGVSVQMKQKGKEEVVEEGENAGYPKDANIVECKDAVGALRVGVDPGMTDIVTVASSAGRIESFSSARFSKVAGYNTSKRRTYKWNDETQDLVKSIPSPNTSNMVDLQDHVRAYLKALPILLQHRANKGYRSMRFFRYVGKQKTIEKVCDVIAPRAQTTVVGFGNWSNQGYGISRSCSGPIKEIRRCLSRRKNVLFKNVDERNTSCKCHGCFQRLVNMKADSVVWRGVCKESPIDGSITVEKQKMVVKNVKVHKVLHCRDSVKSASSNVRCGATWNRDVNAAKNLLLILTTWMDGRERPEAFCVPSPPPKTTVSIEASVSAKPTDPPGFVSSLPCYPLGQLKC

SEQ ID NO: 1266 - protein, 802 aa, Chlamydomonas sp.
NIYHVCDVCIKSSVMYKLCKMATKPPTVAKLKELLKLAEVAYSSKDKKDDIVRLCEDNGLIARPPPEYKTVEKMCVVKCALKKAMSLDDEEFGKFRGHVDQLVNVVSRMLQRSSLVLTFHVTRLMEGDLPIPNMYDMKDTYWKDWLRIGVDGVFPDEESRISYESVKDVIVKVLGSDDPDYINSYPIYFDQVLNYAGHTLSTVVSNNAWVPLVPRLTRLTKGTLNALGAPKTIRVYDVMRVIQQEIQEMESWPESVQEYVREVRVRLKVPDGSRLYDDYGKDMDFPTMVRFNYWMQTRLEAIGARRIRLMPIFNVQRAHVRLDMKTLVNLFRHVFPKDPNIVELSKWENVKDPDRFMLPLKPSVKKKKSCGPGEWEAYKLAQQKYDADVKDIKATDEYRHSKGRYDTLVNARKTVAGSFFKKPPVKTGWVFDCSICTDGVSLSMQYSKTVQVRVSDLKKTSKRSRDEEGMSVSEQYDHKLKTTLPDMGIVVLGVDPGRSNIATVTYLADDKSKTWKLTRGAFYHKSGIKKQKKQQEKRFSDMIPRWESLRENGAALSTSRKDDISAYLKNYATFSDEWWRMALRRRESRDNFQRYIGKRKAMDSFWAGIKRNMKLDHPDLRVRVAYGSAITKLKATGPGEVAVPTGSMFASCKRLFKEEVHVTDEFKTTLMSWETGAKKECVYKIPSVQITAEGQIRLGYELLGHTPLKETPKVSYRDQLAVKVYCTRKQIQEKHRRGGLAPSLVDNNSIKRYPEVRGLRFSPETSTYSDRDRSSALTIARLHCMELLGQGRPLPFCRDACC

SEQ ID NO: 1267 - protein, 239 aa, Chlamydomonas sp.
YLGLLENYATFSDEWWRMALRRRESRDNFQRYIGKRKAMDSFWAGIKRNMKLDHPDLRVRVAYGSAITTLKATGPGEVAVPTGSMFASCKRLFKEEVHVTDEFKTTLMSWETGAKKECVYKIPSVQITTEGQIRLGYELLGHTPLKETPKVSYRDQLAVRVYCTRKQIQEKHRRGGLAPSLVDNNSIKRYPEVRGLRFSPETSTYSDRDRSSALTIARLHCMELLGQGRPLPFCRDACC

SEQ ID NO: 1268 - protein, 667 aa, Chlamydomonas sp.
SDCHPRGQPRSCCVVGLTQAKSMQSVHQVVNACMTSQSMSKNMPTLARPSHIQFQEGNAYAIAVSPASGKGTISNAKSVLCMTALVSTSSAGDCSMFWNSQTKGLSKKLWLPTVTASADSPSTSWNGSFEPMETGSWFSIKRMPPHPEQNSLMTSWQSSRCSAAELTADASTANVEMVARKLRLYPDAPTTAKLRQWFGCVRVTYNMALYRINTRPNTPKSMYWLRNRFVNACNIPKSMAFLLDTPKHVREGAVADLALPFKTNFARHRTDTSHRFRISYRTKKSDQSIVIPKSAIKLIDQGKEMRVYPKMLSAAIKHRQLHLPEGMTSVPSDCRLTMSKDGIFHLCIPCRRGSAFARENQPSERKSKHVVVRESSGIPEWAGQWASIDPGVRNFATVYSPNGTLVKLGDHDIERIAKLHVGLSKLQSCHDRCNRHKSKRNMRRAMIRARRRMKNLVDEVHHKAAAWLTKHFEHVIIPPFQTSRMVLKSSRRIGRKTVRDMLSWSHYTFRQRLIAKASVVGTNVYVRSEAWTTKTCTRCGHVKHDIGGAKRFKCSKCGLDIDRDASGARNIFLRNVQLTLCNNQSQYTKDPSHVKTAISGCGVASLKPGRRPKAPSCKTSHAEQNNLAPRRSTARSATNRGQGRRVASEESSHGIVPRDYSEAGLFC

SEQ ID NO: 1269 - protein, 272 aa, Chlamydomonas sp.
AYVSDMFDACDAFSTRAHEYVTTDEGGIVSFREYVVVAAVDPGVTDIVTVTGLDGGTRSYSSAQYYRKGLLFKSQRQTDVWNLETADIVGGIIPDRDSSRSEQIGAYARFYMGAAPILLAHRASKRYRNLRFRRYCKKQKLIVEIADFVAPREKSTKVLVGFGDWKGLGATPISRRTCGPLQAIRFELRSRENVIMEDVDEFRTSQRCSCCETAFATWLHSLIVRGKTVLVGNVRKDASGFTIFSTAKAVKAERHANRAAVGSTAGRLGTAM

SEQ ID NO: 1270 - protein, 403 aa, Chlamydomonas sp.
GHPGWMTSRFTCQIPSSNSFFKNPPVKNGWVFDCSICTDGVSLSMQYSKKVQIRVSDLKKTSMRSRDNEGLSVAEQYDRKLETTLTEMGIVVLGVDPGRSNIATVTYLAKGKSKTWKLTRGAFYHKSGIKKQKKQQEKRFSYMIPRWESLRENGAALSTSRKDDISAYLKNYATFSDEWWRMALRRRESRDNFQRYIGKRKAMDSFWAGIKRNMKLDHPDLRVRIAYGSAIKTMKATGPGEVAVPTGSMFASCKRLFKEEVHVTDEFKTTLMSWKTGAKKECVYKIPSVQITMEGQIRLGYELLGHTPLKETPKVSYRDQLAVRVYCTRKKIQEKHRRGGLAPSLVDNKSIKRYPEVRGLRFSPETSTYSDRDRSSALTIARLHCMELLGQGRPLPFCRDACC

SEQ ID NO: 1271 - protein, 300 aa, Chlamydomonas sp.
FSLSMQYSKTVQVCVSDLKKTSKRSRDEEGMSVSEQYDHKLKTTLPDMGIVVLGVDPGRSNIATVTYLADDKSKTWKLTRGAFYHKSGIKKQKKQQEKRFSDMIPRWESLRENGAALSTSRKDDISAYLKNYATFSDEWWRMALRRRESRDNFQRYIGKRKAMDSFWAGIKRNMKLDHPDLKVRVAYGSAITKLKATGPGEVAVPTGSMFASCKRLFKEEVHVTDEFKTTLISWETGAKKECVYKIPSVQITTEGQIRLGYELLGHTPLKETPKVSYRDQLAVRVYCTRKKSKKNTGGVA

SEQ ID NO: 1272 - protein, 621 aa, Chlamydomonas sp.
QCIRNLHVLNIRMPCMATNASVKLARPPMPLVSPGPSSVDGRIMARSERSGLQATNVSLTQAASKATSSSRKKNPAVVKSFSTHVSPHTNNNPTCSDSNCSCKPIFLTNIPDASKSLKLRTSDQGSTSSAQDFYEYWDLSRQDLYRQLLWLPKTGSQGLVSSSLNGFARSTPARSSFSITKTEPLKTSLDKTSCPSFKYIVADGTVEDATKSNAKPKLRTLKLKLNPTKAQKSMLAEFAGCSRFMYNKAVAAQLGVGSTHKSVFRIRDRYVTNKVRGKGKMPNPYFKNRQWLLQCPKSVRQSAIKAALANIKACFSNLKAGNIKQFSAPFRRKKTELERGWAIEMDQKNVSKDGDKLFIFKDILGNMRYFGSKQLHKLMPEENPTHDPKVQKSRFGEYFLVLSVAAKDRRAERKPVHPDKVATASIDPGVRKTMVTYSPENEESFMLGQGLGSDLVKLLLVHDKLQSRLDTEKNLRSKERMKIKKQMIRIWKRIFYLKKEFRDQTTNFLAARYDVLLVPQLETAKMTISAERELTTKVARQMLTLSHSVLFNRLKEKCEEYGTVFLHVLEHYTSQTCPMCGFLNKCGETYTCKNCQFTCDRDIVGAAGIFLKAVRTENPCS

SEQ ID NO: 1273 - protein, 798 aa, Chlamydomonas sp.
ECSREPVCRSRLHQNVFGVQFVMENGIGESSSLVHEADQHDDVAELVDYEGEEDGECAPGRAICVVKMKLSTFIPHDWLRNKIDTLVLDMNKLLGEGYIFANFHIARLFENGIAVPPVNRNFFYRCLIAVSTNKCKGSTLGEDFESSRLLFDLLREPGQSKVDIRGSVKNQIIADLSILMATMASNHLWTNLERRITTYLKWKYPQIAKRLRSDIVAALIKCPTKNLDVIFKMSPHTTKLPTKLPTSRLRSAKSAVALAKKRVGRKEPEGSPLRVRLTKLQERLEKLSEAWLSSKNLRVDADNAKRFFAREVAFCLRGVLPLPSGNTFASRAHMTLPLYHKILSETIEEKRKTKNEKHRTFSLLPYKSGFTLSHIPISKMAFFYMVNECHFDSCKADVASKNHQGIWERFANLKKVETVSRKFGYRIVTDGFAVSILMNKPTCLTCSMPADAFSTRAHEYVTTDEGGIVSFLDNVVVAAVDPGVTDIVTVTGLNGGTRSYSSAKYYRKGLIFKSQRQTDVWNLETADIVGGIIPDRDSSNSEQIGAYARFYMGAAPILLAHRASRGYRNLRFRRYCKKQKLIVEIADFVAPRKKSAKVLVGFGDWKGLGATPISRRTCGPLQAIRFELRSRENVIMEDIDEFRTSQRCSCCENHLCNMVALTHRKKQDGTGWECTEGRKRIHKILHCKSSQSGAPRQQSGGMLHCGKTWDRDVNASRNILMLTLHQVFGRERPLAFRRDAPRSSSTTPPPPPDTDMGTQTVERFTKEATRNIFENLFNLLHPPTTICSLDDYKVSHFI

SEQ ID NO: 1274 - protein, 820 aa, Chlamydomonas sp.
NHYGLFRPLMEHVCDVCIKSSVMYKLCKMATKPPTVAKLKELLKLAEVAYSSKDKKDDIVRLCEDNGLIARPPPEYKTVEKMCVVKCALKKAMSLDDEEFGKFREHVDQLVNVVSRMLRRSSLVLTFHITSLLEKGLDIPDLYNMKDTYWKDWLRIGVDGIFPDEESKISYEAVKDSIGDVIGNDDADYIKSYPIYFDQVLNYAGHTLSTVVSNNAWVPLIPRLARLTSTTLNKLNAPKTLDTSKIIRGYDVMQAIQQEVQNMEGWPESVQEYVNEVREMLSVPDGSRVYDNYGKDMDFPTMVRFNYWIQTRLEDMDARRIRLMPIFNVQRVHVRLDLKTLVNLFRHMFPNDQNIVELSKWGHVKNPDSFMLPQRPAQKKKKSCGPGEWEAYKSVMKQYDDDVKDIKATDEYRHAKGLYDTLVNARKTVAGSFFRKPPVKNGWVFDCSICTDGVSLSMQYSKTVQVLVSDLKKTCKKPRKEEGIKIAEKYDGSLKTILPDMGIVVLGVDPGRSNIATVTYLADDKNKTWTLTRGEFYHKSGIKKQTRQKELRFADMIPMWESLRENGAALSTSRTDKISAYLSNYAKFSDEWWRLALRHRESRDNLQRYIGKRKVKDSFWAGIKRCMMKELPDMKVCVAYGSAITKLKPTGPGEVAVPTGAMFASCKRIFKEDVSVTDEFKTTLMSWETGKEKERVYKIPSVCSADVKLRLGGERFGHTKSKTMPKVADCDHLGVRLYNKRKGAQEKHRRGGFATSLVDSQKSIERYPEVRGLRFSPETCIYSDRDRSSALTIARLHCMELMGLGRPLPFAHSSSVVVDE

SEQ ID NO: 1275 - protein, 533 aa, Chlamydomonas sp.
CNVITRCLDDGDFDVKQLPHLDRNFYYRCILAVSISNVRNDTLDQSLKDSMVAFDALRPAGYVKVDVRPWGQVIADVSIQMATMACNSVWANVDRVVIKYLRLKHPSLKKHFKKIVKAVVQYPDSDIDKIIPAGLVHANLIKDVVRRLRDLLPLPRGKQFNARAHLTMRLFHHVLTELGEDLKEKTTKKRPRLFSILPRKSGFTISYVPISSMTLMKLLSMGDSPLESVRGNGRHENHSMLWRKYFNVQGLETKGSHFDNRILSDGKGVSVQMKPQVGKDIAGEGGGDNAGYPKDASIEDCQDASLRQGALRVGINPGMTDIVTIASSDGRVESFSSARFREAAGYNTSNRRTNKWNADTQDLVSPFHRRLRAVCTTCRTMSEVTSARSRPSFTPSQQRLPIDAILSICGQQKTIEKVCDLIAPKAQKKTIEEKVCDVIAPKTKKTVVGFGNWSNQGYGISRSCSGPVKEIRKCLSRRQNVLFKNVDERNTSCTCHGCFQKLVNMKADSVVWRRVQNEPSALIDGGSYNTNNV

SEQ ID NO: 1276 - protein, 332 aa, Chlamydomonas sp.
ASQNSMTINSKRHCPIWVSSFWVWILVGATSLQSRIWQTTKARHGSLHAELFITSLVSRNRKNSKKNVSPDMIPRWESLRENGAALSTSRTDDISAYLKNYATFSDEWWRMALLRRESRDNFQRYIGKRKAMDSFWAGIKRNMKLDHPDLRVRVAYGSAITTLKATGPGEVAVPTGSMFASCKRLFKEEVHVTDEFKTTLMSWETGAKKECVYKIPSVHITTEGQIRLGYELLGHTPLKETPNVSYRDQLAVRVYCTRKQIQEKHRRGGLAPSLVDNNSIKRYPEVRGLRFSPETSTYSDRDRSSALTIARLHCMELLGQGRPLPFCRDACC

SEQ ID NO: 1277 - protein, 794 aa, Chlamydomonas sp.
EGSREPVCRSRLHQNVFGVQFVMENGIGESSSLVHEADQHDDVAELVDYEGEEDGECAPGRAICVVKMKLSTFIPHDWLRNKIDTLVLDMNKLLGEGYIFANFHIARLFENGIAVPPVNRNFFYRCLIAVSTNKCKGSTLGEDFESSRLLFDLLREPGQSKVDIRGRVKNQIIADLSILMATMASNHLWTNLERRITTYLKWKYPQIAKRLRSDIVAALIKCPTKNLDVIFKMSPHTTKLPTKLPTSRLRSAKSAVALAKKRVGRKEPEGSPLRVRLTKLQERLEKLSEAWLSSKNLRVDTDNAKRFFAREVAFCLRGVLPLPSGNTSASRAHMTLPLYHKILSETIEEKRKTKNEKHRTFSLLPYKSGFTLSHIPISKMAFFYMVNECHFDSCKADVASKNHQGIWERFANLKKVETVSRKFGYRIVTDGFAVSILMNKPTCLTCSMPADAFSTRAHEYVTTDEGGIVSFLDNVVVAAVDPGVTDIVTVTGLNGGTRSYSSAQYYRKGLIFKSQRQTDVWNLETADIVGGIIPDRDSSSSEQIGAYARFYMGAAPILLAHRASRGYRNLRFRRYCKKQKLIVEIADFVAPRKKSAKVLVGFGDWKGLGATPISRRTCGPLQAIRFELRSRENVIMEDIDEFRTSQRCCCCENHLCNMVALTHRKKQDGTGWECTEGRKRIHKILHCKSSQSGAPRQQSGGMLHCGKTWNRDVNASRNILMLTLHQVFGRERPLAFRRDAPRSSSTTPPPPPDTDMGTQTVERFTKEATRNIFENLFNLLHPPTLPKSNDLQSG

SEQ ID NO: 1278 - protein, 234 aa, Chlamydomonas sp.
SPFHRLIRATWSTCRTMSKLISKRSRSSYNTEPTKATDLCDVIAPRAQTTVVGFGNWSNQGYGISRSCSGPIKEIRRCLSRRKNVLFKNVDERNTSCKCHSCFQRLVNMKADSIVWRGVCKESPIDGSITVEKQKMVVKNVEVHKVLHCRDSVKSASSNVRCGATWNRDVNAAKNLLLLLTTWMDGRERPEAFCVPSPPPKTTVSIEASVSAKPTDPPGFVSSLPCYPLGQLKC

SEQ ID NO: 1279 - protein, 240 aa, Chlamydomonas sp.
ENPTHDPKVQKSRFGEYFLVLSVAARDRRAERKPVHPDKVATASIDPGVRKTMVTYSPENEESFMLGQGQASDLVKLLLVHDKLQSRLDTEKTLRSKERMKIKKLMIRIRKTIFYLKKEFRDQTTNFLAARYDVLLVPQLETAKMTISAQRELTTKVAHQMLTLSHSVLFNRLKEKCEEYGTVFLHVLEHYTSQTCPMCGFLNKCGETYTCKNCQFTCDRDIVGAAGIFLKAVRTENPCS

SEQ ID NO: 1280 - protein, 688 aa, Chlamydomonas sp.
RNVGTILYHQKKKNTHPLLMGVVQDKGDDDINISVVKKTLNSLCMDVSRHQISSRIQSMVLLINHAVAEAYLFANFHITRCLDDGDFDVKQLPHLDRNFYYRCLLAVSTSNVRKDTLGQSFHDTMVAFDALRPAGNVKVDVRPWGQVIADVSIQMATMACNSIWANVDRVVIKYLHLKHPSLKKRFKKIVKAVVQYPESKINTIIPEGLVNAIHNKEVVSHLRALFPLPRGKQFNTRAHLTMRLFHHVLTELGEVGRVDPKDKKTRKSHPRLFSILPRKNGFTISYVPISSMTFMKLLSMGDSPLESVSGDGRYENHTMLWRKYFNVQGLETKRSRFDNRILSDGKGVSVQMKQKGKEEVVEEGENAGYPKDANIVECKDAVGALRVGVDPGMTDIVTVASSAGCIESFSSARFSEVAGYNTSKRRTYKWNDETQDLVKSIPSPNTSNMSDLQDHVRAYLKALPILLQHRANKGYRSMRFFRYVGKQKTIEKVCDVIAPRAQTTVVGFGNWSNQGYGISRSCSGPIKEIRRCLSRRKNVLFKNVDERNTSCKCHGCFQRLVNMKADSVVWRGVCKESPIDGSITVEKQKMVVKNVKVHKVLHCRDSVKSASSNVRCGATWNRDVNAAKNLLLLLTTWMDGRERPEAFCVPSPPPKTTVSIEASVSAKPTDPPGFVISLPCYPLGQLKC

SEQ ID NO: 1281 - protein, 373 aa, Chlamydomonas sp.
VFDCSICTDGVSLSMQYSKTVQVRVSDLKKTSKRSRDDEGMSVSEQYDHKLKTTLPDMGIVVLGVDPGRSNIATVTYLADDKSKTWKLTRGAFYHKSGIKKQKKQQEKRFSDMIPRWESLRENGAALSTSRTDDISAYLKNYATFSDEWWRMALLRRESRDNFQRYIGKRKAMDSFWAGIKRNMKLDHPDLRVRVAYGSAITTLKATGPGEVAVPTGSMFASCKRLFKEEVHVTDEFKTTLMSWETGAKKECVYKIPSVQITTEGQIRLGYELLGHTPLKETPKVSYRDQLAVRVYCTRKQIQEKHRRGGLAPSLVDNNSIKRYPEVRGLRFSPETSTYSDRDRSSALTIARLHCMELLGQGRPLPFCRDACC

SEQ ID NO: 1282 - protein, 794 aa, Chlamydomonas sp.
ECSREPVCRSRLHQNVFGVQFVMENGIGESSSLVHEADQHDDVAELVDYEGEEDEECAPGRAICVVKMKLSTFIPHDWLRNKIDTLVLDMNKLLGEGYIFSNFHIARLFENGIAVPPVNRNFFYRCLIAVSTNKCKGSTLGEDFESSRLLFDLLREPGQSKVDIRGNVKNQIIADLSILMATMASNHLWTNLERRITTYLKWKYPQIAKRLRSDIVAALIKCPTKNLDVIFKMSPHTTKLPTKLPTARLRSAKSAVALAKKRVGRKEPEGSPLRVRLTKLQERLEKLSEAWLSSKNLRVDADNAKRFFAREVAFCLRGVLPLPSGNTFASRAHMTLPLYHKILSKTIEEKRKTKNEKHRTFSLLPSKSGFTLSHIPISKMAFFYMVNECHFDSCKADVASKNHQGIWERFANLKKVETVSRKFGYRIVTDGFAVSILMNKPTCLTCSMPADAFSTRAHEYVTTDEGGIVSFLDNVVVAAVDPGVTDIVTVTGLNGGTRSYSSAQYYRKGLIFKSQRQTDVWNLETADIVGGIIPDRDSSSSEQIGAYARFYMGAAPILLAHRASRGYRNLRFRSNCKKQKLIVEIADFVAPREKSAKVLVGFGDWKGLGATPISRRTCGPLQAIRFELRSRENVIMEDIDEFRTSQRCSCCENHLCNMVALTHRKKQDGTGWECTEGRKRIHKILHCKSSQSGAPRQQSGGMLHCGKTWDRDVNASRNILMLTLHQVFGRERPLAFRRDAPRSSSTTPPPPPDTDMGTQTVERFTKEATRNIFENLFNLLHPPTLPKSNDLLSG

SEQ ID NO: 1283 - protein, 710 aa, Chlamydomonas sp.
GNCQLVWYHQNNNHSLSMGVVTNNGDDDDLDIMVVKKTLNSLCMDVSRQQICSRIQSMVLVINHAVAEAYLFAIFHITRCLDDGDFDVKQLPHLDRNFYYRCILAVSISNVRNDTLDQSLKDSMVAFDALRPAGYVKVDVRPWGQVIADVSIQMATMACNSVWANVDRVVIKYLRLKHPSLKKHFKKIVKAVVQYPDSDIDKIIPAGLVHANLIKDVVRRLRDLLPLPRGKQFNTRAHLAMRLFHHVLTELGANLKEKTTKKRPRLFSILPRKSGFTISYVPISSMTLMKLLSMGDSPLESVRGDGRHENHSMLWRKYFNVQGLETKGSRFDNRILSDGKGVYVQMKHQVGKDIAGEGGGDNAGYPKDASIEDCQDASLRQGALRVGIDPGMTDIVTIASSDGRVESFSSARFSEAAGYNTSNRRTNKWNADTQDLVKSIPSPTTSSMHDMQDHVRGYLSALPTLLQHRANRGYRSMRFFRYVGKQKTIEKVCDLIAPKAQKKTIEEKVCDVIAPKAKKTVVGFGNWSNQGYGISRSCSGPVKEIRKCLSRRQNVLFKNVDERNTSCTCHGCFQKLVNMKADSVAWRRVQNEPSALIDGAPTTTTTFEKQKTVVKNVKVHKVLNCRNSVKSASSNVRCGATWNRDVNAAKNLLLLLTTWMDGKERPAAFCVPSSSPTPKITVSGEANVGAQPTDPPGSVSSLQLLSSGPA

SEQ ID NO: 1284 - protein, 802 aa, Chlamydomonas sp.
ECSREPVCRSRLHQNVFGVQFVMENGIGESSSLVHEADQHDDVAELVDYEGEEDGECAPGRAICVVKMKLSTFIPHDWLRNKIDTLVLDMNKLLGEGYIFANFHIARLFENGIAVPPVNRNFFYRCLIAVSTNKCKGSTLGEDFESSRLLFDLLREPGQSKVDIRGSVKNQIIADLSILMATMASNHLWTNLERRITTYLKWKYPQIAKRLRSDIVAALIKCPTKNLDVIFKMSPHTTKLPTKLPTSRLRSAKSAVALAKKRVGRKEPEGSPLRVRLTKLQERLEKLSEAWLSSKNLRVDADNAKRFFAREVAFCLRGVLPLPSGNTFASRAHMTLPLYHKILSETIEEKRKTKNEKHRTFSLLPYKSGFTLSHIPISKMALFYMVNECHFDSCKADVASKNHQGIWERFANLKKVETVSRKFGYRIVTDGFAVSILMNKPTCLTCSMPADAFSTRAHEYVTTDEGGIVSFLDNVVVAAVDPGVTDIVTVTGLNGGTRSYSSAKYYRKGLIFKSQRQTDVWNLETADIVGGIIPDRDSSSSEQIGAYARFYMGAAPILLAHRASRGYRNLRFRRYCKKQKLIVEIADFVAPREKSAKVLVGFGDWKGLGATPISRRTCGPLQAIRFELRSRENVIMEDIDEFRTSQRCSCCENHLCNMVALTHSKKQDGTSWECTEVRKRIHKILHCKSSQSGAPRQQSGGMLHCGKTWDRDVNASRNILMLTLHQVFGRERPLAFRRDAPRSSSTTPPHPLILIWGHRRLNGLPKRLLGISSRTSSTFCTPQRCPKATICSLDDYKVSHFI

SEQ ID NO: 1285 - protein, 793 aa, Chlamydomonas sp.
KMATKPPTVAKLKELLKLAEVPYSSKSNKDDLVRLCEDNGLIARPPPEYKTVEKMCVVKCALKKAMSLDDEEFGKFREHVDQLVNVVSRMLRRSSLVLTFHITSLLEKGLDIPDLYNMKDTYWKDWLRIGVDGIFPDEESKISYEAVKDSIGDVIGNDDADYIKSYPIYFDQVLNYAGHTLSTVVSNNAWVPLIPRLARLTSTTLNKLNAPKTLDTSKIIRGYDVMQAIQQEVQNMEGWPESVQEYVNEVREMLSVPDGSRVYDNYGKDMDFPTMVRFNYWIQKRLEDMDARRIRLMPIFNVQRVHVRLDLKTLVNLFRHMFPTDKNIVELSKWEHVKNPDSFMLPQRPAQKKKKSCCPGEWDAYKSVLKQYDDDVKDIKATDEYRHAKGLYDTLVNAKKTVAGSFFRKPPVKNGWVFDCSICTDGVSLSMQYSKTVQVLVSDLKKTCKKPRKEEGIKIAEKYDGSLKTILPDMGIVVLGVDPGRSNIATVTYLADDKNKTWKLTRGAFYHKSGIKKQTRQKELRFADMIPMWESLRENGAALSTSRTDKISAYLSNYAKFSEEWWRLALRRRESRDNLQRYIGKRKVKDSFWAGIKRCMMKELPDMKVCVAYGSAITKLKPTGPGEVAVPTGAMFASCKRIFKEDVSVTDEFRTTLMSWETGKEKERVYKIPSVCSADVKLRLGGERFGHTKSKTMPKVADCDNLGVRLYNKRKRAQEKHKRGGFATSLVDSQKSIERYPEVRGLRFSPETCIYSDRDRSSALTIARLHCMELMGLGRPLPFAHSSSVVVDE

SEQ ID NO: 1286 - protein, 687 aa, Chlamydomonas sp.
YQDKKRTLPPSISMGVVTNNGDDDDDLDIMVVKKTLNSLCMDVSRQQICSRIQSMVLVINHAVAEAYLFANFHITRCLDDVDFDVKQLPHLDRNFYYRCILAVSTSNVRKDTLGQSLKDSMVAFDALRPAGYLKVDVRQWGQVIADVSIQMATMACNSVLANVDRVVIKYLRLKHPSLKKHFNKIVKAVVQYPESDIDKIIPGSLVHANLIKDVVRRLRDLLPLPRGEQFNTRAHLTMRLFHHVLTELGADLKEKTTKKRPRLFSILPRKSGFTISYVPISSMTLMKLLSMGDSPLESFRGDGRHENHSMLWRKYFNVQGLETKGSRFDNRILSDGKGVSVQMKHQASEDVAVDNAGYPKDAILENCQDASLRVGVDPGMTDIVTVASSDGRVESVSSARFSEAAGYNTSNRRTNKWNVDTQDLVKSIPSPTTSSMHDMQDHVRGYLSALPTLLQHRASRGYRSMRFFRYVGKQKTIEKVCDLIAPKAQKKTIEEKVCDVIAPRAQTTVVGFGNWSNQGYGISRSCSGPIKEIRRCLSRRKNVLFKNVDERNTSCTCHGCFQKLVNMKADSVVWRRVQNEPPSLINGAPTTTTTIEKQKTVVKNVKVHKVLHCRNSVKSASSKVRCGCNLEPRRERCQEPSSASDDVDGRERATGDILCALIIAHPKNHSFRRGKCGRSTNRPTWVS

SEQ ID NO: 1287 - protein, 798 aa, Chlamydomonas sp.
PRMEHVCDVCIKSSVMYKLCKMATKPPTVAKLKELLKLAEVAYSSKDKKDDIVRLCEDNGLIARPPPEYKTVEKMCVVKCALEKAMSLDDEEFGKFRGHVDQLVNVVSRMLRRSSLVLTFHVTRLMEGDLPIPNMYDMKDTYWKDWLRIGVDGVFPDEESRISYEAVKDVIGKVLGSDDPDYINSYPIYFDQVLNYAGHTLSTVVSNNAWVPLVPRLTRLTKATLKALGAPKTIRVYDVMRVIQQEIQEMESWPESVQEYVREVRVRLKVPDGSRLYDDYGKDMDFPTMVRFNYWMQTRLEAMGARRIRLMPIFNVQRAHVRLDMKTLVNLFRHVFPKDPNIVELSKWENVKDPDRFMLPLKPAVKKKKSCGPGEWEAYKLAQQKYDADVKDIEATDEYRHAKGRYDTLVNARKTVAGSFSKKPPVKTGWVFDCSICTDGVSLSMQYSKTVQVRVSDLKKTSKRSRDEEGMSVSEQYDHKLKTTLPDMGVDPGRSNIATVTYLADDKSKTWKLTRGAFYHKSGIKKQKKQQEKRFSDMIPRWESLRENGAALSTSRKDDISAYLKNYATFSDEWWRMALRRRESRDNFQRYIGKRKAMDSFWAGIKRNMKLDHPDLRVRVAYGSAITKLKATGPGEVAVPTGSMFASCKRLFKEEVHVTDEFKTTLMSWETGAKKECVYKIPSVQITTEGQIRLGYELLGHTPLKETPKVSYRDQLAVRVYCTRKKIQEKHRRGGLAPSLVDNKSIKRYPEVRGLRFSPETSTYSDRDRSSALTIARLHCMELLGQGRPLPFCRDACC

SEQ ID NO: 1288 - protein, 396 aa, Chlamydomonas sp.
TQPRLRNRCWQSLQGAAGSCTTRRWQHGWASEALTSLSSEFEDRYVTNKVRGEGKMPNPYFKNRQWLLQCPKSVRQSAIKAALANIKACFSNLKACNIKQFSARFRRKKTELERGWAIEMDQKNVSKDGDKLFIFKDILGNMRYFGSKQLHKLMPEENPTHDPKVKNSRFGEYFLVLSVAARDRRAERKPVHPDKVATASIDPGVRKTMVTYSPENEESFMLGQGQASDLVKLLLVHDKLQSRLDTEKTLRSKERMKIKMQMIRIRKRIFYLKKEFRDQTTHFLAARYDVLLVPQLETAKMTISAERELTTKVARQMLTLSHSVLFNRLKEKCEEYGTVFMHVLEHYTSQTCPMCGFLNKCGETYTCKNCQFTCDRDIMGAAGIFLKAVRTENPCS

SEQ ID NO: 1289 - protein, 200 aa, Chlamydomonas sp.
VGIVFLLRICDMIAPRDTPTIVGFGNWSNQGNGISRPCSGPVKEIRKKLSQRGNVIFKNIDERNTSCTCHGCFERLVNMKANSVRWRRGQIGQLGVSVKEKVMVKNVKVHKILHCCNSVGSAPSVRCGTTWNRDVNASKNILLLLMTWVAGKERPAAFCVPSKNKITTSREATEMLRPVDPSLGSIGHTRLLSSEHQLKC

SEQ ID NO: 1290 - protein, 668 aa, Chlamydomonas sp.
TAIDRLPCCFTTAMGDDDSWIMVVKTTLNSLSRDTSRQQLCSRIREMVGTMNQVVAEAYLFANFHVTRCLDDPTFDAECLPKLDRNFYYRCLLAVSRSNIRKGTLGERLTASMDAFDGLRPEGCPKTDVRPWGQVVADLSIQMATMACNSVRSNLSKIIVKYLRLKYPSLKKHFNRIVKAVVQFPKSDINNFVPSTIGNAVEVKAVINHLRSLLPPSTGKQFNTRAHLTMRLFHSVLAELVSSSSSEPNRRAPRLFSLLPRKIGFTISYIPISSMTFMKILSMGNTPLEKIRGDGRLEDHDRLWRKYFNIGSVETKASRFDCRMITDGKGVSIQMRRELGQRLMETCGYPKDSSIGECLNATTHRNARCVGVDPGMTNIATVAFSRGGGTQSFSSSHFSHTAGYKTSKRRTDKWNVETLELVKSIPTSMTTSMDGLERHVQAYLGALPTLLQHRTNKGYRSMRFFCYVGKQKAIEEVCDMIAPRDTPTIVGFGNWSNQGNGISRPCSGPVKEIRKKLSQRGNVLFKNIDERNTSCTCHGCFERLVNMKANSVRWRRGQIGQLGVSVKEKVMVKNVKVHKILHCCNSVGSAPSMRCGTKWNRDVNASKNILLLLMTWVAGQERPDAFCVPSTNKITTSREANEMLRPVDPSLGSIGHTRLLSSEHQLKC

SEQ ID NO: 1291 - protein, 668 aa, Chlamydomonas sp.
TAIDRLPCCFTTAMGDDDSWIMVVKTTLNSLSRDTSRQQLCSRIREMVGTMNQVVAEAYLFANFHVTRCLDDPTFDAECLPKLDRNFYYRCLLAVSRSNIRKGTLGESLTASMDAFDGLRPEGCPKTDVRPWGQVVADLSIQMATMACNSVWSNLSKIIVKYLRLKYPSLKKHFDRIVKAVVQFPKSDINNFVPSTIGNAVEVKAVINHLRSLLPQSTGKQFNTRAHLTMRLFHSVLAELVSSSSSEPNRRTPRLFSLLPRKIGFTISYIPISSMTFMKILSMGNTPLEKIRGDGRHEDHDRLWRKYFNIGSVETKASRFDCRIITDGKGVSIQMRRKLGQRLMETSGYPKDSSIGECLNAITHRNARCVGVDPGMTDIATVAFSGGGGTQSFSSSHFSHTAGYKTSKRRTDKWNVETLELVKSIPTSMTTSMDGLERHVQAYLGALPTLLQHRTNKGYHSMRFFRYVGKQKDIEEVCDMIAPRDTPTIVGFGNWSNQGNRISRPCSGPVKEICKKLSQRGNVLFKNIDERNTSCTCHGCFERLVNMKANSVRWRRGQIGQLGVSVKEKVMVKNVKVHKILHCCNSVGSAPSVRCGTTWNRDVNASKNILLLLMTWVAGQERPDAFCVPSKNKITTSREATEMLRPVDPSLGSISHTRLLSSEHQLKC

SEQ ID NO: 1292 - protein, 622 aa, Chlamydomonas sp.
MVGTMNQVVAEAYLFANFHVTRCLDDPTFDAECLPKLDRNFYYRCLLAVSRSNIPKGTLGESLTASMDAFDGLRPEGCPKTDVRPWGQVVADLSIQMATMACNSVWSNLSKIIVKYLRLKYPSLKKHFDRIVKAVVQFPKSDINNFVPSTIGNAVEVKAVINHLRSLLPQSTGKQFNTRAHLTMRLFHSVLAELVSSSSSEPNRRAPRLFSLLPRKIGFTISYIPISSMTFMKILSMGNTPLEKIRGDGRLEDHDRLWRKYFNIGSVETKASMFDCRIITDGKGVSIQMRRELGQCLMETSGYPKDSSIGECLNATTHRNARCVGVDPGMTDIATVAFSSGGGTQSFSSSHFSHKSGYKTSKRRTDKWNVETSELVKSIPTSMTTSMDGLERHVQAYLGALPTLLQHRTNKGYRSMRFFRYVGKQKAIEEVCDMIAPRDTPTIVGFGNWSNQGNGISRPCSGPVKEIRKRLSQRGNVLFKNIDERNTSCTCHGCFKRLVNMKANSVRWRRGQIGQLGVSVKEKVMVKNVKVHKILHCCNSVGSAPSVRCGTTWNRDVNTSKNILLLLMTWVAGQERPAAFCVPSKNKIITSREATEMLRPVDPSLGSIGHTRLLSSEHQLKC

SEQ ID NO: 1293 - protein, 803 aa, Chlamydomonas sp.
PRMEHVCDVCIQSSVMYKLCKMATKPPTVAKLKELLKLAEVAYSSKDKKDDIVRLCEDNGLIARPPPEYKTVEKMCVVKCALKKAMSLDDEEFGKFREHVDQLVNVVSRMLRRSSQVLTFHVTRLMEGDLPIPNMYDMKDTYWKDWLRIGVDGVFPDEESRISYESVKDVIGKVLGSDDPDYINSYPIYFDQVLNYAGHTLSTVVSNNAWVPLVPRLTRLTKATLNALEAPKTIRVYDVMRVIQQEIQEMESWPESVQEYVREVRVRLKVPDGSRLYDDYGKDMDFQTMVRFNYWMQTRLEAIGARRIRLMPIFNVQRAHVRLDMKTLVNLFRHVFPKDPNIVELSKWKNVKDPDRFMLPLKPAVKKKKSCGPGEWEAYMLAQQKYDADVNDIKDTDEYRHAKGRYDTLVNARKTVASSFFKKPPVKTGWVFDCSICTDGVSLSMQYSKTVQFRVSDLKKTSKRSRDDEGMSVSEQYDHKLKTTFPDMGIVVLGVDPGRSNIATVTYLADDKSKTWKLTRGAFYHKSGIKKQKKQQEKRFSDMIPRWESLRENGAALSTSRTDDISAYLKNYATFSDEWWRMALLRRESRDNFQRYIGKRKAMDSFWAGIKRDMKLDHPDLRVRVAYGSAITTLKATGPGEVAVPTGSMFASCKRLFKEEVHVTDEFKTTLMSWETGAKKECVYKIPSVQITTEGQIRLGYELLGHTPLKETPKVSYRDQLAVRVYCTRKQIQEKHRRGGLAPSLVDNNSIKRYPEVRGLRFSPETSTYSDRDRSSALTIARLHCMELMGQGRPLPFCRDACC

SEQ ID NO: 1294 - protein, 793 aa, Chlamydomonas sp.
KMATKPPTVAKLKELLKLAEVPYSSKSIKDDLVRLCEDNGLIARPPPEYKTVEKMCVVNCALKKAMSLDDEEFGKFREHVDQLVNVVSRMLRRSSLVLTFHITSLLEKGLDIPDLYNMKDTYWKDWLRIGVDGIFPDEESRISYEAVKDSIGDVIGNDDADYIKSYPIYFDQVLNYAGHTLSTVVSNNAWVPLIPRLARLTSTTLNKLNAPKTLDTSKIIRGYDVMQAIQQEVQNMEGWPESVQEYVNEVREMLSVPDGSRVYDNYGKDMDFPTMVRFNYWIQTRLEDMDARRIRLMPIFNVQRVHVRLDLKTLVNLFRHMFPNDQNIVELSKWEHVKNPDSFMLPQRLAQKKKKSCGPGEWEAYKSVLKQYDDDVKDIKATDEYRHAKGLYDTLVNARKTVAGSFFRKPPVKNGWVFDCSICTDGVSLSMQYSKTVQVLVSDLKKTCKKPRKEEGIKIAEKYDGSLKTILPDMGIVVLGVDPGRSNIATVTYLADDKNKTWTLTRGAFYHKSGIKKQTRQKELRFADMIPMWESLRENGAALSTSRTDKISAYLSNYAKFSDEWWRLALRRRESRDNLQRYIGKRKVKDSFWAGIKRCMMKELPDMKVCVAYGSAITKLKPTGPGEVAVPTGAMFASCKRIFKEDASVTDEFKTTLMSWETGKEKERVYKIPSVCSADVKLRLGGERFGHTKSKTMPKVADCDHLGVRLYNKRKRAQEKHRRGGFATSLVDSQKSIERYPEVRGLRFSPETCIYSDRDRSSALTIARLHCMELMGLGRPLPFAHSSSVVVDE

SEQ ID NO: 1295 - protein, 537 aa, Chlamydomonas sp.
GRTGITMACNSIWANVDRVVIKYLRLKHPSLKKHFKKIVKAVVQYPESKIDTIIPEGLVHAIHIKEVVSHLRALFPLPRGKQFNTRAHLTMRLFHHVLTELGEVGRVDPKDKKTRKSHPRLFSILPRKNGFTISYVPISSMTFMKLLSMGDSPLESVSGDGRYENHTMLWRKYFNVQGLETKRSRFDNRILSDGKGVSVQMKQKGKEEVVEEGENAGYPKDANIVECKDAVGALRVGVDPGMTDIVTVASSAGRIESFSSARFSEVAGYNTSKRRTYKWNDETQDLVKSIPSPNTSNMSDLQDHVRAYLKALPILLQHRANKGYRSMRFFRYVGKQKTIEKVCDVIAPRAQTTVVGFGNWSNQGYGISRSCSGPIKEIRRCLSLRKNVLFKNVDERNTSCKCHGCFQRLVNMKADSVVWRGVCKESPTDGYITVEKQKMVVKNVKVHKVLHCRDSVKSASSNVRCGATWNRDVNAAKNLLLLLTTWMDGRERPEAFCVPSPPPKTTVSIEASVSAKPTDPPGFVSSFPCYPLGQLKC

SEQ ID NO: 1296 - protein, 502 aa, Chlamydomonas sp.
PILSIQILIKDVVRRLRDLLPLPRGKQFNTRAHLTMRLFHHVLTELGADLKEKTTKKRPRLFSILPRKSGFTISYVPISSMTLMKLLSMGDSPLESVRGDGRHENHSMLWRKYFNVQGLETKGSRFDNRILSDGKGVSVQMKHQVGKDIAGEGGGDNAGYPKDASIEDCQDASLRQGALRVGIDPGMTDIVTIASSDGRVESFSSARFSEAAGYNTSNRRTNKWNADTQDLVKSIPSPTTSSMQDHVRGYLSALPTLLQHRANRGYRSMRFFRYVGKQKTIEKVCDLIAPKAQKKTIEEKGCDVIAPKAKKTVVGFGNWYNQGYGISRSCSGPVKEIRKCLSRRQNVLFKNVDERNTSCTCHGCFQKLVNMKADSVVWRRVQNEPSALIDGAPTTTTTFEKQKTVVKNVKVHKVLHCRNSVKSASSNVRCGATWNRDVNAAKNLLLLLTTWMDGKERPAAFCVPSSSPTPKTTVSGEANVGAQPTDPPGSVSSLQLLSSGPA

SEQ ID NO: 1297 - protein, 795 aa, Chlamydomonas sp.
LWKMATKPPTVAKLKELLKLAEVPYSSKSNKDDPVRLCEDNGLIARPPPEYKTVEKMCVVKCALKKAMSLDDEEFGKFREHVDQLVNVVSRMLRRSSLVLTFHITSLLEKGLEIPDLYNMKDTYWKDWLRIGVDGIFPDEESKISYEAVKDSIGDVIGNDDADYIKSYPIYFDQVLNYAGHTLSTVVSNNAWVPLIPRLARLTSTTLNKLNAPKTLDTSKIIRGYDVMQAIQQEVQNMEGWPESVQEYVNEVREMLSVPDGSRVYDNYGKDMDFPTMVRFNYWIQTRLEDMDARRIRLMPIFNVQWVHVRLDLKTLVNLFRHMFPNDQNIVELSKWEHVKNPDSFMLPQRPAQKKKKSCGPGEWEAYKSVLKQYDDDVKDIKATDEYRHAKGLYDTLVNARKTVAGSFFRKPPVKNGWVFDCSICTDGVSLSMQYSKTVQVLVSDLKKTCKNPRKEEGIKIAEKYDGSLKTILPDMGIVVLGVDPGRSNIATVTYLADDKNKTWTLTRGAFYHKSGIKKQTRQKELRFADMIPMWESLRENGAALSTSRTDKISAYLSNYAKFSEEWWRLALRRRESRDNLQRYIGKRKVKDSFWAGIKRCMMKELPDMKVCVAYGSAITKLKPNGPGEVAVPTGAMFASCKRIFKEDVSVTDEFKTTLMSWETGKEKERVYKIPSVCSADVKLRLGGERFGHTKSKTMPKVADCDHLGVRLYNKRKGAQEKHRRGGFASSLVDSQKSIERYPEVRGLRFSPETCIYSDRDRSSALTIARLHCMELMGLGRPLPFAHSSSVVVDE

SEQ ID NO: 1298 - protein, 683 aa, Chlamydomonas sp.
YYITKRKTILTPLLMGVVQDKGDDDINISVVKKTLNSLCMDVSRHQISSRIQSMVLLINHAVAEAYLFANFHITRCLDDGDFDVKQLPHLDRNFYYRCLLAVSTSNVRKDTLGQSFNDTMVAFDALRPAGYVKVDVRPWGQVIADVSIQMATMACNSVWANVDRVVINYLRLKHPSLKKHFKKIVKAVVQYQESKIDTIIPEGLVHAIHIKEVVSHLRALFPLPRGKQFNTRAHLTMRLFHHVLTELGEVGRVDPKDKKTRKSHPRLFSILPRKNGFTISYVPISSMTFMKLLSMGDSPLESVSGDGRYENHTMLWRKYFNVQGLETKRSRFDNRILSDGKGVSVQMKQKGKEEVVEEGENAGYPKDANIVECKDEVGALRVGVDPGMTDIVTVASSAGRIESFSSARFSEVAGYNTSKRRTYKWNDETQDLVKSIPSPNTSNMSDLQDHVRAYLKALPILLQHRANKGYRSMRFFRYIGKQKTIEKVCDVIAPRAQTTVVGFGNWSNQGYGISRSCSGPIKEIRRCLSRRKNVLFKNVDERNTSCKCHGCFQRLVNMKADSVVWRGICKESPIDGSITVEKQKMVVKNVKVHKVLHCRDSVKSASSNVRCGATWNRDVNAAKNLLLLLTTWMDGRERPEAFCVPSPPPKTTVSIEASVSAKPTDPPGFVSSLPCYPLGQLKC

SEQ ID NO: 1299 - protein, 322 aa, Chlamydomonas sp.
YFVQQTNFPQTTIINIVECKDAVGALRVGVDPGMTDIVTVASSAGRIESFSSARFNEVAGYNTSKRRTYKWNDETQDLVKSIPSPNTSNMSDLQDHVRAYLKALPILLQHRANKGYRSMRFFRYVGKQKTIEKVCDVIAPRAQTTVVGFGNWSNQGYGISRSCSGPIKEIRRCLSRRKNVLFKNVDERNTSCKCHGCFQRLVNMKADSVVWRGICKESPIDGSITVEKQKMVVKNVKVHKVLHCRDSVKSASSNVRCGATWNRDVNAAKNLLLLLTTWMDGRERPEAFCVPSPPPKTTVSIEASVSAKPTDPPGFVSSQLKC

SEQ ID NO: 1300 - protein, 350 aa, Chlamydomonas sp.
RTLTSYRNPLGVNVGNVSIVEKSSQAINVYQVSIQMRRELGQCLMETSGYPKDSSIVECLNATTHRNARCVGVDPGMTDIATVAFSSGGGTQSFSSSHFSHTAGYKTSKRRTDKWNVETSELVKSIPTSMTTSMDGLERHVQAYLVALPTLLQHRTNKGYHSMRFFRYVGKQKAIEEVCDMISPKDTPTIVGFGNWSKQGNGISHPCSGPVKEIRKRLLQRGNVLFKNIDKRNTSCTCHGCFERLVNIKANSVRWRRGQIGQLGVSVKEKVMVKYVKVHKILHCCNSVGSAHSVRCGATWNRDVNASQNILLLLMTWVAGQERPAAFIVPSKKSQFPERQLREIAHSIVF

SEQ ID NO: 1301 - protein, 290 aa, Chlamydomonas sp.
TRDVWNLETADIVGGIIPDRDSSRSEQIGAYARFYMGAAPILLAHRASRGYRNLCFRRYCKKQKLIVEIADFVAPREKSTKVLVGFGDWKCLGATPISRRTCGPLQAIRFELRSRENVIMEDVDEFRTSQRCSCCETRLCNMVALTHRKRQDGTGWECTEGRKRIHKILHCKSSQSGAPRQQSGGMLHCGKTWDRDVNASRNILMLTLHQVFGRERPLAFRRDAPRSSSKTPPTPDTDLGIQTVERFTKEATRNIFENLFNLLHPNVAQPQRSAVWMIIRCVPLYLRTTV

SEQ ID NO: 1302 - protein, 609 aa, Chlamydomonas sp.
HQKKKNTPPLLMGVVQDKVDDDINISVVKKTLNSLCMDVSRHQISSRIQSMVLLINHAVAEAYLFANFHITRCLDDGDVKQLPHLDRNFYYRCLLAVSKSNVRKDTLGQSFNDTMVAFDALRPAGYVKVDVRPWGQVIADVSIQMATMACNSVWANVDRVVIKYLRLIHPSLKKHFKKIVKAVVQYPESKIDTIIPEGLVHAIHIKEVVSHLRALFPLPRGKQFNTRAHLTMRLFHHVLTELGEVGRVDPKDKKTRKSHPRLFSILPRKNGFTISYVPISSMTFMKLLSMGDLPLESVSGDGRYENHTMLWRKYFNVQGLETKRSRFDNRILSDGKGVSVQMKQKGKEEVVEEGENAGYPKDANIVECKDAVGALRVGVDLGMTDIVTVASSAGRIESFSSARFSEVAGYNTSKRRTYKWNDETQDLVKSIPSPNTSNMVDLQDHVRAYIIALPILLQHRANKGYRSMRFFRYVGKQKTIEKVCDVIAPRAQTTVVGFGNWSNQGYGISRSCSGPIKEIRRCLSRRKNVLFKNVDERNTSCKCHGCFQRLVNMKADSVVWRGVCKESPIDGSITVEKQKMVVKNVKVHKVLHCRDSVKSASSNVRCGAT

SEQ ID NO: 1303 - protein, 330 aa, Chlamydomonas sp.
INKLQDVDNVVVAAVDPGVTDIVTVTGLNGGTRSYSSAKYYRKGLIFKSQRQTDVWNLETADIVGGIIPDRDSSSSEQIGAYARFYMGAAPILLAHRASRGYRNLRFRRYCKKQKLIVEIADFVAPREKSAKVLVGFGDWKGLGATPISRRTCGPLQAIRFELRTRENVIMEDIDEFRTSQRCSCCENHLCNMVALTHRKKQDGTGWECTEGRKRIHKILHCKSSQSGAPKQQSGGMLHCGKTWDRDVNASRNILMLTLHQVFGRERPLAFRRDAPRSSSTTPPPPPPPDTDMGTQTVERFTKEARNIFENLFNLLHPPTLPKSNDLQSG

SEQ ID NO: 1304 - protein, 792 aa, Chlamydomonas sp.
ECSREPVCRSRLHQNVFGVQFVMENGIGASSSLVHEADQHDDVAELVDYEGEEDGECAPGRAICVVKMKLSTFIPHDWLRNKIDTLVLDMNKLLGEGYIFANFHIARLFENGIAVPPVNRNFFYRCLIAVSTNNCKGSTLGEDFESSRLLFDLLREPGQSKVDIRGSVKNQIIADLSILMATMASNHLWTNLERRITTYLKWKYPQIAKRLRSDIVAALIKCPTKNLDVIFKMSTHTTKLPTKLPTSRLRSAKSAVALAKKRVGRKEPEGSPLRVRLTKLQERLEKLSEAWLSSKNLRVDADNAKRFFAREVAFCLRGVLPLPSGNTVASRAHMTLPLYHKILSETIEEKRKTKNEKHRTFSLLPYKSGFTLSHIPISKMAFFYMVNECHFDSCKADVASKNHQGIWERFANLKKVETVSRKFGYRIVTDGFAVSILMNKPTCLTCSMPADAFSTRAHEYVTTDEGGIVSFLDNVVVAAVDPGVTDIVTVTGLNGGTRSYSSAQYYRKGLIFKSQRQTDVWNLETADIVGGIIPDRDSSSSEQIGAYARFYMGAAPILLAHRASRGYRNLRFRRYCKKQKLIVEIADFVAPRKKSAKVLVGFGDWKGLGATPISRRTCGPLQAIRFELRSRENVIMEDIDEFRTSQRCSCCENHLCNMVALTHRKKQDGTGWECTEGRKRIHKILHCKSSQSGAPRQQSGGMLHCGKTWDRDVNASRNILMLTLHQVFGRERPLAFRRDAPRSSSTTPPPDTDMGTQTVERFTKEATRNIFENLFNLLHPPTLPKSNDLQSG

SEQ ID NO: 1305 - protein, 686 aa, Chlamydomonas sp.
METIVNKEPPDKRTRPDRAAKIKDRKNGEENVVKCTLSRIIADKDNKDVITKVIKERVDSVSKRTYLAGVAVNRILKEVFEGVPDAQLHTVSVPSVDQNFIRQLMVGSRQAHMETRDATVERFFHNNYWFREKIEGREVIVKKKKQYVGAIARYDGDRNLYSHASKKYLTNFNNHYRVHLSTWIKKFVYPKENRILAKEFKDEHGIDETVFHRYLLYDIHSWGVKEDLIAIHSLLPERTKMLLKIQHSIIGRDEINRQWLKSVSNSAKMIRYNVFINRYLEATEDEGYAKLVNIAPIPTVKHSFITIDTDGLLGVLKDVGLVESLEKTLTNKEHWESVFDVENIRSTGKGVFTCTIDTDGVMACTHFLRAEKKKISIKDDGTAIKKQTKTLREFSESDPNVVVVANDPGRCNIAFLTWKKNKVEEKDKGGRKRKRHCEFGSKRLTRERYYVESGVFKSRGPTKKWLSNIQDCLDDLKDNSPKRTSLESFDAYVTVMVNHWDSRWGEMSKSRWGAQRLRLYGGKKRVLARFFNEVQADVGERKTIVIAYGSSKFAPGGKGELSVPTTSAFNAFRDRFKGRVAVIDEFRTTKIWHKDSTTVLQSVQSEKKGRTVRGLLWCSSTMENSKLFVNRDLNAAINIHNCFTMYPTRPGILARPKKYCKLEVVVGRTIDYKLTGSLQNAVSSEV

SEQ ID NO: 1306 - protein, 539 aa, Chlamydomonas sp.
METIVNKEPPDKRTRPDRAAKIKDRKNGEENVVKCTLSRIIADKDNKDVITKVIKERVDSVSKRTYLAGVAVNRILKEVFEGVPDAQLHTVSVPSVDQNFIRQLMVGSRQAHMETRDATVERFFHNNYWFREKIEGREVIVKKKKQYVGAIARYDGDRNLYSHASKKYLTNFNNHYRVHLSTWIKKFVYSKENRILAKEFKDEHGIDETVFHRYLLYDIHSWGVKEDLIAIHSLLPERTKMLLKIQHSIIGRDEINRQWLKSVSNSAKMIRYNVFINRYLEATEDEGYAKLVNIAPIPTVKHSFITIDTDGLLGVLKDVGLVESLEKTLTNKEHWESVFDVENIRSTGKGVFTCTIDTDGVMACTHFLRAEKKKISIKDDGTAIKKQTKTLREFSESDPNVVVVANDPGRCNIAFLTWKKNKVEEKDKGGRKRKRHCEFGSKRLTRERYYVESGVFKSRGPTKKWLSNIQDCLDDLKDNSPKRTSLESFDAYVTVMVNHWDSRWGEMSKSRWGAQRLRLYGGKKRVLARFFNEVQDGCR

SEQ ID NO: 1307 - protein, 794 aa, Chlamydomonas sp.
ECSREPVCRSRLHQNVFGVQFVMENGIGESSSLVHEADQHDDVAELVDYEGEEDGECAPGRAICVVKMKLSTFIPHDWLRNKIDTLVLDMNKLLGEGYIFANFHIARLFENGIAVPPVNRNFFYRCLIAVSTNKCKGSTLGEDFESSRLLFDLLREPGQSKVDIRGRVKNQIIADLSILMATMASNHLWTNLERRITTYLKWKYPQIAKRLRSDIVAALIKCPTKNLDVIFKMSPHTTKLPTKLPTSRLRSAKSAVALAKKRVGRKEPEGSPLRVRLTKLQERLEKLSEAWLSSKNLRVDADNAKRFFAREVAFCLRGVLPLPSGNTFASRAHMTLPLYHKILSETIEEKRKTKNEKHRTFSLLPYKSGFTLSHIPISKMAFFYMVNECHFDSCKADVASKNHQGIWERFANLKKVETVSRKFGYRIVTDGFAVSILMNKPTCLTCSMPADAFSTRAHEYVTTDEGGIVSFLDNVVVAAVDPGVTDIVTVTGLNGGTRSYSSAKYYRKGLIFKSQRQTDVWNLETADIVGGIIPDRDSSSSEQIGAYARFYMGAAPILLAHRASRGYRNLRFRRYCKKQKLIVEIADFVAPRKKSAKVLVGFGDWKGLGATPISRRTCGPLQAIRFELRSRENVIMEDIDEFRTSQRCSCCENHLCNMVALTHRKKQDGTGWECTEGRKRIHKILHCKSSQSGAPRQQSGGMLHCGKTWDRDVNASRNILMLTLHQVFGRERPLAFRRDAPRSSSTTPPPPPDTDMGTQTVERFTKEATRNIFENLFNLLHPPTLPKSNDLQSG

SEQ ID NO: 1308 - protein, 572 aa, Chlamydomonas sp.
SGLQATNVSLTQAASKATSSSRKKKPAVVKSFSTHVCPHTNNNPTCSDSNCSCNPIFLTNIPDASKSLKSRTSDQGSTSSAQDFYEYWDSSRQDLYRQLLWLPKTGSQGLVSSSLNGFARSTPARSSFSITKTEPMKTSLEKTSCPSFKYIVADGTVEDATKSNAKPKLRTLKLKLNPTKAQKSMLAEFAGCSRFMYNKAVAARLGVGSTHKSVFRIRDRYVTNKVRGEGKMPNPYFKNRQWLLQCPKSVRQSAIKAALANIKACFSNLKAGNIKQFSAPFRRKKTELERGWAIEMDQKNVSKDGDKLFIFKDILGNMRYFGSKQLHKLMPEENPTHNPKVQKSRFGEYFLVLSVAARERRAERKPVHPDKVATASIDPGVRKTMVTYSPENEESFMLGQGHASDLVKLLLVHDKLQSRLDTEKTLRSKERMKIKMQMIRIRKRIFYLKKEFRDQTTNFLAARYDVLLVPQLETAKMTISAERELTTKVARQMLTLSHSVLFNRLKEKCEEYGTVFLHVLEHYTSQTCPMCGFLNKCGETYTCKNCQFTCDRDIVGAAGIFLKAVRTENPCS

SEQ ID NO: 1309 - protein, 796 aa, Chlamydomonas sp.
ECSREPVCRSRLHQNVFGVQFVMENGIGESSSLVHEADQHDDVAELVDYEGEEDEECAPGRAICVVKMKLSTFIPHDWLRNKIDTLVLDMNKLLGEGYIFANFHIARLFENGIAVPPVNRNFFYRCLIAVSTNKCKGSTLGEDFESSRLLFDLLREPGQSKVDIRGNVKNQIIADLSILMATMASNHLWTNLERRITTYLKWKYPQIAKRLRSDIVAALIKCPTKNLDVIFKMSPHTTKLPTKLPTSRLRSAKSAVALAKKRVGRKEPEGSPLRVRLTKLQERLEKLSEAWLSSKNLRVDADNAKRFFAREVAFCLRGVLPLPSGNTFASRAHMTLPLYHKILSETIEEKRKTKNEKHRTFSLLPYKSGFTLSHIPISKMAFFYMVNECHFDSCKADVASKNHQGIWERFANLKKVETVSRKFGYRIVTDGFAVSILMNKPTCLTCSMPADAFSTRAHEYVTTDEGGIVSFLDNVVVAAVDPGVTDIVTVTGLNGGTRSYSSAQYYRKGLIFKSQRQTDVWNLETADIVGGIIPDRDSSSSVQIGAYARFYMGAAPILLAHRASRGYRNLRFRRYCKKQKLIVEIADFVAPREKSAKVLVGFGDWKGLGATPISRRTCGPLQAIRFELRSRENVIMEDIDEFRTSQRCSCCENHLCNMVALTHRKKQDGTGWECTEGRKRIHKILHCKSSQSGAPRQQSGGMLHCGKTWDRDVNASRNILMLTLHQVFGRERPLAFRRDAPRSSSTTPPPPPDTDMGTQTVERFTKEATRNIFENLFNLLHPPTLPKSNDLQSGLL

SEQ ID NO: 1310 - protein, 621 aa, Chlamydomonas sp.
QCIRNLHVLNIRMPCMATNASVKLARPPMPLVSPGPSSVDGRIMARSERSGLQATNVSLTQAASKATSSSRKKKQAVVKSFSTHVCPHTNNKPTCSDSNCSCKPIFLTNIPDASKSLKSRTSDQGSTSSAQDFYEYWDSSRQDLYRQLLWLPKTGSQGLVSSSLNGFARSTPARSSFSITKTEPLKTSLENTSCPSFKYIVADGTVEDATKSNAKPKLGTLKLKLNPTKAQKSILAEFAGCSRFMYNKAVAARLGVGSTHKSVFRIRDRYVTNKVRGKGKIPNPYFKNRQWLLQCPKSVRQSAIKAAFANIKACFSNLKAGNIKQFSAPFRRKKTELERGWAIEMDQKSVSKDGDKLFIFKDTLGNMRYFGSKQLHKLMPEENPTHDPKVQKSRFGEYFLVLSVAARDRRAERKPVHPDKVATASIDPGVRKTMVTYSPENEESFMLGQGQASDLVKLLLVHDKLQSRLDTEKTLRSKERMKIKKLMIRIRKRIFYLKKEFRDQTTKFLAARYDVLLVPQLETAKMTISAERELTTKVARQMLTLSHSVLFNRLKEKCEEYGTVFLHVLEHYTSQTCPMCGFLNKCGETYTCKNCQFTCDRDIVGAAGIFLKAVRTENPCS

SEQ ID NO: 1311 - protein, 453 aa, Chlamydomonas sp.
PIRFNHILVEEPFHKIVQAVVPLSGVGISDKTIPSSLVHANLIKYVVRRLRDLLPLPRGKQFNTRAHLTMRLFHHVLTELGADLKEKTTKKRPRLFSILPRKSGFTISYVPISSMTLMKLLSMGNSPLESFRGDGRHENHSMLWRKYFNVQGLETKGSRFDNRILSDGKGVSVQMKHQAGEDVAVEGGDTAGYPKEASLEDCQDASLRQGALRVGIDPGMTDIVTIASSDGRVDSFSSARFSEAAGYNTSNRRTNKWNADTQDLVKSIPSPTTSSMHDMQDHVRGYLSALPTLLQHRANRGYRSMRFFRYVGKQKTIEKVCDVIAPKAQKKTVVGFGNWSNQGYGISRSCSGPVKEIRKCLSRRQNVLFKNVDERNTSCTCHGCFQKLVNMKADSVVWRRVQNEPSALINGAPTTTTTIEKQKTVVKNVKVHKVLHCRNSVKGASSNVRCGAT

SEQ ID NO: 1312 - protein, 503 aa, Chlamydomonas sp.
KLSEAWLSSKNLRVDEDNAKRFFARDVAFCLRGVLPLPSGKTFASRAHMTLPLYHKILSETIASDNEKLRTFSLLPYKSGFTLSHIPISKMAFFYMVNECHFDSCKADVASKNHQGIWERFANLKIVETFSRKFGYRIVTDGFAVSILMNKPTCLTCSMPAEAFSTRVDEYMTTDEGGIVSFRDNVTVAAVDPGVTDIVTVTGLDGGTRSYSSAQYYRKGLIFKSQRQTDVWNLETTDIVGDNIPDRDSSRSEQIGTYARFYMGAAPILLAHRASRGYRKLRFRRYCKIQKLIVEIADFVAPREKSTKVIVGFGDWKGLGATPISRRTCGPLQAIRFELRSRENVIMEDVDEFRTSQRCSCCESRLCNMVALTHRKKQDGTGWECTEGRKRIHKILHCKSSQSGAPRQQSGGRLHCGKTWDRDVNASRNILMLTLHQVFGRERPLAFRRDTPRSSSKNPPPDTDMGTQTVERFTTEATRNIFENLFNLLHPPTLPKRDDLQSG

SEQ ID NO: 1313 - protein, 344 aa, Chlamydomonas sp.
DISGEGGGGDNAGYPKDASLEDCQDASLRQGALRVGIDPGMTDIVTIASSDGRVESFSSARFSEAAGYNTSNRRTNKWNADTQDLVKSIPSPTTSSMHDMQDHVRGYLSALPTLLQHRANRGYRSMRFFRYVGKQKTIEKVCDVIAPKAQKKTVVGFGNWSNQGYGISRSCSGPVKEIRKCLSRRQNVLFKNVDERNTSCTCHGCFQKLVNMKADSVVWSRVQNEPSALINGAPTTTTTTIEKQKTVVKNVKVHKVLHCRNSVKSASSNVRCGATWNRDVNAAKNLLLLLTTWMDGKERPGAFCVPSSSPTPKTTVSGEANVGTQPTDPPGSVSSLQLLSSGPA

SEQ ID NO: 1314 - protein, 217 aa, Chlamydomonas sp.
NQIRRRTCWAKTDLQDSLLPVLRSIVQRMSRVNPAEASKYKDDAAFLQGGSAGSVTFRAMHRDWDEFRTSQRCSCCESRLCNMVALTYRKKQDGTGWECTEGRKRINKILHCKSSQRRAPRQQSGGRLHCGKTWDRDVNASRNILMLTLHQVFGRERPLAFRRDTPRSSSKNPPPDTDMGTQTVERFTTEATRNIFENLFNLLHPPTLPKRDDLQSG

SEQ ID NO: 1315 - protein, 217 aa, Chlamydomonas sp.
NQIRRRTCWAKTDLQDSLLPVLRSIVQRMSRVNPAEASKYKDDAAFLQGGSAGSVTFRAMHRDWDEFRTSQRCSCCESRLCNMVALTYRKKQDGTGWECTEGRKRIHKILHCKSSQSGAPRQQSGGRLHCGKTWDRDVNASRNILMLTLHQVFGRERPLAFRRDTPRSFSKNPPPDTDMGTQTVERFTTEATRNIFENLFNLLHPPTLPKRDDLQSG

SEQ ID NO: 1316 - protein, 793 aa, Chlamydomonas sp.
KMATKPPTVAKLKELLKLAKVPYSSKSNKDDLVRLCEDNGLIARPPPEYKTVEKMCVVKCALKKAMSLDDEEFGKFREHVDQLVNVVSRMLRRSSLVLTFHITSLLEKGLDIPDLYNMKDTYWKDWLRIGVDGIFPDEESKISYEAVKDSIGDVIGNDDADYIKSYPIYFDQVLNYAGHTLSTVVSNNAWVPLIPRLARLTSTTLNKLNAPKTLDTSKIIRGYDVMQAIQQEVQNMEGWPESVQEYVNEVREMLSVPDGSRVYDNYGKDMDFPTMVRFNYWIQTRLEDMDARRIRLMPIFNVQRVHVRLDLKTLVNLFRHMFPNDQNIVELSKWEHVKNPDSFMLPQRPAQKKKKSCGPGEWEAYKSVLKQYDDDVKDIKATDEYRHAKGLYDTLVNAQKTVAGSFFRKPPVKNGWVFDCSICTDGVSLSMQYSKTVHVLVSDLKKTCKKPRKEEGIKIAEKYDGSLKTILPDMGIVVLGVDPGRSNIATVTYLADDKNKTWTLTRGAFYHKSGIKKQTRQKELRFADMIPMWESLRKKGAALSTSRTDKISAYLSNYAKFSDEWWRLALRRRESRDNLQRYIGKRKVKDSFWAGIKRCMMKELPDMKVCVAYGSAITKLKPIGPGEVAVPTGAMFASCKRIFKEDVSVTDEFKTTLMSWETGKEKERVYKIPSVCSADVKLRLGGERFGHTKSKTMPKVADCDHLGVRLYNKRKRAQEKHRRGGFATSLVDSQKSIERYPEVRGLRFSPETCIYSDRDRSSALTIARLHCMELMGLGRPLPFAHSSSVVVDE

SEQ ID NO: 1317 - protein, 422 aa, Chlamydomonas sp.
ALKQYDADVKDIKATDEYRHAKGRYDTLVNARKTVAGSFFRKPPVKNGWVFDCSICTDGVSLSMQYSKKVQVRVSDLKKTSMRSRDNEGLSVAEQYDRKLETTLTEMGIVVLGVDPGRSNIATVTYLAKGKSKTWKLTRGAFYHKSGIEKQKKQQEKRFSDMIPRWESLRENGAALSTSRKGDISAYLKNYATFSDEWWRMALRRRESRDNFQRYIGKRKAMDSFWAGIKRNMKLDHPDLRVRIAYGSAIKTMKATGPGEVAVPTGSMFASCKRLFKEEVHVTDEFKTTLMSWETGAKKECVYKIPSVQITMEGQIRLGYELLGHTPLKETPKVSYRDQLAVRVYCTRKQIQEKHRRGGLAPSLVDNKSIKRYPEVRGLRFSPETSTYSDRDRSSALTIARLHCMELLGQGRPLPFCRDACC

SEQ ID NO: 1318 - protein, 347 aa, Chlamydomonas sp.
GGRGRCQTRTFKNRQWLLQCPKSVRQSAIKAALANIKACFSNLKAGYIKQFSAPFRRKKTELERGWVIEMDQKNVSKDGDKLFIFKDILGNMRYFCSKQLHKLMPEENPTHDPKVQKSRFGEYFLVLSVAARDRRAERKPVHPDKVATASIDPGVRKTMVTYSPENEESFMLGQGQASDLVKLLLVHDKLQSRLDTEKTLQSKERMKIKKQMIRIRKRIFYLKKEFRDQTTNFLAAHYDVLLVPQLETAKMTISAERELTTKVAREMLTLSHSVLFNRLKEKCEEYGTVFLHVLEHYTSQTCPMCGFLNKCGGETYTCKNCQFTCDRDIVGAVGIFLKAVRTENPCS

SEQ ID NO: 1319 - protein, 410 aa, Chlamydomonas sp.
RVQTCKGLYDTLVNARKTVAGSFFRKPPVKNGWVFDCSICTDGVSLSMQYSKTVQVLVSDLKKTCKKPRKEEGIKIAEKYDGSLKTILPDMGIVVLGVDPGRSNIATVTYLADDKNKTWTLTRGAFYHKSGIKKQTRQKELRFAVMIPMWESLRENGAALSTWRTDKISAYLSNYAKFSDEWWRLALRRRESRDNLQRYIGKRKVKDSFWAGIKRCMMKELPDMKVCVAYGSAITKLKPTGPGEVAVPTGAMFASCTRIFKEDVSVTDEFKTTLMSWETGKEKERVYKIPSVCSADVKLRLGGERFGHTKSKTMPKVADCDHLGVRLYNKRKGAQEKHRRGGFATSLVDSQKSIERYPEVRGLRFSPETCIYSDRDRSSALTIARLHCMELMGLGRPLPFAPSSSVVVDE

SEQ ID NO: 1320 - protein, 691 aa, Chlamydomonas sp.
NGIKKCEYNIISQKKKNTHPLLMGVVQDKGDDDINISVVKKTLNSLCMDVSRHQISSRIQSMVLLINHAVAEAYLFANFHITRCLDDGDFDVKQLPHLDRNFYYRCLLAVSTSNVRKDTLGQSFNDTMVALDALRPAGYVKVDVRPWGQVIADVSIQMATMACNSIWANVDRVVIKYLRLKHPSLMKHFKKIVKAVVQYPESKIDTIIPEGLVHAIHIKEVVSHLRALFPLPRGKQFNTRAHLTMRLFHHVLTELGEVGRVDPKDKKTRKSHPRLFSILPRKNGFTISYVPISSMTFMKLLSMGDSPLESVSGDGRYENHTMLWRKYFNVQGLETKRSRFDNRILSDGKGVSVQMKQKGREEVVEEGENAGYPKDANIVECKDAVGALRVGVDPGMTDIVTVASSAGRIESFSSARFSEVAGYNTSKRRTYKWNDETQDLVKSIPSPDTSNLSDLQDHVRAYLKALPILLQHRAIKGYRSMRFFRYVGKQKTIEKVCDVIAPRAQTTVVGFGNWSNQGYGISRSCSGPIKEIRRCLSRRNNVLFKNVDERNTSCKCHGCFQRLVNMKADSVVWRGVCKESPIDGSITVEKQKMVVKNVKVHKVLHCRDSVKSASSNVRCGATWNRDVNAAKNLLLLLTTWMDGRERPEAFCVPSPPPKTTVSIEASVSAKPTDPTGFVSSLPCYPLGQLKC

SEQ ID NO: 1321 - protein, 688 aa, Chlamydomonas sp.
RNVSTILYHQEKKNAHPLLMGVVQDKGDDDINISVVKKTLNSLCMDVSRHQISSRIQSMVLLINHAVAEAYLFANFHITRCLDDGDFDVKQLPHLDRNFYYRCLLAVSTSNVRKDTLGQSFNDTMVAFDALRPAGYVKVDVRPWGQVIADVSIQMATMACNSVWANVDRVVIKYLRLKHPSLKKHFKKIVKAVVQYPESKIDTIIPEGLVHAIHIKEVVSHLRALFPLPRGKQFNTRAHLTMRLFHHVLTELGEVGRVDPKDKKTRKSHPRLFSTLPRKNGFTISYVPISSMTFMKLLSMGDLPLKSVSGDGRYENHTMLWRKYFNVQGLETKRSRFDNRILSDGKGVSVQMKQKGKEEVVEEGENAGYPKDANIVECKDAVGALRVGVDPGMTDIVTVASSAGRIESFSSARFSEVAGYNTSKRRTYKWNDETQDLVKSIPSPDTSNMSDLQDHVRAYLKALPILLQHRANKGYRSMRFFRYVGKQKTIEKVCDVIAPRAHTTVVGFGNWSNQGYGISRSCSGPIKEIRRCLSRRNNVLFKNVDERNTSCKCHGCFQRLVNMKADSVVWRGVCKESPIDGSITVEKQKMVVKNVKVHKVLHCRDSVKSASSNVRCGATWNRDVNAAKNLLLLLTTWMDGRERPEAFCVPSPPPKTTVSIEASVSAKPTDPTGFVSSLPCYPLGQLKC

SEQ ID NO: 1322 - protein, 326 aa, Chlamydomonas sp.
RRRNAGYPKDANIVECKDAVGALRVGVDPGMTDIVTVASSAGRIESFSSARFSEVAGYNTSKRRTYKWNDETQDLVKSIPSPNTSNMSDLQDHVRAYLKALPILLQHRANKGYRSMRFFRYVGKQKTIEKVCDVIAPRAQTTVVGFGNWSNQGYGISRSCSGPIKEIRRCLSRRNNVLFKNVDERNTSCKCHGCFQRLVNMKADSVVWRGVCKESPIDGSITVEKQKMVVKNVKVHKVLHCRDSVKSASSNVRCGATWNRDVNAAKNLLLLLTTWMDGRERPEAFCVPSPPPKTTVSIEASVIAKPTDPPGFVSSLPCYPLGQLKC

SEQ ID NO: 1323 - protein, 324 aa, Chlamydomonas sp.
VGYRQNHPSESRACEPHQRRCQTPERSLAAAKGEAVQHSSAPDNETVSSRAYRVGSGSKRENNKKNAPVCSVSFHARAAFTISYVPISSMTLMKLLSMGDSPLETFRGDGRHENHSMLWRKYFNVQGLETKGSRFDNRILSDGKGVSVQMKHQASEDVAVEGGDNAGYPKDAILEDCQDASLRVGVDPGMTDIVTVASSAGRVESFSSARFSEAAGYNTSNRRTNKWNVDTQDLVKSIPSPTTSSMHDMQDHVRGYLSALPTLLQHRASRGYRSMRFFRYVGQQKTIEKVCDLIAPKAQKKTIEEKVCDVIAPRAQTTVVGIGN

SEQ ID NO: 1324 - protein, 688 aa, Chlamydomonas sp.
RNVGTILYHQKKKNTHPLLMGVVQDKGDDDINISVVKKTLNSLCMDVSRHQISSRIQIMVLLINHAVAEAYLFANFHITRCLDDGDFDVKQLPHLDRNFYYRCLLAVSTSNVRKDTLGQSFNDTMFAFDALRPAGYVKVDVRPWGQVIADVSIQMATMACNSVWANVDRVVIKYLRLKHPSLKKHFKKIVKAVVQYPESKIDTIIPEGLVHAIHIKEAVSHLRALFPLPRGKQFNTRAHLTMRLFHHVLTELGEVGRVDPKDKKTRKSHPCLFSILPRKNGFTISYVPISSMTFMKLLSMGDSPLESVSGDGRYENHTMLWRKYFNVQGLETKRSRFDNRILSDGKGVSVQMKQKGKEEVAEEGENAGYPKDANIVECKDAVGALRVGVDPGMTDIVTVASSAGRIESFSSARFSEVAGYNTSKRRTYKWNDETQDLVKSIPSPNTSNMSDLQDHVRAYLKALPILLQHRANKGYRSMRFFRYVGKQKTIEKVCDVIAPRAQTTVVGFGNWSNQGYGISRSCSGPIKEIRRCLSRRKNVLFKNVDERNTSCKCHGCFQRLVNMKADSVVWRGVCKESPIDGSITVEKQKMVVKNVKVHKVLHCRDSVKSASSNVRCGATWNRDVNAAKNLLLLLTTWMDGRERPEAFCVPSPPPKTTVSIEASVSAKPTDPPGFVSSLPCYPLGQLKC

SEQ ID NO: 1325 - protein, 268 aa, Chlamydomonas sp.
SAFCKAIFRCHDYSPFCTPPHRLPGSHQQERRSGEGCFSHCWREYFLVLSVAARDRRAERKPVNPDKVATASIDPGVRKTMVTYSPENEESFMLGQGQASDLVKLLLVHDKLQSRLDTEKTLRSKERMKIKKLMIRIRKTIFYLKKEFRDQTTNFLAARYDVLLVPQLETAKMTISAERELTTKVARQMLTLSHSVLFNRMKEKCEEYGTVFLHVLEHYTSQTCPMCGFLNKCGETYTCKNCQFTCDRDIVGAAGIFLKAVRTENPCS

SEQ ID NO: 1326 - protein, 762 aa, Chlamydomonas sp.
IRWIFVDPMDLRRSDGSSKNHQGIWERFANLKKVETVSRKFGYRIVTDGFAVSILMNKPTCLTCSMPADAFSTRAHEYVTTDEGGIVSFLDNVVVAAVDPGVTDIVTVTGLNGGTRSYSSAQYYRKGLIFKSQRQTDVWNLETADIVGGIIPDRDSSSSEQIGAYARFYMGAAPILLAHRASRGYRNLRFRRYCKKQKLIVEIADFVAPRKKSAKVLVGFGDWKGLGATPISRRTCGPLQAIRFELRSRENVIMEDIDEFRTSQRCSCCENHLCNMVALTHRKKQDGTGWECTEGRKRIHKILHCKSSQSGAPRQQSGGMLHCGKTWDRDVNASRNILMLTLHQVFGRERPLAFRRDAPRSSSTTPPPPPDTDMGTQTVERFTKEATRNIFENLFNLLHPPTLPKSNDLDAVWMIIKFPTLFKNNCMHRKKKLKCLDLFSGIGGNALALRSICKTIAYCEIDPFARDVLEANMKRKNLDKAPIFEDVTTLKAVDVPELPDVITASFPCQDISSAGKGAGITGEHSGLYKHIFRLVKEFRRHRNHRISVIVMENSPMIKNRGLEKIESDLRSLGFRFQSVYRKASDFGARHERRRWCMVAIDKQSDLDLPCTYFRHNFDNLDNIPVLLKREGKASANFIRYGALGNAVVPKFIASVWDELICSVPFDSQDINRYPLLSYNTPHVTATRRLWPTPLYSRQQWTMRPFIRVGRREWSNMANRVFHEEGVMRKYNYNDANQAYHTYMINPEWVEALMGYPTGWTGT

SEQ ID NO: 1327 - protein, 759 aa, Chlamydomonas sp.
VHEADQHDDVAELVDYEGEEDGECAPGREICVVKMKLSTFIPHDWLRNKIDTLVLDMNKLLGEGYIFANFHIARLFENGIAVPPVNRNFFYRCLIAVSTNKCKGSTLGEDFESSRLLFDLLREPGQSKVDIRGSVKNQIIADLSILMATMASNHLWTNLERRITTYLKWKYPQIAKRLRSDIVAALIKCPTKNLDVIFKMSPHTTKLPTKLPTSRLRSAKSAVALAKKRVGRKEPEGSPLRVRLTKLQERLEKLSEAWLSSKNLRVDADNAKRFFAREVAFCLRGVLPLPSGNTFASRAHMTLPLYHKILSETIEEKRKTKNEKYRTFSLLPYKSGFTLSHIPISKMAFFYMVNECHFDSCKADVASKNHQGIWERFANLKKVETVSRKFGYRIVTDGFAVSILMNKPTCLTCSMPADAFSTRAHEYVTTDEGGIVSFLDNVVVAAVDPGVTDIVTVTGLNGGTRSYSSAQYYRKGLIFKSQRQTDVWNLETADIVGGIIPDRDSSSSEQIGAYARFYMGAAPILLAHRASRGYRNLRFRRYCKKQKLIVEIADFVAPRKKSAKVLVGFGDWKGLGATPISRRTCGPLQAIRFELRSRENVIMEDIDEFRTSQRCSCCENHLCNMVALTHRKKQDGTGWECTEGRKRIHKILHCKSSQSGAPRQQSGGMLHCGKTWDRDVNASRNILMLTLHQVFGRERPLAFRRDAPRSSSTTPPPDTDMGTQTVERFTKEATRNIFENLFNLLHPPTLPKSNDLQSG

SEQ ID NO: 1328 - protein, 802 aa, Chlamydomonas sp.
NCFDHVCDVCIKSSVMYKLCKMATKPPTVAKLKELLKLAEVAYSSKDKKDDIVRLCEDNGLIARPPPEYKTVEKMCVVKCAMKKAMSLDDEEFGKFRGHVDQLVNVVSRMLRRSSLVLTFHVTRLMEGDLPIPNMYDMKDTYRKDWLRIGVDGVFPDEESRISYEAVKDVIGKVLGSDDPDYINSYPIYFDQVLNYAGHTLSTVVSNNAWVPLVPHLTRLTKDTLNALGAPKTIRVYDVMRVIQQEIQEMESWPESVQEYVREVRVRLKVPDGSRLYDDYGKDMDFPTMVRFNNWMQTRFEAMVARRIRLMPIFNAQRAHVRLDMKTLVNLFRHVFPKDPNIVELSKWENVKDPDRFMLPLKPAFKKKKSCGPGEWEAYKLAQQKYDADVKDIKATDEYRHAKGRYDTLVNARKTVAGSFFKKPPVKTGWVFDCSICTDGVSLSMQYSKTVQVRVSDLKKTSKRSRDEEGMSVSEQYDHKLKTTLPDMGIVLVGVDPGRSNIVTVTYLEDDKSKTWKLTRGAFYHKSGIKKQKKHQEKRFSDMIPRWESLRVNGAALSTSRKDDISAYLKNYATFSDEWWRMALRCKESRDNFQRYIGKRKAMDSFWAGIKRKMKLDHPDLRVRVAYGSAITKLKATGPGEVAVPTGSMFASCKRLFKEEVHVTDEFKTTLMSWETGAKKECVYKIPSVQITTEGQIRLGYELLGHPLKETPKVSYRDQLAVRVYCTRQKIQEKHRRGGLAPSLVDNNSIKRYPEVRGLRFSPETSTYSDRDRSSALTIARLHCMELLGQGRPLPFCRDACC

SEQ ID NO: 1329 - protein, 216 aa, Chlamydomonas sp.
DCLDDLKDNSPKRTSLVSFDAYVTVMVNHWDSRWGEMSKSRWGAQRLRLYGGKKRVLARFFNKVQADVGERKTIVVAYGSAKFAPGGKGELSVPTTSAFNAFSDRFKGRVAVIDEFRTTKIWHKDSTTVLQSVQSEKEGRTVRGLLWCSSTMENSKLFVNRDLNAAINIHNCFTMYPIRPGILARPKKYCKLEVVVGRKIDYKLTGSLQNAVSSEV

SEQ ID NO: 1330 - protein, 793 aa, Chlamydomonas sp.
KMATKPPTVAKLKELLKLAEVPYSSKSNKDDLVRLCEDNGLIARPPPEYKTVEKMCVVKCALKKAMSLDDEEFGKFREHVEQLVNVVSRMLRRSSLVLTFHITSLLEKGLDIPDLYNMKDTYWKDWLRIGVDGIFPDEESKISYEAVKDSIGDVIGNDDADYIKSYPIYFDQVLNYAGHTLSTVVSNNAWVPLIPRLARLTSTTLNKLNAPKTLDTSKIIRGYDVMQAIQQEVQNMEGWPESVQEYVNEVREMLSVPDGSRVYDNYGKDMDFPTMVRFNYWIQTRLEDMDARRIRLMPIFNVQRVHVRLDLKTLVNLFRHMFPNDQNIVELSKWEHVKNPESFMLPQRPAQKKKKSCGPGEWEAYKSVLKQYDDDVKDIKATDEYRHAKGFYDTLVNARKTVACSFFRKPPVKNGWVFDCSICTDGVSLSMQYSKTVQVLVSDLKKTCKKPRKEEGIKIAEKYDGSLKTILPDMGIVVLGVDPGRSNIATVTYLADDKNKTWKLTRGAFYHKSGIKKQTRQKELRFADMIPMWESLRENGAALSTSRTDKISAYLSNYAKFSDEWWRLALRRRESRDNLQRYIGKRKVKDSFWAGIKRCMMKELPDMKVCVAYGSAITKLKPTGPGEVAVPTGAMFASCKRIFKEDVSVTDEFKTTLMSWETGKEKERVYKIPSVCSADVKLRLGGERFGHTKSKTMPKVADCDHLGVRLYNKRKGAQEKHRRGGFATSLVDSQKSIERYPEVRGLRLSPETCIYSDRDRSSALTIARLHCMELMGLGRPLPFAHSSSVVVDE

SEQ ID NO: 1331 - protein, 265 aa, Chlamydomonas sp.
RVLYGVLHSDRSIMLQYIESITILYVQLGQTVDCVFKSRGPTKKWLSNIQDCLDDLKDNSPKRTSLESFDAYVTVMVNHWDSRWGEMSKSRWGAQRLRLYGGKKRVLARFFNEVQAERKTIVIAYGSSKFAPGGKGELSVPTTSAFNAFSDRFKGRVAVIDEFRTTKIWHKDSTTVLQSVQSEKEGRTVRGLLWCSSTMENSKLFVNRDLNAAINIHNCFTMYPTRPGILARPKKYCKLEVVVGRTIDYKLTGSLTKATAEIFLA

SEQ ID NO: 1332 - protein, 274 aa, Chlamydomonas sp.
KTTKKRPRLFSILPRKSGFTISYVPISSMTLMKLLSMGDSPLESVRGDGRHENHSMLWRKYFNVQGLETKGSRFENRILSDGKGVSVQMKHQVGKDIAGEGEGDNAGYPKDASIEDCQDASLRQGALRVGIDPGMTDIVTIASSDGRVESFSSARFSEAAGYNTSNRRTNKWNADTQDLVKSIPSPTTSSMHDMQDHVRGYLSALPTLLQHRANRGYRSMRFFRYVGKQKTIEKVCDLIAPKAQKKTIEEKVCDVIAPKAKKTVVGFGNWSNQG

SEQ ID NO: 1333 - protein, 591 aa, Chlamydomonas sp.
RRPNFIRQLMVGSRQAHMETRDATVERFFHNNYWFREKIEGREVIVKKKKQYVGAIARYDGDRNLYSHASKKYLTNFNNHYRVHLSTWIKKFVYSKENRILAKEFKDEHGIDETVFHRYLLYDIHSWGVKEDLIAIHSLLPERTKMLLKIQHSIIGRDEINRQWLKSVSNSAKMIRYNVFINRYLEATEDEGYAKLVNIAPIPTVKHSFITIDTDGLLGVLKDVGLVESLEKTLTNKEHWESVFDVENIRSTGKGVFTCTIDTDGVMACTHFLRAEKKKISIKDDGTAIKKQTKTLREFSESDPNVVVVANDPGRCNIAFLTWKKNKVEEKDNGGRKRKRHCEFGSKRLTRERYYVESGVFKSRGPTKKWLSNIQDCLDDLKDNSPKRTSLESFDAYVTVMVNHWDSRWGEMSKSRWGAQRLRLYGGKKRVLARFFNEVQADVGERKTIVIAYGSSKFAPGGKGELSVPTTSAFNAFRDRFKGRVAVIDEFRTTKIWHKDSTTVLQSVQSEKKGRTVRGLLWCSSTMENSKLFVNRDLNAAINIHNCFTMYPTRPGILARPKKYCKLEVVVGRTIDYKLTGSLQNAVSSEV

SEQ ID NO: 1334 - protein, 336 aa, Chlamydomonas sp.
DHPLIHYNVCRPDSSRTVSRKFGYRIVTDGFAVSILMNKPTCLTCSMPADSFSTRAHEYVTTDEGGIVSFRDNVVVAAVDPGVTDIVTVIGLDGGTRSYSSAQYYRKGLIFKSQRQTDVWNLETADIVGDIIPDRDSSRSEQIGAYARFYMGAAPILLAHRASRGYRNLRFCRYCKKQKLIVEIADFVAPREKSAKVLVGFGDWKGLGATPISRRTCGPLQAIRFELRSRGNVIMEDVDEFRTSQQCSCCENRLCNMVALTHRKKQDGTGWECTEGRKRIHKILHCKSSQSRAPRQQSGGRLHCGRTWDRDVNASRNILMLTLHQVFGRERPLAFR

SEQ ID NO: 1335 - protein, 624 aa, Chlamydomonas sp.
VNLTVYKEFACTKYQNAMYGNQRFCKIGKASDALGVSRTVLRRWADNGTIRTIRTPGNQRLFDPSSIQGYLIEQEKKPSSRQVILYARVSSHKQQPDLLRQQLFMQTHIYDKHSGCEQVIEVKDVGSGLNFKRPGLLRVLGLVTAGLVSSIVVASKDRLARFGFELIEWICSQHSCSIIVLDHQDGAPEDELGKDLMSIVQVHCCRWNGRRRYKVKCQTQVEDLKAEAETNQGSEIDAGRVCGVQPVHVQQGGGSTVGRREHSQVCLPNSRQVCDEQGEGVGEDAKPVLQESPMVASVPQNVRQSAIKAALANIKACFSNMKVGNIKQFSAPFRRKKTELERGWAIEMDQKNVSKDGDKLFIFKDILGNMRYFGSKQLHKLMPEENPTHDPKVQKSRFGEYFLVLSVASRDRRAERKPVHPDKVATASIDPGVRKTMVTYSPENEESFMLGQGQASDLVKLLLVHDKLQSSLDTEKTLRSKERMKIKKHMIRIRKRIFYLKKEFRDQTTNFLAARYDVLLVPQLETAKMTISAERELTTKVARQMLTLSHSVLFNRLKEKCAEYGTVFLHVLEHYTSQTCPMCGFLNKCGETYTCKNCQFTCDRDIVGAAGIFLKAVRTENPCS

SEQ ID NO: 1336 - protein, 299 aa, Chlamydomonas sp.
EEKSCGPGEWEAYKLAQQKYDADVKDIKAIDEYRHAKGRYDTLVNARKTVAGSFFKKPPVKTGWVFDCSICTDGVSLSMQYSKTVQVRVSDLKKTSKRSRDEEGMSVAEQYDHKLKTTLPDMGIVVLGVDPGRSNIATVTYLADDKSKTWKLTRGAFYHKSGIKKQKKQQEKRFSDMIPRWESLRENGAALSTSRKDDISAYLKNYATFSDEWWRMALRRRESRDNFQRYIGKRKAMDSFWAGIKRNMKLDHPDLRVRIAYGSAIKTMKATGPGEVAVPTGSMFRFLQAPLQRGGSCDR

SEQ ID NO: 1337 - protein, 316 aa, Chlamydomonas sp.
PVKTGWVFDCSICTDGVSLSMQYSKTVQVRVSDLKKTSKRSRDEEGMSVAEQYDHKLKTTLPDMGIVVLCVDPGRSNIATVTYLADDKSKTWKLTRGAFYHKSGIKKQKKQQEKRFSDMIPRWESLRENGAALSTSRKDDISAYLKNYATFSDEWWRMALRRRESRDNFQRYIGKRKAMDSFWAGIKRNMKLDHPDLRVRIAYGSAIKTMKATGPGEVPVPTGSMFASCKRLFKEEVHVTDEFKTTLMSWETGAKKECVYKIPSVQITTEGQIRLGYELLGHTPLKETPKVSYLDQLAVRVYCTRKKSMKNTGGVA

SEQ ID NO: 1338 - protein, 276 aa, Chlamydomonas sp.
ETLTKPLHGSSLKLSRRFGPGLSVTRHLSSMRRFAVHQLAHPRFVTRPPGSVWRRRESRDNLQRYIGKRKVKDSFWAGIKRCMMKELPDKKVCVAYGSAITKLKPTEPGEVAVPTGAMFASCKRIFKEDVSVTDEFKTTLMSWETGKEKERVYKIPSVSSADVKLRLGGERFGHTKSKTMPKVADCDHLGVRLYNKRKGAQEKHRRGGFATSLVDSQKSIERYPEVRGLRFSPETCIYSDRDRSSALTIARLHCMELMGLGRPLPFAHSSSVVVDE

SEQ ID NO: 1339 - protein, 309 aa, Chlamydomonas sp.
RSNIATVTYLADDKNKTWTLTRGAFYHKSGIKKQTRQKELRFADMIPMWESLRENGAAFSTSRTDKISAYLSNYAKFSEEWWRLALRRRESRDNLQRYIGKRKVKDSFWAGIKRCMMKELPDMKVCVAYGSAITKLKPTGPGEVAVPTGAMFASCKRIFKEDVSVTDEFKTTLMSWETGKEKERVYKIPSVCSADVKLRLGGERFGHTKSKTMPKVADCNHLGVRLYNKRKGAQEKHRRGGFATSLVDSQKSIERYPEVRGLRFSPETCIYSDRDRSSALTIARLHCMELMGLGRPLPFAHSSSVVVDE

SEQ ID NO: 1340 - protein, 677 aa, Chlamydomonas sp.
RFSDHAIEDSGMIPALTCHRWLVLLINHAVAEAYLFANFHITRCLDDGDFDVKQLPHLDRNFYYRCLLAVSTSNVRKDTLGQSFNDTMVAFDALRPAGYVKVDVRPWGQVIADVSIQMATMACNSVWANVDRVVIKYLRLKHPSLKKHFKKIVKAVVQYPESKIDTIIPEGLVHAIHIKEVVSHLRALLPLPRGKQFNTRAHLTMRLFHHVLTELGADLKEKTTKKRPRLFSILPRKSGFTISYVPISSMTLMKLLSMGDSPLESVRGDGRLENHSMLWRKYFNVQGLEKKGSRFDNRILSDGKGVSVQMKHQVGKDIAGEGGGDNAGYPKDASIEDCQDASLRQGALRVGIDPGMTDIVTIASSDGRVESFSSARFSEAAGYNTSNRRTNKWNADTQDLVKSISSPTTSSMHDMQDHVRGYLSALPTLLQHRANRGYRSMRFFRYVGKQKTIEKVCDLIAPKAQKKTIEEKVCDVIAPKAKKTVVGFGNWSNQGYGISRSCSGPVKEIRKCLSRRQNVLFKNVDERNTSCTCHGCFQKLVNMKADSVVWRRVQNEPSALIDGAPTTTTTTTTFEKQKTVVKNVKVHKVLHCRNSVKSASSNVRCGATWNRDVNAAKNLLLLLTTWMDGKERPAAFCVPSSSPTPKTTVSGEANVGAQPTDPPGSVSSLQLLSSGPA

SEQ ID NO: 1341 - protein, 621 aa, Chlamydomonas sp.
QCIRDLHVLNIRMLCMATNASVKLARPPMPLVSPGPSSVDGRIMARSERSGLQATNVSLTQAASKATSSSRKKNPAVVKSFSTHVCPHTNNNPTCSDSNCSCKPIFLTNIPDASKSLKSRTSDQGSTSSAQDFYEYWDSSRQDLYRQLLWLPKTGSQGLVSSSLNGFARSTPVRSSFSITKTEPLKTSLEKTSCPSFKYIVADGTVEDATKSNAKPKLRTLKLKLNPTKAQKSMLAEFAGCSRFMYNKAVAARLGVGSTHKSVFRIRDRYVTNKVKGEGKMPNPYFKNRQWLLQCPKSVRQSAIKAALANIKACFSNLKAGNIKQFSAPFRRKKTELERGWAIEMDQHNVSKDGDKLFIFKDTLGNMRYFGRKQLQKLMPEKNPTHDPKVQKSRFGEYFLVLSVAARDRREDRKPVHPGKVATASIDPGVRKTMVTYSPENEESFMLGKGQASDLVKLLLVHDKLHSRLGTEKTLRSKERMKIKMQMIRIRKRIFYLKKEFRDQTTNFLAARYDVLLVPQLETAKMTISAERELTTKVARQMLTLSHSVLFNRLKEKCEEYGTVFLHVLEHYTSQTCPMCGFLNKCGETYTCKNCQFTCDRDIVGAAGIFLKAVRTENTCS

SEQ ID NO: 1342 - protein, 796 aa, Chlamydomonas sp.
YERLGYECSREPVCRSRLHQNVFGVQFVMENGIGESSSLVHEADQHDDVAELVDYEGEEDEECAPGRAICVVKMKLSTFIPHDWLRKKIDTLVLDMNKLLGEGYIFANFHIARLFENGIAVPPVNRNFFYRCLIAVSTNKCKGSTLGEDFESSRLLFDLLREPGQSKVDIRGNVKNQIIADLSILMATMASNHLWTNLERRITTYLKWKYPQIAKRLRSDIVAAVIKCPTKNLDVIFKMSPHTTKLPTASLRSAKSAVALAKKRVGRKEPEGSPLRVRLTKLQERLEKLSKAWLSSKNLRVDADNAKRFFARDVAFCLRGVLPLPSGNTFVSRAHMTLPLYHKILSETIEEKRKTKNEKHRTFSLLPYKSGFTLSHIPISKMAFFYMVNECHFDSCKADVASKNHQGIWERFANLKKVETVSRKFGYRIVTDGFAVSILMNKPTCLTCSIPADAFSTRAHEYVTTDEGGIVSFLDNVVVAAVDPGVTDIVTVTGLNGGTRSYSSAQYYRKGLIFKSQRQTDVWNLETADIVGGIIPDRDSSSSEQIGAYARFYMGAAPILLAHRASRGYRNLRFRRYCKKQKLIVEIADFVAPREKSAKVLVRFGDWKGLGATPISRRTCGPLQAIRFELRSRENVIMEDIDEFRTSQRCSCCENHLCNMVALTHRKKQDGTGWECTEGRKRIHKILHCKSSQSGAPRQQSGGMLHCGKTWDRDVNASRNILMHTLHQVFGRERPLAFRRDAPRSSSTTPPPPPDTDMGTQTVERFTKEATRNIFENLFNLLHPPTLPKSNDLQSG

SEQ ID NO: 1343 - protein, 425 aa, Chlamydomonas sp.
KNKKKSPRLFSILPRKNGFTISYVPISSMTFMKLLSMGDSPLESVSGDGRYENHTMLWRKYFNVQGLETKRSRFDNRILSDGKGVSVQMKQKGKEEVVEEGENAGYPKDANIVECKDAVGVLRVGVDLGMTDIVTVASSAGRIESFSSARFSEVAGYNTSKRRTYKWNDETQDLVKSIPSPNTSNMSDLQDHVRAYLKALPILLQHRANKGYRSMRFFRYVGKQKTIEKVCDVIAPRAQTTVVGFGNWSNQGYGISRSCSGPIKEIRRCLSRRKNVLFKNVDERNTCCKCHGCFQRLVNMKADSVVWRGVCKESPIDGSITVEKQKMVVKNVKVHKVLHCRDSVKSASSNVRCGATWNRDVNAAKNLPLLLTTWMDGRERPEAFCVPLPPPKTTVSIEASVSAKPTDPPGFVSSLPCYPLGQLKC

SEQ ID NO: 1344 - protein, 803 aa, Chlamydomonas sp.
KMATKPPTVAKLKELLKLAEVPYSSKSNKDDLVRLCEDNGLIARPPPEYKTAEKMCVVKCALKKAMSLDDEEFGKFREHVDQLVNVVSRMLRRSSLVLTFHITSLLEKGLEIPDLYHMKDTYWKDWLRIGVDGIFPDEESKISYEAVKDSIGDVIGNDDADYIKSYPIYFDQVLNYAGHTLSTVVSNSAWVPLIPRLARLTSTILNKLNAPKTLDTSKIIRGYDVMQAIQQEVQNMEGWPKSVQEYVNEVREMLSVPDGSRVYDNYGKDMDFPTMVRFNYWIQTRLEDMDARRIRLMPIFNVQRVHVRLDLKTLVNLFRHMFPNDQNIVELSKWEHVKNPDSFMLPQRPAQKKKKSCGPGEWEAYKSVLKQYDDDVKDIKATDEYRHAKGLYDTLVNARKTVAGSFFRKPPVKNGWVFDCSICTDGVSLSMQYSKTVQVLVSDLKKTCKKPRKEEGIKIAEKYDGSLKTILPDMGIVVLGVDPGRSNIATVMYLADDKNKTWTLTRGAFYHKSGIKKQTRQKELRFADMIPMWESLRENGAALSTSRTDKISAYLSNYAKFSGEWWRLALRRRESRDNLQRYIGKRKVKDSFWAGIKRCMMKELPDMKVCVAYGSAITKLKPTGPGEVAVPTGAMFASCKRIFKEDVSVTDEFKTTLMSWETDKEKERVYKIPSVCSADVKLRLGGERFGHTKSKTMPKVADCDHLGVRLYNKRKGAQEKHRRGGFATSLVDSQKSIERYPEVRGLRFSPETCIYSDRDRSSALTIARLHCMELMGLGRPLSFAHSSSVVVDYITLHYMLKST

SEQ ID NO: 1345 - protein, 941 aa, Chlamydomonas sp.
KIGQCKGDLVSLVTGFCSRYKDTINAGKILVSFDECGFSERLKAHYGYSPVGKPVIVKTTGGWVHHSLLMAVFSDGRKEFVVKKGSVKKTDFAAFIDSLSLCNNSVVIMDNASIHKNLVLRSPVNICYTPPYSPEFNAIELCFAKVTTYGTRMEHVCDVCIKSSVMYKLCKMATKPPTVAKLKELLKLAEVAYSSKDKKDDIVRLCEDNGLIARPPPEYKTVEKMCVVKCALKKAMSLDDEEFGKFRGHVDQLVNVVSRMLRPSSLLLTFHVTRLMEGDLPIPNMYNMKDTYWKDWLRIGVDGVFPDEESRISYESVKDVIGKVLGSDDPDYINSYPIYFDQVLNYAGHTLSTVVSNNAWVPLVPRLTRLTKATLNALGAPKTIRVYDVMRVIQQEIQEMESWPESVQEYVREVRVRLKVPDGSRLYDDYGKDMDFPTMVRFNYWMQTRLEAIGARRIRLMPIFNVQRAHVRLDMKTLVNLFRHVFPKDPNIVELSKWKNVKDPDRFMLPLKPAVKKKKSCGPGEWEAYKLAQQKYDTDVNDIKATDEYRHAKGRYDTLVNARKTVAGSFFKKPPVKTGWVFDCSICTDGVSLSMQYSKTVQVRVSDLKKTSKRSRDDEGMSVSEQYDHKLKTTLPDMGIVVLGVDPGRSNIATVTCLADDKSKTWKLTRGAFYHKSGIKTQKKQQEKRFSDTIPRWESLRENGAALSTSRKDDISAYLKNYATFSDEWWRMALRRRESRDNFQRYIGKRKAMDSFWAGIKRNMKLDHPDLRVRVAYGSAITTLKATGPGEVAVPTGSMFASCKRLFKEEVHVTDEFKTTLMSWETGAKKECVYKIPSVQITTEGQIRLGYELLGHTPLKETPKVSYRDQLAVRVYCTRKQIQEKHRRGGLAPSLVDNNSIKRYPEVRGLRFSPETSTYSDRDRSSALTTVSSDDVLYWLW

SEQ ID NO: 1346 - protein, 402 aa, Chlamydomonas sp.
NHSMLWRKYFNVQGLEKKGSRFDNRILSDGKGVSVQMKHQVGKDIVGVGGRDNAGYPKNASIEDCQDASLRQGALRVGIDPGMTDIVTIASSDGRVESFSSARFSEAAGYNTSNRRTNKWNADTQDLVKSIPSPTTSSMHDMQDHVRGYLSALPTLLQHRANRGYRSMRFFRYVGKQKTIEKVCDLIAPKAQKKTIEEKVCDVIAPKAKKTVVGFGNWSNQGYGISRSCSGPVKEIRKCLSRRQNVLFKNVDERNTSCTCHGCFQKLVNMKADSVVWRRVQNEPSALIDGAPTTTTTTFEKQKTVVKNVKVHKVLHCRNSVKSASSNVRCGATWNRDVNAAKNLLLLLTTWMDGKERPAAFCVPSLSPTPKTTVSGEANVGAQPTDPPGSVSSLQLLSSGPA

SEQ ID NO: 1347 - protein, 260 aa, Chlamydomonas sp.
IPRWESLRENGAALSTSRKDDISAYLKNYATFSDEWWRMALRRREFRDNFQRYIGKRKAMDSFWAGIKRNMKLDHPDLRVRVAYGSAITTLKATGPGEVAVPTGSMFASCKRLFKEEVHVTDEFKTTLMSWETGAKKECVYKIPSVQTTTEGQIRLGYELLGHTPLKETPKVSYRDQLAVRVYCTRKQIQEKHRRGGLAPSLVDNNSIKRYPEVRGLRFSPETSTYSDRDRSSALTIARLHCMELLGQGRPLPFCRDACC

SEQ ID NO: 1348 - protein, 618 aa, Chlamydomonas sp.
QCIRNLHVLNIRMSCMATNASVKLARPPMPLVSPGPSSVDGRIMARSGLQATNVSLTQAASKATSSSRKKTPAVVKSFSTHECPHTINNPTCSDSNCSCKPIFLTNIPDASKSLKSRTSDQGSTSSAQDFYEYWDSSRQDLYRQLLWLPKKGSQGLVSSSLNGFARSTPVRSSFSITKTEPLKTSLEKTSCPSFKYIVADGTVEDATKSNAKPKLRTLKLKLNPTKAQKSMLAEFAGCSRFMYNKAVAARLGVGSTHKSVFRIRDRYVTNKVKGEGKMPNPYFKNRQWLLQCPKSVRQSAIKAALANIKACFSNLKAGNIKQFSAPFRRKKTELERGWAIEMDQHDISEDDDKLFIFKDTLGNMRYFGRKQLQKLMPEKNPTHDPKVQKSRFGKYFLVLSVAARDRREERKPVHPGKVATASIDQGVRKTMVTYSPENEESVMLGKGQASDLVKLLLVHDKLHSRLDTEKTLRSKERMKIKMQMIRIRKIIFYLKKEFRDQTTNFLAARYDVSLVPQLETAKMTISAERELTTKVARQMLTLSHSVLFNRLKEKCEEYGTVFLHVLEHYTSQTCPMCGFLNKCGETYTCKNCQFTCDRDIVGAAGIFLKAVRTENPCS

SEQ ID NO: 1349 - protein, 199 aa, Chlamydomonas sp.
LRWRRAQRYSSVLVIGKVWGRHQSLGRLVAIRFELRSRKNVIMEDVDEFRTSQRCSCCETRLCNMVALTHGKQQDGTWECTEGRKRIHKILHCKSSQSGAPRQQSGGRLHCGKTWDRDVNASRNILMLTLHQVFGRERPLAFCRDAPRGSSKNPPTPDTDMGSQTVERFTTEATRNIFENLFNMLHPPMLPKRNDLQSG

SEQ ID NO: 1350 - protein, 666 aa, Chlamydomonas sp.
METIVNKEPPDKRTRPDRAAKIKDRKNGEENVVKCTLSRIIADKDNKDVIIKVIKERVDSVSKRTYLAGVAVNRILKEVFEGVPDAQLHTVSVPSVDQNFIRQLMVGSRQAHMETRDATVERFFHNNYWFREKIEGREVIVKKKKQYVGAIARFDGDQNLYSHASKKYLTNFNNHYRVHLSTWIKKFVYSKENRILAKEIKDEHGIDETVFHRYLLYDIHPWGVKEDLIAMHSLLPERTKMLLKIQHSILGRDEINRQWLKSVSNSAKMIRYNVFINRYLEATEDEGYAKLVNIAPIPTVKHAFITIDTDGLLGVLKDVGLIESLEKTLTNKEHWESVFDVENIRSAGKGVFTCTIDTDGVMACTHFLRAEKKKISIKDDGTAIKKQTKTLREFSESDPNVVVVANDPGRCNIAFLPWKKNKVEEKDKGGRKRKRHCEFGSTRLTRERYYVESGVFKSRGPTKKWLSNIQDCLDDLKDNSPKRTSLVSFDDYVAVMVNHWDSRWGEMSKSRWGEQRLRLYGGKKRVLARFFNEVQEAVGERKTNVVAYGSAKFAPGGKGELSVPTTSAFKAFSDRFKGRVAVIDEFRTAKIWHKDSTTVLQSVQSEKEGRTVRGLLWCSSTMENSKLFVNRDLNAAINIHNCFTMYPIRPGILARPKKYCKLEVVV

SEQ ID NO: 1351 - protein, 577 aa, Chlamydomonas sp.
VNLTVYKEFACTTTNVSLTQAASKATSSSRKKKPAVVKSFSTHVCPHTNNNTTCSDSNCSCKPIFLTNIPDASKSRTSDQGSTSSALDFYEYWDSSRQDMYRQLLWLPKTGTQGLVSSSFNGFAHSTPTRSSFSITKTEPLKTSLEKTSCPSFKYIVTDGTVEDATKSNAKPKLRTLKLKLNPTKAQKSMLAEFAGCSRFMYNKAVAARLGVGSTHKSVFRIRDRYVTNKVRGEGKMPNPYFKNRQWLLQCPKSVRQSAIKSALANIKACFSNLKAGNIKQFSAPFRRKKTELERGWVIEMDQKNVSKDGDKLFIFKEILGNMRYFGSKQLHKLMPEENPTHDPKVQKSRFGEYFLVLSVAARDRRAERKPVNPDKVATASIDPGVRKTMVTYSPENEESFMLGQGQASDLVKLLLVHDKLQSRLDTEKTLRSKERMKIKKLMIRIRKTIFYLKKEFRDQTTNFLAARYDVLLVPQLETAKMTISAERELTTKVARQMLTLSHSVLFNRLKEKCEEYGTVFLHVLEHYTSQTCPMCGFLNKCGETYTCKNCQFTCDRDIVGAAGIFLKAVRTENPCL

SEQ ID NO: 1352 - protein, 458 aa, Chlamydomonas sp.
LNGFARSTPARSSFSITKTEPLKTSLEKTSCPSFKYIVADGTVEDATKSNAKPKLRTLKLKLNPTKAQKSMLAEFAGCSRFMYNKAVAARLGVGSTHKSVFRIRDRYVTNKVRAKGKMPNPYFKNRQWLLQCPKSVRQSAIKSALANIKACFSNLKAGNIKQFSAPFRRKKTELERGWVIEMDQKNVSKDGDKLFIFKGILGNMRYFGSKQLHKLMPEENPTHDPKVQKSRFGEYFLVLSVAARDRRAERKPVNPDKVATASIDPGVRKTMVTYSPENEESFMLGQGQASDLVKLLLVHDKLQSRLDTEKTLRSKERMKIKKLMIRIRKTIFYLKKEFRDQTTNFLAARYDVLLVPQLETAKMTISAERELTTKVARQMLTLSHSVLFNRLKEKCEEYGTVFLHVLEHYTSQTCPMCGFLNKCGETYTCKNCQFTCDRDIVGAAGIFLKAVRTENPCS

SEQ ID NO: 1353 - protein, 801 aa, Chlamydomonas sp.
PRMEHVCDVGIKSSVMYKLCKMATKPPTVAKLKELLKLAEVAYSSKDKKDDIVRLCEDNGLIAKPPPEYKTVEKMCVVKCALKKAMSLDDEEFGKFREHVDQLVNVVSRMLRRSSLVLTFHVTRLMEGDLPIPNMYDMKDTYWKDWLRIGVDGVFPDEESRISYEAVKDVIGKVLGSDDPDYINSYPIYFDQVLNYAGHTLSTVVSNNAWVPLVPRLTRLTKATLNALKAPKTIRVYDVMRVIQQEIQEMESWPESVQEYVREVRVRLKVPDGSRLYDDYGKDMDFPTMVRFNYWMQTRLEAIGARRIRLMPIFNVQRAHVRLDMKTLVNLFRHVFPKDPNIVELSKWKDVKDPDRFMLPLKPAVKKKKSCGPGEWEAYKLAQQKYDADVNDIKDTDEYRHAKGRYDTLVNARKTVAGSFFKKPPVKTGWVFDCSICTDGVSLSMQYSKTVQVRVSDLKKTSKRSRDDEGMSVSEQYDHKLKTTLPDMGIVVLGVDPGRSNIATVTYLADDKSKTWKLTRGAFYHKSGIKKKKKQQEKRFSDMIPRWESLRENGAALSTSRTDDISAYLKNYDTFSDEWWRMALLRRESRDNFQRYIGKRKAMDSFWAGIKRNMKLDHPDLRVRVAYGSAITTLKATGPGEVAVPTGSMFASCKRLFKEEVHVTDEFKTTLMSWETGAKKECVYKIPSVQITTEGQIRLGYELLGHTPLKETPNVSYRDQLAVRVYCTRKQIQEKHRRGGLAPSLVDNNSIKRYPEVRGLRFSPETSTYSDRDRSSALTIARLHCMELLGQGRPLPFCRDA

SEQ ID NO: 1354 - protein, 374 aa, Chlamydomonas sp.
TGWVFDCSICTDGVSLSMQYSKTVQVRVSDLKKTSKRSRDDEGMSVSEQYDHKLKTTLPDMGIVVLGVDPGRSNIATVTYLADDKSKTWKLTRGAFYHKSGIKKQKKQQEKRFSDMIPRWESLRENGAALSTSRTDDISAYLKNYDTFSDEWWRMALLRRESRDNFQRYIGKRKAMDSFWAGIKRNMKLDHPDLRVRVAYGSAITTLKATGPGEVAVPTGSMFASCKRLFKEEVHVTDEFKTTLMSWETGAKKKCVYKIPSVQITTEGQIRLGYELLGHTPLKETPNVSYRDQLAVRVYCTRKQIQEKHRRGGLAPSLVDNNSIKRYPEVRGLRFSPETSTYSDRDRSSALTIARLHCMELLGQGRPLPFCRDA

SEQ ID NO: 1355 - protein, 342 aa, Chlamydomonas sp.
GVSVQMKQKGKEEVVEEGENAGYPKDVNIVECKDAVGALRVGVDPGMTDIVTVASSAGRIESFSSARFSEVAGYNTSKRRTYKWNDETQDLVKSIPSPNTSNMSDLQDHVRAYLKALPILLQHRANKGYRSMRFFRYVGKQKTIEKVCDVIAPRAQTTVVGFGNWSNQGYGISRSCSGPIKEIRRCLSRRKNVLFKNVDERNTSCKCHGCFQRLVNMKADSVVWRGVCKESPIDGSITVEKQKMVVKNVKVHKVLHCRDSVKSASSNVRCGATWNRDVNAAKNLLLLLTTWMGGRERPEAFCVPSPPPKTTVSIEASVSAKPTDPPGFVSSLPCYPLGQLKC

SEQ ID NO: 1356 - protein, 693 aa, Chlamydomonas sp.
GACGPARQCGEPHVTAVQSGADFPHHESLRERSGDSRPVQHERYLLEGLAPYRGRRNEESKISYEAVKDSIGDVIGNDDADYIKSYPIYFDQVLNYAGHTLSTVVSNNAWVPLIPRLARLTSTTLNKLNAPKTLDTSKIIRGYDVMQAIQQEVQNMEGWPESVQEYVNEVREMLSVPDGSRVYDNYGKDMDFPTMVRFNYWIQTRLEDMDARRIRLMPIFNVQRVHVRLDLKTLVNLFRHMFPNDQNIVELSKWEHVKNPDSFMLPQRPAQKKKKSCGPGEWEAYKSVLKQYDDDVKDIKATDEYRHAKGLYDTLVNARKTVAGSFFRKPPVKNGWVFDCSICTDGVSLSMQYSKTVQVLVSDLKKTCKNPRKEEGIKIAEKYDGSLKTILPDMGIVVLGVDPGRSNIATVTYLADDKNKTWTLTRGAFYHKSGIKKQTRQKELRFADMIPMWESLRENGAALSTSRTDKISAYLSNYAKFSEEWWRLALRRRKSRDNLQRYIGKRKVKDSFWAGIKRCMMKELPDMKVCVAYGSAITKLKPTGPGEVAVPTGAMFASCKRIFKEDVSVTDEFKTTLMSWETGKEKERVYKIPSVCSADVKLRLGGERFGHTKSKTMPKVVDCDHLGVRLYNKRKGAQEKHRRGGFATSLVDSQNRSSGTQRYEDCDSLQKHAFTRTGIALLLSQSQGCTAWN

SEQ ID NO: 1357 - protein, 208 aa, Chlamydomonas sp.
LRSFEREERAKVLVGFGDWKGLGATPISRRTCGPLQGIRFELRSRENVIMEDIDEFRTSQRCSCCENHLCNMVALTHRKKQDGTAWECTEGRKRIHKILHCKSSQSGAPRQQSGGMLHCGKTWDRDVNASRNILMLTLHQVFGRERPLAFRRDAPRSSSTTPPPPTDTDMGTQTVERFTKEATRNIFENLFNLLHPPTLPKSNDLQSG

SEQ ID NO: 1358 - protein, 199 aa, Chlamydomonas sp.
LRWRRARRYSSVLVIGKVWGRHQSLGGLVAIRFELRSRENVIMEDVDEFRTSQRCSCCETRLCNMVALTHRKKQDGTWECTEGRKRIHKILHCKSSQSGAPRQQSGGRLHCGKTWDRDVNASRNILMLTLHQVFVRERPLAFLGDAPRGSSKNPPTPDTDMGTQTVERFTTEATRNIFENLFNMLHPPTLPKRNDLQSG

SEQ ID NO: 1359 - protein, 273 aa, Chlamydomonas sp.
QHEEVLTSFVGTTGKGVFTCTIDTDGVMACTHFLRAEKKKISIKDDGTAIKKQTKTLRKFSESDPNVVVVANDPGRCNIAFLTWKKNKVEEKDKGGRKRKRHCEFGSKRLTRERYYVESGVFKSRGPTKKWLSNIQDCLDDLKDNSPKRTSLVSFDAYVTVMVNHWDSRWGEMSKSRWGAQRLRLYGGKKRVLARFFNEVQEDVGERKTIVVAYGSAKFAPGGKGELSVPTTSAFKAFSDRFKGRVAVIDEFRTTKIWHKDSTTVLQSVQSEK

SEQ ID NO: 1360 - protein, 275 aa, Chlamydomonas sp.
LFFLVDVEIDLSRFLLLLLLLLLLFLFALAKELHFPKDDMMPIASPTKDANIVECKDAVGALRVGVDPGMTDIVTVASSAGRIKSFSSARFSEVAGYNTSKRRTYKWNDETQDLVKSIPSPNTSNMVDLQDHVRAYLKALQILLQHRANKGYRSMRFFRYVGKQKTIEKVCDVIAPRAQTTVVGFGNWSNQGYGISRSCSGPIKEIRRCLSRRKNVLFKNVDERNTSCKCHGCFQRLVNMKADSVVWRGVCKESPIDGSVRYEGYLLEGLAKDRS

SEQ ID NO: 1361 - protein, 349 aa, Chlamydomonas sp.
RRPVRSLVKKKVSRSQKKYDGSLKTILPDMGIVVLGVDPGRSNIATVTYLADDKNKTWKLTRGAFYHKSGIKKQTRQKELRFADMIPMWESLRENGAALSTSRTDNISAYLSNYAKFSDEWWRLALRRRESRDNLQRYIGKRKVKDSFWAGIKRCMMKELPDMKVCVAYGSAITKLKPTGPGEVAVPTGAMFASCKRIFKEDVSVTDEFKTTLMSWETGKEKERVYKIPSVCSADVKLRLGGERFGHTKSKSMPKVADCDHLGVRLYNKRKGAQEKHRRGGFATSLVDSQKSIERYPEVRGLRFSPETCIYSDRDRSSALTIARLHCMELMGLGRPLPFAHSSSVVVDE

SEQ ID NO: 1362 - protein, 1051 aa, Chlamydomonas sp.
PRMEHVCDVCIKSSVMYKLCKMATKPPTVAKLKELLKLAEVAYSSKDKKDDIVRLCEDNGLIARPPPEYKTVEKMCVVKCALKKAMSLDDEEFGKFRGHVDQLVNVVSRMLRRSSLVLTFHVTRLMEGDLPIPNMYDMKDTYWKDWLRIGVDGVFPDEESRISYEYVKDVIGKVLGSDDPDYINSYPIYFDQVLNYAGHTLSTVVSNNAWVPLVPRLTRLTKATLNALGAPKTIRVYDVMRVIQQEIQEMESWPESVQEYVREVRVRLKVPDGSRLYDDYGKDMDFPNMVRFNYWMQTRLEDMYARRIRLMPIFNVQRVHVRLDLKTLVNLFRHMFPNDQNIVELSKWEHVKNPDSFMLPQRPAQKKKNSCGPGEWEAYKSVLKQYDDDIKDIKATEEYRHAKGLYDTLVNARKTVAGSFFRKPPVKNGWVFDCSICTDGVSLSMQYSKTVQVLVSDLKKTCKKPRKEEGIKIAEKYDGSLKTILPDMGIVVLGVDPGRSNIATVTYLADDKNKTWTLTRGAFYHKSGIKKQTRQKELRFADMIPMWESLRENGAALSTSRTDKISAYLSNYAKFSDEWWRLALRRRESRDNLQRYIGKRKVKDSFWAGIKRCMMKELPDMKVCVAYGSAITKLKPTGPEEVAVPTGAMFASCKRIFKEDVSVTDEFKTTLMSWETGKEKERVYKIPSVCSADVKLRLGGERFGHTKSKTMPKVAGFFFFFFFLFWGGGGGGGGGGGVGGGGWVWFFFLGGGVSLGGVVSFFFFFWGGGGGGGGGGGGLGGWGGGGGGAGGGGGGGVGAGGGGGGGGGVFFFFFFFVVGGGGGGGGGGGGGGGGGGGGGGGGGSFCGGAGGGGGGGGGGGGRGGGGGGGGGGGGGGWGGGGGLGGGGGGGGGGGGGWGGGGGGGGGGGGVWGGGGGGGGGVVGGGGGGGGGGGGWWGGGGGGGGGGGGVCVGCVFVFWLVLCGGGGFFFFWCVFFFFLFFFSLFFFGVGWFFFFLVVVCFFLCFFFFFFFCFFFFFFFFFFFFFLFFFFFFFFFFFFFFFFFFFFWGKVVQ

SEQ ID NO: 1363 - protein, 793 aa, Chlamydomonas sp.
KMATKPPTVAKLKELLKLAEVPYSSKSNKDDLVRLCEDNGLIARPPPEYKKVEKMCVVKCALKKAMSLDDEEFGKFREHVDQLVNVVSRMLRRSSLVLTFHITSLLEKGLDIPDLYNMKDTYWKDWLRIGVDGIFPDEESKISYEAVKDSIGDVIGNDDADYIKSYPIYFDQVLNYAGHTLSTVVSNNAWVSLIPRLARLTSTTLNKLNAPKTLDTSKIIRGYDVMQAIQQEVQNMEGWPKSVQEYVNEVREMLSVPDGSRVYDNYGKDMDFPTMVRFNYWIQTRLEDMDARRIRLMPIFNVQRVHVRLDLKTLVNLFRHMFPNDQNIVELSKWEHVKNSDSFMLPQRPAQKKKKSCGPGEWEAYKSVLKQYDDDVKDIKATDEYRHAKGLYDTLVNARKTVAGSFFRKPPVKNGWVFDCSICTDGVSLSMQYSKTVQVLVSDLKKTCKKPRKEEGIKIAEKYDGSLKTILPDMGIVVLGVDPGRSNIATVTYLADDKNKTWTLTRGAFYHKSGIKKQTRQKELRFADMIPMWESLRENGAALSTSRTDKISAYLSNYAKFSDEWWRLALRRRESRDNLQRYIGKRKVKGSFWAGIKRCMMKELPDMKVCVAYGSAITKLKPTGPGEVAVPTGAMFASCKRIFKEDVSVTDEFKTTLMSWETGKEKERVYKIPSVCSADVKLRLGGERFGHTKSKTMPKVADCDHLGVRLYNKREGAQEKHRRGGFATSLVDSQKSIERYPEVRGLRFSPESCIYSDRDRSSALTIARLHCMELMGLGRPLPFAHSSSVVVDE

SEQ ID NO: 1364 - protein, 355 aa, Chlamydomonas sp.
VPTRSAHSSTSCTPTCSFGHVMSVHRNTVIWWDWSVSSLQLFFVLGVDPGRSNIATVTYLADDKSKTWKLTRGAFYHKSGIKKQKKQQEKRFSDMIPRWESLRENGAALSTSRTDDISAYLKNYATFSDEWWRMALLRRESRDNFQRYIGKRKAMDSFWAGIKRNMKLDHPDLRVRVAYGSAITTLKATGPGEVAVPTGSMFASCKRLFKEEVHVTDEFKTTLMSWETGAKKECVYKIPSVQITTEGQIRLGYELLGHTPLKETPKVSYRDQLAVRVYCTRKQIQEKHRRGGLAPSLVDNNSIKRYPEVRGLRFSPETSTYSDQDRSSALTIARLHCMELLGQGRPLPFCRDACC

SEQ ID NO: 1365 - protein, 473 aa, Chlamydomonas sp.
NCFYCHLKDPNIVELSKWKNVKDPDRFMLPLKPAFKKKKSCGPGEWEAYKLAQQKYDADVKDIEATDEYRHAKGRYGTLVNARKTVAGSFFKKPPVKTGWVFDCSICTDGVSLSMQYSKTVQVRVSDLKKTSKRSRDDEGMSVSEQYDHKLKTTLPDMGIVVLGVDPGRSNIATVTYLADDKSKTWKLTRGAFYHKSGIKKQKKQQEKRFSDMIPRWESLRENGAALSTSRKDDISAYLKNYATFSDEWWRMALRRRESRDNFQRYIGKRKAMDSFWAGIKRNMKLDHSDLRVRVAYGSAITNLKATGPGEVAVPTGSMFASCKRLFKEEVHVTDEFKTTLMSWETGAKKECVHKIPSVQITTEGQIRLGYELLGHTPLKETPKVSYRDQLAVRVYCTRNKIQEKHRRGGLAPSLVDNNSIKRYPEVRGLRFSPETSTYSDRDRSSALTIARLHCMELLGQGRPLPFCRDACC

SEQ ID NO: 1366 - protein, 284 aa, Chlamydomonas sp.
SSSLSVKLTFGTSRRLISSVVSFRIETLRVLNRLVRTPDSTWVPPQSFLPIVLPGGYRNLRFRRYCKKQKLIVEIADFVAPREKSAKVLVEFGDWKGLGATPISRRTCGPLQAIRFELRSRENVIMEDIDEFRTSQRCSCCENHLCNMVALTHRKKQDGTGWECTEGRKRIHKILHCKSSQSGAPRQQCGGMLHCGKTWDRDVNASRNILMLTFHQVFGRERPLAFRRDAPRRSSTTPPPPPDTDMGTQTVERFTKEATRNIFENLFNLLHPPTLPKSNDLQSG

SEQ ID NO: 1367 - protein, 299 aa, Chlamydomonas sp.
HLLQVASSLSARLALAKLLGTIQASVAPTNGMTRLKTSLKSIPSPNTSNMVDLQGPCHSLSQSAPILLQHRANKGYQSMRFFRYVGKQKTIEKVCDVIAPRAQTTVVGFGNWSNQGYGISRSCSGPIKEIRRCLSRRKNVLFKNVDERNTSCKCHGCFQRLVNMKADSVVWRGVCKESPIDGSITVEKQKMVVKNVKVHKVLHCRDSVKSASSNVRCGATWNRDVNAAKNLLLLLTTWMDGRERLEAFCVPSPPPKTTVSIEASVSAKPTDPPGFVSSLPCYPLGQNGRSCFPTDFLFY

SEQ ID NO: 1368 - protein, 358 aa, Chlamydomonas sp.
TVQVRVSDLKKTSKRSRDEEGMSVAEQYDHKLKTTLPDIGIVVPGVDPGRSNIATVTYLADDKSKTWKLTRGAFYHKSGIKKQKRQQEKRFTDMIPMWASLRENGAALSTSRMDDISVYLSNYATFSDEWWRLALRRRESRDNLQRYIGKRKAMDSFWAGIKRNMMMDHPDLRVRVAYGSAITKLKATGPGEVVVPTGSMFASCKRIFKEEVRVTDEFKTTLMSWETGAKKECVYKIPSVSLNAEGQISIGDEWLLCHTLLKKPPKVAERDQSAVRVYCTRKKIQEKHRRGGLATSLFDVNKSIKRYPEVRGLRFSPETSTYSDRDRSSALTIARLHCMELLGLGRPLPFSRCKAACC

SEQ ID NO: 1369 - protein, 261 aa, Chlamydomonas sp.
MYDIAVRKLALSTSRTDKISAYLSNYAKFSDEWWRLALRRRESRDNLQRYIGKRKVKDSFWAGIKRCMMKELPAMKVCVAYGSAITKLKPTGPGEVAVPTGAMFASCKRIFKEDVSVTDEFKTTLMSWEAGKEKERVYKIPSVCSADVKLRLGGERFGHTKSKTMPKVADCDHLGVRLYNKRKGAQEKHRRGGFATSLVDSQKSIERYPEVRGLRFSPETCIYSDRDRSSALTIARLHCMELMGLGRPLPFAHSSSVVVDE

SEQ ID NO: 1370 - protein, 953 aa, Chlamydomonas sp.
KIGQCKGDLVSLVTEFCSRYKDTINAGKIVVSFDECGFSESLKPHYGYSPVGKPVIVKTTGGWVHHSLLMAVFSDGRKEFVVKKGSVKKTDFAAFIDSLSLCNNSVVIMDNASIHKNLVLRSPVNICYTPPYSPEFNAIELCFAKVTTYGTRMEHVCDVCIKSSVMYKLCKMATKPPTVAKLKELLKLAEVAYSSKDKKDDIVRLCEDNGLIARPPPEYKTVEKMCVVKCALKKAMSLDNEEFGKFRGHVDQLVNVVSRMLRRSSLLLTFHVTRLMEGDLPIPNMYDMKDTYWKDWLRIGVDGVFPDEESRISYESVKDVIGKVLGSDGPDYINSYPIYFDQVLNYAGHTLSTVVSNNAWVPLVPRLTRLTKATLNALGAPKTIRVYDVMRVIQQEIQEMESWPESVQEYVREVRVRLKVPDGSRLYDDYGKDMDFPTMVRFNYWMQTRLEAIGARRIRLMPIFNVQRAHVRLDMKTLVNLFRHVFPKDPNIVELSKWKNVKDPDRFMLPLKPAVKKKKSCGPGEWEAYKLAQQKYDTDVNDIKATDEYRHAKGRYDTLVNARKTVAGSFFKKPPVKTGWVFDCSICTDGVSLSMQYSKTVQVRVSDLKKTSKRSRDDEGMSVSEQYDHKLKTTLPDMGIVVLGVDPGRSNIATVTYLADDKSKTWKLTHGAFYYKSGIKKQKKQQEKRFSDMIPRWESLRENGAALSTSRKDDISAYLKNYATFSDEWWRMALRRRESRDNFQRDIGKRKAMDSFWAGIKRNMKLDHPALRVRVAYGSAITTLKATGPGEVAVPTGSMFASCKRLFKEEVHVTDEFKTTLMSWETGAKKECVYKIPSVQITTEGQIRLGYELLGHTQLKETPKVSYRDQLAVRVYCTRKKIQEKHRRGGLAPSLVDNNSIKRYPEVRGLRFSPETSTYSDRDRSSALTIARLHCMELLGQGRPLPFCRDACC

SEQ ID NO: 1371 - protein, 649 aa, Chlamydomonas sp.
SSSLSVDLLREPGQSKVDIRGNVKNQIIADLSILMATMASNHLWTNLERRITTYLKWKYPQIAKRLRSDIVAAVIKCPTKNLDVIFKMSPHTTKLPTKLPTARLRSAKSAVALAKKRVGRKEPEGSPLRVRLTKLQERLEKLSEAWLSSKNLRVDADNAKRFFAREVAFCLRGVLPLPSGNTFASRAHMTLPLYHKILSETIEEKRKTKNEKHRTFSLLPYKSGFTLSHIPISNMAFFYMVNECHFDSCKADVASKNHQGIWERPSNLKKVETVSRKFGYRIVTDGFAVSILMNKHTCLTCSMPADAFSTRAHEYVTTDEGGIVSFLDNVVVAAVDPGVTDIVTVTGLNGGTRSYSSAQYYRKGLIFKSQRQTDVWNLETADIVGGIIPDRDSSSSEQIGAYAGFYMGAAPILLALRVSGGYRNLRFRRYCKKQKLIVEIADFVAPREKSAKVLVGFGDWKGLGATPISRRTCGPLQAIRFELRSRENVIMEDIDEFRTSQRCSCCENHLCNMVALTHRKKQDGTGWECTEGRKRIHKILHCKSSQSGGSRQQSGGMLHCGKTWDRDVNASRNILMLTLHQVFGRERPLAFCRDAPRSSSTTPPPPPDTDMGTQTIERFTKEATRNIFENLFNLLHPPTLPKSNDLQSG

SEQ ID NO: 1372 - protein, 799 aa, Chlamydomonas sp.
HVCDVCIKSSVMYKLCKMATKPPTVAKLKELLKLAEVAYSSKDKKDDIVRLCEDNGLIARPPPECKTVEKMCVVKCALKKAMSLDDEEFGKFRGHVDQLVNVVSRMLRRSSRLLTFHVTRLMEGDLPIPNMYDMKDTYWKDWLRIGVDGVFPDEESRISYESVKDVIGKALGSDDPDYINSYPIYFDQVLNYAGHTLSTVVSNNAWVPLVPRLTRLTKATLNALGAPKTIRVYDVMRVIQQEIHEMESWPESVQDYVREVRVRLKVPDGSRLYDDYGKDMDFPTMVRFNYWMQTRLEAIGARRIRLMPIFNVQRAHVRLDMKTLVNLFRHVFPKDPNIVELSKWKNVKDPDRFMLPLKPAVKKKKSCGPGEWEAYKLAQQKYDTDVNDIKATDEYRHAKGRYDTLVNARKTVAGSFFKKPPIKTGWVFDCSICTDGVSLSMQYSKTVQVRVSDLKKTSKRSRYDEGMSVSEQYDHKLKTTLPDMGIVVLGVDPGRSNIATVTYLADDKSKTWKLTRGAFYHKSGIKKQKKQQEKRFSDMIPRWESLRENGAALSTSRKDDISAYLKNYATFSDEWWRMALRRRESRDNFQRYIGKRKAMDSFWAGIKRNMKLDHPDLRVRVAYGSAITTLKATGPGEVAVPTGSMFASCKRLFKEEVHVTDEFKTTLMSWETGAKKECVYKIPSVQITTEGQIRLGYELLGHTPLKETPKVSYRDQLAVRVYCTRKQIQEKHRRGGLAPSLVDNNSIKRYPEVRGLRFSPETSTYSDRDRSSALTIARLHCMELLGQGRPLPFCRDACC

SEQ ID NO: 1373 - protein, 793 aa, Chlamydomonas sp.
CLYINCSVMYKLCKMATKPPTVAKLKELLKLAEVAYSSKDKKDGIVRLCEDNGLIARPPPEYKTVEKMCVVKCPLKKAMSLDDEEFGKFRGHVDQLVNVVSRMLRRSSLVLTFHVTRLMEGDLPIPNMYDMKDTYWKDWLRIGVDGVFPDEESRISYESVKDVIGKVLGSDDPDYINSYPIYFDQVLNYAGHTLSTVVSNNAWVPLVPRLTKATLNALGAPKTIRVYDVMRVIQQEIQEMESWPESVQEYVREVRVRLKVPDGSRLYDDYGKDMDFPTMVRFNYWMQTRLEAIGARRIRLMPIFNVQRAHVRLDMKTLVNLFRHVFPKDPNILELSKWKNVKDPDRLMLPLKPAFKKKKSCGPGEWEAYKLAQQKYDADVKDIKATDEYRHAKGRYDTLVNARKTVAGSFFKKPPVKTGWVFDCTICTDGVSLSMQYSKTVQVRVSDLKKTSKRSRDDEGMSVSEQYDHKLKTTLPDMGIVVLGVDPGRSNIATVTYLADDKRKTWKLTRGAFYHKSGIKKQKKQEEKRFSDMIPRWESLRENGAALSTSRKDDISAYLKNYATFSDEWWRMALRRSESRDNFQRYIGKRKAMESFWAGIKRNMKLDHPDLRVRVAYGSAITKLKATGPGEVAVPTGSMFASCKRLFKEEVHVTDEFKTTLMSWETGAKKECVYKIPSVQITTEGQIRLGYELLGHTPLKETPKVSYRDQLAVRVYCTRKQIQEKHRRGGLAPSLVDNNSIKRYPEVRGLRFSPETSTYSDRDRSSALTIARLHCMELLGQGRPLPFCRDACC

SEQ ID NO: 1374 - protein, 789 aa, Chlamydomonas sp.
ECSREPVCRSRLHQNVFGVQFVMEHGVVLVHEADQHDDVAELVDYEGDEDEERAPGRAICVVKMKLSTFIPHDWLRKKIDTLVLDMNKLLGEGYIFANFHIARLFENGIAVPPVNRNFFYRCLLAVSTNKCKGSTLGEDFESSRLLFDLLREPGQSKVDIRGNVKNQIIADLSILMATMSSNNLWTNLERRITTYLKWKYPQIAKRLRSDTVAAVIKCPTKNLDVIFKMSPHVANMPTKLPTARLRSAKSAVALAKKRVSRKEPEVSPLRVRLTKLQARFEKLSEAWLSSKNLRVEEDNAKRLFARDVAFCLRGVLPLPSGNTFVSRAHMTLPLYHKILSETIEEKRKTKNEKLRTFSLLPYKSGFTLSHIPISKMAFFYMVNECQFDSCKADVASKNHQGIWERFANLKKVETVSRKFGYRIVTDGFAVSILMNKPTCLTCSMPADSFSTRAHEYVTTDEGGIVSFRDNVVVAAVDPGVTDIVTVTGLDGGTRSYSSAQYYRKGLIFKSQRQTDVWNLETADIVGDIIPGRDSSRSEQIGAYVRFYMGAAPILLAHRASRGYRNLRFRRYCKKRKLIVEIADFVAPREKSAKVLVGFGDWKGLGATPISRRTCVPLQAIRFELRSRGNVIMEDVDEFRTSQRCSCCENRLYNMVALTHRKKQDGTGWECTEGRKRIHKILHCKSSQSGAPRQQSGGRLHCGKTWDRDVNASRNILMLTLHQVFGRERPLAFRRDAPRSSSKTPPPPDTDMGTQTVERFTKEATRNIFENLFNLLHPPTLPKRNDLQSG

SEQ ID NO: 1375 - protein, 354 aa, Chlamydomonas sp.
DRYVTNKVRGKGKMPNPYFKNRQWLLQCPKSVRQSAIKAALANTKACFSNMKAGNIKQFSAPFRRKKTELERGWAIEMDQKNVSKDGDKLFIFKDILGNMRYFGSKQLHKLMPEENPTHDPKVQKSRFGEYFLVLSVASRDRRAERKPVHPDKVATASIDPGVRKTMVTYSPENEDSFMLGQGQASNLVKFLLVHDKLQSRLDTEKTLRSKERMKIKKHMIRIRKRIFYLKKEFRDQTTNVLAARYDVLLVPQLETAKMTISAERELTTKVARQMLTLSHSVLFNRLKEKCAEYGTVFLHVLEHYTSQTCPMCGFLNKCGETYTCKNCQFTCDRDIVGAAGIFLKAVRTENPCS

SEQ ID NO: 1376 - protein, 393 aa, Chlamydomonas sp.
TQSRLRNRCWQSVQPVHVQQGGGSTVGRRKHSQVCLPNSRQVCDEQGEGGGEDAKPVLQESPMVASVPQSVRQSAIKAALANIKACFSNLKAGNIKHFSAPFRRKKAELERGWAIEMDQKNVSKDGDKLFIFKDILGNMRYFGSKQLHKLMPEENPTHDPKVQKSRFGEYFLVLSVAARDRRVERKPVHPDKVATASIDPGVRKTMVTYSPENEESFMLGQGQASDLVKLLLVHDKLQSRLDTEKTLRSKERMKIRMQMIRIRKRIFYLKKEFRDQTTNFLAARYDVLLVPQLETAKMTISAERELTTKVARQMLTLSHSVLFNRLKEKCEEYGTVFLHVLEHYTSQTCPMCGFLSKCGETYTCKNCQFTCDRDIVGAAGIFLKAVRTENPCS

SEQ ID NO: 1377 - protein, 425 aa, Chlamydomonas sp.
KNKKKSPPSVQYPSSQERLHNLYVPISSMTFMKLLSMGDSPLESVSGDGRYENHTMLWRKYFNVQGLETKRSRFDNRILSDGKGVSVQMKQKGKEEVVEEGENAGYPKDANIVECKDAVGALRVGVDPGMTDIVTVASSAGRIESFSSARFSEVAGYNKSKRRTYKWNDETQDLVKSIPSPNTSNMVDLQDHVRAYLKALPILLQHRANKGYRSMRFFRYVGKQKTIEKVCDVIAPRAQTTVVGFGNWSNQGYGISRSCSGPIKEIRRCLSRRKNVLFKNVDERNTSCKCHGCFQRLVNMNADSVVWHGVCKESPIDGSITVEKQKMVVKNVKVHKVLHCRDSVKSASSNVRCGATWNRDVNAAKNLLLLLTTWMDGRERPEAFCVPSPPPKTTVSIEASVSAKPTDPPGFVSSLPCYPLGHLKC

SEQ ID NO: 1378 - protein, 420 aa, Chlamydomonas sp.
VRMAGPLESTDILQFVDSKSYWCIKSYLAIHKYASSRSSLVIVGAEQATYHSSHQPEDTTLLDGANTRTHVNVVVAAVDPSVTDIVTVTGLDGGTRSYSSAQYYRKGLIFKSQRQTDVWNLETADIVGDIIPDKDSSRSEQIGAYARFYMGAAPILLAHRASRGYRNLRFRRYCKKQKLIVEIADFVAPMEKSAKVLVGFGDWKGLGATPISRRTCGPLQAIRFELRSRGNFIMEDVDEFRTSQRCSCCENRLCNMVALTHRKKQDGTGWECTEGRKRIHKILHCKSSQSGARRQQSGGRLHCGKTWDRDVNASRNILMLTLHQVFGRERPLAFRRDAPRSSSRTPPPPNTDTGTQTVERFTKRLLGISSRTSSTCCTPQRCLKATICSLDDYKVCSTLFENYCITEEEENTWKRKTKTR

SEQ ID NO: 1379 - protein, 794 aa, Chlamydomonas sp.
ECSREPVCRSRLHQNVFGVQFVMENGIGESSSLVHEADQHDDVAELVDYEGEEDEECAPGRAICVVKMKLSTFIPHDWLRKKIDTLVLDMNKLLGEGYIFANFHIARLFENGIAVPPVNRNFFYRCLIAVSTNKCKGSTLGEDFESSRLLFDLLREPGQSKVDIRGNVKNQIIADLSILMVTMASNHLWTNLERRITTYLKWKYPKIAKRLRSDIVAAVIKCPTKNLDVIFKMSPHTTKLPTKLPTARLRSAKSAVALAKKRVGRKEPEGSPLRVRLTKIQERLEKLSEAWLSSKNLRVDADNAKRVFARDVAFCLRGVLPLPSGNTFASRAHMTLPLYHKILSETIEEKRKTKNEKHRTFSLLPYKSGFTLSHIPISKMAFFYMVNECHFDSCKADVASKNHQGIWERFAKLKKVETVSRKFGYRIVTDGFAVSILMNKLTCLTCSMPADAFSTRAHEYVTTDEGGIVSFLDNVVVAAVDPGVTDIVTVTGLNGGTRSYSSAQYYRKGLIFKSQRQTDVWNLETADIVGGIIPDRDSSSSEQIGAYARFYMGAAPILLAHRASRGYRNLRFRRYCKKQKLIVEIADFVAPREKSAKVLVGFGDWKGLGATPISRRTCGPLQAIRFELRSRENVIMEDIDEFRTSQRCSCCENHLCNMVALTHRKKQDGTGWECTEGRKRIHKILHCKSSQSGAPRQQSGGMLHCGKTWDRDVNASRNILMLTLHQVFGRERPLAFRRDAPRSSSTTPPPPPDTDMGTQTVERFTKEATRNIFENLFNLLHPPTLPKSNDLQSG

SEQ ID NO: 1380 - protein, 622 aa, Chlamydomonas sp.
VNLIVYKEFACTRYQNAMYGNQRFCKIGKASDALGVSRTVVLRQWSDKGTIRTPGNQRLFDPSSIQGYLIEQEKKPAVVKSFSTHVCPHTNNNPTCSDSNCSCKPIFLTNIPDASKSLKSRTSDQGSTSSAQDFYEYWDSSRQDLYRQLLWLPKTGSQGLVSSSLNGFARSTPTRSSFSIPKTKPLKTSLEKTSCPSFKYIVADGTVEDATKSNAKPKLRTLKLKLNPTKDQKSMLAEFAGCSWFMYNKAVAAWLGVGSTHKSVFRIRDRYVTNKVRGEGKMPNPYFKNRQWLLQCPQSVRQSAIKAALANIKACFSNLKAGNIKQFSAPFRRKKMELERGWAIEMDQKNVSKDGDKLFIFKDILGNMRYFGSKQLHKLMPEENPTHGPKVQKSRFGEYFLVLSVASRDRRAERKPVHPDKVATASIDPGVRKTMVTYSPENEESFMLGQGQASDLVKLLLVHDKLQSRLDTEKTLRSKERMKIKKQMIRIRKIIFYLKKEFRDQTSNFLAARYDVLLVPQLETAKMTISAERELTTKVARQMLTLSHSVLFNRLKEKCEEYGTVFLHVLEHYTSQTCPMCGFLNKCGETYTCKNCQFTCDRDIVGAAGIFLKAVRTENPCS

SEQ ID NO: 1381 - protein, 465 aa, Chlamydomonas sp.
GLFPLPRGKQFNTRAHLTMRLFHHVLTELGEVGRVDPKDKKTKRSHPRLFSILPRKNGFTISYVPISSMTFMKLLSMGDSPLESVSGDGRYENHTMLWRKYFNVQGLETKRSRFDNRILSDGKGVSVQMKQKGKEEVVEEGEHAGYPKDANIVECKDAVGALRVGVDPGMTDIVTVASSAGRIESFSSARFSEVAGYNTSKRRTYKWNDETQDLVKSIPSPNTSNMVDLQDHVRAYLKALPILLQHRANKGYRSMRFFRYVGKQKTIEKVCDVIAPRAQTTVVGFGNWSNQGYGISRSCSGPIKEIRRCLSRRKNVLFKNVDERNTSCKCHGCFQRLVNMKADSVVWRGVCKESPIDGSITVEKQKMVVKNVKVHKVLHCRDSVKSASSNVRCGATWNRDVNAAKNLLLLLTTWMDGRERPEAFCVPSPPPKTTVSIEVSVSAKPTDPPGFVSSLPCYPLGQLKC

SEQ ID NO: 1382 - protein, 251 aa, Anthracocystis panici-leucophaei
EGRSGVRTAQTWFSSDGTVIEFGSKQDCDTLASLHKKADRWKSRRMKKKAVMGRRRAMRGRRARKIGTLMARTTAKESRTLMETKSARRRRMSLASVLAIRKFRLRFRQQRDASCYAKSAVHSRSTTILSKICTGARRHIWPKPAISLSPRMEVRGMIRKSSSKLNRNVKRNLMAWSHGKSLDVLAQQTHDAGKVLLIQPEAYTSKTCGRCGKQNKKLGSSKVFKCPSCSYTADRDHNAARNMTIKAMRQR

SEQ ID NO: 1383 - protein, 326 aa, Anthracocystis panici-leucophaei
YGNGSKHFTVTSDVRFPSGSGTDPQVSLDHTLRFMVWLCQFVHRFVQPMLKATTADEKGEPNGAVNRQQHILANSFRCSLVQRQSHSKWAAKQLPIAADQCHPLYSACSPFQSYTKVHKDHNDFTPTILLNFGHCQLYLPGYDVHIDLRPGEIIFFDTAVHHATQAHPGFHGPDTKRWVVSCFFHYRIRLRRSPPSGLVQAMKRDSNIAGIHQRLLDIIEEEKRAEKEAKSTANDGLSLEMGSARRKERQGKNKGVKQAHLTIGQYKVKSMLMVQREADTLKTCARCGFIHEKLCSNKVCCRCPSCQYHADHDHNGAVNMLIKAIR

SEQ ID NO: 1384 - protein, 214 aa, Apophysomyces ossiformis
LIIARYYMNETANLNWFPLLFNIQVAMDGRSDLREFYMQKKSVRKWKRTQQIYTQKAYSKIASAERRHLKKSGNDKDILIMCTGDAGTAVGSTIHGHARRGGKRLRRQHMQNACVAITDEFRSLQTCPYCFQPVTCHEKKQADKWVTNIGSVTCTNCECPSVKMGYATRGRDTNAAVNIALGGEYAHAKFILSSSSCLLSSKKCQRVRPGYEIV

SEQ ID NO: 1385 - protein, 788 aa, Fucus vesiculosus
PPLIDQSHPGPWMRRKSKTFQQLSRLGSQLNVTTTILIIMVKPSSDGKPKKKKPKRDKPTPPFLQTVRNLYPKQYLMAAGKPPRKYKGSYCAQLFSRVRFGDKVSQNLRSRTVSVGFQAATADDNRETFQAKVNEAVDHLSRERVLASLFSNFVYMERLRDGSALPEPDAKFFRSCLSSCIKSRGGSLNTEFDRFSTLTGLPRLVPPKKLNLDQQRTFEANQMATSTCTRVTHHTERRRISITRWFLRERIPRGNLGYKEYTTKLYSLAKKIITGFDGTPEDKQKLRDMVRGMDTDVEPEAIIEFAENEKKFSDGLGTNKKCASTIAHLNWMFKTYVSEARRKYEQVVSQAQSIFPGEERESREKRKDFMMKELGGKDVCAPPRDATVLPICSAGAVFIHIDMKTLRSWGLLHSNDAWWYKNVLRPFSKEANIKGLRSRENVRYASNEQGYLSSLLQSGPAKCPWFLGESFLTDGVQIKLLLVTLEHTRRAFSGSSELNEEGYSKLPRADAELESLLEEGRGVYNISSLVESGSIRGDLVVMSADPGQAKIINVCSATSETWTKKDPAVILQTSTYVFGDDYRRDTLASRSDEYETFKRKGRPYGVAVDSLAEEKKRTSCLTTFISYYKSWCANVSALMGETLQKGRRLLRFGRHRARQSTLAKIADRYMGHVGDTCRVMLFGKATFSAKKGRASAPRKALIREMASRGVVLMVNEHNTSKKCPGCLEDTVEDKERRVRSCTNFKVGSPEESCRLHPLTPVFEMDRDDVGSTNIGMRGFGHLLGQKWF

SEQ ID NO: 1386 - protein, 239 aa, Scenedesmus sp.
AAPALAGGAAGAVRPPPARRRRLRACLPEPRACILGHERRRAAAWRNGRVHHVLNNAFAYSLLACRAECAWRLRKHGLKQRALHAVIQLTAYGRVFVRGRVRPHARLPADLPAVVLGIGDASLGMGGCISGPGPPRQALLALLRTYYARRRVAAVLMDEHRTSITCSVCGARMEKLRGIYGLLQCPGCTVVAPRDDNAARNICALTLHELLRGGRGTAGGARLAGAFRQAAAAAVDPPA

SEQ ID NO: 1387 - protein, 366 aa, Scenedesmus sp.
IPASITCLLRSPPTTGGREAGRMATSFVSSCTRSTLTGRAALLHTRIGCEKRRTGWDKRAEWAAGIGRAATANLNVYLAHAAARAALLCEGKAVLGSLAARRWSLRTHCLAQHELARVVQQLALGRCTVGGRWSARERDPSWRARQQLLPLPEVVVVGMGNAELSQSFIGRKLSPPVRLLERCVRGWRPAVPDGAPGPRAHFVYVDEYRTSRTCSRCFGLDDVQEVAVRAAGAAGERRTRCGPAARAASRSSATSTARAASRRRPHGRCLSRVCTLTTRGSWTTRSSGSRARGCRCACRLARCATRAQRRCWPASAPGSASGCCHAWRRSLRRQGAGGARRRRQSCVTRARARRRRRRTWRRWPLL

SEQ ID NO: 1388 - protein, 208 aa, Macrobrachium nipponense
VHKKLSKTDSVSFEEYLQLYIENYKIIWDMKTAKSGGGACLVYLLPEKQGHLAKFINRVVGDSTKPLHINYGTAKFAAMGKKHYASPNSATGILSRKKWFWRFLHKLIKEKVVSEIFKSVDEWKTSKVCHMFKELLSTYIRWELLNKKQQITPALGRKWCNCVVYVVALHSNNRLNDGNISQDAPQLKMCPIGGAFLNRDSNAAANID

SEQ ID NO: 1389 - protein, 228 aa, Mortierella sp.
QEPNHSGEGSGAPSSGIQGSSNPSSNEPVQGSQQGTVNQDNGFCSDCSKHHLPDFSRTGLAYPTSCPSNELPFVPVLFVGTAVCNGSRLGGHLKYGGKRVIEQHMCSSPVCMIDEQNTSKVCPFCFQHMRLARATKIVDGQRRSVRVNRAVECVNPSCLSFQLGYTKRARDSNASMNIALNGLLSSPRPTVKSFLLTKETSDQPSPPLMPLASILALKTLSLLQLRSW

SEQ ID NO: 1390 - protein, 273 aa, Mortierella sp.
RQVPLQETRLGRPKGQAKRVPHHRRPASSISRRLATQKKGRDNKVVIAVGLGKFQSKSGMTSRRTSRRLHVLFPKIWKPARFISQSTLIILALHTYASSLGYLVVGVNEFYTSKKWPVCTNFVEQVTIRRLYCRTCRVYLHRDVMAAQNMCSIVQEYLLKWELPEYLQPKSIDGTYLWTIAISEASSSANLDPTTLEQASGTEPSAKDSSKTSVFSSKGIASDGELEEQVEELTIEPKKNSGTHSVTNCYIVIESFCMTDLSVHKGKFPFYLD

SEQ ID NO: 1391 - protein, 219 aa, Mortierella sp.
TFLRNQKLVDKQVLLSDVSPIDGWCVRCQCHHIPTAVESKAFRHLGCCPRTVPEVLPILLIGDAGTCVSSRLRGQTRRGGANMREEHRRYCPVAITSEYRSSKTCVYCYHQVQQARARRIVKDQIRIVNLHEAEECVNPECPSFLVGYTIKSRDQHAAAAIAIIGPRRPYHPISRLSLHSPEPSLTVPPLRTPASRWIEIPTLKIHMLIPWERPSVRGL

SEQ ID NO: 1392 - protein, 664 aa, Haplosporangium sp.
NPMTSITESLEKSGSVFSPFFNASTIQMICRVHDLEFTTSGSILKAFYVIVMFSILSFIFFAALTRTFSDNQIIKGSDQAAMPLILFIGLAGRGVGNRVGDHARRRCKVMRREHRQHCFVAFTDEYNTSQRCLLCSEQIRTVRYWPIQPTQGHEVNQHHQQYTGRTQRHEYQQLIQSWRQPGGQAITLALFIGGEMIAVTSASTSFQQNLFLLSPSPSSSSFKFSSLPFSIPSLFLLCSFFHQRFFILFHTHLSVLFLLDSSIPVSLNPGPVNVMFARPVDPFLVFNSAYSAAELMHKDMFAQEQQPHHQDLQQEQHHASRRKRSLHFEPEFFEALNSSLQDPPATLSRSSRPYKKPKRNATEATSSFAANNTNTFPADLSSTSSASDKLSPATLVELASGQNITKIRSPPPKFSSFLAPKPTDGPSIIDLSSGEELQTLNLGENDHKRRRDNATDSGSSTDTLREVFDVQEDGSLHAVMDHAPSLPSPTKRIKTDKNSKGKDRTLWSLNEQDDGWEHRHSIHYQSNAARRNYYSNMAAKDDARTGSSTDEHAMDQDSWMSTPAYRANTMALVRYKGPKTVTFVDGVDELIRNQLDDHYTPALDNAQGNEMILYRRPARMPLINQTADDDAEESSARIEELDDGYGTDNAIHELEEKIMDMDLD

SEQ ID NO: 1393 - protein, 230 aa, Haplosporangium sp.
KDPSSLSAMQRRVCYLPWSILTSTISFVGQGPNTNVIHDGSYRRVDGLFYEIATLFNFIISFLRSADKDFFDNQILEGSDQAIIPLILFISLSGMSIGSRVGGHARRSGKVMRRHHQQRCLAALTVEYNTSQICLFYFEQIRTVRYRHILSGEVKSVRVNGAKECTNSRCQFVTDGHAVRSRDARLTLCIALAGASTVLNGEPIDPFNRHKALRPTHQQYAGRIQRHEYQ

SEQ ID NO: 1394 - protein, 244 aa, Mortierella sp.
RTPIMINWTCSTTGRICKRHVYDATRAQQEEFAIITDRLLNTVGATVGRKVGMGQFSSTSRLSSLHSTFMDYFVQTVGSRFNGMVSSYGRAMHHVNKVRSVGYIVLGANEYYISKRCPVCESFVCQVTLGRIFCEERGATMHRDVMAGHNMANVVRSYLLDQKRPRYLQPMDKDNNWKIVPPFFSRERVTASKGDPQCVVEACLSLRKDHDRASFSHQSFPTFTFTFPFLSSCPSFSHSSTIAE

SEQ ID NO: 1395 - protein, 218 aa, Mortierella hygrophila
SRLYTIASSTHLSTSSGVPFVDPGSGLCQCGSYHSPEWSSSGLQYPVVCPLSKNRVLPIFFVGTEGVGTNSRIKGSLKYGGKRLIEQHQQHCPVLMTGEHRTSKVCPFCFCLTRLARTHRWVNGEFKSLKVNGLVECTNPSCISFMSGYTKRGRDTNAATNIGILGLTRVLTGNTLPPFTRTMRPAVAPPSTTSRVSAGSFHSVDLNGRPRSSVRIQV

SEQ ID NO: 1396 - protein, 899 aa, Aphidius ervi
KKKKNFSAAVGSGGKRQRTGNNTNTTSTTSTTTSTTTTTTARRSLFKVPERRSLNDSSSNMSLNNSTASNSSRSRSQSPSLSTVSASSRTSSQASICCNNYGTDHTNRASKRCLNHRLPIKERAMKKLNQNNEKPTNYETHTIKMGFKSICPDENIRQEIYNDVELMSECIIDFSIFFEFTIRHDKQWMVQYLENHDKEPNLCLIAMHLKNNYSKKNRDIVELLDEYNTLYPCSNKHQYQFEHHSALIKNQVNLFQVNFKTNIVEHIRSRVNKYYCKVYNRDYSKINKLLDDLFLRNIHLKNDELFNNEQFKNLDFKKLYDTGDKWWKFISFHLKLQLHVDFVLSPINKLGLHSISFTTDAVHQLFRRKKFINNEKTLVNASYSIATNGPDDNYNEYEYENLWKKFIQIPSKYKFAYYITTDGISASIQCFKKMNEKKLNFNIEEKNYQDIVNLKISDVERELLIKKLNELYERFDGLDPGLRELFSGIIIQDFKYFFDKDKQERFKIKSNTYHRISHFYEREEKRKKWTQIYEETYKSLLKENNDLLKKRDPEKIFKLNDIKNYIAITKYRLGLFVQGQIFLKARKIARLKWDKYINTQKTNDMIVNKLLFGEFVGDKQKLTIENNKKKKLDNKKLKRQRNQVKFKKKYDEKKLKRKKKLEEKIKLKTPEQQQQQQHHNNNNNNKLNGKKKRSILRDKNNTNIEFHDAALRQAMKDEEAERIKKKIEKLKARRKKKLDKRPKRIKKNKKKADNTTTDAAIADVIAGAIADAAAAVDDAVVDNIPDENGGGGANDNIKIKKKKKKSIKIITDKFNNNKRILIALGDTKISKWMKGYRRVSFKGIIRALYCRARLSKSKIDIIDTDEFNTTKLCSACNSVCLKSKSPDRLVIYLFINFIF

SEQ ID NO: 1397 - protein, 1278 aa, Aphidius ervi
KMAEPKGLPNLGNTCYMSSAVQALYATSKFCDQIKKDDSTMFKLLKDIFLNMSQKKDAFFMKMSLEALRANMKYELGRQHDSSEFLLTLFIEYSSKAYSKRIIHDTFYGKFHYIKKCIKCDSKLHSFSQEEEFSMINLFVPENLDDITVKSLIGLDLEPEKLKNTTKCKNCGNTCDSYNRHKNFTNLPPYLILNLNYFKCKGSVIEKIKNKTKVDKEITIPIKEKKSSTAINQKYKLYAMIIHVGYTVDSGHYYTYRKDNETNCWYKCNDENVTKIVDFQEIENFNSEEQIPYVLFYEKINNNNNSDEFNLKSHKKSNSFVEKKINSLNNQKLIKKDPPIKKVVKKDNSHIIKNKTKITHIKNKKLSKNIQNFLKINNNNNNNNNNDDDDNNDDDDDDNNDDDDSSITQKLITRSRQVNRLPSNHSNRERSLSVQSIDRMSVASEASSTQTIRMEIENLNIVSERKRAGNDTDIFLAPAPKKSKSSNHKEINTNNDNNNNNHHNQSLIKKNLDKNKKFKYSSIKMGFRKFCGIQDIPHGTQMETLDNDDKTRMEVYNLVKTIIHELSPYVVECSFFLDFCLSHKDEWLINYLASMNKTPNLLFVTNLLRDSSFKNRGLIITQKTTPEQKEKILIKKQQIDKMRSLYEEYIQCKPDKKKTNYNTQNRSKIIEDTTERLCTNLAVGIYENAYSRIKNYFVKYLGISNDLYQIMNDLFCNNIHPVIENDNLFSECKDLDFTKLKTNWYKFLPFFYKLQKLVANFTLAPIYKCGAQHFTFTPSIIFQLAHTYFPSLVETTFQKEVKNDPENVKKMWTKLFGIPPKFLKNFAGSMSTDGIDVSLHQLKEIDESKKMKEEMSNKQLLDLNNVTKDNLSKVTKWSTYDPGLKKTIAGISVKSFDDFNNKNKENQFVLKGKKLRHLTGQFSRRIKYEKIMQTVKEYNQIILSDKFKDLNLKNPTNYQQNTQYHLNYMNASQSISMKNSIQRLKFDAKIKKKSVIDQLADNICYDTGPISFNRTHKKTKNCNNDNNDDDDDDDDGKKKEIKTQRNEGKKKQRDSYKKKIKIRKAKLEEIKKEKKKIAIEKAMKKKGILQNKKEKTDDKIDDKIDDKIDEKRKKYEKDRAKRRMRKREKIKSRIRKMSGQENIVKTVTDASAPYNPGNKTGLTVVFFGDVKMPPHVKGHVKTPLTEIKNTVKQRENVIVLEVDEYCTTKNCSVCNEILSAPRWWSGHRYRYCINCGITWDRDINASRNLFAKGAIDNNLKDENFMKNYDNFLRKKKKT

SEQ ID NO: 1398 - protein, 1716 aa, Aphidius ervi
VLIKNIYKMVMRVGLDNLGLNCYINSIIQVLHAIEDFRNDLINNKEHNSSIIKELCELFKELSLSFSFMAKSPENFIKSLKKSSITKHFDYTRQEDCSEFLFKLFELCNDDENSCEIIKKYFVGEIKRLPKCTNCNKTKIIIEKFNNLQLCFSSNENTIQDMFNNCFVPETLENVKCDSCKVKCNKTETKELTQTPLHLILLLKRFDFKNGQPVKKHDYVKLNENITVKNESYELHSVIIHKGEDIESGHYYTYNKDISENKWYKYDDDEKVENVKFNVIENLKSPDTPYMVLYKKKDNNNNNNNLNKKNEQLKISPIKVTNKLDIHNNTVTKKPKIISNVILNKKKIANKIDLNLNNDDKSIGKCKTWVSSSIIPIGLANFNNTCYINSIIHPLMNTDKFYNKIMNTNYKEFDPLKRIFQLLINKESSKSSFKRLILKLKTEAFVEGTQQDTSEFLLTIFNNYSENKNCEKIINDLFYGKYIEQRRCTNKNCKDFRSKESFFINNLNIQTNTTVRKLMSKNYKNEDQNCVKCGQNNSCTIKKVNTILPPYMIFNLNYFVYDKKSNTFKLINNVTLEIDEEIKLPIKKASKSEIDEEIKLPNKKASKSEIDEEIKLPNKKARESVGGQIYIIYAIIIHDGNTLNSGHYYTYCKDKNTNIWYRFNDNIVTPIKFEDIKTFHLNDNKKPYLLFYKKSNISSTIPSPPPQSAQHNPSVEDIVDNLSDLFSNFSTLSKDTNKSKNSIQSSSIIMKDIDNLSEKLSKCSTSSEEIKNQLKRKNNNHIGIIDKKKFKPYKQNLKRKINNKTLCIVEKKQKINKLESTQTSIFHKNQIISDDDNDDDDENDEKNQSNNIKNTNDLPDNNKISNNKLKGVCNDCHRIGHASKKNKLCEFSDEKQKLKCGDCQKNGHSNKRSTWCRYNSSCKKKVIAKNSINDSKIIKRRNPSKTLKEKERHSTVQIGLKTAIGINTFNFNKMEKKDYDEKLELYNIIIGDVRRLSKLARDASILYEYCINHPNKWLLNYIANSDKEPRVNDIFNRLRENVTVKKDIDENIIRLLADYENDRPKNVKIPMLHNTDGCSRPYEEMMTQFETNLKVNLNEHGPERVTKYFYSLKIKTKDGKEENKYTKDEIKKLLDDLFIYNEHPKEELFKGFEDLDFSLFYRKTKWWKFLPFFHKLQGILKNFILIPTFQCNLKHIRYSNTGLKQLASRLYNLKEREVAKTYNNNNIKELWKKMFPHIPHFENFDCTMTTNAVYACFKYIKKQKINDDDDDDDDDDDDYDYYYDDKKDEYIVKPKKINNIKEKAKDCEQVVTADPGFINPLAGIITRGKDCIKNFGDKEHGKPYCLKLSTYRRKTGTFKRQKKLKKITDKVDKAVNELLLKDRYKNLNTKDPNNYIQTMQWRTECTDIMSPVYTQLRVAKLSWDKIMMTRSVIDTTVNKMGWNIGKKNKKLIKNQKKQIEKKIKLLETDTSKKNDDENNDKNKKKLTNHEQKKKNKKNKLKEESDKRQNKLTDRQKYQRDRQRRKEQAKKVIRKKEKKEKLVQKYKNILSNINDHFEKKKIQFKNEPDKEKKKKIFNGNFRFYHKRKKLNGKTLFLMGSTKMSNRIRGHVFAPLNIFAKTLKKHKNIIFFNVNEYMTTQNCANCNEKCHVSTRGDRYLYCPNCHITWNRDINGGLNIGNVAFIHLLLKNENSMKNYNNFKRSYNNKKNNKTIDKIK

SEQ ID NO: 1399 - protein, 1006 aa, Aphidius ervi
CVLMIFLIKFLIKIFRSSSLQKTKRSTRSSKQNERRPPNLSLIVDPDTDDDDDVNMVVTPTPSTSTSINKNKQQLKNNDGSSIIQRLSQELARTAVLENNNNMDIDDDLIVERQRREMTQVFGSQKSMEDEQVIKSQEWVVKSFSPPSTSENNNKKRLNMSPIPELINKKIQKMAPSSPPPPTPPPPPPPPPSFKTPTVPQTPIKQQKQKKQRNTQTAQSRTPSPSPSSTSTSTSRSTSSINSGKTSTSTKRRQRSAGDKKFANEPDKKMYTIQMGLRTLLKITKDTKLTDQNNKIYTQIQSDVDRVAKWKIGGSYFLEFCINHHKGWLVNHIYSNGAKKIIPQIFNILKVPRLKGKQPIYDVNLIELYDEYCSIITSLNETDNLNYPLRFNVDGLSKLCDDQIETYLTCFETNINTHKYKRLFKYIKKELGISGSEAYKILSDLFERNIRPEKIKLFDDFKDLNFKLFNNNSNWYKFLPFFIELQKLTTNFIVVPINHFGWHHVRYSTSALTRFVGQLSDVKLSEECKTLSDEALWKKIFNIDPESSLGKRFGLSLTTDGASVSIQCRKDVVNKNNNLDNNIQKDVPKITILSQHSLDDLKNYNITHFSSVDQGQRCVVSGIHFENISDLKNKCKQKRFAIKNSTWLYKSGFFRNEKKRKRITSTADEKVEKIVQLVEFKNIINLKNPINYLLNLKFRLLCFAIQQPVYGTLKMTLLKWNISIRKRTYLDDLAYFIATGQRKKKYLKKKIIDEKKKTKNIKAKELKKLRKQNYLKNHPSDKDKQTKHQLKLARKLDSQVKLAEKNQLKMTKKQLKQRKRNRKREKRLKKATKNLEKQRKLELKLSFEKQQLNYHQEKEKKRKEYNKNKNNNNNNNNNNNNSTNNNTKVREYSCCFIGDPNPHLRPKGYQRPPLCKLEKTILTFDNVILVRVDEYKTTQNCSKCHNQLIVSTHGHRYAYCRTCGITWHRDINAGISVGKIGTTYAGMNPDDDIANYSNFERSTKTR

SEQ ID NO: 1400 - protein, 1070 aa, Aphidius ervi
YYCLLFYRSAPLTVLGNLSPESTTESFKQDMFSDDDNDLLGTINLPSTSSAPQVNERKRPILSSPSSSSSSSSSSVIQKTKKKCLEISSSSSSTSTSSSVKETSKKKCLPLSSLSSSSSHNNDLESLSQSQSYRSTTDTSDNSTVCDDDDEQTTLRDSSDADTNNDNNLDVDNVDDNENNENNMDLEDAPDRENLDVDNVDDNTNNDNNMDYYLEDAPDTVQLSQLSIASWISEASSPETFDKKLIEKQQQNLQALENNTPTSPQLPPTIATPSPPPQQPTIATPPPPPQQPTTQTFKRPSTSTVRSRSPSLSSSCASSYRTNMSAGTKKFQSIDKKNLEEYTVQFSLKKFCGIDSQTYDNDNKLKIYNKIINDVRIISEWAKESSIFFEFAINHPNSWLVNWISSKDEFHHIYIIFNILRSDWKPKKATKDSEEFKELNKLFDEYKKERPQNIQLGPTYNTSNLSSLVEGQCVTYFTNFKNNLLNHFYKRLRKLLKNQKTQFFNEKGKEISIYKVLKNLFTKDILPDVDIFKRDEFKNLKFSKFQQNWWKFLKFYLELQKQMKSFVLIPVLKCGLRHVKYSTTALQQFALTLEKETEKETEKETGKKTKQKTTQHTIKSRTHESLWKQYFTIKNDSRLDRDFYLSMTTDGVSVSLICMRKKKLINNPISIDKNIDNYNRLFFGDIGLRLLFGGVILNSINQLGNKELEQRYTYKSKTHRYRSGEFKRQEKRKKITAEVDKYVENLLLKDEFKNINTKDPTNYKNIMKFRVLCFDKLHPVYSQLRVMRIKWDKKIKVKKSIDNMANFIGYGVNPKNRKKKKKETSNEENKKKVKFKNKVNSTRSKEKRVRKHELQVNKARENKKSKTDDEKERAKASRLKEQARRKQLRLAISKRLTEKKKEQLKKQLEKKSVKKLRRINVDQHKTLVIVGNVNVAKHMSGYVHAPTSKFIKKVEKLKNVKVLYVDEYNTTKLCSECSTNLIVGKYGQRYCYCPKCHTTWNRDVNAGRNIGKLGLIRENFVDENYFQNEKGWNFKKFSRKKYTDDDDEEEDEDDDDYDDSEEEEEEQQQL

SEQ ID NO: 1401 - protein, 877 aa, Aphidius ervi
LCFFCVFSSDQQSSIDIQKKKINTCSNQKRLCKACGRKSHGTKFSQKCIKNVDNIPLAKRLEKTKLTQANKIDKIKNSKSKEAKAIRQFNYQKKKRVGKLKSGQEKYSTIKSIKMGLNRIIKNQEVKKIIIDDIKVLSKLFIEFSYFVSFCFNHEKNEAINDIEKLTNKKQFHLSKYLNKLTYFKRQKAKKEEDFIDKLFKEYQIIRNEVGMPIEGYCGDLRTNLISMNLINFETNFMNNIIVNCRVRIGKYLKIVGKIYNRRKRKKMLDNLFYKNIKPKDKDNKIMDIFNDLNLNFTEIKYKWWKFMGFFKKLSNIDLMNFPLTPIYKPGLKHFMYSTSSVWQLAIKVFGNKNQKLVRDWSQQKKMFNNNYYHMQKFIWKQCFKIKKKLIKKKFNFTISTNGVTVTIHLMKEIINNNDNDNNLSKKKLKTTVGAAAVTSSTTTTSSTDENISSDEEDYDDINVLYNYTDIDENDDDNNNNINNNNNIIDDNDDNSNRISDKEYDRGIGLDPGNKNILGGVIVQSLNDIGNKDKEERYLLTSKALLHKSGHYTRQFVIKKLIKNVEEEKKQVYNQFVEIKKQEFENIVGEIEAEYIQKRKTKKERKQLKQQKIENNTKHDDDDDDGKTRNWKKCKQLLKNKKNNNVVPSESAEPTAPIEPAPPIEPLEPSKLKKNSRQMIRKKTLLENFVINKPDNYVLSAKYHLTCMKLEEPVYSSRRYVRLQFDKYIRTNEAVSKEVNYLEHGTYDGKKTSQLEKKTLICGGQFQISKYMRGYPSAPSSLLKKKLQENKKIKLIIVDEFRTTILCNKCNNPCVTSKSPHRYQYCSHCKITFNRDINGGSNIFRLGVYRTDKTHKYLVSKPLNFTRSVQVAVAAVV

SEQ ID NO: 1402 - protein, 236 aa, Aphidius ervi
KEQEKEQEQEKEKEQENCNKKSTDNPSSNDKLKNKIFVRKKNSLELFILNKSDNYILATKYRLEMLRVSIPIYTDRRYVRLNDFDKYIRTNRAVDQQVNFILYCTYSGKKCNTSNDGRKTLFAAGQFIMNGCTKGYTSSPLSLLKKKIDYPPMIVVINTDEFRTTMLCSVCSGKVITSKSPHRYQYCPNCKITFNRDINGAKNILQKTIVKLDPKRKYLIKNIDNFSRSTLRENIK

SEQ ID NO: 1403 - protein, 901 aa, Aphidius ervi
LIFSTTSVEWLEKNQDWLEKDETAVKDIIKLDPGYVEQIQREKQELQEKQQQEEKQQQQQQQQQQQQQQEKQQQQEKQQQQQSKFRKPKKPEKNINIPPPSSSPPPLSVSSVSTKKSRSTVKSKSTTKSKPKTPSVCSSKKTSSSRQTSAGAKKFAGQKNRRQQTIQMGLRTLLNITKETKNDDLHKIVYDKIISEVRVMSKWRIASSMFFEFCFNHEDNWLLNDIMERKKSIDDVFNIMRKDCTKAKHPDRLKKLHQEWCSLIKENKLNIETKFDTKGLFRLTDDAIQVFKTCFKTNITYHGYKRIFKHVKKTLNKSPTQTYNILHDLFNKNIKPANIPIFKDFNHLDFTEMKDDKNWYKFLSFFRSLQRTTLDFAVVPIHKFGWLHIRYSTSALKEFVKNLNLDPKIYEEIINCNSAELWEKLFNIKQHTSLGKNFYETLTTNGAEVSILCLKPKTPVSTLISKNEINIDKVINDDDDVVKLPKIQILSKHKLNDIKKQKPKKYASFDPGFRCPLAGIFFNNLDDLDDKDKQRRYCLKHSTYLYKTGFYKSEKIRKKLTRDADKKIEDLMKSSEFKDINLKNSLDYKKILKFRLLSYDAMQPVYGDLKLTKIRWHRKIQNRRALDRLVNFITTGQGPKSRLKKPIKVDKKKEKNKKNNNNNNNKNNTKVDKDNKSKNQLNKEKKLYRQQEKAKENRNKLTDRQKKRRAKNRKRELLKKKSKKIERNERNDEKKLLFEKKQKKYQINKAKKRALYERSQNPNNNNNNNDDADDADDGGDDGGDDDNDGLMIIFIGQTDMSPLPFGYRKPPLKKIEKKILAHENVVLIRVDEYMTTQNCSKCKQQAIVSTHGHRYTYCPKCNITWHRDINSACGIAKIGAAFSGLNENDSIDNYSTYVRKG

SEQ ID NO: 1404 - protein, 1209 aa, Aphidius ervi
INVNNLLIFYFFFFYKKFKRSNDYVQPTHAQQLLPSSTSSSSRRLSTQPIQQSLSIQNRPTVPSTRSRRSGERYIIIFYSINFKNINRYDYLVIFYFFINFNRSNDCAQPLHAQQLLPSSSSSFSRRVLTQPIQQSLSIQNQPVVPSTRRTRISHERYFIIFYSIEFKNINRHDYLLIFNFYINFNRSSDYVQPTPAQQLLPSSSSSSSSRRLSTQQSRHTHEQQPRQLYERTPAQPTRQLANFIASSSNRDVDELSDKLSEKLSTTSSSKKSSEKTSTSSSSTISFVPRRIIPTPMTPSQFSDKNNDKTNSDIDSQTIKSTGSFNNKKLVGKRQCHDCSKYSHGTKNSKKCSMNKENINENIKNDERLIRKMNRPYQAERRKNKMMLKNQDKIDKPSSNGNNNNQVNNDKKRVINRPIKRAVRHNIDENNETPADQEQKKPAVKRKINDGEKTTAVKRKFDNSNDFSTWSIKMGLNQICKNPIIKNQIIDDVDELSKMFIDFSYFFYFGLQHKDNQLIDEISKLNNKQLCLNKYLSVLTVLENRKKKKKEKSCIDDLFEEYMKLRESAGVEIPLYNVSYRSQVVQLNLRQFSTNFVTNITRNARPRVGKYLKMEKKIYNRKKRKRILDDLFYRNIKPKEPNDDTKIMELFDNDLDFTKIKFKWFLFLNFFKQLSNVEGMNFPLSPIMKPGLKHILYDTQSLWQMGRKLFPDQFETIWSQQMSIPYAYQKIWNFFFKIKKKYKKKHFNCTITTNGITVTLHLQRQIVKKKITKKKLKTTNKVGGNTSIDGKSKVNDDDNDEDADDFDDLNLFNYNDFDDDDDDDDGHNNKKNNIHNVNDQIYGRKGGLDAGKKLSYAAVFVDKLEDIGVKGKVQHYRLPSKVLLAKCGHYTHMNIRKNLTKDIEIQKRKIYDKYLKIKEDIYAEFIKGKKIQVTEYVEKKKSKKEKNKLKQMTEPMITDDDKERNYKKWREQKKLEKLAKSGGGGDDEKSEIIIEQPNIAPSVTTKKKMVKKKCPLELFVLNKSENYESATKYRLEIFGLSQKIYASRRYVRLHDFDKYIRTHRATAREVNFLERGTYCGKKINALKDGKRTFLGAGQFIMSNATRGYTSSPLSLLKKKIDNNSMIDVVYVDEFRTTLLCNRCNNLCITSTSPHRYQYCRFCKITYNRDINASANMLNKAISNTDDSKNYLIKQPNNFKRSTKREDILQ

SEQ ID NO: 1405 - protein, 348 aa, Aphidius ervi
DFRRYYSGVFSGFLRILLDFLRIFLEKIIFLFFVCKLLFLVFLLIFLSFCVCFFKRKFRKKSRDIMEIVWRLLCKYLRKSQLRRKSGENPEKSRENPERLFLPGKKKTKNIKASELKKLKKQNYLENHPSDKDKKTQHQLKLARKLDNQKKLAEENKLTMTKKQKKQRERNRIREKRLKKAPKILEKQHKLELKLSFEKQQINYHKEKENKKKEYNKNKNKNNNNDNNDKDKKYSCCFIGDANPQLRPKRYKRPPLCKLEKKLHELENVIVVRVDEYKAIQNCSVCHSQLIVSTHRHRYAYCPMCGITWHRDINAGINIGKIGTAYVDMNPDDDIANYINFKSLTKTR

SEQ ID NO: 1406 - protein, 220 aa, Aphidius ervi
EKYKKQSVKERSKKKNYSAKASDANVVAASKVVELVSTINAIGNYNNNNNNDNIILLNHIIKTRAKLRKARKLAKQLRVASRNKETKSKSTLKREKIAREKQQAKRKEQREKEKKIIEEKKLTQMSSYEKKKWPRKLRRLNVDGKKIIYCVGRPDYPQWIKAYKRPRLKIFDRKIRSRPGVFTIDVDEYNTTKLCSKCNEALVVSQHGHRYCWCPQCNIT

SEQ ID NO: 1407 - protein, 932 aa, Aphidius ervi
SNYFCYFSLNKRTLVDDTNDTATPSKLPKIHYNDNNNTTRLCRDCGKRSHGTKYSKKCQKNIFHTRHVEMNKPPDIKQRELELKKEKKNKQIIKSKEAKALKRQKQIPSQLDNDRNNNKEFRIHTKKMGFNKICKNTLVKNAIIDDINVLSKLFIDFSYFMSFSLSHNNNIMIDKISSMKNGSTLHFYKFINRLVYFKRKKKKTPTEDEWIDNLFAEYQLYRKIDTLYDGNLRTNLISQNIQTYETNFINNIIVNARPRVGKYLKLEHQVYNRKTRKAMLDQLFYKNIKPKKNNKVIEIFDDDNLDFREIKSKWWLFLKFFKQLANTEGMNFPISPIWKPGLKHFLYSTSCVWQLTNKLFKNDKHIQSDWGCQKKIFDNTEKIDLVYKILWKKCFRIKYKYNRKIFNYTISTNGIDVSIHYKYSINTIDNTPSNKKRKTTTAKATAKAKATAARTNTTTAKATAARPNTPTAKATATTAKTTTAKATATRTNTTTAKATAARPNTIAKATATTAKTTTVTATNSLQHNNPSLDDTNDWDDIDYIFKYTDHDDEDDTNADNNNHVANNNHNHNINNNNNNDKTISDDEYDRYVTLDPGRKLALGGVILKSLADLNNKNLEERYRLSSKSLLNKCGYYTRQRIMTKKTKKIEIEKKKLYDKYVNKFQDQFNNFIETKKNEYRKKKSQVNLNNKAKVNKTNDNKIRNWKLVKEKKKQKKNKDSDDRQVDIINEGKKKIDKINKDLKPFVLNRPDNFILSTQFRSESLELSYPIYSNRHYCRLSFDKYIRTNRAIDREVNYLQNGTYNGRKEDELNKKTLVCAGEFKMSGCTKGYRSSPLSLLKKKLLQRPKIVVIIVDEFRTTILCSLCNNLCTTSKSPHRYQHCRFCNVIFNRDINGSRNIFIQGVLRFDGDKIYLSKIPSNFNRATLHENLKK

SEQ ID NO: 1408 - protein, 899 aa, Aphidius ervi
KKKNNFSAAVGSGGKRQRTGNNTNTTSTTSSTTTTTSTTTARRSLFKVPERRSLNDSSSNMSLNNSTASNSSRSRSQSPSLSTVSASSRTSSQASICCNNYGTDHTNRASKRCLNHRLPIKERAMKKLNQNKEKPTNYETHTIKMGFKSICPDENIRQEIYNDVELMSEYIIDFSIFFEFTIRHDKQWMVQYLENHDKEPNLCLIAMHLKNNYSKKNKGIVELLDEYNKLYPCSNKHQYQFEHHSALIKNQVNLFQVNFKTNIVEHIRSRVNKYYCKVYNRDYSKINKLLDDLFLRNIHPKNDELFNNEQFKNLDFKKLYDTGDKWWKFISFHLKLQLHVDFVLSPINKLGLHSISFTTDAVHQLFRRKKFINNQKTLVNASYSIATNGPDDNYNEYEYENLWKKFIQIPSKYKFAYYITTDGISASIQCFKKIDEKKLNFNIEEKNYQDIVNLKISDVERELLIKELNKLYKRFDGLDPGLRELFGGIIIQDFKDFFDKDKQERFKIKSNTYHKISHFYEREEKRKKWTQIYEEIYKSLLKENNDLLKKDDPEKIFKLNDIKNYIAITKYRLGLFVQGQIFLKARKIARLKWDKYINTQKTNDMIVNKLLFGEFVGDKQKLTIENNKKKKLDNKKLKRQRNQVKFKKKYDEKKLKRKKKLEEKIKLKIPEQQQQQQHNNNNNKLNGKKKRSILRDKNNTNIEFHDAALRQAMKDEEAERIKKKIEKLKARRKKKLDKRPKRIKKNKKKADNTTTDTAAAIADVIAGAIADAAVDDAVVDNIPDENGGGGDNDNVEIKKNKKKSIKIITDKFNNNKRILIALGDTKISKWMKGYRRVSFKGIIRALYCRAHLSKSKIDIVDTDEFNTTKLCSACNSVCLKSKSPDRLVIYLFINFILIN

SEQ ID NO: 1409 - protein, 499 aa, Linnemannia zychae
MEKLGFDSTLLPKVEQEDKDTSDDDDTTPDDDGTTPDDEADDEDVKKKSKKIDFSPQHIQSRWGYPMKLPAANRPRFCIQSKMTDSFIDIREETLFRILWRKKSDTIWGGSTHNFDWAKRQVNISFGNVIKMLFIGDPDTVRLATKHQTTYGKRTTTIDERATAHSTMYGQEPLARYQIDRINYYRAKYNASIPARSSSSSASTTLPPPPNPPPLPAPPGPRLFRYALNNYIRTDGHQLQLLAYDLTKNRQALGHKVFLRCIEKQYTTRQSIIDTFGQNSSSVVVVGIDPGEVVSGAFCMRPNDNTVVNLLVKRASLYQPTLAFRGWEQEWRRQHPMAGPADNVDASLWTRKRDDKNRTTFLPSIHDLENAMPSTNYDSLDALISAQQQYFELEPIIHGFYSSSDWKRAVHQHRMAKLAEMDMAVAGVLRLVDEALKNTPMADRRVLFALGNATFRTGFNLASVHTTFLRRLQQKVMMRKIVGERTRTGGHTDWFHAPF

SEQ ID NO: 1410 - protein, 299 aa, Mortierella antarctica
TVRHKKNRETSRVPFETRRKRKCTNGIKGSGHEGASSQDCSDYAGNRSSPCKAPRGSKNLKIIRNLHRPPQGPAPSADPDQTRMVKACCIRVSSHPAICFGEKPGTKSRAGAGAGAGTGHGTPSQPTRKHDPKARSQFFYGAAGTGVGSRIRGQALRGGKVRQQYMQHAVVALTNEWRTSQTCATCFSQLGLARSRRIVRRKVQRMRVPGAAHCTKQALPSAEESLDHSATGYQCRSMHWQLRSVPTPLPPAAPPVHEGYASTTHVHQRHHPGNTTHAFNILDAMEAPVGPPTSDVALS

SEQ ID NO: 1411 - protein, 646 aa, Gryganskiella cystojenkinii
IKKLGITGLPELIDPYEKKETTGGRMATGEAGHGATSREEQPQGQYQRDEEEVQEIDEEEELRKTKFGPDYIQMLWTYHQAIPEHHRPAFFPMVGFKDTFIRFEERALVDILWGYHQRDSSHCAPVEVSVRKLFETVMDAHAAAKQDPGFVLFELFYGDRELIAKSETFRLTNYGKSTCTMSHFGEYRRSTEAMTTFVNGAKMFWKELNTCIESGASVTSSMPRFRPNLDRWTRYILSNYVLFNGLEVHFLAYDSRRPVRRNIFVRDLTHISPTESKQFVNNFTGVDPGERVTASFCLLSPNPDPEVPKQGCDSIHKVQGKLKESKPLAVKGQSGRGSSSLVSANTPESGATGDTSQIPDKTVINLSITRKALFQQSFKYRQELEVLKQYRGPLQAGNVSFSLWVPKDFEWRKHLLPLGNDGDEQGTLTESPGVQELESMLLPNSYQSRTDIYAIVQTRQHLYPSLHTFYASMKLKKMAWELKKALKSERDKAASAVLKKCPQPTLFTYGKAKFRSKFNLSSPHDTFRMDFASKVTIARTTVFVLGTCFSNTNHDFKIQATSLGHTVVLVNEYMTSKMCPVCVSAENQNRLVQQKYRTFVCPSCRVPIDRDHGGSHNMALLGWYWVHHRRRPKPLDWTPEPNPSIP

SEQ ID NO: 1412 - protein, 227 aa, Gryganskiella cystojenkinii
EATIDSETGKCSFCDDHHLPEVIDGELVMPQVCPELVAKVILIFFHGRAGTCVGSRIKGHLKYGGNWIALERMVRSIVLMVNEHRTSKTCPYCLQPIRLAKATKVNPRGEKRLVSVHGAVVCTNQDCKSFACGYTNRSRDTNAALNIGLAGQSQLISKDRQTLAAFSPKVRPPKPGPALPTPINTSLNWNNNNFQKSAGLDASFDQGGVSNLGVSASFDDRHPTQTS

SEQ ID NO: 1413 - protein, 199 aa, Apophysomyces sp.
AVLGGPSTDIDIASRRPSERRRKLLPSSFEKYDLRIATSYILILRIKKSGRRLHPVVQIRKPLIAYGNTVFNSLRGTVLGVVGAVRKKLKQEARRSRCFVVDVDETRTTKVCSVCGRDQLGNIRGAQSQSLHAVLRRKKCSTVWNRDQNASRNIRFIAYYMATNGNERPDIFKRHCGDKPLTKHTSGQSHKVGWRLFTI

SEQ ID NO: 1414 - protein, 367 aa, Dissophora globulifera
DKLELLKTKDASSSTYKQAKVNVKAAIKNHILNSGGCARSRKYVLADTLHTDGYQLKIHAYSLAHPKKKAETSGNHSAETSTSTNRLEAASASSTSSTRSKMKYLKEAIPNLETLQKEFGDQDSHVIFAIYPGIKNTATAVITDSLVPTKAWNVVLSRGSHVLSSQRHAQMPERHKKDRRYRGEGTMSVYDLESDIKPLQTGDDSGRDLALRFKNIKDSFQEYSKTVFVVEKDLREFYGSKSSKVAKYRKDQGEKAEVGRAIGGMIKATRAQADMPNVEKRKALVVIGDGDFRGKNGGPVQANKFITQLQSRVRPLSIVIDVYSDKKCNSLSVILTSRLVCIAGNWRRDVAVLCGRIQNIDMLLLVP

SEQ ID NO: 1415 - protein, 228 aa, Dissophora globulifera
LFWLHLSSIAEEISPVDGWCNNCSCHHVPRGTPGLFAHVKVCPMRDRQHPTIPAMLTGLAGTGVGSRIVGHERRGGTKMRKEQQKHIVVSFTNEYRTLKTCLFCFGPVRLARRRRLVNDPIRSLRLYGGIECVNPVCVSFKAGYTIKARDAHSVVVIALAGASNLLSPERETLPPFARFAYIPPIPAIATATSALSDFVTKNASPALETLSPQTSIDDATGAPTNVGL

SEQ ID NO: 1416 - protein, 259 aa, Mortierella sp.
DAEIDDGFLEISDDASVEDGAINNESGDNDNPQTSSSTYTTELSVYKWLMINWRQGSKLLTNVEEQFHDASICPSPDDTIIIGIDPGEKNAMAAALIDPKNPNGRHVVKIRRSYSYGPHIQFRNALKKQKDEIGVTQLETNIPAFSRTTLTEYFEYMTAPSGEYPTRLDRIQHCYLGNWYRRKYWESQRPATACLDLGIKGILRMAGVNEGKKSDHQREVIFRVGLGSFNSRTGLASKHTALLQRFVCLVGSNESERRE

SEQ ID NO: 1417 - protein, 218 aa, Mortierella sp.
SAHGVTHRWLVHGVRYTPYPGQQGQTRFEYDTHCPRTQPKTMPILLIGDSGTGNQSRISGHCRREGKKMRQEHMKHCVVGITSKYRTSKACFACSQELRLARSRRVVRGQIKMASVHGAVECTNPNCPAVQQKRSVRSRDTNAAMNIAVAGAAILLSQQRAHLLHSRPFAPKTPVIHRPRQPARDIHVYDTTRAPSRKEGLGKIERGVCRSRDRRRWA

SEQ ID NO: 1418 - protein, 273 aa, Mortierella sp.
ECENSDDNGQDVGKKRPSKSIESQTSAFPSESHGNSSTVPQQAPSPTLLENIDDVKTGGGNSGATSVSTANGWCGVCKRHHSPEVVGDKLVYNPVCPKQRKKTIPVIFQGNAGTCAGSRLKGHCRGGGLSKEHAKVCPVIMTDEYCTSKTCCFCFAPVELVPVKRLVNGVMKQVRCNGAVRCINPDCISVKAGYSVKPRDTNAAMNIALAGASQLLTSSRLPPFRRSFQPTIYTSPSALATSSSSVHQPMPREPPSVEGFIAGKSAFTCPHRD

SEQ ID NO: 1419 - protein, 212 aa, Mortierella sp.
ISIDLQIGSNAAMFNCIFAFGIDLPLLFFRFFVLVYSGLADGKMNVIPVVLHGTAGTGAGSRIQGHARRGGPKMTNEHRKHGPVGETNEMRTSKVCSACFEPISLSRATREKDVKQTTIRVHGSVDCRNPSYPRRQQGQGTMDRDKNSAVNIAIAGPSNLHSAVKTTLPPFRPFRLLPNTNNVSHTAGTNMSSLDHQRNQLPSRNLFFRVQH

SEQ ID NO: 1420 - protein, 572 aa, Actinomortierella ambigua
IAPSGATTGSSSAGSAAGSSSAGPAAGSSSAGPAAGSSSAGPAAGTSLAMSTTGSSSAGPAALISLAMSTTGSSPAGSAAGSSSAGPAAGISLVWSTTGSSSAGSAAGSSSAGSAAGSSSAGPAAGISLAMSTTGSSPAGSAAGSSSAGPAAGISLVWSTTGSSSAGSAAGSSSAGSAAGSSPAGPAAGISLVRSTTGSSSAGSAGDSSSVGSAAGCSPVMRTAANSIRSFLMRTAANSLRSFGMQTASRSTTMSTTGSSPAVTAADLKLKKSHKMSARQVNEVSHTHKMARQRERDLKKTANAAVKRDLETISKPENSLTTADSVLKVHKAHLVRSGVQQTIRAFETTKRMLKMRRTQRLRTQRTWAKLCAAERRYVQQHKLDSLPQPSTPTHINQTNGWCTRCNRHHIPSNLDASLEFQHVKECPNVRQEVRPVLLIGDSGTGVGSRIQGHARRGGGKMRAEHIRYCTIAMTDEFRTSKTCVFCFQQVRLARHHRMVKGKEKLVSVHGVVECVNPDCPSVKSGYCQKPRDAHAAVAIAIAGTHQLLKKQAFAPFSRAFFDTTAGATESAT

SEQ ID NO: 1421 - protein, 288 aa, Actinomortierella ambigua
EERHTTGEGSEGSEGSGRRGWDLPRRRERIRRKERRKRRILATTTATSRRPCRMYRKANTSTVYLAVKRKAVYQPTLEHRRWLEMRKNEKFKGSTMPAGPSSASSSDSEQTQPTSISEVESLLPPLRGENAALGAHVDHRNAYSQVLDELYNGVDYLSKRDEDAKSPLFKKNRWGAKRAQKTEFQRIADRLLRMVGGSIWAKRKKDNKVIIGIGVAKFRCTSGLPSLDGTFQTYFVRFARSLGYIVVGVNEYYSVPAAAARGNGKGTGARPIVCVYVIALSSASQSHD

SEQ ID NO: 1422 - protein, 218 aa, Mortierella polycephala
SLSLSLSTVPLVSRNDGWCASCASHHVPRATGRPFEHLHECPKRQGMDKRPWILPVMFIGSAGTCVGSRLKGHQKRGGGQMRSQHRRYAVIGMTNEFRSSQTCIFCFEQTRLAKGWRKGKDGTVKLSKLHGAIECFNPACPSFQVGYTIRPRDTHSAVAIMIAGASLLLSSDRRPIAPFDQYAKSSIITTNNTRLKLDLTTSLVPSKRTLDELPHGCL

SEQ ID NO: 1423 - protein, 284 aa, Daphnia obtusa
WRAFIQADHLKYLRGQSQEFLESHVIGIDRGVKRPIQAGEQSFDLTPEQKKSMERSRRNLLRYQKRMSRQLKGSGRRQRTKIKLSNTHNDIANVRKDFCHKASRTLVDQKEAKIFILEDLKTSNMTRRAKAVKDDSGRWLKNGAKAKSGLNKAILNVGWHRFEEFLKYKANRAGKAWLKVPSHHTSQECAACGHTHPGNRKSQAVFKCDSCGHTDNADHNAAEVIKKRAIGLISNSGSELSKRGVLSFSDSGRGAMGKTRRAKSPRALGEEASKRKRKVQGFAF

SEQ ID NO: 1424 - protein, 428 aa, Daphnia obtusa
FIFRFMEIVKRKVTYRLYPSRRQQNQMLEALRLHQKLYNAALEQRIDAYRRCGVSLNYNDQAHDLTQLRAEFPEYAALNAQSEQVTLKRLERAFKAFFQRVKEGKEKPGFPRFKSFDRYRGWGYAAHGDGWKFLPNEDFVNGTIRMSGIGNIQARGRSRFIDEERTSRNPGKPKTMEIFRKNDKWYASVTFETLRPFRASGDTALGIDWGTAKFLTIVDETKVPLIVENPRHLKSSEDKLKKAQKSLSRKKKGSSNRKKAKKILGNAHERVAWKREDFLHQTSAAIVKSASLIATEALNIKGMTASGGAYKTGLNRSILDTSPGKFFEILEYKAVDAGIPYIEVPTRKVKPSQTCSGCGHAEKKQLSDRVHDCKKCGLMLDRDVNAAIVILNFAMTGFVTGREPALSVESKVTCSLKHETPPIPEHAR

SEQ ID NO: 1425 - protein, 320 aa, Daphnia obtusa
VSLLLSSIRVLRNRLQSISKGVTTNSGDLLSQSDHLKYLRGQSQEYLKSHVIGIDRGVKRPIQAGDQCLDFTKEQKRNMERKKKNLLRYQRRMTRQLKGSKRRHRTKVKLSNTHNDIANIRKDFCHKASSALVDQKESKVFILEDLKTRQMTGRAKAKKNDSGRWLKNGAKAKSGLNKAILNVGWHRFEEFLKYKVNRAGKAWFKVPAHHTSQECAACGSTHPGSRKSQALFKCDSCGHTDNADHNAAEVIKKRAIGFISNSGSELSKRGVLSLSDSGRGAMGKTRRAKSPRAPGEEASKKKKKSPRALPSDFSLEASPL

SEQ ID NO: 1426 - protein, 219 aa, Chionoecetes opilio
GGEGRAFRNDDLCPRLQNYIDNFETYWELAATKKWRRAKFRGYCLRQRVMDKFVSAVLSPTGHPPPFVAYGGAKFSSTGRGEKFSVPNCKLGKTFKEKAGARNFTLVDEWNTSQICHRCWQLLATVSVRRPAAEEEDDPVDWRVLALRGLRRCSSKETSGADNNLLLGFKCPLASCSSIGMATQPRTSRPRCGWKSAAARMICCSNRTASIEPASENSK

SEQ ID NO: 1427 - protein, 227 aa, Chionoecetes opilio
GYRLRRRAMDKLVSAVLSSTGRPLPFVAYGGAKFSSSEKAARKFLVPNCELAKTFKEKAGARNFTLVDEWNTSHIFHHCWQPLATVSVRRPAAEEEEEDPVDWRVLALRGLRRCSSKETSGADNNLLLGFKCPLAQSFLDRDANAAANIATKVRMEVGGGQNDLLFKPNRVDRASVGKFKIDDEAYYFRKKHHGVAMRRSRGWSSPTGVATITPVTGQSPWLCPLKG

SEQ ID NO: 1428 - protein, 404 aa, Neovahlkampfia damariscottae
LYPNENERKKLNQWMGCARWTYNQCLNGVNKENISKSKKELRKYCLKSTSEIIKKNKWTSNTPYYIRDEAMCDLLKAFKTCFSAGEKFKMKYKRKKDNTDSIVIHLKHFNAARKKEMKELLSKSKAKQKEKKETFYDFIPKIKSSEKLPDSLEYDSRIIKDSLNQYWMCIPVRMDKKSFDHQEMKLKSEKIASIDPGVRTFSTVYGSDGICLKVAKGDISRIYRLGCQVDKLQSKWSQKDVKHKKRYKFKKAAKRIRRKIKDLVTEVHDKLIKYLCVNYSLILLPIFETQKMIRRKARKIRSKTARSLITWSHFSFRKRLINKLREYPEVSLKVVTEEYTSKTCGKCGKLNQKLYGKKTFICPSCSYKADRDLNAARNIMIKSLIMSQCLYGIDVETQLLSTQF

SEQ ID NO: 1429 - protein, 210 aa, Neovahlkampfia damariscottae
KIEKNTTRCFRLCYSAYVCNVHSSTEMLKEKQKKTNKKIKLEANMKKRNEKMSQSVGIPVNGGKPSIKWNEEGFFFWPSYKLGALKTAQKDSVQVHEVSEHYTSCTCGSCGKIDWKLGKKDHFNCKYCNFSLPRDYNGARNIFLMNIQNFIGNPKTASTAGDGPIPKETLILMSGLINQNEQKVSFKIAELFLLDCFSFQDKKIIFCSLN

SEQ ID NO: 1430 - protein, 299 aa, Neovahlkampfia damariscottae
KNICWTKKLVEQSSLTEGVLFSSKDVPKENKQVSHKTGLSKKQLDTDEIIQSRKILLKPTSEQKKKIQEWMRITRFVYNLSHHFVEDLGYDANFLLLKKIILNADKNPESSKYPWLFNRKLKKIPRDALDYAIQQYVCNVHSSTEMLKEKQKKTNKKIKLEANMKKRTEKMSQSVGIPVNGGKPSIKWNEEGFFFCPSYKLGALKTAQKDFVQVHEVSEHYTSCTCGSCGKIDWKLGKKDHFNCKYCNFSLPRDYNGARNIFLMNIQNFIGNPKTASTAGDGPIPKETLINQNEQKSQF

SEQ ID NO: 1431 - protein, 207 aa, Neovahlkampfia damariscottae
KFTEYEKGDVSKLFKNALKCDKIQSEIDKNKSNDKMSKEEIKKLKKKRYKLKKKYQKYQNRIQGLKEAFHKSVSKDLCENNDEILISKFPVKGMIKKWERKIHSTTVRKMLHWSHFQFRQTLKHLAQKDSVQVHEVSEHYTSCTCGSCGKIDWKLGKKDHFNCKYCNFSLPRDYNGARNIFLMNIQNFIGNPKTASTVGDGPIPKET

SEQ ID NO: 1432 - protein, 384 aa, Neovahlkampfia damariscottae
NPESSKYPWLFNRKLKKIPRDALDYAIQQYVCNVHSSTEMLKEKQKKTNKKIKLEANMKKRNEKMSQSVGIPVNGGKPSIKWNEEGFFFWPSYKLGALKIAQKREIKRLSNVVGKESSDRTCILKYQHGRYYMIIPFVAKIKKKDEKEKKIIALDPGVRTFQTGFDNFGKFTEYGKGDVSKLFKNVLKCDKIQSEIDKNKSNDKMSKEEIKILKKKRYKLKKKYQNRIQGLKEAFHKSVSKDLCENNDEILISKFPVKGMIKKWERKIHSTTVRKMLHWSHFQFCQTLKHLAQKDSVQVHEVSEHYTSCTCGSCGKIDWKLGKKDYFNCKYCNFSLPRDYNGARNIFLMNIQNFIGNPKTASTAGDGPIPKETLINQNEQKSQF

SEQ ID NO: 1433 - protein, 334 aa, Neovahlkampfia damariscottae
KKRNEKMSQSVGIPVNGGKPSIKWNEEGFFFWPSYKLGALKTSQKREIKRLSNVVGKESSDRTCILKYQYGRYYMIIPFVAKIKKKDKKEKKIIALDPGVRTFQTGFDNFGKFAEYGKGDVSKLFKNALECDKIQSEIDKNKSNDKMSKEEIKKLKKKRYKLKKKYQKYQNRIQGLKEAFHKSISKDLCENNDEILISKFPVKGMIKKWERKIHSTTVRKMLHWSHFQFCQTLKHLAQKDSVQVHEVSEHYTSCTCGSCGKIDWKLGKKDYFNCKYCNFSLPRDYNGARNIFLMNIQNFIGNPKTASTAGGPIPKETLILMSGLINQNERKSQF

SEQ ID NO: 1434 - protein, 239 aa, Thamnidium elegans
MFTNMVRTDGYGIDFILTVPERQSNKLSNLDLNDFTPEEINERFHLWGVNPGQINIFTASDGHNTNPHQLRKYSTAEYYTRTGFKKTNLHILNYIGRQRADAEMVNIFVNGGKKYLRQEFKQTGRDKKRGNPKRKKRRPVKKEKGKGKEKLKKRKLKPFEPDNRIPLVALGEAIFPTSMKGTIPGLARRLVTVLKKAEDEDLLVTVPVTEYITSKVSEHNLNKKNRLVPIALETIPIIS

SEQ ID NO: 1435 - protein, 224 aa, Thamnidium elegans
RKKKLADSRNINDVETFYKKRKESNARLRAFYYSQKQIKRRRTYELQKRKYVDKLCSNERNYVASGSKSISIMFVGDRGYGIGSTIKGHARQGGLWKPKKHSLYSSVCITNEHNSSQICIFCFKKLFHPISTTTTNSGTKKKSVNGAFVCYNEECVAVKAGKATHGRDALSSLAIGLSGLAMLLFGITFPVFSSKASQFNTEQFNNKAVAFLKRSATQPTAYGE

SEQ ID NO: 1436 - protein, 201 aa, Thamnidium elegans
SQKPTEVYFPGSSFEFRVDEKCNIYYESLFVAKIRGFLPQPERESDTRSFKREVYYNYLQIMLQQPHITKRLEDEQKNKVFELAQQDNYVQKISVILENLQLLPFQKLKFSSKLFYYQDDNKLVHNLTGKFGQDAILVFGDWYAPNTKFHKPTKNKNLIAMQKKNGFTVYLVNEYKSSSFCPRCEHALEIFKTVPNPRPFK

SEQ ID NO: 1437 - protein, 227 aa, Thamnidium elegans
KFEEIYFPNSCFDFHTNEKSNLSFGSLYITKIQDFPQQHNAVSLDRLTNSQRYATYIRIMLQRKHISRRLDDAIKAEVLELADEIFTSERASLRQRASEMLEKLPVLPSRKLKFLTKVYYDQSDEKLVRDLKKKFDSDAILELGNWSAANTKCHKPTRNKNLIHMLKKNGHTVHLIDEFKTSSKYPKCEDDLENFKVIKNLQSYRRLHLRTNKFFFKAINFFKSSFF

SEQ ID NO: 1438 - protein, 235 aa, Mucor saturninus
ENNRLLIQGVDPGIVTTAAISCVKSSTLFESLNRFQMLENYEPWTIPTSNQKGYEFDYTANKINQAVLSNTHRLQREKKKKYDIGKYRLARKIRLTTYHKKHYSVTRRDIFSYHGWKRGSILSFVGNWFGKGAYIRGHTRRSMKPILNQFNSVADDHIAVVNEFKSTITCSSCFEVTTEQVVRVGEKRVKRIKGAVTCTNHNCPRRLSPTRRTAVNRDMNGAINIALIGFSLWFK

SEQ ID NO: 1439 - protein, 207 aa, Mucor saturninus
KQRMSSNNDTLRNFYNSSKIFSHRSFRIKSLLITQLCQKERHHVSLIKNIKKIMFVGDREYGVCSRLRRFNRYGGLWKLKQHSRYTAVCTTNQHSTSQTCNFCFQKLQHPYERIKNKQKQGKNKTVSGPFICHNLHCLSVALNQATRGRDTLSAAAIAFPGACLVMLSLPCLSFDPKISQKKILMNSIKTSTFLCKESKERPTVDDA

SEQ ID NO: 1440 - protein, 239 aa, Mucor saturninus
TQGVVTASFKDVPSSLLFESINKYTSLKNVEPIESVAKENQISLDFTAKIVNHATFSTKHSQERQSREKLDMNYLEKKKVSRKIRKKKIYEVFFRRHRKKLVTSLGSKNNNVIWSFLGNWSGVTTFMKGHSRRSIKPVIAELQKKEKDKFMIVDGYKSTITCTSCFEPTTKQVLRRGDSIKRIKGAVVCVNRRVYNKSTTSNRDQNGALNIALIGFSALVSDDGLTLSPFRRGINNPNK

SEQ ID NO: 1441 - protein, 205 aa, Mucor saturninus
NKKREKTKRGKDGKPISLERKRATRKIRTKRYHKKNYSRYRSGMFKSHVLDVREGSVLTFVGDWSRNGTYIRGHERRSLDPVLKRLKCVEKDETFIVDEYKSTVNCSFCFEPTTKQIIRVGDHGRKRIKDAVTCTNEICPRRLSSRFSTINRDQNGAMNISLIGFCHLVSEDDLTLPPFRRSNNNSNKYEISEIRTFKLYTNSFA

SEQ ID NO: 1442 - protein, 209 aa, Bradysia odoriphaga
ILLSDGFNKVDYRHRMELSKKSWNYMDYVKFELKHLINVQNMLVNPILAHYKLKRSIFITKTAVDVAKQLAETGQVIASRPVQYKHQHKFKCPEQRHANKGKFETAKRTTLIILGNFKMAPDSPMKGHPRSAVGQFHRELRRRCDVLVQDEHNTTKACYKCRKKLEIAQPPERFAQCRCTDGKRKVIDTLFVISIFKAILTQIAFPFLM

SEQ ID NO: 1443 - protein, 199 aa, Bradysia odoriphaga
AAALGSHQFHKYLAKLSFRRYISKKRAIVKIARTLVYGARRENKRKAATRTKRPQRRNQRKRRKRKKPKGDDDKTNKTEQKRSERQSTDPRVLVFVGSTNISPIIKGYVRAPSRLIIKKMSKWAKVVSVHEHRSTMLCSRCFDPCITSRSPHRWQNCTACRIRWNRDINAAWNILYLGMHLVGGTNPDRRFSHGHSFGR

SEQ ID NO: 1444 - protein, 475 aa, Bradysia odoriphaga
IFFFWVYMFELYATNFRNNIVVHAKKRVRQFFRLFKSDNNIDDKAIDRTIRYIFNVNSRVKSVLGLLQMLDQFNIHHWPKNNRTNHWPVQLNGAECFRGFFSQQLANNWFLTVPIFIQIQRQIQVISEQQQNLHNQMTQAKDNEQFELAELLAHELKKTPSARNFNVVPLMNFQRKHVRIDDKVLLGLLILLNKRPKHADGKLFTESASDCNAFMSVSAYYWNQIFKIDEMKTHKPFAHQIVTDGVSVSILQKTIAVHEDYDDLAAAVKKTTSTEVAANVQADINSIKRSCPLPHYFIGIDPGYNTWLAAVRRTVATGKETLIKISSKQYHARTKRPIRNRLEKKYTADYSAAETQDLIKNGFPSPKGIYYEAYISHRLRMFTRGIETYTQRKYARLALDKYINSYRVIDTIAHNLTRGQPSIVFMGAAEFSNSSPIKKYVRCPGTRRIVNSFNKQSRTFVAYVDEFMTSQCCPL

SEQ ID NO: 1445 - protein, 275 aa, Bradysia odoriphaga
NRSRMSKIKFGKSRTTSAQDKYKYRTSIDVGFNTYIAAKRLTIETGKEVNLKLKSKEYHRGTRNNCRKKKFQKLVGDYERRAATDRESYAVMPTPTGPFYWIYVRHCLRFWTEGIGVYTRARYARMAFDKYVYSQKKIDSIVTVLTNKQPSLFLIGGAEFSPNSPIKGHVRCPGIRKFTQALIKYDNCELLSTVGCVYLGFPLGQKRRDTNGVKAARLLSWPYHRHQSLLVLHQSVSTNVSVNRAILETKLGDTSKQQTPPAFQPTGIGIFRRAV

SEQ ID NO: 1446 - protein, 233 aa, Bradysia odoriphaga
KNHESVLVFLVQSSKEIVGDENVHGKATTQQNKVRVFFVGNCSTTSNSSIKGHRRSSGNAPIVCYLKQIPRTFVDATIDEYCSTKKCSRCYETLDDVEFSKERLKLCHNCKLAENSTSTNLVWTYQRKRKIAKAMVPITRMYPKPTQFQRAQRVEMERTKRWSIGDKIRIAARNERKSTSYNVYTTETLNKLYWNRDGNAARNIVQLGLCEYNDCLPIEFNRDEAFQRPKKNQ

SEQ ID NO: 1447 - protein, 384 aa, Bradysia odoriphaga
FTICSAKTTEKTDAELKQLKQQEFDRVQKKYNNGDFTTIVGADEGERLMVAAHANCQSDSGEWIRKQTKYKSRTFQYDSGQLYFKHKQHIITRDVLEYVEKDRAVFPLHNPNRNTDAGYRLVEELRDDGLCDRRKQQRDKIRNFLLQRQAEGTITRRQQRTLHRQEQFGKINQRNRLELSKHSYNYNDYVRFQLKHLQRLQDVMVKPLLAHYKFKRGIFITKTATNIATQLAETGKIVGNKRVKYEEIHKRAKHLSKTQRQDIQNKYKMGRNSTLVIIGDYKLAANSPMKGHPRSAHSQFLRELRRRCNVLVVNEFNTTKCCAVCRKKLLVAKPPERFAQCFCINKKRKVIFVYARFFGFNFNLQFCVRFHYRSGIATSMRRSI

SEQ ID NO: 1448 - protein, 314 aa, Bradysia odoriphaga
RYCFYVNEKHYETTTNVLWRRYFKIDEVESDGHKFHNHIRTDSVSITMKRKKRSVADIAQRMAQANAKLKRNEIKNVRAYDPGHRLIFAGIDRDLETEQETSLKYSRRSYHYTSGRHRFQEKYNRLANPLFRELQTEREALPSKASAILDYDEFINFELKHFCKTNEVLMSKAITKLRFQRFVSREKATTELAKALVGSRTATNTTIVFCGSTEQNPVIKGYVRTPNKKIFSEMQRLAPFTFKIDEYRSTMLCSRCFTPAITSKSPHRWQYCKKCAITWNRDVNAGWNICYLGLNEILGVQCHKGFSRLFQFPG

SEQ ID NO: 1449 - protein, 349 aa, Isochrysis galbana
WSTTRGHICVWGRQKGTYNIDGLSVANYKWDAPAERLQLEDTDRGVYRDHQWRHDISCQADADVKLISIDPGIKKKLQIASAPLSRCADATKLAELAAVEPRSVFWEISSKEWADYAGTRRWEARVVGARQRNQPYDVLVEELRMCRKKTANRETFKDYLFHLLGGFSTFTSHLLHPQRSMDRWRETRKAMSALARIADRVWGIKKRKKGEPRVPNNEKKRTIVLIGDGSFADTFPKKKFVRALASRGLTIVLDEYNTSSMCPCGESKLQDTAAIFQVASDDAPRRPWCHKAAEHEGPCHVMSTFLLNQLDTDRDELACMQMLLAGYEGLCHGTRPKCLCSGVWRKGRL

SEQ ID NO: 1450 - protein, 394 aa, Isochrysis galbana
RSSFTGVEKDILQSELYSHRCAEASLFDVLLKRSSFGGSSEKKGWREGWIPLRISTDGVKLAVTFASAVAQKAPNIDGLASADYKWEAPTERLDVHQVARGVFRDHQWRHDIACRVDDKVQLLAIDPGIKKKLQIASAPLSQCAHAAGLAQFAAQTPSVFWNISSKEWKELGGAKLWEDRAVHQRHYNASYNQLVEGLTRKKTSKSGTFERYLEAVLGGYITFTSHLLHPQRSMDRWRESRKARSALDRIADRVWGIKKRKKGEPKKTDSDKDKERTVVLVGDGSFGDTFPQKKFVRALACRGVTIVLDEYHTSLMCPCGTSELQDTAAMFGVTPSDIPRRPRCHKAAESMGRVQDGAGEESDIESANQALELECTPQRLADLLPSDSESDGEL

SEQ ID NO: 1451 - protein, 238 aa, Isochrysis galbana
QRLLILMADGQDLDPQRLPIAAVARGARQALKPLQVTGDEITLAQCNSRTADLVAFTVYCTRRIITLKRSLGFYGDLEWRRHRRNVYIHKQKSEERLFRRFEMFRKNHHDRLMVLAYGSWGMKTGKMPMRGLPPTIGVGLLRKLARRFVVCVTPERNTSQTCSSCGGKAFECQETEALRQRKIRGLRRCTMCLKHLGRDRNAACNIGRVFAARYHNQIISFQMDPLDTAIEEADCSCE

SEQ ID NO: 1452 - protein, 250 aa, Isochrysis galbana
AQSHIGKEGRRRDLRTQQYAARIKALKPLQVTGDEITLAQCNSRTAALVAFTVYCTRRVITLTRSLGFYGDLEWRRHRRNVYIHRQKSEKRLFRRFEMFRENHPDRLMVLAYGSWGMKTGKMPIRGLPPTIGVGLLRKLARRFVVCVTPERNTSQTCSFCGGKAFDCDCQETEALRQRKIRGLRRCTVCIKHLGRDRNAACNIGRVWRKGRYDKITWPSFDGTRLRSTFHLRSPARSDEAALARVPIGIL

SEQ ID NO: 1453 - protein, 447 aa, Isochrysis galbana
ARREGNQEPFQTRDEGDVRAAPAEMVRGMGSRAPPRMAHGGSCLRSDGGLRDRHQLYETPGALAAAAAQRCLAHADALCPSGGAVVVDVGVGRGRLLQALRRLADDRHRVVGVEIQSAEELGAPPLPGVAYGLDALDGARPWPGVARGDHVLVLSNPPFRAQIDVLNAIARRAAAEGWASLHVFAILGASARTPSSRSRCLLHLHHEWGVPRAMCSFEARARRVDVCCVLQHLSALPPLVLDFDAFRSYCLESVSSLELRFSFYSNVEFRRARWKSYVQRQKSTARLLNRIEALRPKYDTRPILVAYGAWGLKAGTSSIGKRGNPPAIGVSMARFMAKRFRVIWTPEYFTSKTCLACGSKCGRCSKVERSRPLDEQGRVREIRGLRQCLNPYCGPSGQERGILLNRDRMGATNIGWNLARALDGVPLIGAPPPGIERELHDLNIELE

SEQ ID NO: 1454 - protein, 211 aa, Isochrysis galbana
FWNLSSKEWKELGGLKLWEDRVVHQRHHNASYNQLVEGLTRKKTSKSGTFQRYLEGVLGGYLTFTSHLLHPQRSMDRWRESRKAKSALDRIADRVWGIKKRKKGDPKKTDYDTDKERTVVLIGDWSFGDTFPKKQFIRALASRGVTIVLDEYHTSLIYMPLWYIGTTGHCRNLCDRAQRDSPPSSVPQSSRAHGTILCTLSLLHQPYGHRS

SEQ ID NO: 1455 - protein, 228 aa, Isochrysis galbana
VVPPPWAVIGIDPGKYDIIHCVDMDSPTHMLFRYTSAERRRDLRTQQYAARMQALKPLQVTGDEITLAQCNSRTADLVAFTVYCTRRVITLTRSLGFYGDLEWRRHRRNVYIHRQKSEERLFRRFEMFRENHPDRLMVLAYGSWGMKTGKMPMRGLPPTIGVGLLRKLARRFVVCVTLSRWMPGSSQGGNKKQEADDLMKRNVADKVIGKADSIGKDQWVVLVDDGTL

SEQ ID NO: 1456 - protein, 428 aa, Isochrysis galbana
PYTRRFVCAARVIACNHCARRAYAHRLPPPRGAVRAHRCTEAALFDLLLKRSAFGGSSEKNGWRKGWTPIRLSTDGVRLAVTFASGVAKKAPNIDALSAANYKWDAPAERLQVEDTDRGVYRDHQWRHDVTCQVDADVKLIAIDPGIKKKLQVASAPLSRCADAAQLAELAAREPKSVFWDISSKDWADYAGAKRWEARVAGARQRNRPYDVLVEELRMCRKKTSNSETFQEYLFHLLGGFSIFTSHLLHPQRSMDRWCESRKAMSALDRIADRVWGIKKKRKKGEPHAEKYTPNDEKKRTIVLIGDGSFGDTFPKKKFVRALASRGLTIVLDEYNTSSMCPCGESKLQDTAAIFQVAPDDAPRRPRCHKAAEHEGPCHVMSTFLQKQLDTDRDELACMQMLRAGYQGLCHGNRPQCLCSGVWRKGRL

SEQ ID NO: 1457 - protein, 202 aa, Isochrysis galbana
LPIELREIGEKYREYCTESLRTLQVRLSFYSHVAYRRRRWKIYLKQQQSISRLFKRIKTMQPTCDNRPMLLAYGAWGLNVHIMTTGRKGNPPALGIGMARMLAKRFRVIWTPEYFTSRTCVACGSVCTRCPRVERQRQNGRPGRVREIRGLRQCSNNECGATSMTLGGLFNRDRQGAINIGRNLALALVRRKAIFSRSVHSG

SEQ ID NO: 1458 - protein, 291 aa, Isochrysis galbana
RPFSAPVSRCVFQPAFPIHQERYPSMWALIEPYMGRWCKAKLMLVGDYSDEYDRIPKTKYIGDEAAVAYLCMEYITAVAYAETNPMVQVHQVAGKLYMENKKAVLARVTDLATQDQPSDIVAMDRWCETRKAMSALARIADRVWGIKKRKKGEPRVPNNEKKRTIVLIGDGSFADTFPKKKFVRALASRGLTIVLDEYNTSSMCPCGESKLQGTAAIFQVASDDAPRRPRCHKAAEHEGPCHVMSTFLLNQLDTDRDELACMQMLLAGYEGLCHGTRPKCLCSGVWRKGRL

SEQ ID NO: 1459 - protein, 261 aa, Isochrysis galbana
MRMSSSYIAIDPGIKKKLQVASAPLSRCADAAQLAELAASEPNSVFWSISSKDWADYAGAKRWEARVTGARQRNRPYDVLVEELRMCRKKTSKSATFQEYLFHLLGGLSTFTSHLLHPQRSMDRWCESRKAMSALARIADRVWGIRKRKKDEPLAEGCIPNDEKKRTIVLVGDGSFGDTFPKKKFVRALASRGLTIVLDEYNTSSMCPCGESQLQDAAAIFQVASDDAPRRPRCHKAQSSRARRTISRDVYLSSEAARYRP

SEQ ID NO: 1460 - protein, 228 aa, Isochrysis galbana
RGGACRVCCPNSFRLLEHLVQGARSGRSLVVPSYGKIELFINVTTMDNGSYNQLVEGLTRKKTSKSGTFEKYLEVVLGGYLTFTSHLLHPRRSMDRWRESRKARSALDRIADRVWGIKKRKKGEPSKKTGADTDREPTVVLVGDGSFGDTFPQKKLIRGLASRRGVTIVLDEYHTSLMCPCGASELRGCNLRFGCFFGECPPCGRYKFYLKDSLIKVQTCRFQALAQI

SEQ ID NO: 1461 - protein, 226 aa, Isochrysis galbana
GARTGSLRCPYGAQCSQLHNVMCENAKLRLSGHKTPFHYRRPFLQTPEHRHFGLVPCESRKAMSALARIADRVWGIKKRTKDEPHAENCIPNDEKKRTIVLIGDGSFGDTFPKKKFVRALASRGLTTVLDEYNTSSMCPCGESKLQDAAAIFQVASDDAPRRPRCHKAAEREGPCHVMSTFLLNQLDKVVCLHLVPLVSKYAMRRYQKNRLVFKQRHPPHSAQPCL

SEQ ID NO: 1462 - protein, 301 aa, Isochrysis galbana
PLARGGLHFLTVARCPIKNLQGGGTCHYENLRQEIEMVRISAPLLGQRRTETCENVFAKRLESEKPADVQNAEVSLSAFNSKALDFGAYRAYCAESLQTLQVRLSFYSHVAYRRRRRKIYLKQQQSISRLFKRIEKMQPTCDKRPMLLAYGAWGLNAHTMTTGRKGNPPALGIGMARMLAKRFRVIWTPEYFTSKTCVACGSVCTRCPRVERLGRSVCPEIMHCRKLARAAALGFCQGGRRCAHVQASHGAQWAPGTLVHARERKCALRLGLRCTVHWTEEGHWRERRQRNKGGGAGYRRG

SEQ ID NO: 1463 - protein, 295 aa, Isochrysis galbana
KTSPTPSPLPLPCDDPHITVTSTLSFLNCESMGWLSAPIGLHERSTDESRELRASSQRRRTPAGPIRLRLSRSLSVLWDVPASSTRQIMSRDSSSRSAFERRTVERLEETSKILHSMRERRGSGALASVRKTSASAKLKRLFHLLGGFSTFTSHLLHPQRSMDRWCESRKAMSALDRIADRVWGIKKRKKGEPHAEKYTPNDEKNTTIVLIGDGSFGDTFPKKKFVRALASRGLTIVLDEYNTSSMCPCGESKLQDAAAIFQVAPNDAPRRPRCHKAAEHEGPCHVMSTFLQKTA

SEQ ID NO: 1464 - protein, 253 aa, Isochrysis galbana
PSPPHPHSTPSQRPTIDRPQREKAPAACVELLHRLSRAPLLVGHLDELAQQLAQVVRTFLALVLVLALVLVLANLLVSLLLLSLLLLSLLVLADVAGVHCRRSSRLSSLLSPPRRQTRAHAVVDHGPHTQGAHRERQGRGRVRCGSLPPTIGVGLLRKLARRFVVCITPERNTSQTCSSCGGTAFECQETEALRRRKIRGLRRCTECLKHLGRDRNAACNIGRVFAARYHRETMHFQADPLDIAIEDADCTSE

SEQ ID NO: 1465 - protein, 583 aa, Euura lappo
SVDVDDDDDDDDGVFYPKKPSSKDNKGRTLKGGTTPSRKPSTGRCTRSPPTSGERVASKSDSSDDGIFYPKRPRSGSSSTTPRKDNKGRKSVPTKGGTTPSRKPSTGRCTRSPPTSGERVASKSDSSDDGIFYPKRPSSKHDKGRLPTEGTRSRSKSSTPGKTISRAKGDDGVFARKRPKSGSLTPSRDAESPRPKQPRLSEMDWQDSSGRSGSASTTPRSEPATTPTTTTRMLPPKSSGSRGPKRSWTTGCVFQDRSPPPTTPPHHSLIVKLFSNYSPTPAEATTSSGAKKPRALIALGDTTMPDWTRKWHRGPLKLFDKRLNDRARYGQKDTHLVYVNEYLTTQLCNECNERMDVAKRRDRYVHCPRCKITLNRDVNAGENIRQLALHREGMVPVGYVKCPENFQRGSAQERRKKKPDADTTAGKKKQLEANSSSGRRVAGVDGFVGMTNRDGVSCYANATLQCMFHCSEIFRELIGSNNANDEDAALKSFARSYNDARNVPDATPLDSFEVREFVGGPFTDRVQQQDVADFLTAICEKSRLVRQAIEHELVVITRCNNDCGIRESRSVQANRILAIPLLV

SEQ ID NO: 1466 - protein, 568 aa, Euura lappo
LTPSRDAESPRPKQPRLSEMDWQDSSGRSGSASTTPRSEPAATPTTTTRMSPPKSSGSRGPKRSRTTGCVFQDRSPPPTTPPHHRCRVSLIVKLFSNYSPTPAEATTSSGAKKLRALIALGDTTMPGWTHKWQRGPTKTYDKRLNDRARYGEKDIHLVYVDEYLTTQLCNKCNERMYVAKSRDRYVHCPRCKITLNRDVNAGENIRQLALHREGMVPVGYVKRPENFERGSTQERGKKKKPDTDTSAGKNQLEAKNRPDLAKIRKKALPNSSSGRRVAGVDGFVGITNGDGVSCYANATLQCIFHCSEIFRELIGSNNANDEDAALKSFARSYNDARNVPDATPLDSFEVREFVRCPFTDRVQQQDVTDFLTAICEKSGLVRQAIEHELVIITRCNNNDCGEGDSYSVQANRILAIPVTSFVTPGVENPANLQDLLDNATSQWTKVVGSRCKNCQEMNRVQKTTVASIQRFLVVQLMIFTSDKNERPIKLTDLRLNGISGITLNGQRFRVIGTIFHHGQLLKHGHYTVKLKDAGNDNNWVNFDDTEVRTCAWPQDAKDAYVIVLEKIT

SEQ ID NO: 1467 - protein, 240 aa, Phytophthora capsici
QDCNPQVPEAIRNMLTKKTTSLEKLEVYVAFMAQHMDLLLRYSQLKPSRRLRLRSYIFMKKKLRQLCEQQVPRGNRVVVGFGDWSNFDPGGVINKCPAGPVKGFERELARHCTVIPIVEYHTSKVHFDCQYELKNQYSQRLCRDGEIRTKKVYSVLHCLNNGCRGMIVNRDVNASRNILRLLQCKLRDEDRPAAYSRQVTKTKRATECLRAAQQQRNAPLRQLSLSTPFAELVETSIRAK

SEQ ID NO: 1468 - protein, 670 aa, Phytophthora capsici
EPLRAEKGNMKLARIRHIDEIIPEWPNTSDSENNARPKYQRRNCGWAALRKRLRDSLQQLRVLIFVHVEDPKACLETRLSAVFRWKTLAWKALLQLHKTTRVDLPGLLQELNTCQEEAIIAVLSSVLAHILRGYVSEYRPLLTKLSTHHRRLLNQNFNARTLNTLEPLRNLPGFSSWFQFQTQSNLIREPKTLHELDEYQHIKTWLNDAVKYQQKCAAFDKKEERARTISTYRATINILKVNAEEHESDIETAKHELKTLEKEDNLMIRRTRKYRLYPTPEQRGRLRQFMGTCRWTYNQAVAHFRKTNVYKAETLRDLYVTKVTSKQQEYPEGMGPPQEWAFDTPKNFRYNTLRRFQSNVRSAFSNKKNCNITKFKIGFKSKKDSRFFTICEDARAAKLTYVAGQSRALLSVSKLKNIPIRCDHGLSITHDIQILNENGFWYAAIPVFVCPSVQVNLGRAVALDPGLKAFMTGVDLCGNCIHVGRGTRDHLDKLRDRAADAQRRMAEIKNVCGHRTGKQWKIFARAKRTFDCATAKIKNCVKELHYQTCAYLTKHYDTIVLPIFMSKQMVKKSCARNRTYNKMLLGLKHYQFRELLRAKCEVAGKSLVLCSEMYTTQTCGDCSRLHLKIGNKDVFECPHCEYVAGRDVNAAFNILRFTCGGSLAVHTIHR

SEQ ID NO: 1469 - protein, 709 aa, Phytophthora capsici
KSDRTKATCIIINNAVVHVVVAAFFIRRARSLAERVLPFCGGCPTFIRSMPYIQRSNPALAQLFFHFLTVVMKRKRREDNDNPDGSDEYYPSLEFVAETPDLDYEEEKTEVAGVEAVTEEHAQMFPCSQRPTISSTYHLKEITKNIHSSVVCKLNRVCRHPWLVEEIKNVCVVMKQVQLEGWHLANLHVLRCLEEDDDIPELDQMFFCRCCAATLGDVEKRDRPKKKTGYETFYKTCQLYWAGREREPSYEPEFIDHASTMINEMAKLMQINALNMVALHFRRRLHQYIRFKYAVEGKLELKYSETKRLVGSCYRVKSVPEKGDDGNLTGNTVKDWASWDDTKNPIEKELRAWLEIVPWQWQIRANSAHFIRKLSDMLAYMEKFVNKHPDTKGARVYSLLPVSTSYQAAYVKLNASTLYGFLSRRILDPKVKDFLDTELNHLPFDRKTFQKNRNEVLRLIFDVEQFETRDRTFAFEVKTNGYGASVTMIRPVTTRSVVVVEKPVSTKKHKKNDGTAGTKKKPTKKKLKTPEELAEADTFAKELFKLGPEYSPKVLIGIDPGMRSLVTAVSIGHLPRRRRHKSRRGKHRHHRKRHGKRKERVVKISTREYYHLARVNDFAFYNESLKRREPWYASVIRAMPSFKTANYDMYFGHLQFFWKHLRFLLAFSAEQAFLRWRFTRDRAKMKAMDTLAKRIVPKADKQVCIAYGD

SEQ ID NO: 1470 - protein, 304 aa, Phytophthora capsici
KKLKAPTELAEADTFTKELFKLGPEYSPKVLIGIDPGMRSLVTAVSIGHLPRRCRHKSRRGKHRHHRKRRGNRKEPVVQISTREYRHLARIHDFTFYNENLKRRELWYASVIRAMPSFKTASCDMYFGHLHLIWKHLRFLLAFSAEQAFLRWRFTRDHTKMKAIDTLAKRIVPKAGKQVCIAYNDWSRRDGLKGHATGPMKGFVEAPKRWATVIPMVEYRTSITCSGCHKRLRQSRLFNNLNRKKNEADVRLNERPSLREAKEIAEKAKFRNPKLANKKIVLKCTRNVLRCTNSLCKGMALQQP

SEQ ID NO: 1471 - protein, 232 aa, Phytophthora capsici
HAYTVTWLGSTDFEHGEGQKRSHPEYSKVIAKMPSFKTASYEKYLGRLEYFWYHAEFLLQFSVDRPFLKWKFFRKRMAQVAVDVAAKRIAPNVSRLMCVAYGDWSRRKGITGHAPSPVKGLKQALQKRATVVPMDEFKTSKLCSQCHQTLSQVSYEVDVMLPKKRKRKGVVLIRNRAEIQFEEKTCYGVLRCGHKNCTAQYWDRDVNAAINMVELLKSETLGRGRMPAFGRS

SEQ ID NO: 1472 - protein, 264 aa, Phytophthora capsici
DSGRYCGRGHVRQGCDQARSRVLARRPHRSRNERRGTPASSGQCPRSRLRVKYDYRSHLQFLWVHLQFLLAFSAEQSFLRWRFTRDVAKMKALGTLAQRLVPKARKQVCIAFGDWRRRDGIKGHATGPVKGFVEALKKRATVIPVGEYRTSITCSHCHQRLKQARLFNNIKRGHDEVDMRTEANPSPKEVRVIAKMAKFRNPKLVNRKIVLRGTRNVLRCSNSRCKTNFWNRDVNAARNTLEPLKSGLKGKHEATRLRAFRQGQ

SEQ ID NO: 1473 - protein, 359 aa, Phytophthora capsici
FSLPRFMKATKSSIAGFFAALKRDEKTSFPVLKFKSKFASTNSIKIPSRAVKVAEQDSHTAFPFQARFFGFKEADGIAVFEGIPTLTTSVRLHRLREGKYYLCVPRLRSFQKTESVRVCAIDPGVVNFVTVYDPDGRIISVTDAHKVLKKKFEAVDAMKSILALKDNACKDRHKLKVRSKKKTGRKSPKSKEHRLRYRLHRRMGFTYRKATRCVNDLHQKLSCWLSENYNTVLLPSFQTQEMVMRHLREVASDATPETASTEDNAAINTRKMRSPTARALMAQAHFKFKQLLKYKMKRTGGRVVDCEEEYTSKTCSSCGVIKTNLGGDRVFQCANCHAVFDRDVSAAKNILHKNFSLLT

SEQ ID NO: 1474 - protein, 359 aa, Phytophthora capsici
FSLPRFMKATKSSIAGFFAALKRDEKTSFPVLKFKSKFASTNSIKIPSRAVKVVEQDSHTAFPFHTRFFGFKEVDGIAVFEGIPTLTTSVRLHRLREGKYYLCVPRLRSFQKTESVRVCAIDPGVVNFATVYDPDGRTFSVTDAHKVLKKKFEAVDAMKSILALKDNACKDRHKLKVRSKKKTGRKSPKSKEHRLRYRLRRRMRFTYRKATRCVNDLHQKLSCWLSENYNIVLLPSFQTQEMVMRHLREVASDATPETASTEDNAAINTRKMRSPTARALMAQAHFKFKQLLKYKMKRTGGRVVDCEEEYTSKTCSSCGVIKTNLGGDRVFQCANCHAVFDRDVSAAKNILHKNFSLLT

SEQ ID NO: 1475 - protein, 258 aa, Phytophthora capsici
FSLPRFHEGHQNIYRGIFAALKRDENTSFPVLKFKASANSIEIPSRAVKVVEQDSLTALQFHARFFGFKEADGTAVFEDIPTVTASVRWQRLWEGKNYLCVTRLRSFQKPEAARVCAIDPGVVNFATVYDPDGRTFKFTDADKVLKKKFEDVDAMKSILALKDNVCKDRHKLKVRSKKKTGRKSPKSKEHRLRYCLRRRMRFTSRIATRCANDLHQKLSCWLSENYNTILLPSFQTQQMIMRHLREVASGATPETAST

SEQ ID NO: 1476 - protein, 241 aa, Paralithodes camtschaticus
KNMFNITKRYGRPRQWRRVKFRKYCLDQKTLDAFVNKTLFGGNNRSPFHVAYESAKFSATGKGEHYSSPNGKLAKLKRERASAENFTAVDEWNTSKVCHRCKGPLSPVGFVKVENEDKGETEETPKVTERLIYLRALRRCSAQSNNFNDVDTQRRKRQTRIGGNDNNNNLVSSPPSKCPIGGALLDRDSNAAANIAQKLFLDSSSTLQRGVKVETKRVFWLSKVYLKKKKKHTPCTHVTEV

SEQ ID NO: 1477 - protein, 239 aa, Propsilocerus akamusi
SWMQPASNSLFVAAVKIPSNPMNSFENIKISNKTYQHECGSNERKSKMKKFTGLVDKAMETDRRNINVPLNKKGNVHYEDFISFELKWLNVKQAEYCKNKISRLKFDKYIRTKSTLSSYVNRLVGDFKSTTCFFGDANIASSSPIKGYIRLPRKELRKSLENHPKINLIPTDEFRSTKLCSKYYAVNEIPESPHRFASCPHCKKVWNQDINAANNILINGVNKFMEIIPIPQFSRTFIL

SEQ ID NO: 1478 - protein, 472 aa, Propsilocerus akamusi
DHVKMASRKRKCYNEQPITSSTDKKQKLNELKVIKCTLNSVIKNTRLYDKINQDVAEMSLLAREASILISWDLVQKLDDGDYMNMSNFKSLPYFYMLLSGSKEKYTLLRNRFAIRKYNKTLRSNLFVQLSRQYDTIFDNNLWMHGYTRVRRFIKSLYHIDDNKMLYRDMKYLFSKDLSQTHLHENDPLPVWPQSHFSKLTSGRGLSYLNDFYLIWKWNNENQVKNFKLIPLYRAGRLYVNYDAFAFYQLLSSIGECPKYKNECGKMVAAKYHQVNMLDFLTLSNALRQKFHGSFATDGVACSIKIDCPPCNSTIEPVTRNLRSEAYFGIDPGCKLFLGGVYSRETVDSKPHHENLKYSSRQYHHECGYSERKIKLVKFTMNIDVHLEVKRPTNQSHIEYLTFELENMLEKQALYMKRNVARLKFDAYTRKQKILAQCIQKNVIKEASSVTVFFGDAKQVTNSPIKGYVRNRN

SEQ ID NO: 1479 - protein, 484 aa, Propsilocerus akamusi
KKSNFSTKYFYMLLPGAKAKYSLPEEYETLRNTHRARKYEKSYKGNLFKYAAQNYTAAFENNIAIHAYSRMKRFLKKIFPTKNASQIYHILKYLFDKKPVVIDASDVTKLESLLNCELPRGHFFSIKREPMNHFKIFFQLQSLNESNEWKNFNLIPLYKAGLKHVVYDKQSFHALLCRLKKCPMKLNARGRQVNQNYNEIQWSNYFSFKKTKMFQGTFTTDGVSVCVKYIKKISNAAKKPKISQSFDQYIGIDPGCRLFVAAVKIPSNSIENIKISNKMYQHECGRNERKSKMKKFTGLVDKAMETDRRNINVPLNKKGNAHYEDFISFQLKWLNVKQAEYCQNKISRLKFDKYIRTKSTLSSYVNRLVGDFKSTACFFGDATIASSSSIKGYIRLPGKELRKALENHPKINLIPTDEFRSTKLCSKCYAVNEIPESPHRFASCTHCKKVWNRDINAANNILINGVNKFMENIPIPQFSRTFIL

SEQ ID NO: 1480 - protein, 574 aa, Propsilocerus akamusi
CIFSQTSFTYKHTETSVDSKSGKTLKRKIEDGNETIKTVKCGLKKIVLNDTILSAIQEDVKEISLLMYEASRLIYFDLMKKLHHGESVEKVKFLDYFYMLLQGAKAKYSLPEEYETLRNTHRARKYDKSYKGNLFKYAAQNYTTAFENNIAIHAYSRMKRFLKKIFPAKNASQIYHILKYLFDKKPVVIDPSDVTKLESLLNCELPRGHFFSIKREPMNHVKIFFQLQSLNESNEWKNFNLIPLYKAGLKHVVYDKQSFHALLCRLKKCPTKLNARGRQVNENYNEIQWSNYFSFKKTKMFQGTFTTDGVSVCVKYIKKISNAAKKAKISQSFDQYIGIDPGCRLFVAAVKIPSNSMNSFQNIKISNKTYQHECGSNERKSKMKKFTGLVDKAMETDRRNINVPLNKKGNAHFEDFIGFELKWLNVKQAEYCKNKISRLKFDKYIRTKSTLSSYVNRLVGDFKSTACFFGDATISSNSPIKGYIRLPGKELRKALENHPKINLIPTDEFRSTKLCSKCYAVNEIPESPHRFASCTHCKKVWNRDINAANNILINGVNKLMEIIPIPQFSRTFIL

SEQ ID NO: 1481 - protein, 228 aa, Phytophthora pseudosyringae
YRHGDLHARAPTFGEDERLPVLQRKPEEAGAVVRYCHSCDTVLQDLELHTYFQRFQFFWKHLLFLLAFSAEQYFLRWRFTQDRAKMKALDSLAKRLVPKASKQVCIAYGDWSRRDGIKGHATGPDKGFVEALKKRATVVPMDEYRTSITCSRCHKSLMQARLFTKVRRKKDEEDIRMKEQPSKKEVKEIAEMRKFKNPKLANQKVVQAPGTSCAVPTVVARLTSGTGT

SEQ ID NO: 1482 - protein, 249 aa, Phytophthora pseudosyringae
RGSVQNRLPQVRRRREDQRLRCFSDHDSTAYDDLRCSSRVNGLHEEEEEDERRRRAAHARKEPQTKKAMIPEEIAAGDSFAKELFKLGSDYAPDVIIGIDPGMRSIVTAVSVGRLPRRRRRHRGRNRHRPHMRRPPRKQTVMEISTREYRHLAKMNDLRFYSENLKKREPLYATVVRAMPSFKTSSYDTYFQRLQFFWQHLRFLLTFSAEQAILRWRFTQDRAKMMALDSLAKRLVPKASKQVCIAYGD

SEQ ID NO: 1483 - protein, 387 aa, Apostasia ramifera
NGPMSRFRLYPTVEQEQRLTLYCSHARYIWNIAVEQLGHYRPGHGMPGTAEQSRQLTEARHEHDWLREVPTVVGQQALRDFRQACTNWWAGTHRRPTWRKKDRHEGFRVTNGHGIRVEKLNRRWSRVWITGLGWVKFRRTREVGDVRSFRITRDPAGRWHVAFAVKPDPTEAPGNREVIGVDRGVAVTLAYSDGTMLHAPIPAPVKAAAQALSRCKRGSTRRRKARARLAREHARNTDRRRDFIEKATTALARRFDLIRIEDLRVGSMTRSAKGTVEKPGRNVRQKAGLNRSIMAGGWGVFAQRLEDKAPQRVEKFNPAFTSQTCAVCRYTDKANRENQSFACRSCGHTAHADVNAAQVIAAGRAVRGVEHVAALKREPQLPTSSVA

SEQ ID NO: 1484 - protein, 231 aa, Listronotus oregonensis
MRKQKRAKWTRNIDKKIHIEQEAVGFDKTSSRSIPYVHFYTSFFLRHFEEKQQCYERRNLLRLKFDKYVHQQKLQHGLIRKYFSRPNEHSLVLYGAGYQFMNTASFKGHRKFGHNKLVACMRRYYASAVTCVDVDESYTTKTCSYCRRTSGGRTITNVQVAKKHGHRYVFCSKCHKGIHRDKNGAQNILLKFVQKQFVGLLSWIDKDFCLATPPASAGMSLRARIVTLSAS

SEQ ID NO: 1485 - protein, 616 aa, Listronotus oregonensis
QKNNVNNMVCPSCLQSDHSRSSSARCLKHKRRIREQNLKANEKVEIYTIKKCLASILCPLLENKQSLLQKIQQDVREVSRLSIEMSVLVNFFYKSYFMHYNTRNEFYVHFPKFSPLHFMYVLQNKRNQLDDPADIIGEYKRMRTLPAYNGQLRSFIIQEAAKQYDTVFRTNITTHMFTRIKRYLRLLYPDQTAADIHQKSYQLYYKQETNSNNDDVIVNFFTLHNLDVKSVKKDPWMYVYLMMEMQRKFEEEKTAVKHIQTFPQYSHGSKYITYTSTGLYELLRSIKGPDVPPGDLVRFREEAPKFWRRYFNVAANFGYTMSTDGVACSLSMNRVVAVKTTVKKRKIEPTTPSKITRIIAVDPGAKTPIVTCDTSLQYQMLRKEQVSHETREYMRKQKRRKWTGKFDKKLHTEQESVGFEKTSSRSIQHVRHYTDFFLQHFQEKQQCYERRNLVRLKFDKYVHDQKLQHVLIRKYFYNENERTLVLYGNGYNFMKTATFRGHRKFSHSKLLSCLRREPSYSKNVTCLNVDESYTTKTCSYCRRTNNGVEVNVQVANKDGHRYVICSNCHKGIHRDKNGAQNILVKFIQKHFVNLLSWIDNDSMSLQARIVTLGGLL

SEQ ID NO: 1486 - protein, 1221 aa, Leptopilina boulardi
ILVNCLTFIIVMSDKKKETNKSPPSRADIENAQRRVEQINAINRRNVSRQFVPLLPRRSDNNSGSNHNSNSVDSNRIRTVYSRFTPLFPRRCQQSDNGQNCNVNRVRRQLFPPRDEEHLNQEQSASTSVNFVYRQDQSQEIIPTNHQQLFPLQQDAHLNQEPNALPSFNFVYRQDQSLQEDISADHRQPEQPFLNDENTVMSINDNSQPFISNINNDDRTLSWQKNLNLLNIESSESGDLGEENEFQRCPIPRKRFKLNLGSDKRSEKTTNEAENEKNTPTEKFELPKSLSTQKNYANEPQPSTSKQADVQDAVSFISMVTKKSMKKTTDKIQNTRKKTPKKQSLKNKKETPQKVDKSSTTAVDDNDDDDDDDDDDDDEDLKLQTKFTIKTGFSDSFCCCPELRDLVINQVKVLSRMTILVTIFINFALRHPTNDYLRKIWSEQGPDYNSIFPLFKENSTEPRTDAKKEMHNKLKNEFIPQFSEFMGGKFELFNCTNLSSQIQEMAIQLNVNYLTNLHYHARSRLATFFKHELFKKNKSTMKLNKKETTERQQERTRVYREKKLIRRLRNKKKREKWAKKKKKIKQLYREERRARRAELERLHPYEPHVEKLIFRNVKKLKQNRDIIQRQIVYDLPPKGKNRGKKYRERLTLKKNNKNWEKPSRKKKSSKPSTKKSKIINSKEATKKVQDNEEEEELNHRKIIKTKLDNLLKYNECDNETLKALNLENLDFRDLKRRKECHKFFIFFHRLQDYFAREGIKSFILVPIMSPGLKYITYTNTALKLLETELKKVAPDYTCTKKAPEKFTVNEITAQELMHKDIISPLKEKSKLLHAEKIGLERNFQYLEKANNPKNSEELSNIKNQIKEITKKLTPIKKEIQLENKRHQDIKNQRRPEKINENDERWNNMFDISKIQVNKEKLKFSKTIMTDGVAVSVIYNLVKPKNITNFSPLQQQESRDLTKYEVFKGLDPGLKFGFAGVERKMNDNFDIKCIDKHIKISTKSYRWQTQENKRQSILYNETKNYKKYYHDLQVSEKYRDKVNHKDPQQILISTEYLLTALKRNQPYFEKRKIAALKWDKYMSVQRETDLLANYMVGDVKRKQLLVIGSPEISPWMRGHVRMPLRKVVRRLIEKQSKYPNLRIVFIDEHRTTKLCSTCNENMDIFRNRTAYCASCKISWNRDVNAGRNILNLGLVKLGIINKEQLPNWNDFRALKNIQDWNE

SEQ ID NO: 1487 - protein, 1221 aa, Leptopilina boulardi
ILVNCLTFIIVMSDKKKETNKSPPSRADIENAQRRVEQINAINRRNVSRQFVPLLPRRSDNNSGSNHNSNSVDSNRIRTVYSRFTPLFPRRCQQSDNGQNCNVNRVRRQLFPPRDEEHLNQEQSASTSVNFVYRQDQSQEIIPTNHQQLFPLQQDAHLNQEPNALPSFNFVYRQDQSLQEDISADHRQPEQPFLNDENTVMSINDNSQPFISNINNDDRTLSWQKNLNLLNIESSESGDLGEENEFQRCPIPRKRFKLNLGSDKRSEKTTNEAENEKNTPTEKFELPKSLSTQKNYANEPQPSTSKQADVQDAVSFISMVTKKSMKKTTDKIQNTRKKTPKKQSLKNKKETPQKVDKSSTTAVDDNDDDDDDDDDDDDEDLKLQTKFTIKTGFSDSFCCCPELRDLVINQVKVLSRMTILVTIFINFALRHPTNDYLRKIWSEQGPDYNSIFPLFKENSTEPRTDAKKEMHNKLKNEFIPQFSEFMGGKFELFNCTNLSSQIQEMAIQLNVNYLTNLHYHVRSRLATFFKHELFKKNKSTMKLNKKETTERQQERTRVYREKKLIRRLRNKKKREKWAKKKKKIKQLYREERRARRAELERLHPYEPHVEKLIFRNVKKLKQNRDIIQRQIVYDLPPKGKNRGKKYRERLTLKKNNKNWEKPSRKNKSSKPSTKKSKIINSKEATKKVQDNEEEEELNHRKIIKTKLDNLLKYNECDNETLKALNLENLDFRDLKRRKECHKFFIFFHRLQDYFAREGIKSFILVPIMSPGLKYITYTNTALKLLETELKKVAPDYTCTKKAPEKFTVNEITAQELMHKDIISPLKEKSKLLHAEKIGLERNFQYLEKANNPKNSEELSNIKNQIKEITKKLTPIKKEIQLENKRHQDIKNQRRPEKINENDERWNNMFDISKIQVNKEKLKFSKTIMTDGVAVSVIYNLVKPKNITNFSPLQQQESRDLTKYEVFKGLDPGLKFGFAGVERKMNDNFDIKCIDKHIKISTKSYRWQTQENKRQSILYNETKNYKKYYHDLQVSEKYRDKVNHKDPQQILISTEYLLTALKRNQPYFEKRKIAALKWDKYMSVQRETDLLANYMVGDVKRKQLLVIGSPEISPWMRGHVRMPLRKVVRRLIEKQSKYPNLRIVFIDEHRTTKLCSTCNENMDIFRNRTAYCASCKISWNRDVNAGRNILNLGLVKLGIINKEQLPNWSDFRALKNIQDWNE

SEQ ID NO: 1488 - protein, 1218 aa, Leptopilina boulardi
ILVNCLTFIIVMSDKKKETNKSPPSRADIENAQRRVEQINAINRRNVSRQFVPLLPRRSDNNSGSNHNSNSVDSNRIRTVYSRFTPLFPRRCQQSDNGQNCNVNRVRRQLFPPRDEEHLNQEQSASTSVNFVYRQDQSQEIIPTNHQQLFPLQQDAHLNQEPNALPSFNFVYRQDQSLQEDISADHRQPEQPFLNDENTVMSINDNSQPFISNINNDDRTLSWQKNLNLLNIESSESGDLGEENEFQRCPIPRKRFKLNLGSDKRSEKTTNEAENEKNTPTEKFELPKSLSTQKNYANEPQPSTSKQADVQDAVSFISMVTKKSMKKTTDKIQNTRKKTPKKQSLKNKKETPQKVDKSSTTAVDDNDDDDDDDDDEDLKLQTKFTIKTGFSDSFCCCPELRDLVINQVKVLSRMTILVTIFINFALRHPTNDYLRKIWSEQGPDYNSIFPLFKENSTEPRTDAKKEMHNKLKNEFIPQFSEFMGGKFELFNCTNLSSQIQEMAIQLNVNYLTNLHYHARSRLATFFKHELFKKNKSTMKLNKKETTERQQERTRVYREKKLIRRLRNKKKREKWAKKKKKIKQLYREERRARRAELERLHPYEPHVEKLIFRNVKKLKQNRDIIQRQIVYDLPPKGKNRGKKYRERLTLKKNNKNWEKPSRKKKSSKPSTKKSKIINSKEATKKVQDNEEEEELNHRKIIKTKLDNLLKYNECDNETLKALNLENLDFRDLKRRKECHKFFIFFHRLQDYFAREGIKSFILVPIMSPGLKYITYTNTALKLLETELKKVAPDYTCTKKAPEKFTVNEITAQELMHKDIISPLKEKSKLLHAEKIGLERNFQYLEKANNPKNSEELSNIKNQIKEITKKLTPIKKEIQLENKRHQDIKNQRRPEKINENDERWNNMFDISKIQVNKEKLKFSKTIMTDGVAVSVIYNLVKPKNITNFSPLQQQESRDLTKYEVFKGLDPGLKFGFAGVERKMNDNFDIKCIDKHIKISTKSYRWQTQENKRQSILYNETKNYKKYYHDLQVSEKYRDKVNHKDPQQILISTEYLLTALKRNQPYFEKRKIAALKWDKYMSVQRETDLLANYMVGDVKRKQLLVIGSPEISPWMRGHVRMPLRKVVRRLIEKQSKYPNLRIVFIDEHRTTKLCSTCNENMDIFRNRTAYCASCKISWNRDVNAGRNILNLGLVKLGIINKEQLPNWSDFRALKNIQDWNE

SEQ ID NO: 1489 - protein, 266 aa, Leptopilina boulardi
ESRDVTKYEVFKGLDPGLKFGFAGVERKMNDNFDIKCIDKHIKISTKSYRWQTQENKRQSILYNETKNYKKYYHDLQVSEKYRDKVNHKDPQQILISTEYLLAALKRNQPYFEKRKIAALKWDKYMSVQRETDLLANYMVGDVKRKQLLVIGSPEISPWMRGHVRMPLRKVARRLIEKQSKYPNLRIVFIDEHRTTKLCSTCNENMDIFRNRTAYCASCKISWNRDVNAGRNILNLGLVKLGIINKEQLPNWSDFRALKNIQDWNE

SEQ ID NO: 1490 - protein, 306 aa, Leptopilina boulardi
VNKEKLKFSKTIMTDGVAVSVIYNLVKPKNITNFSPLQQQESRDVTKYEVFKGLDPGLKFGFAGVERKMNDNFDIKCIDKHIKISTKSYRWQTQENKRQSILYNETKNYKKYYHDLQVSEKYRDKVNHKDPQQILISTEYLLTALKRNQPYFEKRKIAALKWDKYMSVQRETDLLANYMVGDVKRKQLLVIGSPEISPWMRGHVRMPLRKVARRLIEKQSKYPNLRIVFIDEHRTTKLCSTCNENMDIFRNRTAYCASCKISWNRDVNAGRNILNLVLVKLGIINKEQLPNWSDFRALKNIQDWNE

SEQ ID NO: 1491 - protein, 1220 aa, Leptopilina boulardi
ILVNCLTFIIVMSDKKKETNKSPPSRADIENAQRRVEQINAINRRNVSRQFVPLLPRRSDNNSGSNHNSNSVDSNRIRTVYSRFTPLFPRRCQQSDNGQNCNVNRVRRQLFPPRDEEHLNQEQSASTSVNFVYRQDQSQEIIPTNHQQLFPLQQDAHLNQEPNALPSFNFVYRQDQSLQEDISADHRQPEQPFLNDENTVMSINDNSQPFISNINNDDRTLSWQKNLNLLNIESSESGDLGEENEFQRCPIPRKRFKLNLGSDKRSEKTTNEAENEKNTPTEKFELPKSLSTQKNYANEPQPSTSKQADVQDAVSFISMVTKKSMKKTTDKIQNTRKKTPKKQSLKNKKETPQKVDKSSTTAVDDNDDDDDDDDDDDEDLKLQTKFTIKTGFSDSFCCCPELRDLVINQVKVLSRMTILVTIFINFALRHPTNDYLRKIWSEQGPDYNSIFPLFKENSTEPRTDAKKEMHNKLKNEFIPQFSEFMGGKFELFNCTNLSSQIQEMAIQLNVNYLTNLHYHARSRLATFFKHELFKKNKSTMKLNKKETTERQQERTRVYREKKLIRRLRNKKKREKWAKKKKKIKQLYREERRARRAELERLHPYEPHVEKLIFRNVKKLKQNRDIIQRQIVYDLPPKGKNRGKKYRERLTLKKNNKNWEKPSRKNKSSKPSTKKSKIINSKEATKKVQDNEEEEELNHRKIIKTKLDNLLKYNECDNETLKALNLENLDFRDLKRRKECHKFFIFFHRLQDYFAREGIKSFILVPIMSPGLKYITYTNTALKLLENELKKVAPDYTCTKKAPEKFTVNEITAQELMHKDIISPLKEKSKLLHAEKIGLERNFQYLEKANNPKNSEELSNIKNQIKEITKKLTPIKKEIQLENKRHQDIKNQRRPEKINENDERWNNMFDISKIQVNKEKLKFSKTIMTDGVAVSVIYNLVKPKNITNFSPLQQQESRDLTKYEVFKGLDPGLKFGFAGVERKMNDNFDIKCIDKHIKISTKSYRWQTQENKRQSILYNETKNYKKYYHDLQVSEKYRDKVNHKDPQQILISTEYLLTALKRNQPYFEKRKIAALKWDKYMSVQRETDLLANYMVGDVKRKQLLVIGSPEISPWMRGHVRMPLRKVVRRLIEKQSKYPNLRIVFIDEHRTTKLCSTCNENMDIFRNRTAYCASCKISWNRDVNAGRNILNLGLVKLGIINKEQLPNWSDFRALKNIQDWNE

SEQ ID NO: 1492 - protein, 1218 aa, Leptopilina boulardi
ILVNCLTFIIVMSDKKKETNKSPPSRADIENAQRRVEQINAINRRNVSRQFVPLLPRRSDNNSGSNHNSNSVDSNRIRTVYSRFTPLFPRRCQQSDNGQNCNVNRVRRQLFPPRDEEHLNQEQSASTSVNFVYRQDQSQEIIPTNHQQLFPLQQDAHLNQEPNALPSFNFVYRQDQSLQEDISADHRQPEQPFLNDENTVMSINDNYQPFISNINNDDRTLSWQKNLNLLNIESSESGDLGEENEFQRCPIPRKRFKLNLGSDKRSEKTTNEAENEKNTPTEKFELPKSLSTQKNYANEPQPSTSKQADVQDAVSFISMVTKKSMKKTTDKIQNTRKKTPKKQSLKNKKETPQKVDKSSTTAVDDNDDDDDDDDDEDLKLQTKFTIKTGFSDSFCCCPELRDLVINQVKVLSRMTILVTIFINFALRHPTNDYLRKIWSEQGPDYNSIFPLFKENSTEPRTDAKKEMHNKLKNEFIPQFSEFMGGKFELFNCTNLSSQIQEMAIQLNVNYLTNLHYHARSRLATFFKHELFKKNKSTMKLNKKETTERQQERTRVYREKKLIRRLRNKKKREKWAKKKKKIKQLYREERRARRAELERLHPYEPHVEKLIFRNVKKLKQNRDIIQRQIVYDLPPKGKNRGKKYRERLTLKKNNKNWEKPSRKNKSSKPSTKKSKIINSKEATKKVQDNEEEEELNHRKIIKTKLDNLLKYNECDNETLKALNLENLDFRDLKRRKECHKFFIFFHRLQDYFAREGIKSFILVPIMSPGLKYITYTNTALKLLENELKKVAPDYTCTKKAPEKFTVNEITAQELMHKDIISPLKEKSKLLHAEKIGLERNFQYLEKANNPKNSEELSNIKNQIKEITKKLTPIKKEIQLENKRHQDIKNQRRPEKINENDERWNNMFDISKIQVNKEKLKFSKTIMTDGVAVSVIYNLVKPKNITNFSPLQQQESRDLTKYEVFKGLDPGLKFGFAGVERKMNDNFDIKCIDKHIKISTKSYRWQTQENKRQSILYNETKNYKKYYHDLQVSEKYRDKVNHKDPQQILISTEYLLTALKRNQPYFEKRKIAALKWDKYMSVQRETDLLANYMVGDVKRKQLLVIGSPEISPWMRGHVRMPLRKVVRRLIEKQSKYPNLRIVFIDEHRTTKLCSTCNENMDIFRNRTAYCASCKISWNRDVNAGRNILNLGLVKLGIINKEQLPNWSDFRALKNIQDWNE

SEQ ID NO: 1493 - protein, 1220 aa, Leptopilina boulardi
ILVNCLTFIIVMSDKKKETNKSPPSRADIENAQRRVEQINAINRRNVSRQFVPLLPRRSDNNSGSNHNSNSVDSNRIRTVYSRFTPLFPRRCQQSDNGQNCNVNRVRRQLFPPRDEEHLNQEQSASTSVNFVYRQDQSQEIIPTNHQQLFPLQQDAHLNQEPNALPSFNFVYRQDQSLQEDISADHRQPEQPFLNDENTVMSINDNSQPFISNINNDDRTLSWQKNLNLLNIESSESGDLGEENEFQRCPIPRKRFKLNLGSDKRSEKTTNEAENEKNTPTEKFELPKSLSTQKNYANEPQPSTSKQADVQDAVSFISMVTKKSMKKTTDKIQNTRKKTPKKQSLKNKKETPQKVDKSSTTAVDDNDDDDDDDDDDDEDLKLQTKFTIKTGFSDSFCCCPELRDLVINQVKVLSRMTILVTIFINFALRHPTNDYLRKIWSEQGPDYNSIFPLFKENSTEPRTDAKKEMHNKLKNEFIPQFSEFMGGKFELFNCTNLSSQIQEMAIQLNVNYLTNLHYHARSRLATFFKHELFKKNKSTMKLNKKETTERQQERTRVYREKKLIRRLRNKKKREKWAKKKKKIKQLYREERRARRAELERLHPYEPHVEKLIFRNVKKLKQNRDIIQRQIVYDLPPKGKNRGKKYRERLTLKKNNKNWEKPSRKNKSSKPSTKKSKIINSKEATKKVQDNEEEEELNHRKIIKTKLDNLLKYNECDNETLKALNLENLDFRDLKRRKECHKFFIFFHRLQDYFAREGIKSFILVPIMSPGLKYITYTNTALKLLETELKKVAPDYTCTKKAPEKFTVNEITAQELMHKDIISPLKEKSKLLHAEKIGLERNFQYLEKANNPKNSEELSNIKNQIKEITKKLTPIKKEIQLENKRHQDIKNQRRPEKINENDERWNNMFDISKIQVNKDKLKFSKTIMTDGVAVSVIYNLVKPKNITNFSPLQQQESRDLTKYEVFKGLDPGLKFGFAGVERKMNDNFDIKCIDKHIKISTKSYRWQTQENKRQSILYNETKNYKKYYHDLQVSEKYRDKVNHKDPQQILISTEYLLTALKRNQPYFEKRKIAALKWDKYMSVQRETDLLANYMVGDVKRKQLLVIGSPEISPWMRGHVRMPLRKVVRRLIEKQSKYPNLRIVFIDEHRTTKLCSTCNENMDIFRNRTAYCASCKISWNRDVNAGRNILNLGLVKLGIINKEQLPNWSDFRALKNIQDWNE

SEQ ID NO: 1494 - protein, 970 aa, Leptopilina boulardi
SFSFMKSKTCFYTFFPELPLQIDTMNNRKRRRETQSSKATSPSNAEPTKKQKKIEKSSFPNAASSQFPPSTSKPKVSNTASKDAKEEDQEQKYYTRYMSLNAILPEGNIVKEKIQDDVNVLSRLKIVCSIFLEYIMNAHDSKIAKRYAKEGIQFDKIMGCFKKRTVAAEKTFRKKHGELDKLFEDFKVLLKDEKTEIDSDLFEEFQQLHKGKSKWKDENEKYEAFNKYRIEKLTKFDCANKEDLILQACQEMKKDMGVHIQINGPKILEKYFNLLLMEKKNQNNDEYKVEDSFVKANSDEEKIEENLKNRRRRKNWNKKMKKKRMERKRTHNMEDQNKQQKKEMTRQQLRKERIYFQLITRKADRKDDLKKINEDYDKRTYKVKKKTEITEEEKEKKKKEKKEKEKKKKEKKEKEKKKKEEKKKKEEEKKKEQEKNKEEKKKEEKKTNDEPKTRNKPLTRKERKQQVETLVNLLIEENQCTDETLKKILKEVQEEYDTFYEKLEKEDEEEEEEEEEKKKQEEIENEKGKKTEKEEIQGQKRKKAEEKKQVERRKPLDFKNLKSHYTSHKLLPFFMKLQKHFVENKIKSFVLFPIRRYGIQHATYTKTILLRNVLPYVHKKENMNPQQKKNEINKINKLNGKDNQLEYLWNRLFDFTELMKKNKIKKLPTLMQTDGVKVSLIFDRTETQKEIFKQEPKEVKIKKYTRFVGLDPGRKAIVGGVIRRGEPKMLEKVKDQDAPIYVKAKTFRFRAGEFRRRDILNRKTKKMNEKYKKFMKENPTFNVNTKDPRQYEKIAKFRMKLFEIFQDTLSKRSIVQLKFNKLVLVEREKDRVVNKIIGNLKEESCFVGIGNEKLANFTKGHVFTPIRQIHKKLQERSRQVGEQKLKILHVSEWYTTQKCSTCCGQCFVSASPKRYSFCQKCNITWERDINAGRNILNLALIKANLMERTDLKDPSVFPQIRESANADIFR

SEQ ID NO: 1495 - protein, 312 aa, Leptopilina boulardi
EAQREKSTKVKRFLSLQEKIDRWHYLFDFSKTERGKKGAFSEAISTNGVDVSVLFDVPKFRKESITEDKEEKYKVFYGFDPGKKIMLGGVRRFGNPNPSSENKSKDKPIHLKSSRFRWQISVYLRKEKKKKFGLDLQKYFKEYVIKNPNMENFSNKNPRDFKRIVNYKIHLFTKFQELHEKKALIRLKMDKYMSHQRECEKLVNFFIGDTLEKPCFVAFGNAKMPNFTLGYAGTPMNQLKQTFDNRAKQLGSRRLKIVTVNEFHTTALCINCCFRLFKSKTPNRYLRCDDNCHTIWKEDINGGRNIHKISHL

SEQ ID NO: 1496 - protein, 386 aa, Leptopilina boulardi
KNWFGKKFSIFGKANNPKNAEELLNIKNQLKEITKKLTPIKKEIQLENKRHQDIKNQRRPEKINENDERWNNMFDISKIQVNKDKLKFSKTIMTDGVAVSVIYNLVKPKNITNFSPLQQQESRDLTKYEVFKGLDPGLKFGFAGVERKMNDNFDIKCTDKHIKISTKSYRWQTQENKRQSILYNETKNYKKYYHDLQVSEKYRDKVNHKDPQQILISTEYLLTALKRNQPYFEKRKIAALKWDKYMSVQRETDLLANYMVGDVKRKQLLVIGSPEISPWMRGHVRMPLRKVVRRLIEKQSKYPNLRIVFIDEHRTTKLCSTCNENMDIFRNRTAYCASCKISWNRDVNAGRNILNLGLVKLGIINKEQLPNWSDFRALKNIQDWNE

SEQ ID NO: 1497 - protein, 1218 aa, Leptopilina boulardi
ILVNCLTFIIVMSDKKKETNKSPPSRADIENAQRRVEQINAINRRNVSRQFVPLLPRRSDNNSGSNHNSNSVDSNRIRTVYSRFTPLFPRRCQQSDNGQNCNVNRVRRQLFPPRDEEHLNQEQSASTSVNFVYRQDQSQEIIPTNHQQLFPLQQDAHLNQEPNALPSFNFVYRQDQSLQEDISADHRQPEQPFLNDENTVMSINDNSQPFISNINNDDRTLSWQKNLNLLNIESSESGDLGEENEFQRCPIPRKRFKLNLGSDKRCEKTTNEAENEKNTPTEKFKLPKSLSTQKNYANEPQPSTSKQADVQDAVSFISMVTKKSMKKTTDKIQNTRKKTPKKQSLKNKKETPQKVDKSSTTAVDDNDDDDDDDDDEDLKLQTKFTIKTGFSDSFCCCPELRDLVINQVKVLSRMTILVTIFINFALRHPTNDYLRKIWSEQGPDYNSIFPLFKENSTEPRTDAKKEMHNKLKNEFIPQFSEFMGGKFELFNCTNLSSQIQEMAIQLNVNYLTNLHYHARSRLATFFKHELFKKNKSTMKLNKKETTERQQERTRVYREKKLIRRLRNKKKREKWAKKKKKIKQLYREERRARRAELERLHPYEPHVEKLIFRNVKKLKQNRDIIQRQIVYDLPPKGKNRGKKYRERLTLKKNNKNWEKPSRKNKSSKPSTKKSKIINSKEATKKVQDNEEEEELNHRKIIKTKLDNLLKYNECDNETLKALNLENLDFRDLKRRKECHKFFIFFHRLQDYFAREGIKSFILVPIMSPGLKYITYTNTALKLLETELKKVAPDYTCTKKAPEKFTVNEITAQELMHKDIISPLKEKSKLLHAEKIGLERNFQYLEKANNPKNSEELSNIKNQIKEITKKLTPIKKEIQLENKRHQDIKNQRRPEKINENDERWNNMFDISKIQVNKEKLKFSKTIMTDGVAVSVIYNLVKPKNITNFSPLQQQESRDLTKYEVFKGLDPGLKFGFAGVERKMNDNFDIKCIDKHIKISTKSYRWQTQENKRQSILYNETKNYKKYYHDLQVSEKYRDKVNHKDPQQILISTEYLLTALKRNQPYFEKRKIAALKWDKYMSVQRETDLLANYMVGDVKRKQLLVIGSPEISPWMRGHVRMPLRKVVRRLIEKQSKYPNLRIVFIDEHRTTKLCSTCNENMDIFRNRTAYCASCKISWNRDVNAGRNILNLGLVKLGIINKEQLPNWSDFRALKNIQDWNK

SEQ ID NO: 1498 - protein, 973 aa, Leptopilina boulardi
SFSFMKSKTCFYTFFPELPLQIDTMNNRKRRRETQSSKATSPSNAEPTKKHKKIEKSSFPNAASSQFPPSTSKPKVSNTASKDAKEEDQEQKYYTRYMSLNAILPEGNIVKEKIQDDVNVLSRLKIVCSIFLEYIMNAHDSKIAKRYAKEGIQFDKIMGCFKKRTVAAEKTFRKKHGELDKLFEDFKVLLKDEKTEIDSDLFEEFQQLHKGKSKWKDENEKYEAFNKYRIEKLTKFDCANKEDLILQACQEMKKDMGVHIHINGPKILEKYFNLLLMEKKNQNNDEYKVEDSFVKANSDEEKIEENLKNRRRRKNWNKKMKKKRMERKRTHNMEDQNKQQKKEMTRQQLRKERIYFQLITRKADRKDDLKKINEDYDKRTYKVKKKTEITEEEKEKKKKEKKEKEKKKKEKKEKEKKEKEKKKKEEKKKKEEEKKKEQEKNKEEKKKEEKKTNDEPKTRNKPLTRKERKQQVETLVNLLIEENQCTDETLKKILKEVQEEYDTFYEKLEKEEEEEEEEEKKKQEEIENEKGKKTEKEEIQGQKRKKAEEKKQVERRKPLDFKNLKSHYTSHKLLPFFMKLQKHFVENKIKSFVLFPIRRYGIQHATYTKTILLRNVLPYVHKKENMNPQQKKNEINKINKLNGKDNQLEYLWNRLFDFTELMKKNKIKKLPTLMQTDGVKVSLIFDRTETQKEIFKQEPKEVKIKKYTRFVGLDPGRKAIVGGVIRRGEPKMLEKVKDQDAPIYVKAKTFRFRAGEFRRRDILNRKTKKMNEKYKKFMKENPTFNVNTKDPRQYEKIAKFRMKLFEIFQDTLSKRSIVQLKFNKLVLVEREKDRVVNKIIGNLKEESCFVGIGNEKLANFTKGHVFTPIRQIHKKLQERSRQVGEQKLKILHVSEWYTTQKCSTCCGQCFVSASPKRYSFCQKCNITWERDINAGRNILNLALIKANLMERTDLKDPSVFPQIRESANADIFR

SEQ ID NO: 1499 - protein, 313 aa, Cystobasidium slooffiae
QTDPRLQYEPESYEEKPPFDETSSLRGSVFYAKKYLKDKKLECVTTLPTEATRKGMYKHVISLDDNSAPIVKDWLMLTSEQNEGAEIKIAGDDPGIRFSQAIHINSPPSSSSYLSHLKGDEKPDQEQETSHQSQGASDTFLLAPHTLAEVARSVSHVKQRLRSRMAFSTLDILNASKQQLNSGDKHRLSSFYNLVDLSLKCSRDYCHSSFRGRQQVRRFYDKTARQFAELVWPKHYENGPKSPLLFVIGDSCGYGNSQARKHHADYSTTSVRQLQKRLESWKLPVKFVLVDELFSSQVCPDPKCRDDQGLRSM

SEQ ID NO: 1500 - protein, 229 aa, Carpediemonas membranifera
TSIYKTRLGLCSSTSRKFDAGMVKSFRRVRLTNHILRQKHFHRAAEQIARTLGWTPRRLPRSIAPPRAAPTRLVVFYGSARFKTPRLVHPCAPYGRFATLLPHRAFNITAEVRMTNEFRTSLFCPFCRARFRRTRYTRRTMRCHNPNCQGAPWYRQQRLNSNPTSTWLNLSHRDKTAAQNILDCGLMTDAQYQASAFRNPRPPARLPNYNPNTPITANQPLVFASGQAN

SEQ ID NO: 1501 - protein, 302 aa, Carpediemonas membranifera
VRMIGALVPTAAVTSLAARLVSINNSIRFVLDNANDIFEAGMRKSFRLVRFANHILRQKHFARCDQQLAREFGRHHPIATPIRLKVFYGSSGFTTPAGMFIPCAPYRKFAREIVPLLKGYNIVVDLNMVDEDRTTVVCPHCHAPYKRVRPRDDQHVHPQRVMLCENPQCRGAQWRATVPDALNVDHRDKSAAETSCGVLLPRKMSSVALRSVAPRSRAFQHHSSIINWLTANIRLRTDDVVQFGTLIVPFRPCLEVRTMCLYCATSQFAHPSLHTFLCAIGLFRYLQGRWPRVILVCLKNRI

SEQ ID NO: 1502 - protein, 253 aa, Carpediemonas membranifera
RRLPQRTAHTCTRRSSGSGLRGHRAASFKSTRLVSINNSIRFVLDNANDIFEAGMRKSFRRVRFANHILRQKHFARCGQQLAREFGWRRHHPIATPIRLKVFYGSSGFTTPAGMFIPCAPYRKFAREIVPLLKRYNIVVDLNMVNEDRTTVVCPHCHAPYKRVRPRDDQHVHPHRVMLCENPQCRGAQWRATVPDALNVGHRDKSAAENILWRSLATEDELSGSPYSRTSIPRLPTSFQHHQLANRQHSSTDG

SEQ ID NO: 1503 - protein, 231 aa, Carpediemonas membranifera
YDGRVVQEHKTVSIINSIRFVLDNANDIFEAGMRKSFRRVRFANHILRQKHFARCGQQLAREFGWRGHHPIATPIRLKVFYGSSGFTTPAGMFIPCAPYRKFAREIVPLLKRYNIVVDLNMVNEDRTTVVCPHCHAPYKRVRPRDDQHVHPHRVMLCEKPQCRGAQWRATVPDALNVDHRDKSAAENILWRSLATEDELSGSPFSRTSIPRLPTSFQYHQLANRHHSSADG

SEQ ID NO: 1504 - protein, 209 aa, Carpediemonas membranifera
SRKLLAYADSPAGRSSSELNSPSLAHLLSYTNRVADMRASAMVRAIMRAGMFYVLSDVAFLTRRTEPIHLKVAYGAALFGSAGTPSCAPYRHFARALPGIMLRHNVVVTVAMVSEFRTSIVCPYCKSTLQTCGAHRTMLCQNPACEGAPWRDKRLSRHPEQRDMLLNLSHRDKSASENIHWCTFDATPDQIGLSPFHYGTQRGALPRYH

SEQ ID NO: 1505 - protein, 208 aa, Carpediemonas membranifera
VSTTLLGLCWTTRTTFSRLECVSLSAECALRTTSFARCGQQLAREFGWRRHHPIATPIRLKVFYGSSEFTTPAGMFIPCAPYRKFAREIVPLLKGYNIVVDLNMVDEDRTTVVCPHCHAPYKRVRPRDDQHVHPHRVMLCENPQCRGAQWRATVPDALNVDHRDKSAAENILWRSLATEDELSGSPFSRTSIPRLQTSFRYHQLANRT

SEQ ID NO: 1506 - protein, 200 aa, Carpediemonas membranifera
RLSNSRLGLSMRTSFRSSTRGRESVSAVRLLPITVCARSTSPGLDVNSWMISAGAPRSPFTVAYGAALFGSASTPSCAPYRHFARALPGIMLRHNVVVTVTMVSEFRTSIVCPYCKAHFRRVVHTHRTMLCQNPACEGAPWRVERLRRHPEQRDILLNLSHRDKSASENILWCTIDATSDQIEQSPFHYDSQRGALPRYH

SEQ ID NO: 1507 - protein, 215 aa, Carpediemonas membranifera
VSTTLFVLDNANDIFEAGMRKYFRRVRFANHILRQKHFARCGQQLAREFGRHHPIATHIRLKVFYGSSGFTTPAGMFIPCAPYRKFAREIVPLLKGYNIVVNLNMVNEDRTTVVCPHCHAPYKRVRPRDDQHVHPHRVMLCEYPQCRGAQWRATVPDALNVDHRDKSAAENILWRSLATEDELSGSPFSRTLIPRLQTSFQYHQLANRQHSSTDG

SEQ ID NO: 1508 - protein, 258 aa, Carpediemonas membranifera
SLFSCEIRCSKLIFSCSNISRSVFMSWNVFACFLYRRRYSWRKLSISDTRLSSAVISNEFLHKLHILGYRLERLGVDDADARPAPDPDAHLMGFNPGARALGGFFIRHPDGTTSSGVVPKCGYTKTPSFAFDMTPASFKSTNLDSLQNSIRFVLLHEQEIFDAGMVKSFRRVRLTNHILRQKHFHRAGEQLARTLGWTPRRLPRSIAPPRAAPTRLVVFYGSARFKTPRRVHPCAPYGRFAKPLPHIMRLSTTLLKCG

SEQ ID NO: 1509 - protein, 205 aa, Carpediemonas membranifera
GDRLLQGFHKASSSWTSAQLQTSQSLTRRLIVFYSTSNNAEAPPTPDPDAHLMRFDPGARSIGGYYIRHPDGTTSSGVLPKCGYTKTPSFGFDMTAASFKSTRLVSINNSIRFVLDNANEIFEAGMRKSFRRVRFANHILRQKHLARCGQQLAREFGWLRHHPIATPIRLKVFYGSSGFTTPAGMLIPCAISKVRERDSTHSQGV

SEQ ID NO: 1510 - protein, 200 aa, Carpediemonas membranifera
RLSNSRLGLSMRTSFRSSTRGRESVSAVRLFANHCLRQKHFARAGRQLLDDLGGRPPEPIHLEVAYGAALFGSAGTPSCAPYRHFARALPGIMLRHNVVVTVTMVSEFRTSIVCPYCKAHFRRVVHTHRTMLCQNPACEGAPWRVERLRRHPEQRDILLNLSHRDKSASENIHWCTFDATSDQIEQSPFHSQRGALPRYH

SEQ ID NO: 1511 - protein, 200 aa, Carpediemonas membranifera
RLSNSRLGLSMRTSFRSSTRGREKCFRRATFANHCLRQKHFARAGRQLMDDLGGRPSEPIHLEVAYGAALFGSAGTPSCAPYRHFARALPGIMLRHNVVVTVTMVSEFRTSIVCPYCKAHFRRVVHTHRTMLCQNPACEGAPWRVERLRRHPEQRDILLNLSHRDKSASENIHWCTFDATSDQIEQSPFHSQRGALPRYH

SEQ ID NO: 1512 - protein, 263 aa, Carpediemonas membranifera
KRDSFHRIGEQALLVHEGQVLSHLPSVDPGARALRGFFIRHPDGTTSSGVVPKCGYTKTPSFAFDMTPASFKSTNLDSLQNSIRFVLLHEQEIFDAGMVKSRVRLTNHILRQKHFHRAGEQLARTLGWTPRRLPRGIAPPRAAPTRLVVFYGSARFKTPHRVHPCAPYGRFAKSLPHIMRAFNITAEVRMTNEFPEPHSSAPSAARGSVELATRGARCDATTRIVKVLHGTDSNASIPILPPLGSISPTETRLLHRTSWIAAS

SEQ ID NO: 1513 - protein, 355 aa, Carpediemonas membranifera
CATRWRYIRSKPPSSKLSDRTTPKNGEWGITPQQNISTHACWPGSRLNAMRSAGNSPYMTVPYVRKRARGREKERPRLGTNNAEAPPAPDPDVHLMGFDTGARPIGGYYIRHPDGTTSSGVLPKCGYTKTPSFGFDMTAASFKSTRLVSINNSIRFVLDNANEIFEAGMRKSFRRVRFANHILRQKHLARCGQQLAREFGWRRHHPIATPIRLKVFYRSSGFTTPAGMSIPCAPYRKFAREIVPLLKGYNIVVDLNMVNEDRTTVVCPHCHAPYKRVRPRDDQHVHPHRVMLCENPQCRGAQWRATVPDALNVDQRDKSAAENILWRSLATEDELSGSPFSRTLIPRLQTSFQYH

SEQ ID NO: 1514 - protein, 245 aa, Carpediemonas membranifera
PHSSRTSGKPTLELQHCWLGEYSTATRVWLSRASPGYLTRLRAGLERVRPLHENIVQIINEGTRKCFRRASFANHCLRLKHFARAGRQLLDDLGGRPPEPIHIEVAYVAALFGSAGTPSCAPYRHFARALPGIMLRHNVVVSVTMVSEFRTSIVCPYCKAHFRRVVHTHRTMLCQNPACEGAPWRVERLRRHPEQRDILLNLSHRDKSASENILWCTYDATSDQIEQSPFHYDSQRGASSLSLTC

SEQ ID NO: 1515 - protein, 217 aa, Carpediemonas membranifera
VSTTLFGLCWTTRTTFSRLECVSLSAECALRTTSFARSTSPAAANSWLGSCGRHHPIATPIRLKAFNGSSGFTTPAGMFIPCAPYRKFAREIVPLLKRYNIVVDLNMVNEDRTTVVCPHCHAPYKRVRPRDDQHVHPHRVMLCENPQCRGAQWRATVPDALNVDHRDKSAAENILWRSLATEDELSGSPFSRTSISRLQTSFQYHQLANRQHSSTDG

SEQ ID NO: 1516 - protein, 216 aa, Carpediemonas membranifera
VSTTIRFVLDNANDIFEAGMRKSFRLVRFANHILRQKHFARCGQQLAREFGRHHPIATPIRLKVFYGSSGFTTPAGMFIPCAPYRKFAREIVPLLKGYNIVVDLNMVNEDRTTVVCPHCHAPYKRVRPRDDQHVHPQRVMLCENPQCRGAQWRATVPDALNVDHRDKSAAENILWRSLATEDELGGSPFSRTSIPRLPTSFQYHQLVNRQHSSTDG

SEQ ID NO: 1517 - protein, 224 aa, Carpediemonas membranifera
PRDSFHRIGEQALLVHEGQVLSHLPPVDPGARALRGFFIRHPDGTTSSGVVPKCGYTKTPSFAFDMTPASFKSTNLDSLQNSVRFVLLHEQEIFDAGMVKSFRRVRLTNHILRQKHFHRAGEQLARTLGWTPRRLPRGIAPPRAAPTRLVVFYGSARFKTPRRVHPCAPYGRFAILLPHIMRAFNITAEAHDAMPQPELSRCTMVQTATPQFRSYYHHLAQSLP

SEQ ID NO: 1518 - protein, 473 aa, Carpediemonas membranifera
GDRLLQGFHKASSSWTSAQLQTSQSLTRRLIVFYSTLNSPLHLYSSPEALRPLRPTVGSGVRSPPSHRHPHSPESLLRELGIHHACWYVHSLRAISKVRERDSSLLKGYNIVVDLNMVNEDRTTVVCPHCHATYKRVRPRDDQHVHPHRVMLCENRQCRGAQWRATIPDAPNVDHRDKSAAENILWRSLATEDELSGSPFSRTSHVFKLHSSIINWLTANIRLRTDDIVQFGTLIVPFRPCLGGSKNVFILRNRIELRHHKESPSMNFGGSITLVFGPMFSGKTTELIRLCDRQQLAGRKVLVIKYSKDTRYTANNEVSTHVGHKLPAIPTDNLFSILDAALDAEVIGIDEGQFFPDIVQFADDMANAGKHVIVAALDGTFRRDPFPSRVIDLLPRAEHVTKLSAVCHICGRNAPFSRRITADTDVEVIGGADMYVAVCRHCFHTDVTEGLKVDPKSRSPMRNMVVPEPPRSW

SEQ ID NO: 1519 - protein, 262 aa, Carpediemonas membranifera
GDRLLQSFHKASSSWTSAQLQTSQSLTRRLIVFYSTLNSLLHLYMLVMVFIVGSYMSSSSMTSCTPVVRNKMEIYTIKASINQAFRPLVLLLKGYNIVVDLNMVNEDRTTVVCPHCHAPYKRVRPRDDKHVHPHRVMLCEKPQCRGAQWRTTVPDALNVDHRDKSAAENILWRSLATEDELGRSPFSRTVIPRLPTSFQSIINWLTATIRLLTDDVVQFGTLIVPFRPCLGGSNNVFILRNMPRSQILQDSTTMPTVVVTRP

SEQ ID NO: 1520 - protein, 215 aa, Carpediemonas membranifera
VSTTLLGLCWTTRTTFSRLACVSLFAECALRTTSFARSTSPAAANSWLGSSVATHRPPIRLKVFYRSSGFTTPAGMFIPCAPYRKFAREIVPLLKRYNIVVDLNMVNEDRTTVVCPHCHAPYKRVRPRDDQHVHPHRVMLCENPQCRGAQWRATVPDALNVDHRDKSAAENILWRSLATEDELSGSPFSRTSIPRLPTSFQYHQLANRQHSSTDG

SEQ ID NO: 1521 - protein, 204 aa, Carpediemonas membranifera
RLSNSRLSFCFVHENIVQIINEGTRKCFRRATFANHCLRLKHFARAGRQLLDDLGGRPPEPIHLEVAYGAALFDSAGTPSCAPYRHFARALPGIMLRHNVVVSVTMVSEFRTSIVCPYCKAHFRRVVHTHRTMLCQNPACEGAPWRVERLRRHPEQRDILLNLSHRDKSTSENILWCTFDATSDQIEQSPFHYDSQRGALPRYH

SEQ ID NO: 1522 - protein, 260 aa, Carpediemonas membranifera
YYIRHPDGTTSSGVLPKCGYTKTPSFGFDMTAASFKSTRLVSINNSIRFVLDNANDIFEAGMRKSFRRVRFANHILRQKHFARCGQQLAREFGWRRHHPIATHIRLKVFYGSSGFTTPAGMFIPCAPYRKFAREIVPLLKGYNIVVDLNMVNEDRTTVVCPHCHAPCKRVRPRDDQHVHPHRVMLCEKPQCRGAQWRATVPDALNVDHRDKSAAENILWRSLATEDELSGSPFSRTLIPRLPTSFQYHQLANRQHSSTDG

SEQ ID NO: 1523 - protein, 223 aa, Carpediemonas membranifera
FARSTSPAAANSWLGSCGRHHPIATPIRLKVFYGSSGFTTPAGMFIPCAPYRKFAREIVPLLKGYNIVVDLNMVNEDRTTVVCPHCHAPYKRVRPRDDQHVHPHRVMLCEYPQCRGAQWRATVPDALNVDHRDKSAAENILWRSLATEDELSGSPFSRTSHVFKLHSSIINWLTANIRLRTDDVVQFGTLIVPFRPSLGGSNNVFYTAQHLQRDGLEYQQASC

SEQ ID NO: 1524 - protein, 306 aa, Carpediemonas membranifera
CRLPQRTAHSSTRRSAGSGLRGLRAVARHSADVAGDYHAGSGRAARRSCGVAWSESQSPEVVLPKCGYTKTPSFGFDMTAASFKSTRLVSINDSIRFVLDNANGIFEAGMRKSFRRVRFANHILRQKHFARCGQQLAREFGRHHPIATPIRLKVFYGSSGFTTPAGMFIPCAPYRKFAREIVPLLKRYNIVVDLNMVNEDCTTVVCPHCHAPYKRVRPRDDQHVHPHRVMLCENPQCRGAQWRATVPDALNVDHRDKSAAENILWRSLATEDELSGSPFSRTSIPRLQTSFQYHQLANRQHSSTDG

SEQ ID NO: 1525 - protein, 202 aa, Carpediemonas membranifera
RLSNSRLGLSMRTSFRSSTRGRESVSAVRVFANHCLRLKHFARAGRQLLDDLGGRPPEPNHLEVAYGAALFGSAGTPSCAPYRHFAQALPGIMLRHNVVVSVDMVSEFRTSIVCPYCKAHFRRVVHTHRTMLCQNPACEGAPWRVERLRRHPEQRDILLNLSHRDKSASENILWCTYDATSDQIEQSPFHYDSQRGALPRYH

SEQ ID NO: 1526 - protein, 534 aa, Carpediemonas membranifera
RKCSAAHALTPPRTVNLFDEEVLKQMVSIAKGRESKAKAADRCRWIGDLAMWRDPDITPLVEDFREAYVGIAAPFQSWLGEYSTATRVWLSHASPEYLTRLRAGLERVRPLLHDEGVRQDFLDTLGELDTEVDAIAADHGRYHHRMHALPEEQRVGHTDTVADALVGVLSCVTRMSAAVTKLVTLTRAVNLELSHALPEPKLVPFVPMAPVRPGFMTLERGVTALTPAMKRRLRVHVNWPANKNLTDEQVAEYERDHGDITKLRRVLSVAVAVWVGREKYSGGRVADRPTYKKGSNNKRARLGQDDAEATPAPHIQALMGFDPGARSLGGYTIRRPDGQSVSGVLAKCGYTATPSFRVNMSAASFKTTSLEALKQSIRFVHENIVQIINEGMRKCFRRASFANHCLRLKHFARAGHQLLDDLGGRPPEPIHLEVAYGAALFGSAGTPSCAPYRHFARALPGIMLRHNVVTVTMVSEFRTSIVCPYCKAHFRRVVHTHRTMLCQNPACEGAPWRVERLRRHPAAERHTSQSLSPR

SEQ ID NO: 1527 - protein, 256 aa, Carpediemonas membranifera
HRLPQRTAHSCTRRSSGSGLRGHRAVARHSADVETTLPYLSINNSIRFVLDNANDIFEAGMRKSFRRVRFANHILRQKHFARCGQQLAREFGRHHPIATPIRLKVFYGSSGFTTPAGMLIPCAISKVRERDSSPSQGHNLVVDLNMVNEDRTTVVCPHCHAPYKRVRPRDDQHVHPHRVMLCENQQCRGAQWRATVPDALNVDHRDKSAAENILWRSLATEDELSGSPFSRTLIPRLQTSFQYHQLANRQHSSTDG

SEQ ID NO: 1528 - protein, 224 aa, Carpediemonas membranifera
GVCVCAIEGSNNVFILRNTALSPSYSRLKSVGRSSSPGLPQSVFFEKNTEAPPAPDPDAHLMGFDPGARSIGGYYIRHPDGTTSSGVLPKCGYTKTPSFGFDMTAASFKSARRVSINNSIRFVLDNANDIFEAGMRKSFRRVRFANHILRQKHFARCGQQLAREFGWRRHHPTATPIRLKVFYGSSGFTAPADMFIPCAPYRKFAREIVPLLKGYITLSSILTW

SEQ ID NO: 1529 - protein, 221 aa, Carpediemonas membranifera
GCFGCAIEGSNNVFILRNTALSPSYSRLKSVGRSSSPGLPQSVFFENNAEAPPAPDPDAHLMGFDPGARSIGGYYIRHPDGTTSSGVLPKCGYTKTPSFGFDMTAASFKSARLVSINNSIRFVLDNANDIFEAGMRKSFRRVRFANHILRQKHFARCGQQLAREFGWRRHHPIATPIRLKVFYGSTKPADMFIPCAPYRKFAREIVPLLKGYITLSSILTW

SEQ ID NO: 1530 - protein, 223 aa, Carpediemonas membranifera
VCAIEGSNNVFTLRNTALSPSYSRLKSVGRSSSPGLPQSVFFVDVSTAANFTIAHTSSHHHPIATPIRLKVFYGSSGFTKPAGMFIPCASYRKFAREIVPLLKRYNIVVDLNMVNEDRTTVVCPHYHAPYKRVRPRDDQHVHPHRVMLCENPQCRGAQWRATVPDALNVDHRDKSAAENILWRSLATEDELSGSPFSRTSIPRLPTSFQHHQLANRQHSSADG

SEQ ID NO: 1531 - protein, 335 aa, Carpediemonas membranifera
AHDARAAGGSSSEHPSGAVCQDRWGRRGPHGPSWCSVIRQQTCQWQPDEEAKGSGASGCGWRGCSPRARPRCPPHGFDPGARALGGFFIRHPDGITSGVVPKCGYTKTPSFAFDMTPASFKSTNLDSLQNSVRFVLLHEQEIFDAGMVKSFRRVRLTNHILRQKHFHRAGEQLARTLGWTPRRLPRGIAPPRAAPTRLVVFYGSARFKTPRRVHPCAPYGRFAKSLAHIMRAFNITAEVRMTNEFRTSLVCPFCRARFRRTRFTRRTMPQPELSRCSMVQTATPQFRSYYIHLAQSLPQRQDCCTEHLGLRPHDGCTVSSQCSQKSKTSSPSSQL

SEQ ID NO: 1532 - protein, 226 aa, Carpediemonas membranifera
GIAPCAIEGSNNVFILRNTALSPSYSRLKSVGRSSSPGLPQSVFFVDVSTAANITIAHTSSHHHPIATPIRLKVFYGGSGFTKPAGMFIPCAPYRKFAREIVPLLKRYNIVVDLNMVNEDRTTVVCPHCHAPYKRVRPRDDQHVHPHRVMLCENPQCRGAQWRATVPDALNVDHRDKSAAENILWRSLATEDELSGSPFSRTLIPRLQTSFQYHQLANRQHSSMDG

SEQ ID NO: 1533 - protein, 285 aa, Carpediemonas membranifera
PAHVQKGSSNKRARLGQDDAEANPAPDIQALMGFDPGARSLGGYTIRRPDGQSVSGVLAKCGYTATPSFRVNMSAASFKTTSLEALKQSIRFVHENIVQIINEGTRKCFRHATFANHCLRQKHFARAGRKLLDDLGGRPPEPIHLEVAYGAALFGSAGTPSCAPYRHFARALPGIMLRHNVVVTVTMVSEFRTSIVCPYCKAHFRRVVHTPRTMLCQNPACEGAPWRVERLRRHPEQRDILLNLSHRDKSASENILWCTYDATSDQIEQSPFHYDSQRGALPHYH

SEQ ID NO: 1534 - protein, 251 aa, Carpediemonas membranifera
VHIHLPACVRLCICARVDPTEDGQPVATPSFRVNMSAASFKTTSLEALKQSIRFVHENIVQIINEGTRKCFRRATFANHCLRQKHFARAGRQLLDDLGGRPPEPIHLEVAYGAALFGSAGTPSCAPYRHFARALPGIMLRHNVVVTVTMVSEFRTSIVCPYCKAHFRRVVHTHRTMLCQNPACEGAPWRVERLRRHPEQRDILLNLSHRDKSASENILWCTYDATSDQTEQSPFHYDYDEVLFLAIINLPS

SEQ ID NO: 1535 - protein, 200 aa, Carpediemonas membranifera
SCAAQLECVSLSAECALRTTSFARSTSPAAANRLGSSVGVATPIRLKVFYGSSGFTTPAGMFIPCAPYRKFAREIVPLLKRYNIVVDLNMVNEDRTIVVCPHCHAPYKRVRPRDDQHVHPHRVMLCENPQCRGAQWRATVPDALNVDHRDKSAAENILWRSLASEDELSGSPFSRTSIPRLPTSFQYHQLANRQHSSTDG

SEQ ID NO: 1536 - protein, 247 aa, Carpediemonas membranifera
VHIHLPACVRLCICARVDPTEDGQPVATPSFRVNMSAASFKMTSLEALKQSIRFVHENIVQIINEGTRKCFRRASFANHCLRLKHFARAGRQLLDDLGGRPPEPIHLEVAYGAALFGSAGTPSCAPYRHFARALPSIMLRHKVVVSVTMVSEFRTSIMCPYCKAHFRRVVHTHRTMLCLNPACEGAPWRVERLRRHPEQRDILLNRSHRDKSASENILWCTFDATPDQIGLSPFHYGTQRGALPRYH

SEQ ID NO: 1537 - protein, 218 aa, Carpediemonas membranifera
PSEDGRDRDPEASVSVCTRRLIVFYSTLNSLLHLYSSPEALRPLRPTLGSGVRSPPSHRHPHSPESLLRELGIHHACWYVHSLCAISKVRERDSTLLKRYNIVVDLNMVNEDRTTAVCPHCHAPYKRVRPRDDQHVHPHRVMLCENPQCRGAQWRATVPDALNVDHRDKSAAENILWRSLATEDELSGSPFSRTSIPRLQTSFQYHQLANRQHSSTDG

SEQ ID NO: 1538 - protein, 364 aa, Chlorops oryzae
VTCKTQRSFGSTYIYFIICSGTMRQKKIKNFALIPQMRHGLHHIRYDSLAMYSMLCKLKLFKGAFATFKRDDEFPKYFRMPTSGIKKISSIMTDGVSVSFVMDKIVKTPAPVAPKKKKPTSLEFSGNIEEMRQTKYEHTLGLDPGCRLIFGGVRDGEPIKIKNTRYQHLAGLYSNKRKLDRYTKSFEETTQLSANDGNYREYIAYQLQILVKKQSVFEQRKVARLRLKRYMLRQKACNNIAEMLVPNPNEKTLVCIGSTEMAANSPIRGYVRTPNKKLIEALRNRKAHILMVNEFRTTKLCAKCFAPNKTSLSPHRYQFCPNCRTCWNRDVNAGKNILYLGQCLIHSQEKHKNFKKSTILNIPP

SEQ ID NO: 1539 - protein, 252 aa, Chlorops oryzae
LQKKKKPTSLEFSGNIEEMRQTKYEHTLGLDPGCRLIFGGVRDGEPIKIKNTRYQHLAGLYSNKRKLDRYTKSFEETTQLSANDGNYREYIAYQLQILVKKQSVFEQRKVARLRLKRYMLRQKACNNIAEMLVPNPNEKTLVCIGSTEMAANSPIRGYVRTPNKKLIEALRNRKAHILMVNEFRTTKLCAKCFAPNKTSLSPHRYQFCPNCRTCWNRDVNAGKNILYLGLCLIHSKEKHKNFKKSTILNIPP

SEQ ID NO: 1540 - protein, 548 aa, Chlorops oryzae
RKMGGKRQAADSDKRVMQVVKGALHSRCLNNAVFERIQLDVKEMSCLFVEVSRYIHFALMKRWENGNFVPVRFLDFYYHLMTKKMKKYVIDEEYSRLRGDIPLYDSGSRSNIFVENSNRYETIFHNNIWMHAYSRLRRYFKFETDRSKVYNTLDYLFVKDSTKNPCEHLLTRLREDLKWTGENLSDLQNSKKFWKHLYLFYNLQRYNEAKKIKNFALIPQMRHGLHHIRYDSLAMYSMLCKLKLFKGKFETFKKDDEFPKYFRMPTSGIKKISSIMTDGVSVSFVMDKIVKTPAPVAPKKKKPTSLEFSGNIEEMRQTKYEHTLGLDPGCRLIFGGVRDGEPIKIKNTRYQHLAGLYSNKRKLDRYTKSFEETTQLSANDGNYREYIAYQLQILVKKQSVFEQRKVARLRLKRYMLRQKACNNIAEMLVPNPNEKTLVCIGSTEMAENSPIRGYVRTPNKKLIEALRNRKAHILMVNEFRTTKLCAKCFAPNKTSLSPHRYQFCPNCRTCWNRDVNAGKNILYLGQCLIDSQEKHKNFKKSTILNIPP

SEQ ID NO: 1541 - protein, 256 aa, Chlorops oryzae
TPAPVAPKKKKQTSLEFSGNIEEIRQTKYEHTLGLDPGCRLIFGGVRDGEPIKIKITRYQHLAGLYPNKRKLDRYTKSFEETTQLSANDGNYREYIAYQLQILLKKQSVFEQRKVARLRLKRYMLRQKACNNIAKMLVPNPNKKTLVCIGSTEMAANSPIRGYVRTLNKQLIEALRNRKAHILMVNEFRTTKLCPNKTSLSPHRYQFCPNCRTCWNRDVNAGKNILYLGLCLIHNKEKHKNFKKSTILNIPPNNNK

SEQ ID NO: 1542 - protein, 221 aa, Chlorops oryzae
IAYQLQILLKKQSVFEQRKVARLRLKRYMLRQKACNNIAKMLVPNPNEKTLVCIGSTEMAANSPIRGYVRTLNKQLIEALRNRKAHILMVNEFRTTKLCPQQNIPVTSQVPILSKLPYLLEQGCKSSKSDKVVCFYTRHTLCRGYIAFVGLCVTPRTSRYRPYKMYIEMISVTRRFDLDMCVRLSVCPSVCLSVCLYTVILSKELSYLGIKIWYACSRGHE

SEQ ID NO: 1543 - protein, 252 aa, Chlorops oryzae
LQKRKKQTSLKFSGNIEEIRQTKYEHTLGLDPGCRLIFGGVRDGEPIKIKNTCYQHLAGLYSNKRKLDRYTKSFEETTQLSANDGNYREYIAYQQQILLEKQSVFEQRKVARLRLKRYMLRQKACNNIAEMLVPNPNEKTLVCIGSTEMAANSPIRGYVRTPNKKLIEALRNRKAHILIVNEFRITKLCAKCFAPNKTSLSPHRYQFCPNCRTWWNRDVNAGKNILYLGLCLIHNKEKHNNFKKSTILNIPP

SEQ ID NO: 1544 - protein, 494 aa, Dreissena polymorpha
VYKQTHLFPAFYCTAMKRKREHFTLWDAANVHKHKSMWYWWAYIRRKDMVNHEKTDCDVIQLLQSASVKKQKTQSDKFLTSFSVGLRPTKHQKQVLNEMLRVSNYTYNWCLWLVNEKGLKPHLFELQKVVCKTNASDVDPYYRMENDDWFFNNKMSTIKLTSCKNFCTSYKSAKSLKSKLKRPMSVSNIIQGSFCVQKLFIRRLSDKDVSIDNTQMQNRYICMMPDNFEKRSNPKKRFLKLAKSITKIPPIDHDVKIVKRADGMFIMNIPCDPKYTRRNASNDTIEKRVCGIDPGGRTFATVYDPIDCCVFQVGIKEDKQYVISKLHNKIDHAHMHLTKAQNKKQQQAAQERIVSLKKTHLKLKTFVDDIHLKLSSHLVKEYQYVALGKINVAPLVKKKHLSKRAKRDLLYWQHYRFRQRLTHRTTNTECILDVQNEAYTSKTCGVCGTINKNLEKSETFYCDNCKYNTHRDVNGARNILLKSLRMFPFVNSQL

SEQ ID NO: 1545 - protein, 515 aa, Dreissena polymorpha
VGIRFHSYRSDIRLLQIFVYKQTNYCVALYCTAMKRKREDLTLWDAANVHKHKSMWYWWEYIRRKDLINHEKTDCDVIQLLQSASVKKQKTHSDDFLTSFSVGIRPTKHQKQVLNEMLRVSNYTYNWCLWLVNEKGIRPHQFELQKIVCKTNAGDVDPQYRMENDDWFFNNKMTSVKTTSCKNFFTSYKSAKSLKSKLKRPMPVSNIVQGSFCVRKVLLRHLSNKDVSTDNTNMLNRYICMIPDNFGKRSKPKERFLKLAKPITKIPPIDHDVKIVKRADGMFIMNIPCDLKYTRRNASNDTIDKRVCGIDPGGRTFATVYDPIDCSVFQVGIKEDKQYVIRKLHNKIDHAHMHLTKAQNKKQQQAARERIVSLKKTHLKLKTFVDDIHLKLSSHLVKEYQYVALGKINVAQLVKTDRPKPLSKRAKRDLLSWQHYRFRQRLTHRTTNTDCILEVQNEANTSKTCGVCGEKDDNLGKSETYYCIKCEYNTHRDVNGARNILLKSLHMFPFEKKQQ

SEQ ID NO: 1546 - protein, 515 aa, Dreissena polymorpha
VGIRFHSYRSDIRLLQIFVYKQTNYCVALYCTAMKRKREDLTLWDAANVHKHKSMWYWWEYIRRKDLINHEKTDCDVIQLLQSASVKKQKTHSDDFLTSFSVGIRPTKHQKQVLNEMLRVSNYTYNWCLWLVNEKGIRPHQFELQKIVCKTNASDVDPQYRMENDDWFFNNKMTSVKTTSCKNFFTSYKSAKSLKSKLKRPMPVSNIVQGSFCVRKVLLRHLSNKDVSTDNTNMLNRYICMIPDNFGKRSKPKERFLKLAKPITKIPPIDHDVKIVKRADGMFIMNIPCDLKYTRRNASNDTIDKRVCGIDPGGRTFATVYDPIDCSVFQVGIKEDKQYVIRKLHNKIDHAHMHLTKAQNKKQQQAARERIVSLKKTHLKLKTFVDDIHLKLSSHLVKEYQYVALGKINVAQLVKTDRPKPLSKRAKRDLLSWQHYRFRQRLTHRTTNTDCILEVQNEANTSKTCGVCGEKDDNLGKSETYYCIKCEYNTHRDVNGARNILLKSLHMFPFEKKQQ

SEQ ID NO: 1547 - protein, 202 aa, Dreissena polymorpha
ILVVERLLQCMTQSIVTFFQVGIEEDKQYVISKLHNKIDHAHMHLTKAQNKKQQQAACERIVSLKKTHLKLKTFVEDIHLKLSSHLVKEYQYVALGKINVASMVKKKHLSQRAKRDLLYWQHYRFRQRLIHRTTNTECILLVQDKAYTSKTCGVCGKINKNLQKSETFYCDQCKYNTHRDVNGARNILLKSLRMFPFENQQQ

SEQ ID NO: 1548 - protein, 496 aa, Dreissena polymorpha
VYKQTHLFPAFYCTAMKRKREHFTLWDAANVHKHKSMWYWWAYIRRKDMVNHEKTDCDVIQLLQSASVKKQKTQSDKFLTSFSVGLRPTKHQKQVLNEMLRVSNYTYNWCLWLVNEKGLKPHLFELQKVVCKTNASDVDPYYRMENDNWFFNNKMSTIKLTSCKKICTSNKSAKSLKSKLKRPMSVSNIIQGSFCVQKLFIRRLSDKDVSIDNTQMQNRYICMMPDNFEKRSNPKERFLKLAKPITKIPPIDHDVKIVKRADGMFIMNIPCDPKYTRRNASNDTIEKRVCGIDPGGRTFATVYDPIDCCVFQVGIKEDKQYVISKLHNKIDHAHMHLTKAQNKKQQQAARERIVSLKKTHLKLKTFVDDIHLKLSSHLVKEYQYVALGKINVAQLVKTDRPKPLSPRAKRDLLYWQHYRFRQRLTHRTTNTECILDVQNEAYTSKTCGVCGTINKNLEKSETFYCDNCKYNTHRDVNGARNILLKSLRMFPFVNSQ

SEQ ID NO: 1549 - protein, 493 aa, Dreissena polymorpha
VYKQTHLFPAFYCTAMKRKREHFTLWDAANVHKHKSMWYWWAYIRRKDMVNHEKTDCDVIQLLQSASVKKQKTQSDKFLTSFSVGLRPIKHQKQVLNEMLRVSNYTYNWCLWLVNEKGLKPHLFELQKVVCKTNASDVDPYYRMENDDWFFNNKMSTIKLTSCKNFCTSYKSAKSLKSKLKRPMSVSNIIQGSFCVQKLFIRRLSDKDVSIDNTQMQNRYICMMPDNFEKRSNPKERFLKLAQPITKIPPIDHDVKIVKRADGMFIMNIPCDPKYTRRNASNDTIEKRVCGIDPGGRTFATVYDPIDCCVFQVGIKEDKQYVISKLHNKIDHAHMHLTKAQNKKQQQAARERIVSLKKTHLKLKTFVEDIHLKLSSHLVKEYQYIALGKINVAPLVKKKHLSKRAKRDLLYWQHYRFRQRLTHRTTNTECILDVQNEAYTSKTCGVCGTINKNLEKSETFYCDNCKYNTHRDVNGARNILLKSLRMFPFVNSQ

SEQ ID NO: 1550 - protein, 496 aa, Dreissena polymorpha
VYKQTHLFPAFYCTAMKRKREHFTLWDAANVHKHKSMWYWWAYIRRKDMVNHEKTDCDVIQLLQSASVKKQKTQSDKFLTSFSVGLRPTKHQKQVLNEMLRVSNYTYNWCLWLVNEKGLKPHLFELQKVVCKTNASDVDPYYRMENDNWFFNNKMSTIKLTSCKNFCTSYKSAKSLKSKLKRPMSVSNIIQGSFCVQKLFIRRLSDKDVSIDNTQTQNRYICMMPDNFEKRSNPKERFLKLAKPITKIPPIDHDVKIVKRADGMFIMNIPCDPKYTRRNASNDTIEKRVCGIDPGGRTFATVYDPIDCCVFQVGIKEDKQYVISKLHNKIDHAHMHLTKAQNKKQQQAARERIVSLKKTHLKLKTFVDDIHLKLSSHLVKEYEYVALGKINVAQLVKTDRPKPLSPRAKRDLLYWQHYRFRQRLTHRTTNTECILDVQNEAYTSKTCGVCGTINKNLEKSETFYCDNCKYNTHRDVNGARNILLKSLRMFPFVNSQ

SEQ ID NO: 1551 - protein, 492 aa, Dreissena polymorpha
VYKQTHFLPAFYCTAMKRKRENFTLWDAANVHKHKSMWYWWEHIRRKDMVNHEKTDCDVIQLLQSASVKKQKTQSDKFLTSFSVGIRPTKHQKRVLNEMLRVSNYTYNWCLWLVDEKGQRPHLFELQKIVCKTTANDVDPYYRMENDDWFFNNKMSNIKLTSCKNFCTSYKSAKSLKSKLIRPMSVSNIIQGSFCVQKVLLRHLSDKDVSTDNMLNRYICMMPDNFEKRSKPKERFLKLAKPITKIPPIDHDVKIVKRADGMFIMNIPCDPKYTRRNASNDTIDKRVCGIDPGGRTFATVYDPIDCNVFQVGIEEDKQYVISKLHNKIDHAHMHLTKAQNKKQQQAARERIVSLKKVHLKLKTFVEDIHLKLSSHLVKEYQYIALGKINVAPMVKKKHLSKRAKRDLLYWQHYRFRQRLTHRATNTECILEVQNEAYTSKTCGVCGEINENLEKSKTFYCDQCKYNTHRDVNGARNILLKSFRMFPFEKQQQ

SEQ ID NO: 1552 - protein, 306 aa, Dreissena polymorpha
GSFCVPKLFIRNLSSKDVSIDNINMLNRYICMIPENFEKRSKPKERFLKLAKPITKIPPFDHDVKIVKRADGMFILNIPCDPKYTRRNASNDTIDKRVCGIDPGGRTFATVYDPIDCSVFQVGIEEDKQYVISKLHNKIYHAHKHLTKAQNKKQQQAASERIVSLKKTHLKLKTFVDDIHLKLSSHLVKEYEYVALGKINVAQLVKTDRPKPLSPRAKRDLLYWQHYRFRQRLTHRTTNTECILDVQNEAYTSKTCGVCGTINKNLEKSETFFCDQCKYNTHRDVNGARNILLKSLRMFPFEKQQQ

SEQ ID NO: 1553 - protein, 238 aa, Dreissena polymorpha
IVKRADGTFIMKIRCDPKYTRRKASNDMIEKRVCGIDPGGRTFATVYDPIDCSVFQVGIEEDKQYVISKLHNKIDHVHMHLTKAQNKKQQQAARERIVSLKKTHLKLKTFVDDIHLKLSSHLVKEYQYVALGKINVAPMVKKKHLSKRAKRDLLYWQHYRFRQRLTNRTTNTECILDVHNEAYTSKTCGVFSTINENLKKRETFYCDNCKYNTHRDVNGARNILLKSLRMFPFEKQQQ

SEQ ID NO: 1554 - protein, 261 aa, Dreissena polymorpha
RTILKLAKSITKIPPIDHDVKIVKRADGMFIMNIPCDPKYTRRNASNDTIEKRVCGIDPGGRTFATVYDPIDCCVFQVGIKEDKQYVISKLHNKIDHAHMHLTKAQNKKQQQAARERIVSLKKTHLKLKTFVDDIHLKLSSHLVKEYEYVALGKINVAQLVKTDRPKPLSPRAKRDLLYWQHYRFRQRLTHRTTNTECILDVQNEAYTSKTCGVCGTINKNLEKSETFYCDNCKYNTHRDVNGARNILLKSLRMFPFVNSQ

SEQ ID NO: 1555 - protein, 496 aa, Dreissena polymorpha
VYKQTHLFPAFYCTAMKRKREHFTLWDAANVHKHKSMWYWWAYIRRKDMVNHEKTDCDVIQLLQSASVKKQKTQSDKFLTSFSVGLRPTKHQKQVLNEMLRVSNYTYNWCLWLVNEKGLKPHLFEIQKVVCKTNASDVDPYYRMENDDWFFNNKMSTIKLTSCKNFCTSYKSAKSLKSKLKRPMSVSNIIQGSFCVQKLFIRRLSDKDVSIDNTQMQNRYICMMPDNFEKRSNPKERFLKLAKSITKIPPIDHDVKIVKRADGMFIMNIPCDPKYTRRNASNDTIEKRVCGIDPGGRTFATVYDPIDCCVFQVGIKEDKQYVISKLHNKIDHAHMHLTKAQNKKQQQAARERIVSLKKTHLKLKTFVDDIHLKLSSHLVKEYEYVALGKINVAQLVKTDRPKPLSPRAKRDLLYWQHYRFRQRLTHRTTNTECILDVQNEAYTSKTCGVCGTINKNLEKSETFYCDNCKYNTHRDVNGARNILLKSLRMFPFVNSQ

SEQ ID NO: 1556 - protein, 317 aa, Dreissena polymorpha
SDQCLYQISFRDRFVFKKCYSDIFQAKSLKDVSTDNMLNRYLCMMPDDFEKRSNPKERFLKLAKPITKIPPIEHDVTIVKRADGMFILNIPCDPKYTRRNASNDTIDKRVCGIDPGGRTFATVYVPFDCSVFQVGIEEDKQYVISKLHNKIDHAHMHLTKAQNKKQPQAAHERIVSLKKTHLKLKAFVDDIHLKLSSHLVKEYQYVALGKINVAQLVKTDRPKPLSPRAKRDLLYWQHYRFRQRLTHRTMNTECILDVQNEANTSRTCGLCGTINKNLEKSETFNCDQCNYNTHRDVNGARNILLKSLRMFPFVNSQ

SEQ ID NO: 1557 - protein, 481 aa, Vermamoeba vermiformis
KSQIKLNNQGASIKGSVVRRLCWKIIYNVCWNRDFDFDPPESIKDIFDRVHDDFIGFYGEFQQDEYGLRKDEAIRYIYHLMVNMKGNHSMKLIPQSSFTVKSITIDKEVCNSIKSAIERRKRKYIKQKLKKKKKKIKKKKKEIKKKKKEIKKKKKEKLDKNDLFKSIFVVDEPKNCKLTLIRSNGVDIDFVFERVDSQRKRKFEKIDDSDRPLKRLKNNTNVMVNNTNDGQDVNNTNVMVNDERITGVDLGRKDLFVSISHPNKAQCVVKKWSNGQYQFESGLAIWNSQLKRWKRKDRGIRIFEADLSDDTAIQSIISAQSKKHLHYVFEKLWIVTKFYFKRQHRRRLFWLYNCRQKALNKLCRVMAADSDIVAIGDPKFSASSRGYAPAPTVAVVKELQRLCPRKVVLIDEYNTSKLCSLCYSPLKQTKTEGRVNWRVQRCNNCGVYWNRDVNAARNMRALYVYQRDNNGARIPAFERPE

SEQ ID NO: 1558 - protein, 648 aa, Vermamoeba vermiformis
IRTVKKCLLSSLMGSKWQKHFVRKWISDQAEAHSQMLILASRFLWFHFARLIEKKKELPQNIDQQYIMNVFRHVSKSSKPSQRDNKIDDDLLQETATILNLNTEKFPVRVSQISKYHANQFITNIENHLKHNTIHHYTLKYLMWTLKESIKLNNQGASIKGSVVCRLCWKIIYNVCWNRDFDFDPPESIKDIFDRVHDDFIGFYGEFQQDEYGLRKDEAIRYIYHLMVNMKGNHSMKLIPQSSFTVKSITIDKEVCNSIKLAVERRKRKYTKQKLKKKKKKIKKKKKEIKKKKKEIKKKKKEKLDKNDLFKSIFVVDEPKNCKLTLIRSNGVDIDFVFERVDSQRKRKFEKIDDSDRPLKRLKNNTNVMVNNTNVRVNNTNVMVNNTNVMVNNTNVMVNNTNVRVNNTNVMVNERITGVDLGRKDLFVSISHPNKAQCVVKKWSNGQYQFESGLAIWNSQLKWWKRKDRGIRIFEADLSDDTAIQSIISVQSKKHLHYVFEKLWIVTKFYFKRQHRRRLFWLYNRRQKALNKLCRVMAADSDIVAIGDPKFSASSRGYAPAPTVAVVKELQRLCPRKVVLIDEYNTSKLCSLCYSPLKQTKTEGRVNWRVQRCNNCGGVLEPRRQRCTKHACVVRLSARQQWRANSCL

SEQ ID NO: 1559 - protein, 295 aa, Vermamoeba vermiformis
TKTEEKEEENQEKEEGNQEKRRRKSRKRRRKSWIKNDLFKSIFIVDEPKNCKLTLIRSNGVDIDFVFERVDSQHKRKFEKIDDSDRPLKRLKNNTNVIVNNTNVMVNNTNVMVNNTNVRVNNTNVMVNERITGVDLGRKDLFVSISHPNKAQCVVKEWSNGQYQFESGLAIWNSQLKRWKRKDRGIRIFEADLSDDTAIQSIISEQSKKHLHYVFEKLWIVTKFYFKRRHCRRLFWLYNRRQKALNKLCRVMAADSDIIAVGDPKSSTRHHEAMLLHQPSLSLRSCSVSALERWC

SEQ ID NO: 1560 - protein, 287 aa, Vermamoeba vermiformis
HDDSDRPLKRLKNNTNVMVNNTNVMVNNTNMMVNNTNVRVNNTNMMVNERITGVDLGRKDLFVSISHPNKAQCVVKEWSNGQYQFESGLAIWNSQLKRWKRKDRGIRIFEADLSDDTAIQSIISEQSKKHLHYVFEKLWIVTKFYFKRRHRRHLFWLYNRRQKALNKLCRVMAANSDIVAIGDPKFSPSSQGYAPAPTVAVVKALQDKYPRKVVLIDEYNTSKLCSGCLTHLEFTKTEGRVNWRVQRCNNCGVYWNRDVNAARNMRALYVYQRDNNGARIPAFERPE

SEQ ID NO: 1561 - protein, 478 aa, Vermamoeba vermiformis
LCWKIIYNVCWNRDFDFDPPESIKDIYDRVHDDFIGFYGEFQQDEYGLRKDEAIRYIYHLMVNMKGNHSMKLIPQSSFTVKSITIDKEVCNSIKSAVERRKRKYIKQKLKKKKKEIKKKKKEIKKKKKEIKKKKKEIKKKKKEIKKKKEKLDKNDLFKSIFIVDEPKNCKLTLIRSNGVDIDFVFECVDSQRKRKFEKIDDSDRPLKRLKNNTNVMVNNTNVMVNNTNVMVNNTNVMVNERITGVDLGRKDLFVSISHPNKAQCVVKEWSNGQYQFESGLAIWNSQLKRWKRKDRGICIFEADLSDATAIQSIISEQSKKHLHYVFERLWIVTKFYFKRRHCRHLFWLYNCRQKALNKLCRVMAANSDIVAIGDPKFSASSRGYAPAPTVAVVKELQHLCPRKVVLIDEYNTSKLCSLCYSPLKQTKTEGRVNWRVQRCNSCGVYWNRDVNAARNMRALYVYQRDNNGARIPAFERPE

SEQ ID NO: 1562 - protein, 362 aa, Vermamoeba vermiformis
KEEKRKYIKQKLKKKKKEIKKKEKGNQEKRRRKSWIKNDLFKSIFIVDEPKNCKLTLIRSNGVDIDFVFERVDSQRKRKFEKIDDSDRPLKRLKNNTNVMVNNTNVMVNNTNMMVNNTNVMVNERITGVDLGRKDLFVSISHPNKAQCVVKEWSNGQYQFESGLAIWNSQLKRWKRKDRGIRIFEADLSDDTAIQSIISEQSMKHLHYVFEKLWIVTKFYFKRRHRRHLFWLYNRRQKALNKLCHVMAANSDIVAIGDPKFSASSRGYAPAPTVAVVKELQRLCPRKVVLIDEYNTSKLCSLCYSPLKQTKTEGRVNWRVLRCNNCGVYWNRDVNAARNMRALYVYQRDNNGARIPAFERPE

SEQ ID NO: 1563 - protein, 565 aa, Vermamoeba vermiformis
IRTVKKCLFSSLTGSKWQKHFVRNWISDQAEAHSQMLILASRFLWFHFARLIEKKKELPQNIDQQYIMNVFRHVSKSSKPGQQDKIDDDLLQETAEILNLNTEKFPVRVSLISKYHANQFIINIENHLKHNTIHHYTLKYLMWTLKESIKLNNQGASIKGRVVRQLCWKIIYNVCWNRDFDFDPPESIKDIFDRVHDDFIGFYGEFQQDEYGLRKDEAIRYIYHLMVNMKGNHSMKLIPQSSFTVKSITIDKEVCNSIKSAVERRKRKYIKQKLKKKKKKIKKKKKEIKKKKKEIKKKKKEKLDKNDLFKSIFIVDEPKNCKLTLIRSNGVDIDFVFERVDSQRKRKFEKIDDSDRPLKRLKNNTNVMVNNTMKVNNTNVMVNNTNVMVNNTNVMVNNTNVRVNNTNVMVNERITGVDLGRKDLFVSISHPNKAQCVVKKWSNGQYQFESGLAIWNSQLKWWKRKDRGIRIFEADLSDDTAIQSIISAQSKKHLHYVFEKLWIVTKFYFKRQHRRRLFWLYNRRQKALNKLCRVMAADSDIVAIGRSKVQRVITRLCSCTNCCCC

SEQ ID NO: 1564 - protein, 353 aa, Vermamoeba vermiformis
RKRRRRRRNQEKRRRGKSWIKSDVFKSIFIVDEPKNCKLTLIRSNGVDIDFMFERVDSQRKRKFEKIDDSDRPLKRLKNNTNVIVNNTNVMVNNTNVMVNNTNVRVNNTNVMVNERITGVDLGRKDLFVSISHPNKAQCVVKEWSNGQYQFESGLAIWNSQLKRWKRKDRGICIFEADLSDATAIQSIISEQSKKHLHYVFEKLWIVTKFYFKRRHRRHLFWLYNRRQKALNKLCRVMAANSDIVAIGDPKFSASSRGYAPAPTVAVVKALQDKYPRKVVLIDEYNTSKLCSDCLTHLEFTKTEGRVNWRVQRCNNCGVYWNRDVNAARNMRALYVYQRDNNGARIPAFERPE

SEQ ID NO: 1565 - protein, 267 aa, Vermamoeba vermiformis
AIERLKNNTNVMVNNTNVRVNNTNMMVNERITGVDLGHKDLFVSISHPNKAQCVVKEWSNGQYQFESGLAIWNSQLKRWKRKDRGIRIFEADLSDDTAIQSIISEQSMKHLHYVFEKLWIVTKFYFKRRHRRHLFWLYNRRQKALNKLCRVMAANSDIVTIGDPKFSASSRGYAPAPTVAVVKELQRLCPRKVVLIDEYNTSKLCSGCLTHLEFTKTEGRVNWRVQRCNNCGVYWNRDVNAARNMRALYVYQRDNNGARIPAFERPE

SEQ ID NO: 1566 - protein, 264 aa, Vermamoeba vermiformis
SLQFNRGIFFTLLKVRPNNTNVMVNERITGVDLGRKDLFVSISHPNKAQCVVKEWSNGQYQFESGLAIWNSQLKRWKRKDRGICIFEADLSDDTAIQSIISAQSKKHLHYVFEKLWIVTKFYFKRQHHRHLFWLYNRRQKALNKLCRVMAANSDIVAIGDPKFNASSRGYAPAPTVAVVKELQRLCPRKVVLIDEYNTSKLCSLCYSPLKQTKTEGRVNWRVQRCNNCGVYWNRDVNAARNMRALYVYQRDNNGARIPAFERPE

SEQ ID NO: 1567 - protein, 298 aa, Vermamoeba vermiformis
FDPMELTLTLCSKRVDSQRKRKFEKIDDSDRPLKRLKNNTNVMVNNTNVRVNNTNVMVNERITGVDLGRKDLFVSISHPNKAQCVVKEWSNGQYQFESGLAIWNSQLKWWKRKDRGIRIFEADLSDDTAIQSIISAQSKKHLHYVFEKLWIVTKFYFKRRHRRHLFWLYNRRQKALNKLCRVMAADSDIVAIGDPKFSASSRGYAPAPTVAVVKELQRLCPRKVVLIDEYNTSKLCSLCYSPLKQTKTEGRVNWRVQRCNNCGVYWNRDVNAARNMRALYVYQRDNNGARIPAFERPE

SEQ ID NO: 1568 - protein, 555 aa, Vermamoeba vermiformis
FITGDSNNIEFKHRKVSSSVSQISKYHANQFITNIENHLKHNTIHHYTLKYLMWTLKESIKLNNQGASIKGSVVRRLCWKIIYNVCWNRDFDFDPPESIKDIFDRVHDDFIGFYGEFQQDEYGLRKDEAIRYIYHLMVNMKGNHSMKLIPQSSFTVKSITIDKEVCNSIKSAIERRKRKYIKQKLKKKKKKIKKKKKEIKKKKKEKLDKNDLFKSIFVVDEPKNCKLTLIRSNGVDIDFVFERVDSQRKRKFEKIDDSDRPLKRLKNNTNVMVNNTNVRVNNTNVMVNNTNVMVNNTNVMVNNTNVRVNNTNVMVNERITGVDLGCKDLFVSISHPNKAQCVVKKWSNGQYQFESGLAIWNSQLKWWKRKDRGIRIFEADLSDDTAIQSIISAQSKKHLHYVFEKLWIVTKFYFKRRHRRRLFWLYNCRQKALNKLCRVMAANSDIVAIGDPKFSASSRGYAPAPTVAVVKELQRLCPRKVVLIDEYNTSKLCSLCYSPLKQTKTEGRVNWRVQRCNNCGVYWNRDVNAARNMRALYVYQRDNNGARIPAFERPE

SEQ ID NO: 1569 - protein, 695 aa, Vermamoeba vermiformis
TDLKKLDSKNQMGSQDVKSKFIYFIHYYLSNYFYYFLLIQKLQIKTVKKCLLSSLMGSKWQKHFVRKWISDQAEAHSQMLILASRFLWFHFARLIEKKKALPQNIDQQYIMNVFRHVSKSSKPGQRDNKIDDDLLQETAEILNLNAEKFPVRVSQISKYHANQFITNIENHLKHNTIHHYTLKYLMWTLKESIKLNNQGATINNSVVRRLCWKIIYNVCWNRDFDFDPPESIKDIFDRVHDDFIGFYGEFQQDEYGLRKDEAIRYIYHLMVSMKGNHSMKLIPQSSFTVKSITIDKKVCNSIKSAVERRKRKYIKQKLKKKKKKIKKKEEGNQEKRRRKSRKKKKEIKKKKEKLDKNDLFKSIFVVDEPKNCKLTLIRSNGVDIDFVFERVDSQRKRKFEKVDDSDRPLKRLKNNTNVMVNNTNVMVNNTNVMVNNTNVRVNNTNVMVNNTNVMVNERITGVDLGRKDLFVSISHPNKAQCVVKEWSNGQYQFESGLAIWNSQLKWWKRKDRGIRIFEADLSDDTAIQSIISEQSKKHLHYVFEKLWIVTKFYFKRRHRRHLFWLYNRRQKALNKLCRVMAADSDIIAVGDPKFNASSRGYAPAPTVAVVKELQRLCPRKVVLIDENNTSKLCSGCLTHLEFTKTEGRVNWRVQRCNNCGVYWNRDVNAARNMRALYVYQRDNNGARIPAFERPE

SEQ ID NO: 1570 - protein, 353 aa, Vermamoeba vermiformis
TKTEEKRRRKSRKKKKEIKKKKKEIKKKKKEKLDKNDLFKSIFIVDEPKNCKLTLIRSNGVDIDFVFERVDSQHKRKFEKIDDSDRPLKRLKNNTNVMVNNTNVRVNNTNVMVNERITGVDLGRKDLFVSISHPNKAQCVVKEWSNGQYQFESGLAIWNSQLKRWKRKDRGICIFEADLSDDTAIQSIISEQSKKHLHYVFEKLWIVTKFYFKRRHRRHLFWLYNRRQKALNKLCRVMAADSDIIAVGDPKFNASSRGYAPAPTVAVVKELQRLCPRKVVLIDENNTSKLCSGCLTHLEFTKTEGRVNWRVQRCNNCGVYWNRDVNAARNMRALYVYQRDNNGARIPAFERPE

SEQ ID NO: 1571 - protein, 645 aa, Vermamoeba vermiformis
IRTVKKCLFSSLMGSKWQKHFVRNWISDQAEAHSQMLILASRFLWFHFARLIEKKKALPQNIDQQYIMNVFRHVSKSSKPGQQDNKIDDDLLQETATILNLNAEKFPVRVSQISKYHANQFITNIENHLKHNTIHHYTLKYLMWTLKESIKLNNQGASIKGRVVRRLCWKIINNVCWNRDFDFDPPESIKDIFDRVHDDFIGFYGEFQQDEYGLRKDEAIRYIYHLMVNMKGNHSMKLIPQSSFTVKSITIDKEVCNSIKSAVERRKRKYIKQKLKKKKKKIKKKKKEIKKKKKEKLDKNDLFKSIFIVDEPKNCKLTLIRSNGVDIDFVFERVDSQRKRKFEKIDDSDRPLKRLKNNTNVMVNNTNVRVNNTNVMVNNTNVMVNNTNVMVNNTNVRVNNTNVMVNERITGVDLGRKDLFVSISHPNKAQCVVKEWSNGQYQFESGLAIWNSQLKQWKRKDRGICIFEADLSDDTAIQSIISEQSKKHLHYVFEKLWIVTKFYFKRRHRRHLFWLYNRRQKALNKLCRVMAADSDIIAVGDPKFNASSRGYAPAPTIAVVKELQRLCPRKVVLIDENNTSKLCSDCLTHLEFTKTEGRVNWRVQRCNNCGVYWNRDVNAARNMRALYVYQRDNNGARIPAFERPE

SEQ ID NO: 1572 - protein, 363 aa, Vermamoeba vermiformis
RKKKKKIKKKEEGNQEKRRRKSRKRRKSWIKNDLFKSIFIVDEPKNCKLTLIRSNGVDIDFVFERVDSQRKRKFEKIDDSDRPLKRLKNNTNVMVNNTNVMVNNTNVMVNNTNVMVNNTNVMVNERITGVDLGRKDLFVSISHPNKAQCVVKEWSNGQYQFESGLAIWNSQLKRWKRKDRGICIFEADLSDDTAIQSIISEQSKKHLHYVFEKLWIVTKFYFKRRHRRHLFWLYNRRQKALNKLCRVMAADSDIIAVGDPKFNASSRGYAPAPTVAVVKELQRLCPRKVVLIDENNTSKLCSGCLTHLEFTKTEGRVNWRVLRCNNCGVYWNRDVNAARNMRALYVYQRDNNGARIPAFERPE

SEQ ID NO: 1573 - protein, 258 aa, Vermamoeba vermiformis
HQCDGQQPMMVNNTNVMVNERITGVDLGRKDLFVSISHPNKAQCVVKEWSNGQYQFESGLAIWNSQLKRWKRKDRGIRIFEADLSDDTAIQSIISEQSKKHLHYVFEKLWIVTKFYFKRRHRRHLFWLYNRRQKALNKLCRVMAADSDIIAVGDPKFNASSRGYAPAPTVAVVKELQRLCPRKVVLIDENNTSKLCSGCLTHLEFTKTEGRVNWRVLRCNNCGVYWNRDVNAARNMRALYVYQRDNNGARIPAFERPE

SEQ ID NO: 1574 - protein, 584 aa, Vermamoeba vermiformis
KKCLFSSLMGSKWQKHFVRNWISDQAEAHSQMLILASRFLWFHFARLIEKKKALPQNINQQYIMNVFCHVSKSSNPSQRDNKIDDDLLQETATILNLNAEKFPVRVSQISKYHANQFITNIENHLKHNTIHHYTLKYLMWTLKESIKLNNQGASIKGRVVRRLCWKIIYNVCWNRDFDFDPPESIKDIYERVHDDFIGFFGEFQQDEYGLRKDEAIRYIYHLMVNMKGNHSMKLIPQSSFSVKSITIDKEVCNSIKSAVERRKRKYIKQKLKKKKKEIKKKKKEIKKKKKEIKKKKEKLDKNDLFKSIFIVDEPKNCKLTLIRSNGVDIDFVFERVDSQRKRKFEKIDDSDRPLKRLKNNTNMMVNNTNVMVNNTNVMVNNTNVMVNNTNVMVNERITGVDLGCKDLFVSISHPNKAQCVVKEWSNGQYQFESGLAIWNSQLKRWKRKDRGIRIFEADLSDATAIQSIISEQSKKHLHYVFERLWIVTKFYFKCRHRRHLFWLYNRRQKALNKLCRVMAANSDIVAIGDPKFSVLSRGYAPAPTVAVVKELQRLCPRKVVLIDEYNTSKLCSDLSYSPFKANED

SEQ ID NO: 1575 - protein, 359 aa, Vermamoeba vermiformis
RKRRRKSRKRRKKSRKKKKEIKKKKKEKLDKNDLFKSIFVVDEPKNCKLTLIRSNGVDIDFVFERVDSQRKRKFEKIDDSDRPLKRLKNNTNVMVNNTNVMVNNTNVMVNNTNVRVNNTNVMVNERITGVDLGRKDLFVSISHPNKAQCVVKEWSNGQYQFESGLAIWNSQLKWWKRKDRGICIFEADLSDDTAIQSIISVQSKKHLHYVFEKLWIVTKFYFKRQHRRRLFWLYNRRQKALNKLCRVMAADSDIVAIGDPKFSASSRGYAPAPTVAVVKELQRLCPRKVVLIDEYNTSKLCSLCYSPLKQTKTEGRVNWRVQRCNNCGGVLEPRRQRCTKHACVVRLSARQQWRANSCL

SEQ ID NO: 1576 - protein, 583 aa, Vermamoeba vermiformis
IRTVKKCLFSSLTGSKWQKHFVRNWISDQAEAHSQMLILASRFLWFHFAQLIEKKKELPQNINQQYIMNVFRHVSKSSNLSQRDNKIDDDLLQETAEILNLNAEKFPVRVSQISKYHANQFITNIENHLKHNTIHHYTLKYLMWTLTESIKLNNQGASIKGSVVRRLCWKIIYNVCWNRDFDFDPPESIKDIFDRVHDDFIGFYGEFQKDEYGLRKDEAIRYIYHLMVNMKGNHSMKLIPQSSFTVKSITIDKEVCNSIKSAVERRKRKYIKQKLKKKKKKIKKKKKEIKKKKKEIKKKKKEKLDKNDLFKSIFIVDEPKNCKLTLIRSNGVDIDFVFERVDSQRKRKFEKIDDSDRPLKRLKNNTNVMVNNTNVMVNNTNVMVNNTNGMVNNTNVMVNERITGVDLGRKDLFVSISHPNKAQCVVKEWSNGQYQFESGLAIWNSQLKQWKRKDRGIRIFEADLSDDTAIQSIISEQSKKHLHYVFEKLWIVTKFYFKRRHRRHLFWLYNRRQKALNKLCRVMAANSDIVAIGDPKFSPSSRGYAPAPTVAVVKACSDQCPRKVVLIDEYNTSKLCSGCLTHP

SEQ ID NO: 1577 - protein, 394 aa, Vermamoeba vermiformis
TKTEEKKKEIKKKKKEIKKKKKEIKKRRRKSRKKEEGNQERKKKESQEKEEGNQEEEGKSRKRRREKLDKNDLFKSIFIVDEPKNCKLTLIQSNGVDIDFVFERVDSQRKRKFEKIDDSDRPLKRLKNNTNVMVNNTNVMVNNSNVRVNNTNVMVNERITGVDLGRKDLFVSISHPNKAQCVVKEWSNGQYQFESGLAIWNSQLKRWKRKDHGICIFEADLSDDTAIQSIISEQSKKHLHYVFEKLWIVTKFYFKRRHRRHLFWLYNHRQKALNKLCRVMAADSDIIAVGDPKFSASSRGYAPAPTVAVVKELQRLCPRKVVLIDEYNTSKLCSLCYSPLKQTKTEGRVNWRVQRCNNCGVYWNRDVNAARNMRALYVYQRDNNGARIPAFERP

SEQ ID NO: 1578 - protein, 409 aa, Vermamoeba vermiformis
TTKVHQLKAVWFANYAGRSFIMCVGIEILILIHQKALRTYMIEFMMTFIGFYGEFQQDEYGLRKDESNSIYLSLNGQYERKSFNEINSTVIIHSKRVSPLIKKVCNSIKSAVERRKRKYIKQKTEEKEEGKSRKKKKEIKKKKKEIKKKKEKLDKNDLFKSIFIVDEPKNCKLTLIRSNGVDIDFVFERVDSQRKRKFEKIDDSDRPLKRLKNNTNVMVNNTNVMVNNTNVMVNNTNVMVNNTNVMVNNTNVMVNERITGVDLGRKDLFVSISHPNKAQCVVKEWSNGQYQFESGLAIWNSQLKRWKRKDRGIRIFEADLSDDTAIQSIISEQSKKHLHYVFEKLWIVTKFYFKRRHRRHLFWLYNRRQKALNKLCRVMAADSDIVAIGDPKVQCVITRLCSCTNCRCC

SEQ ID NO: 1579 - protein, 373 aa, Vermamoeba vermiformis
LHQVCSRKKKRKYIKQKLKKKKKKIKKKKKEIKKKKEKLDKNDLFKSIFIVDEPKNCKLTLIRSNGVDIDFVFERVDSQRKRKFEKIDDSDRPLKRLKNNTNVMVNNTNVMVNNTNVMVNNTNVRVNNTNVMVNERITGVDLGRKDLFVSISHPNKAQCVVKEWSNGQYQFESGLAIWNSQLKRWKRKDRGIRIFEADLSDDTAIQSIISEQSMKHLHYVFEKLWIVTKFYFKRWHRRHLFWLYNRRQKALNKLCRVMAANSDIVAIGDPKFSASSRGYAPAPTVAVVKELQRLCPRKVVLIDEYNTSKLCSLCYSPLKQTKTEGRVNWRVQRCNNCGVYWNRDVNAARNMRALYVYQRDNNGARIPAFERPE

SEQ ID NO: 1580 - protein, 276 aa, Phytophthora ramorum
RLSKLDNEARAEARKRHPTKIHTAQKLATKKAATEAGIKIARSAKQRERARLRREIRAIKTKITNATTDFHQKFISVLAAKFKTLLLPLYQTSEMVRMYEEEMEADGTPLAPAQPYIDRRGRKRRIRSSTARAMLSQQHFSFRMLSEYKMKRAGGRLITCDEEYSSTTCSSCGKIKENLGGSEVYKCAFCARSWTETSTGPRTSLSRTSRCSFDEVEPKRYCLHRGYLPCGHYRTKRRDLLRWAWKQISACRPSSSFRYRVLLFCFSYCYHKLCRH

SEQ ID NO: 1581 - protein, 220 aa, Mythimna separata
SFAGSQKSTYVRSHTLEWKQERVRTRLCCASKAAERKAREKLDFPVSSKNSSHVFEYTVFRMIWFNVRQEPYEKHAKLTRLGLDKYLRTAKCQEKIIKEVFDGGGVESTLVLYGAGSKFMNGASFSGRKFKHDALLKRLRTKRNIDVEVVDEKYTSQACSSCNEKTGEFRKIVMNHRLRWGVCRNCNSEFDRDANAAKNILINHTRSAICRPGCSTSEAS

SEQ ID NO: 1582 - protein, 333 aa, Sitodiplosis mosellana
FSSHSTIEQTSFPNTQQCSSPFQGLSYDTHIDYSCVKMVLSRVNMTMMDQDGPKNTPTDFRQPRPFQRCIAPANRTIRSPTKCGLIFYLKKNMTKSIDSTFHVVPKNNMAEINSLITSKQYYRLIREDTFEEKLAKLNGDRLKFEKSEMLIAQRNCNDHEMPSNKSHKFGSYVNVKLKVFKRFNSHSKARKVASLKLGQYQKRQIAMTKIVKRLTFGYEPTLLISSRPPIAKDSPIRGYRRCPLKLIEKTCILSPHIDVMFTGEVNTTQKHSKCYGQMEISKSPHLFAICSFCLSYMNTVLPEPQMWKTRASLLCPSRYRYSPLYVIKRNQHT

SEQ ID NO: 1583 - protein, 234 aa, Sitodiplosis mosellana
IHLNIIHNHKNPQYSAETFITVDTMQTNVFGFILLCQSFHSCIESARNDFRRFQQIRLTNRQYHRLIGYHQREKKRRELTRQIDEQMKSHRERFDDRPCPRSADYNMNAGNILRHFNAKFKPYTQYEYALQDLLQYIATERELDKLASQLINGKQTFVYAGNATLPGSSPTKGYRRTRVRALFEKKSRRHNCTVFWVDEFRTTKLCSLCFRELEQPKKSRSSEEKVPVLFVSWV

SEQ ID NO: 1584 - protein, 330 aa, Sitodiplosis mosellana
RDLKSYPIASVSSRGSQWKSFIKHKIKMLTDSLATYARRKYAQLSLHKYIESNREMDLMAQHITKNETGLVFLGDAAFPSNSKIGVKRTKRTPDQRKFIVSLKKDGKTDVVLTPEPYTSQTCANCLRRFPRSTKSDRFKVCKDCRPHKDVRLPPLIVTDRSRRRKQRDRKQNASQMPTANVTRAERAGKHREKRRSERESHNPEQLDTEQAVRRYNRRIRRRELRQRRRVAGHRSRKVTKQPEAESDLSGFVKIGDTSICKIRVKNRKAKPQSWQRIHYDANDTGFGSLGSKKIFFQKNWHSSPMNDQNASTVTWHRDICAAKCILYRGM

SEQ ID NO: 1585 - protein, 218 aa, Sitodiplosis mosellana
SRPENKNGLRASDSRYWNRSKLKYHMKINIDLHCCCSFHRPTSNYRVFNITGVRDKECRKYVHKEQRDLKSYPITSVSPRGSQWKSFIKHKIKMLTDSLATYARRKYAQLSLHKYIESNREMDLMAQHITKNETGVVFLGDAAFPSNSKIGVKRTKRTPDQRKFIVSLKKDSKTDVALTPEPYTLKLLTNRTRTVRVRFLLNFVFVFVRVRFELFETK

SEQ ID NO: 1586 - protein, 234 aa, Sitodiplosis mosellana
ELTIEFLFLWKKLNVFVVAQQTNRKRCIINIGASQPAANSPIKIKKHVRCPGVRKLVKSFKKMEGNVIRFVNEARSSRLCARCFEPFPLSTLNDRVKVCEWCMPDQDDWPDGMKLPEKIVAAKSKRKLRSERRAMRQAAVQNPNQPRGFVSKVICYRKNWQQNAANGMDDNVEERRGVIIHDAELGIIEYTDEYVPEDPVDDSPVLKTVWQRDISAAKLILYRGMLLIELKLMQ

SEQ ID NO: 1587 - protein, 365 aa, Sitodiplosis mosellana
LCLKSRKSTKSQSAKAVTSMNQQLIPASKYVHKEQRDLKSYPITSVSPRGSQLKSFIKHKIKMLTDSLATYARRKYAQLSLHKYIESNREMDLMAQHITKNETGVVFLGDAAFPSNSKIGVKRTKRTPDQRKFIVSLKKDGKTDVVLAPEPYTSQTCANCLRRFPRSTKSDRFKVCKDCRPHKDVRLPSLIVTDRSRRRKQRDRKQNASQKPTANVTRAERAGKHREKRRSERESHNPEQLDTEQAVRRYNRCIRRRELRQRRRVAGHRSRKVTKQPEAESDLQGFVKIGDTSICKIRVKNRKAKPQSWQRIHFNANDTGFGLLGSKKIFFQKNWHSNPMNDQNASTVTWHRDICAAKCILYRGM

SEQ ID NO: 1588 - protein, 241 aa, Sitodiplosis mosellana
YIRHRLKMTERGIAVYTTDKYTRLNFDKYVRANSVTDSIAGMLTNHQPSLMRFRAAQMSLSSPIGIKKTLRCPGNRKMIRSYEKCPGCVVNMVDEYYTSQTCAKCFGRFDRRTKRHRFKVCHDCRPDEGAMLPTMIVCKVNKRKMRQEKLKLFLLEKEVEEGNGNPAVGNDVPHPDQLNPDLLPKVAIYHKTWQVNGLGNLEYVKFNSAGEMEVVEPRVQKTKWHRDIAAAKCILIKGKCS

SEQ ID NO: 1589 - protein, 218 aa, Sitodiplosis mosellana
MFLLLLNRQIANDASLTLELPNHLQIHQLRSRNMFDARACGKSFKKMEGNIIRFVNEARSSRLCARCFEPFPLSTLNDRVKVCVWCEPDQNDWPDGMKLPEKIVVAKSKRKLRSDRREMRQAAVQNPNQPRGFVSKVICYRKNWQQNAANGMDDNVEERRGVTIHDAELGIIEYTDEYVPEDPVDDSPVLKTVWQRDISAAKLILYRGMLFIELKLMQ

SEQ ID NO: 1590 - protein, 235 aa, Sitodiplosis mosellana
TNYKISSKQYHYWTKQTVRNRQGKRWTKDVVKEERRDRENQPSLMHFGAAQMSPSSPIGIKKTLRCPGNRKMIRSYKKCPGCVVNMVDEYFTSQTCAKCFGCFDRRTKRHRFKVCHDCRPDERAMLPSMIVCKVNKRKMRQVKLKLFLLEKEAEEGNGNPAVGNDVPHPDQLSPYLLPKVAIYHKTWQVNGLGNVEYVKFNKADEMEVVESQVHKTKWHRDIAAAKSILIKGKCS

SEQ ID NO: 1591 - protein, 301 aa, Sitodiplosis mosellana
ANYTISSKQYHYWTKQTVRNRQGKRWTKDFVKEERQDRENRALYPVMPSPLGRHWEDYIRHRLKMTERGIAVYTTDKYTRLNFDKYVRANSVTDSIAGMLTNHQPTLMHFGAAQMSPSSPIGIKKSLRCPGNRKMIRSYKKCRGCVVNMVDEYYTSQTCAKCFGRFDRRTKRHRFKVCHDCRPQSVVRAMLPSMIVCKVNKRKMRQEKLKLFLLEKEAEEGNGNPAVGNDVPHPDQLNPELLPKVAIYHKTWHVNESSGILEYVKFNSAGEMEVVEPRLHKTTWHRDIAAAKCILIKGKCS

SEQ ID NO: 1592 - protein, 237 aa, Anadara kagoshimensis
EIKRADGYFILCIPCKPEYTRRKFNKEGQKGVCGVDPGGRTMATIYDPVNRHAWQVGTKRDKKYLIKPLQKKIDVVMAQLQLAIEKEQKSRIMDKKRELKKLHTKMKWIINNIHCDFSNELVKTNKLVVLGDMKTAKIVNKTEKKGLPRKANRDLIEWRHYEFKKRLIHRAKGSGCKVVIQDEAYTSKTCGRCGRMNANLGSAETFVCDTCKYETHRDVNGARNILRKYTKHFFTYK

SEQ ID NO: 1593 - protein, 228 aa, Anadara kagoshimensis
EDKHLMIFPVSLIRPIRLTKSVRKLPPFDHDMRIIKRADGYFILCIPCKPEYTRRKFNKEGQKGVCGVDPGGRTMATIYDPVNRHAWQVGTKRDKKYLIKPLQKKIDVVMAQLQLAIEKEQKSRIMDKKRELKKLHTKMKWIINNIHCDFSNELVKTNKLVVLGDMKTAKIVNKTEKKGLPRKANRDLIEWRHYEFKKRLIHRAKGSGCKVVIQDEAYTSRRVVDAVG

SEQ ID NO: 1594 - protein, 236 aa, Sphagnum fallax
MRKHEVIDGKRVVEWEVELSAYNKKTTDFATFETYVAKKNEMNVCLTPFYQDYTFRRMKMLSFIGRERTEAKMIREFKEKFGSGEEVVVAIGDWEHRQHRKFKEPTKGKGFRTLLRKASYDVYLVDEFRTSCRCSHCEEHGECKSFLECENPKPYRTGRILRHGLVRCKTYQRLWNRDTNASSNIWKVADSAINGLPRPEHLRRTVQANYTVGSDASSSRRRTRRGPSPLQRHGKV

SEQ ID NO: 1595 - protein, 206 aa, Sphagnum fallax
TCKHEVIDGKRVVEWEVELSAYNKKTTDFAAFKTYIAKKNEMNVRLTPFYQDYTFRRMKMLSFIGRQSTEAKMIREFKEKFGSGEEVVVAIGDWEQRQHRKFKEPTKGKGSERSCVNQAMTCIWSTSFVPAADVASVRSMVSVRCFWSVRTRDRTVQDASCVMGLSGVRPTNVYGTGIRTSLNSHIIFASVCCLPMKDNIFMRRKV

SEQ ID NO: 1596 - protein, 342 aa, Rhodotorula sp.
LLNVWADTISAGWLFDRALSRTEERVFPRWSNLDPQGYAERFKNNLATEFSAEGSVLQERRIVTIIPYQNGTRPPNLPIAKLSQNPATPSFCAIRRIRPPVRRYIKPPRTSKGLPITWPDSDKTNGITRVREFATTNEDRSTAGIDIGEVEMVTLFTSTPYAKDGAIAEGVALYSRRSLLELQKLSSREASSLLAKRQRVLLPSNAPLTGSTEPRSRIAIATLSSSSASSRHQQERSRLRSTAEQQGAAAELARHILGGSASKEGVGTVEQAQAALIYVGKGSMVRSDGGHGPRSGAAITRQLEVELRRQRVRCLFVRTNEAYTSSVCPSAHCTNEEGQRNP

SEQ ID NO: 1597 - protein, 443 aa, Microglena sp.
DHPLIHYNVCRPDSSRTVSRKFGYRIVTDGFAVSILMNKPTCSMPADSFSTRAHEYVTTDEGGIVSFRDNVVVAAVDPGVTDIVTVTGLGGGTRSYSSAQYYRKGLIFKSQRQTEVWNLETADIVGDIIPDRDSSRSEQIGAYAWFYMGAAPILLAHRASRGYRNLRFRRYCKKQKLIVEIADFVAPREKSAKVLVGFGDWKGLGATPISRRTCGPLQAIRFELRSRGNVIMEDVDEFRTSQRCSCCENRLCNMVALTHHKKQDGTGWECTEGRKRIHKILHCKSSQSGAPRQQSGGRLHCGKTWDRDVNASRNILMLTLHQVFGRERPLAFRRDAPRSSSKTPPPPDTDMGTQTVERFTKEATRNIFENLFNLLHPPPNVAQKQRSAVWMIIRCVPLYLRTTVSSIKWHWITSICMQLKKWMQALVLRHSKAASWALQSTSA

SEQ ID NO: 1598 - protein, 272 aa, Microglena sp.
AYVSDMFDACDAFSTRAHEYVTTDEGGIVSFREYVVVAAVDPGVTDIVTVTGLDGGTRSYSSAQYYRKGLLFKSQRQTDVWNLETADIVGGIIPDRDSSRSEQIGAYARFYMGAAPILLAHRASKRYRNLRFRRYCKKQKLIVEIADFVAPREKSTKVLVGFGDWKGLGATPISRRTCGPLQAIRFELRSRENVIMEDVDEFRTSQRCSCCETAFATWLHSLIVRGKTVLVGNVRKDASGFTRFSTAKAVKAERHANRAAVGSTAGRLGTAM

SEQ ID NO: 1599 - protein, 222 aa, Microglena sp.
WLVPTFLGPRRKRFQSRTTERRFKKQTKTLREFSESDPNVVVVANDPGRCNIAFLTWKKNKVEEKDKGGRKWKRHCEFGSKRLTRERYYVESGVFKSRGPTKKWLCNIQDCLDDLKDNSPKRTSLESFDAYVTVMVNHWDSRWGEMSKSRWGAQRLRIYGGKKRVLARFFNEVQADVGERKTIVIAYGSSKFAPGGKGELSVPTTSAFNAFRDRFKGRVAVH

SEQ ID NO: 1600 - protein, 206 aa, Microglena sp.
RYFVGFGDWKVCVWATPISSDCALSKLFRLELRSRENVIMEDIDEFRTSQTSSCCENHLCNMVALTHRKKQDGTGWECTEGRKRIHKIPPLQKQSKRSATQQSGGMLHCGKTWDRDVNASRNILMLTLHQVFGRERPLAFRRDAPRSSSTTPPPPPDTDMGHRRLNGLPKRLLGISSRTSSTFCTPQRCPKATICSLDDYKVSHFI

SEQ ID NO: 1601 - protein, 393 aa, Microglena sp.
SFSAWVIRYSRASLAMDVTRTIQCCGESTLMSKVLRRKGLALTTESSATVKGVSVQMKQKGKEEVVEEGENAGYPKDANIVECKDAVGALRVGVDPGMTDIVTVASSAGRIESFSSARFSEVAGYNTSKRRTYKWNDETQDLVKSIPSPNTSNMVDLQDHVRAYLKALAILLQHRANKGYRSMRFFRYVGKHKTIEKVCDVIAPRAQTTVVGFGNWSNQGYGISRSCSGPIKEIRRCLSRRKNVLFKNVDERNTSCKCHGCFHRLVNMKADSVVWRGVCKESPIDGSITVEKQKMVVKNVKVHKVLHCRDSVKSASSNVRCGATWNRDVNAAKNLLLLLTTWMDGRERPEAFCVPSPPPKTTVSIEASVSAKPTDPPGFVSSLPWYPLGQLKC

SEQ ID NO: 1602 - protein, 551 aa, Microglena sp.
GNVGAILYHQKKKNIHLLLMGVVQDKGDDDINISVVKKTLNSLCMDVSRHQISSRIQSMVLLINHAVAEAYLFANFHITRCLDDGDFDVKQLPHLDRNFYYRCLLAVSTSNVRKDTLGQSFNDTMVAFDALRPAGYVKVDVRPWGQVIADVSIQMATMACNSVWANVDRVVIKYLRLKHPSLKKHFKKIVKAVVQYPESKIDTIIPGGLVHAIHIKEVVSHLRALFPLPRGKQFNTRAHLTMRLFHHVLTELGEVGRVDPKDKNTKKRHPRLFSILPRKNGFTISYVPISSMTFMKLLSMVDSPLESVSGDGRYENHTMLWRKYFNVQGLETKRSRFDNRILSDGKGVSVQMKQKGKEEVVEEGENAGYPKDANIVECKDAVGALRVGVDPGMTDIVTVASSAGRIESFSSARFSEVAGYNTSKSRTYKWNDETQDLVKSIPSPNTSNMVDLQDHVRAYLKALPILLQHRANKGYRSMRFFRYVGKHKTIEKVCDVIAPRAQTTVVGFGNWSNQGYGISRSCSGPIKEIRRCLSRRKNVFVQKRRRTQHFL

SEQ ID NO: 1603 - protein, 344 aa, Microglena sp.
CYSILNQFQFSMYNLDKRSIVVHMYTLLQSLRRVAILANVSHMTVSRWISNPTKKVYTRNKPTKSDVVIEFLKASLKIDPFASLAGLRHKVKDAFGFEVSKELIRVVIKRLGLTKKKAKFFSRPDNLYEKTTSFISQRERLKEEGRTFVSIDETSFGRHSRWGEMSKSRWGAQRLRLYGGKKRVLARFFNKVQADVGERKTIVVAYGSAKFAPGGKGELSVPTTSAFKAFSDRFMGRVAVIDEFRTTKIWHKDSTTVLQSVQSEKEGRTVRGLLWCSSTMENSKLFVNRDLNAAINIHNCFTMYPIRPGILARPKKYCKLEVVVGRKIDYKLTGSLQNAVSSEV

SEQ ID NO: 1604 - protein, 423 aa, Microglena sp.
KNKKSHPRLFSILPRKNGFTISYVPISSMTFMKLLSMGDSPLESVSGDGRYENHTMLWRKYFNVQGLETKRSRFDNRILSYGKGVSVQMKQKGKEEVVEKGENAGYPKDANIVECKDAVGALRVGVDPGMTDIVTIASSAGRIESFSSARFSEVAGYNTSKRRTYKWNDETQDLVKSIPSPNTSNMVDLQDHVRAYLKALPILLQHRANKGYRSMRFFRYVGKHKTIEKVCDVIAPRAQTTVVGFGNWSNQGYGISRSCSGPIKEIRRCLSHRKNVLFKNVDERNTSCKCHGCFQRLVNMKADSVVWRGVCKESPIDGSITVEKQKMVVKNVKVHKVLHCRDSVKSASSNVRCGATWNRDVNAAKNLLLLLTTWMDGRERPEAFCVPSPPPKTTVSIGASVSAKPNRPTWVCQQLALLSFGPA

SEQ ID NO: 1605 - protein, 206 aa, Microglena sp.
YVGKQKTIEKVCDVIAPRAQTTVVGFGNWSNQGYGISRSCSGPIKEIRRCLSRRKNVLFKNVDERNTSCKCHGCFQRLVNMKADSVVWRGVCKESPIDGSITVEKQKMVVKNVKVHKVLHCRDSVKSASSNVRCGATWNRDVNAAKNLLLLLTTWMDGRERPEAFCVPSPPPKTTVSIEASVSAKPTDPPGFVSSLPCYPLGQLKC

SEQ ID NO: 1606 - protein, 825 aa, Microglena sp.
PRMEHVCDVCIKSSVMYKLCKMATKPPTVAKLKELLKLAEVAYSSKDKKDDIVRLCEDNGFIARPPPEYKTVEKMCVVKCALKKAMSLDDEEFGKFRGHVDQLVNVVSRMLRRSSLVLTFHVTRLMEGDLPILNMYDMKDTYWKDWLRIGVDGVFPDEESRISYEAVKDVIRKVLGSYEPDYINSYPIYFDQVLNYAGHTLSTVVSNNAWVPLVPRLTRLTKDTLKALGAPKTIRVYVVMRVIQQEIQEMESWPESVQEYVREVRVRLKVPDGSRLYDDYGQDMDFPTMVQFNYWMQTRLEAIGARRIRLMPIFNVQRAHVHLDMKTLVNLFRHVFPKDPNIVELSKWENVKDPDRFMLPLKPSVKKKKSCGPGEWEAYKLAQQKYDADVKDIKATDEYRHAKGRYDTLVNAQKTVAGSFFKKPPVKTGWVFDCSICTDGVSLSMQYSKTVQVRVSDLKKTSKRSRDEEGMSVSEQYDHKLKTTLPDMGIVVLCVDPGRSNIATVMYLADNKSKTWKLTCGAFYHKSGIKKQKKQQEKRFSDMIPRWESLRENGAALSTSRKDDISAHLKNYATFSDEWWRMALRRRESRDYFQRYIGKRKAMDSFWAGIKRNMKLDHPDLRVRVAYGSAITKLKATGPGEVAVPTGSMFASCKGLFKEEVHVTDEFKTTLMSWETGAKKECVYKIPSVQITTEGQIRLGYELLGHTPLKETPKVSYRDQLAVRVYCTRKKIQEKHRRGGLAPSLVDNNSIKRYPEVRGLRFSPETSTYSDRDRSSALTIARLHCMELLGQGRPLPFCRDACCWATKKHDGVPLQCGLLHHKVTP

SEQ ID NO: 1607 - protein, 425 aa, Microglena sp.
KKKKSHPRLFSILPRKNGFTILYVSISSMTFMKLLSMGDSPLESVSGDGRYENHTMLWRKYFNVQGLETKRSRFDNRILSDGKGVSVQMKQKGKEEVVEEGENAGYPKDANIVECKDAVGALRVGVDPGMTDIVTVASSACRIESFSSARFSEVAGYNTSKRRTYKWNDETQDLVKSIPSPNTSNMVDLQDHVRAYLKALPILLQHRANKGYRSMRFFRYVGKQKTIEKVCDVIAPRAQTTVVGFGNWSNQGYGISRSCSGPIKRSGGASHVVRMFCSKNVDERNTSCKCHGCFQRLVNMKADSVVWRGVCKESPINGSITVEKQKMVVKNVKVHKVLHCRDSVKSASSNVRCGATWNRDVNAAKNLLLLLTTWMDGRERPEAFCVPSHPTKTTVSIEASVSAKPTDPPGFVSSLPCYPLGQLKC

SEQ ID NO: 1608 - protein, 686 aa, Microglena sp.
IETIVNKEPPDKRTRPDRAAKIKDRKNGEENVVKCTLSRIIADKDNKDVIIKVIKERVDSVSKRTYLAGVAVNRILKEVFEGVPDAQLHTVSVPSVDQNFMRQLMVGSRQAHMETRDATVERFFHNNYWFREKIEGREVIVKKKKQYVGAIARYDVDRNLYNHASKKYLTNFNNHYRVHLSTWIKKFVYSKENRILAKEIKDEHGIDETVFHRYLLYDIHSWGVKEDLIAIHSLLPERTKMLLKIQHSILGRDEINQQWLKSVSNSAKMIRYNVFINRYLEATEDEGYAKLVNIAPIPTVKHAFITIDTDGLLGVLKDVGLIESLEKTLTNNEHWESVFDVENIRSTGKGVFTCTIDTDGVMACIHFLRAEKKKISIKDDGTAIKKQTKTLREFSESDPNVVVVANDPGRCNIAFLTWKKNKVEEKDKGGRKRKRHCEFGSKRLTRERYYVESGVFKSRGPTKKWLSNIQDCLDDLKDNSPKRTSLVSFDAYVTVMVNHWDSRWGEMSKSRWGAQRLRLYGGKKRVLARFFNEVQEDVGERKTIVVAYGSAKFAPGGKGELSVPTTSAFKVFSDRFKGRVAVIDEFRTTKIWHKDSTTVLQSVQSEKEGRTVRGLLWCSSTMENSKLFVNRDLNASINIHNCFTMYPIRPGILARPKKYCKLEVVVGRKIDYKLTGSLQNAVSSEV

SEQ ID NO: 1609 - protein, 342 aa, Microglena sp.
RVSVQMKQKGKEEVVEEGENAGYPKDANIVECKDAVGALRVGVDPGMTDIVTVASSACRIESFSSARFSEVAGYNTSKRRTYKWNDETQDLVKSIPSPNTSNMVDLQDHVRAYLKALPILLQHRANKGYRSMRFFRYVGKQKTIEKVCDVIAPRAQTTVVGFGNWSNQGYGISRSCSGPIKEIRRCLSRRKNVLFKNVDERNTSCKCHGCFQRLVNMKADSVVWRGVCKESPINGSITVEKQKMVVKNVKVHKVLHCRDSVKSASSNVRCGATWNRDVNAAKNLLLLLTTWMDGRERPEAFCVPSHPPKTTVSIEASVSAKPTDPPGFVSSLPCYPLGQHKC

SEQ ID NO: 1610 - protein, 266 aa, Microglena sp.
ESRDEEGMSVSEQYDHKLKTTLPDMGLVFLGVILVGATSLQSRIWQTTKARHGSLHAELFYHKSGIKKQKKTARKTFLRQIPRWESLRENGAALSTSRKDDISAYLKNYATFSDEWWRMALRRRESRDNFQRYIGKRKAMDSFWAGIKRNMKLDHPDLRVRVAYGSAITKLKATGPGEVAVPTGSMFASCKRLFKEEVHVTDEFKTTLMSWETGAKKECVYKIPSVQITTEGQIRLGYELLGHTPLKETPKVSYRDQLAVRVYCHT

SEQ ID NO: 1611 - protein, 487 aa, Microglena sp.
GARGNCEKEETIRGCHRSLRWRSNLYSHASKKYLTNFNNHYRVHLSTWIKKFVYSKENRILAKEFKDEHGIDETVFHRYLLYDIHSWGVKEDLIAIHSLLPERTKMLLKIQHSIIGRDEINRQWLKSVSNSAKMIRYNVFINRYLEATEDEGYAKLVNIAPIPTVKHSFITIDTDGLLGVLKDVGLVESLEKTLTNKEHWESVFDVENIRSTGKGVFTCTIDTDGVMACTHFLRAEKKKISIKDDGTAIKKQFSESDPNVVVVANDPGRCNIAFLTWKKNKVEEKDKGGRKRKRHCEFGSKRLTRERYYVESGVFKSRGPTKKWLSNIQDCLDDLKDNSPKRTSLESFDAYVTVMVNHWDSRWGEMSKSRWGAQRLRLYGGKKRVLARFFNEVQADVGEGKQLSSHTVLLSLPLVARVNFLSLQRARSMRLETVSRGELPTLTNSVPQRSGTRTAPPSSRVCNPKKKGARFEACYGAVPPWRTASCL

SEQ ID NO: 1612 - protein, 220 aa, Microglena sp.
HVRCLADAFSTRAHEYVTTDEGGIVSFLDNVVVAAVDPGVTDIVTVTGLNGGTRSYSSAKYYRKGLIFKSQRQTDVWNLETADIVGGIIPDRDSSSSEQIGAYARFYMGAAPILLAHRASRGYRNLRFRRYCKKQKLIVEIADLVAPRKKSAKVLVGFGDWKGLGATPISRRTCGPLQAIRFELRSRENVIMEDIDEFRTSQRCSCCENQKFLDNPTPTP

SEQ ID NO: 1613 - protein, 561 aa, Microglena sp.
ALIQQSCQPSFQHLDFDRQKSAVALAKKRVGRKEPEGSPLRVRLTKLQERLEKLSEAWLSSKNLRVDADNAKRFFAREVAFCLRGVLPLPSGNTFASRAHMTLPLYHKILSETIEEKRKTKNEKHRTFSLLPYKSGFTLSHIPISKMAFFYMVNECHFDSCKADVASKNHQGIWERFANLKKVETVSRKFGYRIVTDGFAVSILMNKPTCLTCSMPADAFSTRAHEYVTTDEGGIVSFLDNVVVAAVDPGVTDIVTVTGLNGGTRSYSSAKYYRKGLIFKSQRQTDVWNLETADIVGGIIPDRDSSSSEQIGAYARFYMGAAPILLAHRASRGYRNLRFRRYCKKQKLIVEIADFVAPRKKSAKVLVGFGDWKGLGATPISRRTCGPLQAIRFELRSRENVIMEDIDEFRTSQRCSCCENHLCNMVALTHRKKQDGTGWECTEGRKRIHKILHCKSSQSGAPRQQSGGMLHCGKTWDRDVNASRNILMLTLHQVFGRERPLAFRRDAPRSSSTTPPPPPDTDMGTQTVERFTKEATRNIFENLFNLLHPPTLPKSNDLQSG

SEQ ID NO: 1614 - protein, 240 aa, Microglena sp.
GKPDPRSKGPQIPLRRIFPRLVCRCQGQEAERKPVHPDKVATASIDPGVRKTMVTYSPENEESFMLGQGQASDLVKLLLVHDKLQSRLDTEKTLRSKERMKIKKHMIRIRKRIFYLKKEFRDQTTNFLAARYDVLLVPQLETAKMTISAERELTTKVARQMLTLSHSVLFNRLKEKCAEYETVFLHVLEHYTSQTCPMCGFLNKCGETYTCKNCQFTCDRDIVGAAGIFLKAVRTENPCS

SEQ ID NO: 1615 - protein, 243 aa, Microglena sp.
CLRKTRPRSKGPQNPASANISSSCLSLPTDRRAERKPVHPDKVATASIDPGVRKTMVTYSPENEESFMLGQGQASDLVKLLLVHDKLQSRLDTEKTLRSKERMKIKKHMIRIRREFFTSRKSLGTRQQISWPHRYDVLLVPQLETAKMTISAERELTTKVARQMLTLSHSVLFNRLKEKCAEYGTVFLHVLEHYTSQTCPMCGFLNKCGETYTCKNCQFTCDRDIVGAAGIFLKAVRTENPCS

SEQ ID NO: 1616 - protein, 729 aa, Microglena sp.
PRMEHVCDVCIKSSVMYKLCKMATKPPTVAKLKELLKLAEVAYSSKDKKDDIVRLCEDNGLIARPPPEYKTVEKMCVVKCALKKAMSLDDEEFGKFREHVDQLVNVVSRMLRRSSLVLTFHVTRLMEGDLPIPNMYDMKDTYWKDWLRIGVDGVFPDEESRISYESVKDVIGKVLGSDDPDYINSYPIYFDQVLNYAGHTLSTVVSNNAWVPLVPRLTRLTKATLNALKAPKTIRVYDVMRVIQQEIQEMESWPESVQEYVREVRVRLKVPDGSRLYDDYGKDMDFPTMVRFNYWMQTRLESIGARRIRLMPIFNVQRAHVRLDMKTLVNLFRHVFPKDPNIVELSKWKDVKDPDRFMLPLKPAVKKKKSCGPGEWEAYKLAQQKYDADVNDIKDTDEYRHAKGRYDTLVNARKTVAGSFFKKPPVKTGWVFDCSICTDGVSLSMQYSKTVQVRVSDLKKTSKRSRDDEGMSVSEQYDHKLKTTLPDMGIVVLGVDPGRSNIATVTYLADDKSKTWKLTRGAFYHKSGIKKQKKQQEKRFSDMIPRWESLRENGAALSTSRTDDISAYLKNYDTFSDEWWRMALLRRESRDNFQRYIGKRKAMDSFWAGIKRNMKLDHPDLRVRVAYGSAITTLKATGPGEVAVPTGSMFASCKRLFKEEVHVTDEFKTTLMSWETGAKKECVLQNSKCPNNHGRADSSRLRVVGSHPIEGDSKCLLSRPVGGEGVLHT

SEQ ID NO: 1617 - protein, 349 aa, Microglena sp.
RRPVRSLVKKKVSRSQKKYDGSLKTILPDMGIVVLGVDPGRSNIATVTYLADDKNKTWTLTRGEFYHKSGIKKQTRQKELRFADMIPMWESLRENGAALSTSRTDKISAYLSNYAKFSDEWWRLALRRRESRDNLQRYIGKRKVKDSFWAGIKRCMMKELPDMKVCVAYGSAITKLKPTGPGEVAVPTGTMFASCKRIFKEDVSVTDEFKTTLMSWETGKEKERVYKIPSVCSADVKLRLGGERFGHTKSKTMPKVADCDHLGVRLYNKRKGAQEKHRRGGFATSLVDSQKSIERYPEVRGLRFSPETCIYSDRDRSSALTIARLHCMELMGLGRPLPFAHSSSVVVDE

SEQ ID NO: 1618 - protein, 301 aa, Microglena sp.
EADQDSPRVFRVRPQCGVVANDPGRCNIAFLTWKKNKVEEKDKGGRKRKRHCEFGSKRLTRERYYVESGVFKSRGPTKKWLSNIQDCLDDLKDNSPKRTSLESFDAYVTVMVNHWDSRWGEMSKSRWGAQRLRLYGGKKRVLARFFNEVQADVGERKTIVIAYGSSKFAPGGKGELSVPTTSAFNAFRDRFKGRVAVIDEFRTTKIWHKDSTTVLQSVQSEKKGRTVRGLLWCSSTMENSKLFVNRDLNAAINIHNCFTMYPTRPGILARPKKYCKLEVVVGRTIDYKLTGSLQNAVSSEV

SEQ ID NO: 1619 - protein, 243 aa, Microglena sp.
CLRKTRPTIRRSKNPASANISSYCLSLLGTEGQSGSLSIQTRLQLPPSTQASERQWSRTHLRMRNPSCLVRDRHPTLSNSCWFMTSCSQGWILRKPYDQKERMKIKKLMIRIRKTIFYLKKEFRDQTTNFLAARYDVLLVPQLETAKMTISAERELTTKVARQMLTLSHSVLFNRLKEKCEEYGTVFLHVLEHYTSQTCPMCGFLNKCGETYTCKNCQFTCDRDIVGAAGIFLKAVRTENPCS

SEQ ID NO: 1620 - protein, 214 aa, Microglena sp.
RIWQTIKIKTWKLTRGAFYHKSGIKKQTRQKELRFADMIPMWESLRENGAALSTSRTDKISAYLSNYAKFSDEWWRLALRRRESRDNLQRYIGKRKVKDSFWAGIKRCMMKELPGMKVCVAYGSAITKLKPTGPGEVAVPTGAMFASCKRIFKEDVSVTDEFKTTLMSWETGKEKERVYKIPSVCSADVNLRLGGERFGHTKSKTMQRSLIATT

SEQ ID NO: 1621 - protein, 330 aa, Microglena sp.
ASQNSMTINSKTTLPDMGIVVLGVDPGRSNIATVTYLADDKSKTWKLTRGAFYHKSGIKKQKKQQEKRFSDMIPRWESLRENGAALSTSRTDDISAYLKNYDTFSDEWWRMALLRRESRDNFQRYIGKRKAMDSFWAGIKRNMKLDHPDLRVRVAYGSAITTLKATGPGEVAVPTGSMFASCKRLFKEEVHVTDEFKTTLMSWETGAKKECVLQNSKCPITTEGQIRLGYELLGHTPLKETPKVSYRDQLAVRVYCTRKQIQEKHRRGGLSPSLVDNNSIKRYPEVRGLRFSPETSTYSDRDRSSALTIARLHCMELLGQGRPLPFCRDA

SEQ ID NO: 1622 - protein, 786 aa, Microglena sp.
CIKLCKMATKPPTVAKLKELLKLAEVAYSSKDKKDDIVRLCEDNGLIARPPPEYKTVEKMCVVKCALKKAMSLDDEEFGKFREHVDQLVNVVSRMLRRSSLVLTFHVTRLMEGDLPIPNMYDMKDTYWKDWLRIGVDGVFPDEESRISYEAVKDVIGKVLGSDDPDYINSYPIYFDQVLNYAGHTLSTVVSNNAWVPLVPRLTRLTKATLNALKAPKTIRVYDVMRVIQQEIQEMESWPESVQEYVREVRVRLKVPDGSRLYDDYGKDMDFPTMVRFNYWMQTRLEDMDARRIRLMPIFNVQRAHVRLDMKTLVNLFRHVFPKDPNIVELSKWKDVKDPDRFMLPLKPAFKKKKSCGPGEWEAYKLAQQKYDADVNDIKDTDEYRHAKGRYDTLVNARKTVAGSFFKKPPVKTGWVFDCSICTDGVSLSMQYSKTVQVRVSDLKKTSKRSRDDEGMSVSEQYDHKLKTTLPDMGIVVLGVDPGRSNIATVTYLADDKSKTWKLTRGAFYHKSGIKKQKKQQEKRFSDMIPRWESLRENGAALSTSRTDDISAYLKNYDTFSDDWWRMALLRRESRDNFQRYIGKRKAMDSFWAGIKRNMKLDHPDLRVRVAYGSAITTLKATGPGEVAVPTGSMFASCKRLFKEEVHVTDEFKTTLMSWETGAKKECVYKIPSVQITTEGQIRLGYELLGHTPLKETPNVSYRDQLAVRVYCTRKQIQEKHRRGGLAPSLVDNNSIKRYPEVRGLRFSPETSTYSDRDRSSALTIARLHCMELLGQGRPLPFCRDA

SEQ ID NO: 1623 - protein, 229 aa, Microglena sp.
VRMAGPLESTDILQFVDSKSYWCIKSYLAIHKYASSRSSLVIVGAEQATYHSSHQPEDTTLLDGANTRTHVNVVVAAVDPGVTDIVTVTGLDGGTRSYSSVQYYGKGLIFKSQRQTDVWNLKTADIVGDIIPGRDSSRSEQIGAYARFYTGAAPILLAHRASMGYRNLRFRRYCKKNRNSLLRIADFVAPEGEEREGTRRFLVIGKVWGRRQSLGGLVALSQAIRFRAS

SEQ ID NO: 1624 - protein, 340 aa, Microglena sp.
GEARVVVAWPEGVPPAAHVCICTDGVSLSMQYSKTVQVRVSDLKKTSKRSRDEEGMSVSEQYDHKLKTTLPDMGIVVLGVDPGRSNIATVTYLADDKSKTWKLTRGAFYHKSGIKKQKKKQEKRFSDMIPRWESLRENGAALSTSRKDDISAYLKNYATFSDEWWRMALRRRESRDNFQRYIGKRKAMDSFWAGIKRNMELDHPDLRVRIAYGSAITKLKATGPGEVAVPTGSMFASCKRLFKEEVHVTDEFKTTLMSWETGAKKECVYKIPSVQITTEGQIRLGYELLGHTPLKETPKVSYRDQLAVRVYCTRKQIQEKTQEGWLSPLSCRQQLDQAVP

SEQ ID NO: 1625 - protein, 283 aa, Microglena sp.
EGWAIEMDQKNVSKDGDKLFIFKDILGNMRYFGSKQLHKLMPEVNPTHDPKVHKSRFSEYFLVLSVAARDRRAERKPVHPDKVATASIDPGVRKTMVTYSPENEESFMLGQGQASDLVKLLLVHDKLQSRLDTEKTLRSKERMKIKMQMIRIRKRIFYLKKEFRDQTTNFLAARYDVLLVPQLETAKMTISAERELTTKVARQMLTLSHSVLFNRLKEKCEEYGTVFLHVLEHYTSQTCPMCGFLNKCGETYTCKNCQFTCDRDIVGAAGIFLKAVRTENPCS

SEQ ID NO: 1626 - protein, 392 aa, Microglena sp.
SFSAWGDSPLESVSGDGRYENHTMLWRKYFNVQGLETKRSRFDNRILSDGKGVSVQMKQKGKEEVVEEGENAGYPKDANIVECKDAVGALRVGVDPGMTDIVTVASSAGRIESFSSARFSEVAGYNTSKRRTNKWNDETQDLVKSIPSPNTSNMVDLQDHVRAYLKALPILLQHRANKGYRSMRFFRYVGKQKTIEKVCDVIAPRAQTTVVGFGNWSNQGYGISRPCSGPIKEIRRCLSRHKNVLFNNVDERNTSCKCHGCFQRLVNMKADSRSLARSLQRVPIDESITVEKQKMVVKNVKVHKVLHCRDSVKSASSNVRCGATWNRDVNAAKNLLLLLTTWMDGRERPEAFCVPSPPPKTTVSIEASVSAKRPTTGFVSSLPCYPLGQLKC

SEQ ID NO: 1627 - protein, 317 aa, Microglena sp.
RVSVQMKQKGKEEFVEEGENAGYPKDANIVECKDAVGALRVGVDPGMTDIVTVASSAGRIESFSSARFSEVAGYNTSKRRTYKWNDETQDLVKSIPSPNTSNMVDLQDHVRAYLKALPILLQHRANKGYRSMRFFRYVGKQKTIEKVCDVIAPRAQTTVVGFGNWSNQGYGISRSCSGPIKEIRRCLSRRKNVLFKNVDERNTSCKCHGCFQRLVNMKADSIVWRGVCKESPIDGSITVEKQKMVVKNVKVHKVLHCRDSVKSASSNVRCGATWNRDVNAAKNLLLLLTTWMDGRERPEAFCVPSPPPKPQFPSRRV

SEQ ID NO: 1628 - protein, 282 aa, Microglena sp.
RIWQTIKNKTWKLTRGAFYHKSGIKKQTRQKELRFADMIPMWESLRENGAALSTSRTDKISAYLSNYAKFSDEWWRLALRRRESRDNLQRYIGKRKVKDSFWAGIKRCMMKELPGMKVCVAYGSAITKLKPTGPGEVAVPTGAMFASCKRIFKEDVSVTDEFKTTLMSWETGKEKERVYKIPSVCSADVNLRLGGERFGHTKSKTMPKVADCDHLGVRLYNKRKGAQEKHRRVASPLPLSILKNRSSGTQRYEDCDSLQKHAFTRTGIALLLSQSQGCTAWN

SEQ ID NO: 1629 - protein, 460 aa, Microglena sp.
PCLCTTRYCRRPSKKNEKTKNEKHRTFSLLPYKSGFTLSHIPISKMAFFYMVNECHFDSCKADVASKNHQGIWERFANLKKVETVSRKFGYRIVTDGFAVSILMNKPTCLTCSMPAGAFSTRAHEYVTTDEGGIVSFLDNVVVSAVDPGVTDIVTVTGLNGGTRSYSSAKYYRKGLIFKSQRQTDVWNLETADIVVGIIPDRDSSSSEQIGAYARFYMGAAPILLAHRASRGYRNLRFRRYCKKQKLIVEIADFVAPRKKSAKVLVGFGDWKGLGATPISRRTCGPLQAIRFELRSRENVIMEDIDEFRTSQRCSCCENHLCNMVALTHRKKQDGTGWECTEGRKRIHKILHCKSSQSGAPRQQSGGMLHCGKTWDRDVNASRNILMLTLHQVFGRERPLAFRRDAPRSSSTTPPPPPDTDMGTQTVERFTKEATRNIFENLFNLLHPPTLPKSNDLQSG

SEQ ID NO: 1630 - protein, 227 aa, Microglena sp.
RSDKKWLSNIQDCLDDLKDNSPKRTSLESFDAYVTVMVNHWDSRWGEMSKSRWGAQRLRLYGGKKRVLARFFNEVQADVGERKTIVIAYGSSKFAPGGKGELSVPTTSAFNAFRDRFKGRVAVIDEFRTTKIWHKDSTTVLQSVQSEKKGRTVRGLLWCSSTMENSKLFVNRDLNAAINIHNCFTMYPTRPGILARPKKYCKLEVVVGRTIDYKLTGSLQNAVSSEV

SEQ ID NO: 1631 - protein, 378 aa, Microglena sp.
PCLCTTRYCRRPSKKNEKTKNEKHRTFSLLPYKSGFTLSHIPISKMAFFYMVNECHFDSCKADVASKNHQGIWERFANLKKVETVSRKFGYRIVTDGFAVSILMNKPTCLTCSMPADAFSTRAHEYVTTDEGGIVSFLDNVVVAAVDPGVTDIVTVTGLNGGTRSYSSAQYYRKGLIFKSQRQTDVWNLETADIVGGIIPDRDSSSSEQIGAYARFYMGAAPILLAHRASRGYRNLRFRRYCKKQKLIVEIADFVAPRKKSAKVLVGFGDWKGLGATPISRRTCGPLQAIRFELRSRENVIMEDIDEFRTSQRCSCCENHLCNMVALTHRKKQDGTGWECTEGRKRIHKILHCKSSQSGAPRQQSGGMLHCGRLGTAM

SEQ ID NO: 1632 - protein, 251 aa, Microglena sp.
SSSLSVKLTFGTSRRLISSVVSFRIETLRVLNRLVRTPDSTWVPPQSFLPIVLPGGTETSALRRYCKRNRKLIVEIADFVAPRKKSAKVLVGFGDWKGLGATPISRRTCGPLQAIRFELRSRENVIMEDIDEFRTSQRCSCCENHLANMVALTHRKKQDGTGWECTEGRKRIHKILHCKSSQSGAPRQQSGGMLHCGKTWDRDVNASRNILMLTLHQVFGRERPLAFRRDAPRSSSTTPPPPLILIWGHRR

SEQ ID NO: 1633 - protein, 550 aa, Microglena sp.
TMACNSVWANVDSVVIKYLRLKHPSLKKHFNKIVKAVVQYPDSDIDKIIPAGLVHANLIKDVVRRLRDLLPLPRGKQFNTRAHLTMRLFHHVLTELGADLKEKTTKKRPRLFSILPRKSGFTISYVPISSMTLMKLLSMGDSPLESVRGDGRHENHSMLWRKYFNVQGLETKGSRFDNRILSDGKGVSVQMKHQVGKDIAGGGDNAGYPKDASIEDCQDASLRQGALRVGIDPGMTDIVTIASSDGRVESFSSARFSEAAGYNISNRRTNKWNADTQDLVKSIPSPTTSSMQDHVRGYLSALPTLLQHRANRGYRSMRFFRYVGKQKTIEKVCDLIAPKAQKKTIEEKGCDVIAPKAKKTVVGFGNWSNQGYGISRSCSGPVKEIRKCLSRRQNVLFKNVDERNTSCTCHGCFQKLVNMKADSVVWRRVQNEPSALIDGAPTTTTTIEKQKTVVKNVKVHKVLHCRNSVKSASSNVRCGATWNRDVNAAKNLLLLLTTWMDGKERPAAFCVPSSSPPLKNTVSGEANVGAQQTDPPGSVSSLQLLSSGPA

SEQ ID NO: 1634 - protein, 265 aa, Microglena sp.
HDSYVESLRENGAALSTSRTDKISAYLSNYAKFSDEWWRLALRRRESRDNLQRYIGKRKVKDSFWAGIKRCMMKELPGMKVCVAYGSAITKLKPTGPGEVAVPTGAMFASCKRIFKEDVSVTDEFKTTLMSWETGKEKERVYKIPSVCSADVKLRLGGERFGHTKSKTMPKVADCDHLGVRLYNKRKGAQEKHRRGGFATSLVDSQKSIDRYPEVRGLRFSPETCIYSDRDRSSALTIARLHCMELMGLGRPLPFAHSSSVVVDE

SEQ ID NO: 1635 - protein, 391 aa, Microglena sp.
QPSGNTFASRAHMTLPLYHKILSETIEEKRKTKNEKHRTFSLLPYKSGFTLSHIPISKMAFFYMVNECHFDSCKADVASKNHQGIWERFANLKKVETVSRKFGYRIVTDGFAVSILMNKPTCLTCSMPADAFSTRAHEYVTTDEGGIVSFLNNVVVAAVDPGVTDIVTVTGLNGGTRSYSSAQYYRKGLIFKSQRQTDVWNLETADIVGGIIPDRDSSSSEQIGAYARFYMGAAPILLAHRASRGYRNLRFRRYCKKQKLIVEIADFVAPREKSAKVLVGFGDWKGLGATQSLGGLVALSKLFVSSFVAEKTSSWRISMSSEHLNDAAVVRTTFATWWHSLIVRSKTVQVGNVQKDASGFIRFSTAKAVKEERHANRAVVCFTAGRLGTAM

SEQ ID NO: 1636 - protein, 237 aa, Microglena sp.
ASQNSMTINSKRHCPIWVSSFWVWILVGATSLQSRIWQTTKARHGSLHAELFYHKSGIKKQKKQQEKRFSDMIPRWESLRENGAALSTSRTDDISAYLKNYDTFSDEWWRMALLRRESRDNFQRYIGKRKAMDSFWAGIKRNMKLDHPDLRVRVAYGSAITTLKATGPGEVAVPTGSMFASCKRLFKEEVHVTDEFKTTLMSWETGAKKECVYKIPSVQITTEGQIRLGYELLGHTH

SEQ ID NO: 1637 - protein, 468 aa, Microglena sp.
PCLCTTRYCRRPSKKNEKLKTKNIAHSRCCLTNLDSLCRTFRFRKWPFSIWSTSATLIHARQTLLPKTIKEYGSASQTSRKWRQFSRKFGYRIVTDGFAVSILMNKPTCLTCSMPADAFSTRAHEYVTTDEGGIVSFLDNVVVAAVDPGVTDIVTVTGLNGGTRSYSSAQYYRKGLIFKSQRQTDVWNLETADIVGGIIPDRDSSSSEQIGAYARFYMGAAPILLAHRASRGYRNLRFRRYCKKQKLIVEIADFVAPRKKSAKVLVGFGDWKGLGATPISRRTCGPLQAIRFELRSRENVIMEDIDEFRTSQRCSCCENHLCNMVALTHRKKQDGTGWECTEGRKRIHKILHCKSSQSGAPRQKSGGMLHCGKTWDRDVNASRNILMLTLHQVFGRERPLAFRRDAPRSSSTTPPPPPDTDMGHRRLNGLPKRLLGISSRTSSTFCTPQRCPKATICSLDDYKVSHFI

SEQ ID NO: 1638 - protein, 275 aa, Microglena sp.
TLTVSKDGDKLFIFKEILGNMRYFGSKQLHKLMPEENPTHDPKVQKSRFGEYFLVLSVAARDRRAERKPVNPDKVATASIDPGVRKTMVTYSPENEESFMLGQGQASDLVKLLLVHDKLQSRLDTEKTLRSKERMKIKKLMIRIRKTIFYLKKEFRDQTTNFLAARYDVLLVPQLETAKMTISAERELTTKVARQMLTLSHSVLFNRLKEKCEEYGTVFLHVLEHYTSQTCPMCGFLNKCGETYTCKNCQFTCDRDIVGAAGIFLKAVRTENPCS

SEQ ID NO: 1639 - protein, 213 aa, Microglena sp.
ISNFSSNVKLVRTWIHARCAVHEASVDCIGENESVHDHMSEGHVCDLVKLLLVHDKLQSRLDTEKTLRSKERMKIKKLMIRIRKTIFYLKKEFRDQTTNFLAARYDVLLVPQLETAKMTISAERELTTKVARQMLTLSHSVLFNRLKEKCEEYGTVFLHVLEHYTSQTCPMCGFLNKCGETYTCKNCQFTCDRDIVGAAGIFLKAVRTENPCS

SEQ ID NO: 1640 - protein, 303 aa, Microglena sp.
EQHRYSHVSGRRQKQDMEAYTRSFLPQVWYQETEKNSKKNVFSDMIPRWESLRENGAALSTSRTDDISAYLKNYDTFSDEWWRMALLRRESRDNFQRYIGKRKAMDSFWAGIKRNMKLDHPDLRVRVAYGSAITTLKATGPGEVAVPTGSMFASCKRLFKEEVHVTDEFKTTLMSWETGAKKECVYKIPSVQITTEGQIRLGYELLGHTPLKETPNVSYRDQLAVRVYCTRKQIQEKHRRGGLAPSLVDNKSIKRYPEVRGLRFSPETSTYSDRDRSSALTIARLHCMELLGQGRPLPFCRDA

SEQ ID NO: 1641 - protein, 702 aa, Microglena sp.
PRMEHVCDVCIKSSVMYKLCKMATKPPTVAKLKELLKLAEVAYSSKDKKDDIVRLCEDNGLIARPPPEYKTVEKMCVVKCALKKAMSLDDEEFGKFREHVDQLVNVVSRMLRRSSLVLTFHITSLLEKGLDIPDLYNMKDTYWKDWLRIGVDGIFPDEESKISYEAVKDSIGDVIGNDDADYIKSYPIYFDQVLNYAGHTLSTVVSNNAWVPLIPRLARLTSTTLNKLNAPKTLDTSKIIRGYDVMQAIQQEVQNMEGWPESVQEYVNEVREMLSVPDGSRVYDNYGKDMDFPTMVRFNYWIQTRLEDMDARRIRLMPIFNVQRVHVRLDLKTLVNLFRHMFPNDQNIVELSKWEHVKNPESFMLPQRPAQKKKKSCGPGEWDAYKSVLKQYDDDVKDIKATDEYRHAKGLYDTLVNARKTVAGSFFRKPPVKNGWVFDCSICTDGVSLSMQYSKTVQVLVSDLKKTCKKPRKEEGIKIAEKYDGSLKTILPDMGIVVLGVDPGRSNIATVTYLADDKNKTWKLTRGAFYHKSGIKKQTRQKELRFADMIPMWESLRENGAALSTSRTDKISAYLSNYAKFSDEWWRLALRRRESRDNLQRYIGKRKVKDSFWAGIKRCMMKELPGMKVCVAYGSAITKLKPTGPGEVAVPTGAMFASCKRIFKEDVSVTDEFKTTLMSWETGKEKERVLQDPKCLFSRRES

SEQ ID NO: 1642 - protein, 506 aa, Microglena sp.
AKLGSPRRTLGWTQITRNASLHAKWHSVSGGSTFTIRKHFCVSGSHDLPLYHKILSETIEEKRKTKNEKHRTFSLLPYKSGFTLSHIPISKMAFFYMVNECHFDSCKADVASKNHQGIWERFANLKKVETVSRKFGYRIVTDGFAVSILMNKPTCLTCSMPADAFSTRAHEYVTTDEGGIVSFLDNVVVAAVDPGVTDIVTVTGLNGGTRSYSSAKYYRKGLIFKSQRQTDVWNLETADIVGGIIPDRDSSSSEQIGAYARFYMGAAPILLAHRASRGYRNLRFRRYCKKQKLIVEIADFVAPRKKSAKVLVGFGDWKGLGATPISRRTCGPLQAIRFELRSRENVIMEDIDEFRTSQRCSCCENHLCNMVALTHRKKQDGTGWECTEGRKRIHKILHCKSSQSGAPRQQSGGMLHCGKTWDRDVNASRNILMLTLHQVFGRERPLAFRRDAPRSSSTTPPPPPDTDMGTQTVERFTKEATRNIFENLFNLLHPPTLPKSNDLQSG

SEQ ID NO: 1643 - protein, 528 aa, Microglena sp.
LWQRHGLSDMVRFNYWIQTRLEDMDARRIRLMPIFNVQRVHVRLDLKTLVNLFRHMFPNDQNIVELSKWEHVKNPESFMLPQRPAQKKKKSCGPGEWEAYKSVLKQYDDDVKDIKATDEYRHAKGLYDTLVNARKTVAGSFFRKPPVKNGWVFDCSICTDGVSLSMQYSKTVQVLVSDLKKTCKKPRKEEGIKIAEKYDGSLKTILPDMGIVVLGVDPGRSNIATVTYLADDKNKTWKLTRGAFYHKSGIKKQTRQKELRFADMIPMWESLRENGAALSTSRTDKISAYLSNYAKFSDEWWRLALRRRESRDNLQRYIGKRKVKDSFWAGIKRCMMKELPDMKVCVAYGSAITKLKPTGPGEVAVPTGAMFASCKRIFKEDVSVTDEFKTTLMSWETGKEKERVYKIPSVCSADVKLRLGGERFGHTKSKTMPKVADCDHLGVRLYNKRKGAQEKHRRGVFATSLVDSQKSIERYPEVRGLRFSPETCIYSDRDRSSALTIARLHCMELMGLGRPLPFAHSSSVVVDE

SEQ ID NO: 1644 - protein, 575 aa, Microglena sp.
TNIWKHEENLDVIFKMSPHTTKLPTKLPTSRLRSAKSAVALAKKRVGRKEPEGSPLRVRLTKLQERLEKLSEAWLSSKNLRVDADNAKRFFAREVAFCLRGVLPLPSGNTFASRAHMTLPLYHKILSETIEEKRKTKNEKHRTFSLLPYKSGFTLSHIPISKMAFFYMVNECHFDSCKADVASKNHQGIWERFANLKKVETVSRKFGYRIVTDGFAVSILMNKPTCLTCSMPADAFSTRAHDYVTTDEGGIVSFLDNVVVAAVDPGVTDIVTVTGLNGGTRSYSSAKYYRKGLIFKSQCQTDVWNLETADIVGGIIPDRDSSSSEQIGAYARFYMGAAPILLAHRASRGYRNLRFRRYCKKQKLIVEIADFVAPRKKSAKVLVGFGDWKGLGATPISRRTCGPLQAIRFELRSRENVIMEDIDEFRTSQRCSCCENHLCNMVALTHRKKQDGTGWECTEGRKRIHKILHYKSSQSGAPRQQSGGMLHCGKTWDRDVNASRNILMLTLHQVFGRERPLAFRRDAPRSSSTTPPPDTDMGTQTVERFTKEATRNIFENLFNLLHPPTLHKSNDLQSG

SEQ ID NO: 1645 - protein, 441 aa, Microglena sp.
SLQLRKKSCGPGEWEAYKLAQQKYDADVNDIKDTDEYRHAKGRYDTLVNARKTVAGSFFKKPPVKTGWVFDCSICTDGVSLSMQYSKTVQVRVSDLKKTSKRSRDDEGMSVSEQYDHKLKTTLPDMGIVVLGVDPGRSNIATVTYLADDKSKTWKLTRGAFYHKSGIKKQKKQQEKRFSDMIPRWEFLRENGAALSTSRTDDISAYLKNYATFSDEWWRMALLRRESRDNFQRYIGKRKAMDSFWAGIKRNMKLDHPDLRVRVAYGSAITTMKATGPGEVAVPTGSMFASCKRLFKEEVHVTDEFKTTLMSWETGAKKECVYKNPSVQITTEGQIRLGYELLGHTPLKETPNVSYRDQLAVRMYCTRKQIQEKHRRGGLAPSLVDNNSIKRYPEVRGLRFSPETSTYSDRDRSSALTIARLHCMELLGQGRPLPFCRDACC

SEQ ID NO: 1646 - protein, 243 aa, Microglena sp.
CLRKTRPTIRRSKNPASANISSYCLLLLGTEGQSGSLSIQTRLQLPPSTQASERQWSRTHLRMRKSFMLGQGQASDLVKLLLVHDKLQSRLDTEKTLRSKERMKIKKLMIRIRKTIFYLKKEFRDQTTNFLAARYDVLLVPQLETAKMTISAERELTTKVARQMLTLSHSVLFNRLKEKCEEYGTVFLHVLEHYTSQTCPMCGFLNKCGETYTCKNCQFTCDRDIVGAAGIFLKAVRTENTCS

SEQ ID NO: 1647 - protein, 257 aa, Microglena sp.
RVSVQMKQKGKEEVVEEGENAGYPKDANIVECKDAVGALRVGVDPGMTDIVTVASSAGRIESFSSARFSEVAGYNTSKRRTYKWNDETQDLVKSIPSPNTSNMSDLQDHVRAYLKALPILLQHRANKGYRSMRFFRYVGKQKTIEKVCDVIAPRAQTTVVGFGNWSNQGYGISRSCSGPIKEIRRCLSRRKNVLFKNVDERNTSCKCHGCFQRLVNMKADSVVWRGVCKESPIDGSITVEKQKMVVKKRQGPQSTAL

SEQ ID NO: 1648 - protein, 254 aa, Microglena sp.
SPFHRPNTSNMSDLQDHVRAYLKALPILLQHRANKGYRSMRFFRYVGKQKTIEKVCDVIAPRAQTTVVGFGNWSNQGYGISRSCSGPIKEIRRCLSRRKNVLFKNVDERNTSCTCHGCFQKLVNMKADSVVWRRVQNEPPSLINGAPTTTIEKQKTVVKNVKVHKVLHCRNSVKSASSNVRCGATWNRDVNAAKNLLLFLTTWMDGKERPATFCVPSSSPTPKTTVSGEANVGAQPTDPPGSVSSLQLLSSGPA

SEQ ID NO: 1649 - protein, 325 aa, Microglena sp.
NDIARYGIVVLGVDPGRSNIATVTYLADDKNKTWKLTRGAFYHKSGIKKQTRQKELRFADMIPMWESLRENGAALSTSRTDKISAYLSNYAKFSDEWWRLALRRRESRDNLQRYIGKRKVKDSFWAGIKRCMMKELPDMKVCVAYGSAITKLKPTGPGEVAVPTGAMFASCKRIFKEDVSVTDEFKTTLMSWETGKEKERVYKIPSVCSADVNLRLGGERFGHTKSKTMPKVADCDHLGVRLYNKRKGAQEKHRRGGFATSLVDSQKSIERYPEVRGLRFSPETCIYSDRDRSSALTIARLHCMELMGLGRPLPFSHSSSVVVDE

SEQ ID NO: 1650 - protein, 299 aa, Microglena sp.
GMTCCSRSQLSLKKYRFEFTLTVTCTFRRLRSLRKVCNIYNVSKSSLHRWVNADQVGKSKRLKRKRKELSMLLRSTISNNIAEIIPDRDSSSSEQIGAYARFYMGAAPILLAHRASRGYRNLRFRRYCKKQKLIVEIADFVAPRKKSAKVLVGFGDWKGLGATPISRRTCGPLQAIRFELRSRENVIMEDIDEFRTSQRCSCCENHLCNMVALTHRKKQDGTGWECTEGRKRIHKILHCKSSQSGAPRQQSGGMLHCGKTWDRDVNVPPTVMVSLCESTRHVPPTVMVSLCESTRHVPP

SEQ ID NO: 1651 - protein, 491 aa, Microglena sp.
RETLLCTRSGILSQGGSTFTIRKHFCVSGSHDPASVPQDIVGDHRRKTKNEKRKTSHILVVALQSGFTLSHIPISKMAFFYMVNECHFDSCKADVASKNHQGIWERFANLKKVETVSRKFGYRIVTDGFAVSILMNKPTCLACSMPAGAFSTRAHEYVTTDEGGIVSFLDNVVVAAVDPDVTDIVTVTGLNGGTRSYSSAQYYRKGLIFKSQRQTDVWNLETADIVGGIIPDRDSSSSEQIGAYARFYMGAAPILLAHRASRGYRNLRFRRYCKKQKLIVEIADFVAPRKKSAKVLVGFGDWKGLGATPISRRTCGPLQAIRFELRSRENVIMEDIDEFRTSQRCSCCENHLCNMVALTHRKKQDGTGWECTEGRKRIHKILHCKSSQSGAPRQQSGGMLHCGKTWDRDVNASRNILMLTLHQVFGRERPLAFRRDAPRSSSTTPPPPPDTDMGTQTVERFTKEATRNIFENLFNLLHPPTLPKSNDLQSG

SEQ ID NO: 1652 - protein, 546 aa, Microglena sp.
TSIGKSAVALAKKRVGRKEPEGSPLRVRLTKLQERLEKLSEAWLSSKNLRVDADNAKRFFAREVAFCLRGVLPLPSGNTFASRAHMTLPLYHKILSETIEEKRKTKNEKHRTFSLLPYKSGFTLSHIPISKMAFFYMVNECHFDSCKADVASKNHQGIWERFANLKKVETVSRKFGYRIVTDGFAVSILMNKPTCLTCSMPADAFSTRAHEYVTTDEGGIVSFLDNVVVAAVDPGVTDIVTVTGLNGGTRSYSSAKYYRKGLIFKSQRQTDVWNLETADIVGGIIPDRDSSSSEQIGAYARFYMGAAPILLAHRASRGYRNLRFRRYCKKQKLIVEIADFVAPRKKSAKVLVGFGNWKGLGATPISRRTCGPLQAIRFELRSRENVIMEDIDEFRTSQRCSCCENHLCNMVALTHRKKQDGTGWECTEGRKRIHKILHCKSSQSGAPRQQSGGMLHCGKTWDRDVNASRNILMLTLHQVFGRERPLAFRRDAPRSSSTTPPPPPDTDMGTQTVERFTKEATRNIFENLFNLLHPPTLPKSNDLQSG

SEQ ID NO: 1653 - protein, 299 aa, Microglena sp.
GKMYTVSRKFGYRIVTDGFAVSILMNKPTCLTCSMPADAFSTRAHEYVTTDEGGIVSFLDNVVVAAVDPGVTDIVTVTGLNGGTRSYSSAKYYRKGLIFKSQRQTDVWNLETADIVGGIIPDRDSSSSEQIGAYARFYMGAAPILLAHRASRGYRNLRFRRYCKKQKLIVEIADFVARERRALRYSSGLVIGKVWGRRQSLGGLVALSKLFVSSFVAEKTSSWRTSMSSEHLNDAAAVRTTFATWWHSLIVRSKTVQVGNVQKDASGFIRFSTAKAVKAERHANRAVVCFTAGRLGTAM

SEQ ID NO: 1654 - protein, 421 aa, Microglena sp.
RDRIPPIPPLRYPLLGSKGRPHSDTFSPTGANKDVAEDSALDHRQDEINRQWLKSVSNSAKMIRYNVFINRYLEATEDEGYAKLVNIAPIPTVKHSFITIDTDGLLGVLKDVGLVESLEKTLTNKEHWESVFDVENIRSTGKGVFTCTIDTDSVMACTHFLRAEKKKISIKDDGTAIKKQTKTLREFSESDPNVVVVANDPGRCNIAFLTWKKNKVEEKDNGGRKRKRHCEFGSKRLTRERYYVESGVFKSRGPTKKWLSNIQDCLDDLKDNSPKRTSLESFDAYVTVMVNHWDSRWGEMSKSRWGAQRLRLYGGKKRVLARFFNEVQADVGERKTIVIAYGSSKFAPGGKGELSVPTTSAFNAFRDRFKGRVAVIDEFRTTKIWHKDSTTVLQSVQSEKKGERFEACYGAVPPWRTASCL

SEQ ID NO: 1655 - protein, 250 aa, Microglena sp.
VHRGRIISPRTCQITLSFSDEWWRLALRRRESRDNLQRYIGKRKVKDSFWAGIKRCMMKELPDMKVCVAYGSAITKLKPTGPGEVAVPTGAMFASCKRIFKEDVSVTDEFKTTLMSWETGKEKERVYKIPSVCLADVKLRLGGERFGHTKSKTMPKVADCDHLGVRLYNKRKGAQEKHRRGGFATSLVDSQKSIERYPEVRGLRFSPETCIYSDRDRSSALTIARLHCMELMGLGRPLPFAHSSSVVVDE

SEQ ID NO: 1656 - protein, 401 aa, Microglena sp.
FHARQTLLPKTIKEYGSASQNLKKVETVSRKFGYRIVTDGFAVSILMNKPTCLTCSMPAGAFSTRAHEYVTTDEGGIVSFLDNVVVAAVDPGVTDIVTVTGLNGGTRSYSSAKYYRKGLIFKSQRQTDVWNLETADIVGGIIPDRDSSSSEQIGAYARFYMGAAPILLAHRASRGYRNLRFRRYCKKQKLIVEIADFVAPRKKSAKVLVGFGDWKGLGATPISRRTCGPLQAIRFELRSRENVIMEDIDEFRTSQRCSCCENHLCNMVALTHRKKQDGTCWECTEGRKRIHKILHCKSSHSGAPRQQSGGMLHCGKTWDRDVNASRNILMLTLHQVFGRERPLAFRRDAPRSSSTTPTPDTDMGTQTVERFTKEATRNIFENLFNLLHPPTLPKSNDLQSG

SEQ ID NO: 1657 - protein, 478 aa, Microglena sp.
TCSGTCSPMTRTSLSFSKWEHVKNPDSFMLSQRPAQKKKKSCGPGEWEAYKSVMKQYDDDVKDIKATDEYRHAKGLYDTLVNARKTVAGSFFRKPPVKNGWVFDCSICTDGVSLSMQYSKTVQVLVSDMKKTCKNPRKEEGIKIAEKYDGSLKTILPDMGIVVLGVDPGRSNIATVTYLADDKNKTWKLTRGAFYHKSGIKKQTRQKELRFADMIPMWESLREIGAALSTSRTDKISAYLSNYAKFSEEWWRLALRRRESRDNLQRYIGKRKVKDFFWAGIKRCMMKELPDMKVCVAYGSAITKLKPTGPGEVAVPTGAMFASCKRIFKEDVSVTDEFKTTLMSWETGKEKERVYKIPSFCSADVKLRLGGERFGHTKSKTMPKVADCDHLGVRLYNKRKGAQEKHRRGGFATSLVYSQKSIERYPEVRGLRFSPETCIYSDRDRSSALTIARLHCMELMGLGRPLPFAHSSSVVVDE

SEQ ID NO: 1658 - protein, 232 aa, Microglena sp.
KITIRFPTSGWRMALLRRESRDNFQRYIGKRKAMDSFWAGIKRNMKLDHPDLRVRVAYGSAITTLKATGPGEVAVPTGSMFASCKRLFKEEVHVTDEFKTTLMSWETGAKKECVYKIPSVQITTEGQIRLGYELLGHTPLKETPNVSYRDQLAVRVYCTRKQIQEKHRRGGLAPSLVDNKSIKRYPEVRGLRFSPETSTYSDRDRSSALTIARLHCMELLGQGRPLPFCRDA

SEQ ID NO: 1659 - protein, 690 aa, Microglena sp.
WRMGSASHHRWYMRLTNMMTLQNLSIMKGEEDGECAPGRAICVVKMKLSTFIPHDWLRNKIDTLVLDMNKLLGEGYIFANFHIARLFENGIAVPPVNRNFFYRCIIAVSTNKCNGSTLGEDFESSRLLFDLLREPGQSKVDIRGRVKNQIIADLSILMATMASNHLWTNLERRITTYLKWKYPQIAKRLRSDIVAALIKCPTKNLDDIFKMSPHTTKLPTKLPTSRLRSAKSAVALAKKRVGRKEPEGSPLRVRLTKLQDRLEKLSEAWLSSKNLRVDADNAKRFFAREVAFCLRGVLPLPSGNTFASRAHMTLPLYHKILSETIEEKRKTKNEKHRTFSLLPYKSGFTLSHIPISKMAFFYMVNECHFDSCKADVASKNHQGIWERFANLKKVETVSRKFGYRIVTDGFAVSILMNKPTCLTCSMPADAFSTRAHEYVTTDEGGIVSFLDNVVVAAVDPGVTDIVTVTGLNGGTRSYSSAQYYRKGLIFKSQRQTDVWNLETADIVGGIIPDRDSSSSEQIGAYARFYMGAAPILLSHRASRGYRNLRFRRYCKKQKLIVEIADFVAPRKKSAKVLVGLVIGKVWGRRQSLGGLVALSKLFVSSFVAEKTSSWRTSMSSEHLNDAAAVRTTFATWWHSLIVRSKTVQVGNVQKDASGFIRFSTAKAVKAERHANRAVVCFTAGRLGTAM

SEQ ID NO: 1660 - protein, 215 aa, Microglena sp.
LLQKPQKKTIEEKVCDVIAPRHRRPLLLRQLVQPRVWYQSFLFWTRERDQEVPFTSSECLFKNVDERNTSCTCHGCFQKLVNMKADSVVCAEFKTSPPPSSNGLLQQQQQRFEKQKTVVKNVKVHKVLHCRNSVKSASSNVRCGATWNRDVNAAKNLLLLLTTWMDGKERPAAFCVPSSSPTPKTTVSGEANVGAQQTDPPGSVSSLQLLSSGPA

SEQ ID NO: 1661 - protein, 302 aa, Microglena sp.
EQHRYSHVSGRRQKQDMEAYTRSFLPQVWYQETEKQQEKRFSDMIPRWESLRENGAALSTSRTDDISAYLKNYDTFSDEWWRMALLRRESRDNFQRYIGKRKAMDSFWAGIKRNMKLDHPDLRVRVAYGSAITTLKATGPGEVAVPTGSMFASCKRLFKEEVHVTDEFKTTLMSWETGAKKECVYKIPSVQITTEGQIRLGYELLGHTPLKETPNVSYRDQLAVRVYCTRKQIQEKHRRGGLAPSLVDNNSIKRYPEVRGLRFSPETSTYSDRDRSSALTIARLHCMELLGQGRPLPFCRDA

SEQ ID NO: 1662 - protein, 802 aa, Microglena sp.
PRMEHVCDVCIKSSVMYKLCKMATKPPTVAKLKELLKLAEVAYSSKDKKDDIVRLCEDNGLIARPPPEYKTVEKMCVVKCALKKAMSLDDEEFGKFREHVDQLVNVVSRMLRRSSLVLTFHVTRLMEGDLPIPNMYDMKDTYWKDWLRIGVDGVFPDEESRISYEAVKDVIGKVLGSDDPDYINSYPIYFDQVLNYAGHTLSTVVSNNAWVPLVPRLTRLTKATLNALEAPKTIRVYDVMRVIQQEIQEMESWPESVQEYVREVRVRLKVPDGSRLYDDYGKDMDFPTMVRFNYWMQTRLEAIGARRIRLMPIFNVQRAHVRLDMKTLVNLFRHVFPKDPNIVELSKWKDVKDPDRFMLPLKPAFKKKKSCGPGGWEAYKLAQQKYDAGVNDIKDTDEYRHAKGRYDTLVNARKTVAGSFFKKPPVKTGWVFDCSICTDGVSLSMQYSKTVQVRVSDLKKTSKRSRDDEGMSSEQYDHKLKTTLPDMGIVVLGVDPGRSNIATVTYLADDKSKTWKLTRGAFYHKSGIKKQKKQQEKRFSDMIPRWESLRENGAALSTSRTDDISAYLKNYDTFSDEWWRMALLRRESRDNFQRYIGKRKAMDSFWAGIKRNMKLDHPDLRVRVAYGSAITTLKATGPGEVAVPTGSMFASCKRLFKEEVHVTDEFKTTLMSWETGAKKECVYKIPSVQITTEGQIRLGYELLGHTPLKETPKVSYRDQLAVRVYCTRKQIQEKHRRGGLAPSLVDNNSIKRYPEVRGLRFSPETSTYSDRDRSSALTIARLHCMELLGQGRPLPFCRDACC

SEQ ID NO: 1663 - protein, 258 aa, Microglena sp.
ASQNSMTINSKRHCPIWVSSFWVWILVGATSLQSRIWQTTKARHGSLHAELFTTSLVSRNRKNSKKKRFSDMIPRWESLRENGAALSTSRTDDISAYLKNYDTFSDEWWRMALLRRESRDNFQRYIGKRKAMDSFWAGIKRNMKLDHPDLRVRVAYGSAITTLKATGPGEVAVPTGSMFASCKRLFKEEVHVTDEFKTTLMSWETGAQEGMCLQNSKCPNNHGRADSSRLRVVGSHPIEGDSKCLLSRPVGGEGVLHT

SEQ ID NO: 1664 - protein, 463 aa, Microglena sp.
KPQHVGIRPRRVPFSAKTQSRSDYSGNMETREYKPELCCVPTQTLERIQYIPYTAHVNKSKKNHQGIWERFANLKKVETVSRKFGYRIVTDGFAVSILMNKPTCLTCSMPADAFYTRAHEYVTTDEGGIVSFLDNVVVAAVDPGVTDIVIVTGLNGGTRSYSSAQYYRKGLIFKSQRQTDVWNLETADIVGGIIPDRDSSSSEQIGAYARFYMGAAPILLSHRASRGYRNLRFRRYCKKQKLIVEIADFVAPRKKSAKVLVGFGDWKGLGATPISRRTCGPLQAIRFELRSRENVIMEDIDEFRTSQRCSCCENHHCNMVALTHRKKQDGTGWECTEGRKRIHKILHCKSSQSGAPRQQSGGMLHCGKTWDRDVNASRNILMLTLHQVFGESVLSRFAETRREVPRQPHPHPLILIWGHRRLNGLPKRLLGISSRTSSTFCTPQSCPKATICSLDDYKVSHFI

SEQ ID NO: 1665 - protein, 330 aa, Microglena sp.
ASQNSMTINSKRHCPIWVSSFWVWILVGATSLQSRIWQTTKARHGSLHAELFTTSLVSRNRKKQQEKRFSDMIPRWESLRENGAALSTSRTDDISAYLKNYDTFSDEWWRMALLRRESRDNFQRYIGKRKAMDSFWAGIKRNMKLDHPDLRVRVAYGSAITTLKATGPGEVAVPTGSMFASCKRLFKEEVHVTDEFKTTLMSWETGAKKECVYKIPSVQITTEGQIRLGYELLGHTPLKETPKVSYRDQLAVRVYCTRKQIQEKHRRGGLAPSLVDNNSIKRYPEVRGLRFSPETSTYSDRDRSSALTIARLHCMELLGQGRPLPFCRDA

SEQ ID NO: 1666 - protein, 463 aa, Microglena sp.
AFQVGTCKESRQLHVTQRPAQKKKKSCGPGEWEAYKSVMKQYDDDVKDIKATDEYRHAKGLYDTLVNARKTVAGSSFRKPPVKNGWVFDCSICTDGVSLSMQYSKTVQVLVSDLKKTCKKPRKEEGIKIAEKYDGSLKTLLPDMGIVVLGVDPGRSNIATVTYLADDKNKTWTLTRGAFYHKSGIKKQTRQKELRFADMIPMWESLRENGAALSTSRTDKISAYLSNYAKFSDEWWRLALRRREYCDNLQRYIGKRKVKDSFWAGIKRCMMKELPDMKVCVAYGSAITKLKPTGPGEVAVPTGAMFASCKRIFKEDVSVTDEFKTTLMSWETGKEKERVYKIPSVCSADVKLRLGGERFGHTKSKTMPKVADCDHLGVRLYNKRKGAQEKHRRGGFATSLVDSQKSIERYPVVRGLRFSPETCIYSDRDRSSALTIARLHCMELMGLGRPLPFAHSSSVVVDE

SEQ ID NO: 1667 - protein, 217 aa, Microglena sp.
GILHAWSGQASDLVKLLLVHDKLQSRLDTEKTLRSKREDEDKEADDSHSEDNFLPQERILGTRQQISWPLATMCCWYLNWRRRKMTISAERELTTKVARQMLTLSHSVLFNRLKEKCEEYGTVFLHVLEHYTSQTCPMCGFLNKCGETYTCKNCQFTCDRDIVGAAGIFLKAVSNRKSLFVKDSIPWGVDPYDTPMENSLSFLLHVPRAPGCLVRNS

SEQ ID NO: 1668 - protein, 302 aa, Microglena sp.
RIWQTIKNKTWKLTRGAFYHKSGIKKQTRQKELRFADMIPMWESLRENGAALSTSRTDKISAYLSNYAKFSDEWWRLALRRRESRDNLQRYIGKRKVKDSFWAGIKRCMTKELPDMKVCVAYGSAITKLKPTGPGEVAVPTGAMFASCKRIFKEDVSVTDEFKTTLMSWETGKEKERVYKIPSVCSADVKLRLGGERFGHTKSKTMPKVADCDHLGVRLYNKRKGAQEKHRRGGFATSLVDSQKSIERYPEVRGLRFSPETCIYSDRDRSSALTIARLHCMELMGLGRPLPFAHSSSVVVDE

SEQ ID NO: 1669 - protein, 280 aa, Microglena sp.
TPEKTVAGSFFKKPPVKTGWVFDCSICTDGVSLSMQYSKTVQVRVSDLKKTSKRSRDDEGMSVSEQYDHKLKTTLPDMGIVVLGVDPGRSNIATVTYLADDKSKTWKLTRGAFYHKSGIKKQKKQQEKRFSDMIPRWESLRENGAALSTSRTDDISAYLKNYDTFSDEWWRMALLRRESRDNFQRYIGKRKAMDSFWAGIKRNMKLDHPDLRVRVAYGSAITTLKATGPGEVAVPTGSMFASCKRLFKEEVHVTDEFKTTLMSWKPVPRRNVFTKFQVSK

SEQ ID NO: 1670 - protein, 237 aa, Microglena sp.
YLGLLEKLRYVFRRVVEDGTPSQRIRDNFQRYIGKRKAMDSFWAGIKRNMKLDHPDLRVRVAYGSAITTLKATGPGEVAVPTGSMFASCKRLFKEEVHVTDEFKTTLMSWETGAKKECVYKIPSVQITTEGQIRLGYELLGHTPLKETPNVSYRDQLAVRVYCTRKQIQEKHRRGGLAPSLVDNNSIKRYPEVRGLRFSPETSTYSDRDRSSALTIARLHCMELLGQGRPLPFCRDA

SEQ ID NO: 1671 - protein, 339 aa, Microglena sp.
EQHRYSHVSGRRQSKTWKLTRGAFYHKSGIKKQKKQQEKRFSDMIPRWESLRENGAALSTSRTDDISAYLKNYDTFSDEWWRMALLRRESRDNFQRYIGKRKAMDSFWAGIKRNMKLDHPDLRVRVAYGSAITTLKATGPGEVAVPTGSMFASCKRLFKEEVHVTDEFKTTLMSWETGAKKECVYKIPSVQITTEGQIRLGYELLGHTPLKETPNVSYRDQLAVRVYCTRKQIQEKHRRGGLAPSLVDNNRSSGTLRYEDCDSLQKPALTRTGPLLCSHNRKAALHGTVGSRETASILQGCVMVDGLQKNMMVFHCPVGRYTIRLHHKVYRTLQEAVSF

SEQ ID NO: 1672 - protein, 402 aa, Microglena sp.
FMQGRRCFQNHQGIWERFANLKKVETVSRKFGYRIVTDGFAVSILMNKPTCLTCSMPADAFSTRAHEYVTTDEGGIVSFLDNVVVSAVDPGVTDIVTVTGLNGGTRSYSSAKYYRKGLIFKSQRQTDVWNLETADIVGGIIPDRDSSSSEQIGAYARFYMGAAPNPSCPSCFQGYRNLRFRRYCKKQKLIVEIADFVAPRKKSAKVLVGFGDWKGLGATPISRRTCGPLQAIRFELRSRENVIMEDIDEFRTSQRCSCCENHLCNMVALTHRKKQDGTGWECTEGRKRIHKILHCKSSQSGAPRQQSGGMLHCGKTWDRDVNASRNILMLTLHQVFGRERPLAFRRDAPRSSSTTPPPPPDTDMGTQTVERFTKEATRNIFENLFNLLHPPTLPKSNDLQSG

SEQ ID NO: 1673 - protein, 330 aa, Microglena sp.
ASQNSMTINSKRHCPIWVSSFWVWILVGATSLQSRIWQTTKARHGSLHAELFTTSLVSRKKKKQQEKRFSDMIPRWESLRENGAALSTSRTDDISAYLKNYDTFSDEWWRMALLRRESRDNFQRYIGKRKAMDSFWAGIKRNMKLDHPDLRVRVAYGSAITTLKATGPGEVAVPTGSMFASCKRLFKEEVHVTDEFKTTLMSWETGAKKECVYKIPSVQITTEGQIRLGYELLGHTPLKETPNVSYRDQLAVRVYCTRKQIQEKHRRGGLAPSLVDNNSIKRYPEVRGLRFSPETSTYSDRDRSSALTIARLHCMELLGQGRPLPFCRDA

SEQ ID NO: 1674 - protein, 570 aa, Microglena sp.
LDMIRRLGRPCRYRSRAHMTLPLYHKILSETIEEKRKTKNEKHRTFSLLPYKSGFTLSHIPISKMAFFYMVNECHFDSCKADVASKNHQGIWERFANLKKVETVSRKFGYRIVTDGFAVSILMNKPTCLTCSMPADAFSTRAHEYVTTDEGGIVSFLDNVVVSAVDPGVTDIVTVTGLNGGTRSYSSAKYYRKGLIFKSQRQTDVWNLETADIVGGIIPDRDSSSSEQIGAYARFYMGAAPILLAHRASRGYRNLRFRRYCKKQKLIVEIADFVAPRKKSAKVLVGFGDWKGLGATPISRRTCGPLQAIRFELRSRENVIMEDIDEFRTSQRCSCCENHLCNMVALTHRKKQDGTGWECTEGRKRIHKILHCKSSQSGAPRQQSGGMLHCGKTWDRDVNASRNILMLTLHQVFGRERPLAFRRDAPRSSSTTPPPDTDMGTQTVERFYQRGYSEYLREPLQPSAPPNVAQKQRSAVWMIIKCPTLFENNCKLEDISPLSRLTSLTNLDISYTSVEDISPLSRLTSLTHLNISSTYVDNLSPLSGLTALTHLQSTSKRSIELAEHSFHWFI

SEQ ID NO: 1675 - protein, 250 aa, Microglena sp.
VHRRTDKISAYLSNYAKFSDEWWRLALRRRESRDNLQRYIGKRKVKDSFWAGIKRCMMKELPDMKVCVAYGSAITKLKPTGPGEVAVPTGAMFASCKRIFKEDVSVTDEFKTTLMSWETGKEKERVYKIPSVCSADVNLRLGGERFGHTKSKTMPKVADCDHLGVRLYNKRKGAQEKHRRGGFATSLVDSQKSIERYPEVRGLRFSPETCIYSDRDRSSALTIARLHCMELMGLGRPLPFSHSSSVVVDE

SEQ ID NO: 1676 - protein, 460 aa, Microglena sp.
LHQLLPIYFDQVLNYAGHTLSTVVSNNAWVPLVPRLTRLTKATLNALGAPKTIRVYDVMRVIQQEIQEMESWPESVQEYVREVRVRLKVPDGSRLYDDYGKDMDFPTMVRFNYWMQTRLEAIGARRIRLMPIFNVQRSHVRLDMKTLVNLFRHVFPKDPNIVELSKWKDVKDPDRFMLPLKPAVKKKKSCGPGEWEAYKLAQQKYDADVNDIKDTDEYRHAKGRYDTLVNARKTVAGSFFKKPPVKTGWVFDCSICTDGVSLSMQYSKTVQVRVSDLKKTSKRSRDDEGMSVSEQYDHKLKTTLPDMGIVVLGVDPGRSNIATVTYLADDKSKTWKLTRGAFYHKSGIKKQKKQQEKRFSDMIPRWESLRENGAALSTSRTDDISAYLKNYDTFSDEWWRMALLRRESRDNFQRYIGKRKAMDSFWAGIKRNMKLDHPDLRVRVAYGSAITTLKATDQER

SEQ ID NO: 1677 - protein, 285 aa, Microglena sp.
TDVWNLETADIVGGIIPDRDSSSSEQIGAYARFYMGAAPILLAHRASRGYRNLRFRRYCKKQKLIVEIADFVARERKSAKVLVGFGDWKGLGATPISRRTCGPLQAIRFELRSRENVIMEDIDEFRTSQRCSCCENHLCNMVALTHRKKQDGTGWECTEGRKRIHKILHCKSSQSGAPRQKSGGMLHCGKTWDRDVNASRNILMLTLHQVFGRERPLAFRRDAPRSSSTTPPPPLILIWGHRRLNGLPKRLLGISSRTSFNLLHPQRCPKATICSLDDYKVSHFI

SEQ ID NO: 1678 - protein, 513 aa, Microglena sp.
LLDTDTVGDMDARRIRLMPIFNVQRVHVRLDLKTLVNLFRHMFPNDQNIVELSKWEHVKNPDSFMLPQRPAQKKKKSCGPGEWEAYKSVLKQYDDDVKDIKATDEYRHAKGLYDTLVNARKNSRRFLLQKPPVKNGWVFDCSICTDGVSLSMQYSKTVHVLVSDLKKTCKNPRKEGIKIAEKYDGSLKTILPDMGIVVLGVDRGRSNIATVTYLADDKNKTWTLTRGAFYHKSGIKKQTRQKELRFADMIPMWESLRENGAALSTSRTDKISAYLSNYAKFSEEWWRLALRRRESRDNLQRYIGKRKVKDSLWAGIKRCMMKELPDMKVCVAYGSAITKLKPTGPGEVAVPTGAMFASCKRIFKEDVSVTDEFKTTFMSRETGKEKERVYKIPSVCSADVKLRLGGERFGHTKSKTMPKFADCDHLGVRLYNKRKGTQEKHRRGGFATSLVDSQKSIEQYPEVRGLRFSPETCIYSDRDRSSALTIARLHCMELMGLGRPLPFAHSSSVVVDA

SEQ ID NO: 1679 - protein, 252 aa, Microglena sp.
TDWCVRQILHGCRPNPSCPSCFQGYRNLRFRRYCKKQKLIVEIADFVAPRKKSAKVLVGFGDWKGLGATPISRRTCGPLQAIRFELRSRENVIMEDIDEFRTSQRCSCCENHLCNMVALTHRKKQDGTGWECTEGRKRIHKILHCKSSQSGAPRQQSGGMLHCGKTWDRDVNASRNILMLTLHQVFGRERPLAFRRDAPRSSSTTPPPPPDTDMGTQTVERFTKEATRNIFENLFNLLHPPTLPKSKDLQSG

SEQ ID NO: 1680 - protein, 297 aa, Microglena sp.
HLPLRELPVCKFFSGESSCEREPNSISASEFKKSDLRQIGAYARFYMGAAPILLAHRASRGYRNLRFRRYCKKQKLIVEIADFVAPRKNSAKVLVGFGDWKGLGATPISRRTRGPLQAIRFELRSRENVIMEDIYEFRTSQRCSCFENHLCNMVALTHRKKQDGTGWECTEGRKRIHKILHCKSSQSGAPRQQSGGMLHCGKTWDRDVNASRNILMLTLHQVFGESVLSRFAETRREVPRQPHPHPLILIWGHRRLNGLPKRLLGISSRTSSTFCTPQRCPKATICSLDDYKVSHFI

SEQ ID NO: 1681 - protein, 339 aa, Microglena sp.
NQVQVRGSLQIFFEESQEVCNMCPKLTTYRWVNADQVGKSKRLKRKLLRSRYPIILQRTGMHSFLENLLARGSKQHICLRIQEVRFEADWCVRRFYMGAAPILLAHRASRGYRNLRFRRYCKKQKLIVEIADFVAPRKNSAKVLVGFGDWKGLGATPISRRTRGPLQAIRFELRSRENVIMEDIYEFRTSQRCSCFENHLCNMVALTHRKKQDGTGWECTEGRKRIHKILHCKSSQSGAPRQQSGGMLHCGKTWDRDVNASRNILMLTLHQVFGRERPLAFRRDAPRSSSTTPPPPPDTDMGTQTVERFTKEATRNIFENLFNLLHPPTLPKSNDLQSG

SEQ ID NO: 1682 - protein, 688 aa, Microglena sp.
GNVGATLYHQKKKNTHPLLMGVVQDKGDDEINISVVKKTLNSLCMDVSRHQISSRIQSMVLLINHAVAEAYLFANFHITRCLDDGDFDVKQLPHLDRNFYYRCLLAVSTSNVRKDTLGQSFNDTMVAFDALRPAGYVKVDVRPWGQVIADVSIQMATMACNSVWANVDRVVIKYLRLKHPSLKKHFKKIVKAVVLYPESKIDTIIPEGLVHAIHIKEVVSHLRALFPLPRGKQFNTRAHLTMRLFHHVLTELGKVGRVDPKDKKTRKSHPRLFSILPRKNGFTISYVPISSMTFMKLLSMGDSPLENVSGDGRYENHTMLWRKYFNVQGLETKRSRFDNRILSDGKGVSVQMKQKGKEEVVEEGENAGYPKDANIVECKDAVGALRVGVDPGMTDIVTVASSAGRIESFSSARFSEVAGYNTSKRRTYKWNDETQDLVKSIPSPNTSNMSDLQDHVRAYLKALPILLQHRANKGYRSMRFFRYVGKQKTIEKVCDVIAPRAQTTVVGFGNWSNQGYGISRSCSGPIKDIRRCLSRRKNVLFKNVDERNTSCKCHGCFQRLVNMKADSVVWRGVCKESPIDGSITVEKQKMVVKNVKVHKVLHCRDSVKSASSNVRCGATWNRDVNAAKNILLLLTTWMDGRERPEAFCVPSPPPKTTVSIEASVSAKPTDPPGFVSSLHCYPLGQLKC

SEQ ID NO: 1683 - protein, 447 aa, Microglena sp.
ILGHKHNYGKDMDFPTMVRFNYWIQTRLEDMDARRIRLMPIFNVQRVHVRLDLKTLVNLFRHMFPNDQNIVELSKWEHVKNPDSFMLPQRPAQKKKKSCCPGEWDAYKSVLKQYDDDVKDIKATDEYRHAKGLYDTLVNARKTVAGSFFRKPPVKNGWVFDCSICTDGVSLSMQYSKTVQVLVSDLKKTRKKPRKEEGIKIAEKYDGSLKTILPDMGIVVLGVDPGRSNIATVTYLADDKNKTWKLTRGAFYHKSGIKKQTRQKELRFADMIPMWESLRENGAALSTSRTDKISAYLSNYAKFSDEWWRLALRRRESRDNLQRYIGKRKVKDSFWAGIKRCMMKELPDMKVCVAYGSAITKLKPTGPGEVAVPTGAMFASCKRIFKEDVSVTDEFKTTLMSWETGKEKERVYKIPSVCSADVKLRLGGERFGHTKSKTMPKVADCDH

SEQ ID NO: 1684 - protein, 688 aa, Microglena sp.
RNVGTILYHQKKKNTHPLLMGVLQDKGDDDINISFVKKTLNSLCMDVSRHQISSRIQSMVLLINHAVAEAYLFANFHITRCLDDGDFDVKQLPHLDRNFYYRCLLAVSTSNVRKDTLGQSFNDTMVAFDALRPAGYVKVDVRPWGQVIADVSIQMATMACNSVWANVDRVVIKYLRLKHPSLKKHFKKIVKAVVQYPESEIDTIIPEGLVHAIHIKEVVSHLRALFPLPRGKQFNTRAHLTMRLFHHVLTELGEVGRVDPKDKKTRKSHPRLFSILPRKNGFTISYVPISSMTFMKLLSMGDSPLESVSGDGRYENHTMLWRKYFNVQGLETKRSRFDNRILSDGKGVSVQMKQKGKEEVVEEGENAGYPKDANIVECKDAVGALRVGVDPGMTDIVTVASSAGRIESFSSARFSEVAGYNTSKRRTYKWNDETQDLVKSIPSPNTSNMSDLQDHVRAYLKALPILLQHRANKGYRSMRFFRYVGKQKTIEKVCDVIAPRAQTTVVGFGNWSNQGYGISRSCSGPIKEIRRCLSRRKNVLFKNVDERNTSCKCHGCFQRLVNMKADSVVWRGVCKESPIDGSITVEKQKMVVKNVKVHKVLHCRDSVKSASSNVRCGATWNRDVNAAKNLLLLLTTWMDGRERPEAFCVPSPPPKTTVSIEASVSAKPTDPPGFVSSLPCYPLGQLKC

SEQ ID NO: 1685 - protein, 302 aa, Microglena sp.
RIWQTIKNKTWKLTRGAFYHKSGIKKQTRQKELRFADMIPMWESLRENGAALSTSRTDKISAYLSNYAKFSDEWWRLALRRRESRDNLQRYIGKRKVKDSFWAGIKRCMMKELPDMKVCVAYGSAITKLKPTGPGEVAVPTGAMFASCKRIFKEDVSVTDEFKTTLMSWETGKEKERVYKIPSVCSADVKLRLGGERFGHTKSKTMPKVADCDHLGVRLYNKRKGAQEKHRRGGFATSLVDSQKSIERYPEVRGLRFSPETCIYSDRDRSSALTIARLHCMELMGLGRPLPFAHSSSVVVDE

SEQ ID NO: 1686 - protein, 454 aa, Microglena sp.
KFQMEVDFYDDYGKDMDFPTMVRFNYWMQTRLEAIGARRIRLMPIFNVQRAHVRLDMKTLVNLFRHVFPKDPNIVELSKWKDVKDPDRFMLPLKPAFKKKKSCGPGEWDACKLAQQKYDADVNDIKDTDEYRHAKGRYDTLVNARKTVAGSFFKKPPVKTGWVFDCSICTDGVSLSMQYSKTVQVRVSDLKKTSKRSRDDEGMSVSEQYDHKLKTTLPDMGIVVLGVDPGRSNIATVTYLADDKSKTWKLTRGAFYHKSGIKKQKKQQEKRFSDMIPRWESLRENGAALSTSRTDDISAYLKNYDTFSDEWWRMALLRRESRDNFQRYIGKRKAMDSFWAGIKRNMKLDHPDLRVRVAYGSAITTLKATGPGEVAVPTGAMFASCKRLFKEEVHVTDEFKTTLMSWETGAKKECVYKIPSVQITTEGQIRLGYELLGHTPLKETPKVSYRDQLA

SEQ ID NO: 1687 - protein, 277 aa, Microglena sp.
DGSEERFQGWRQTLHLQRHIGNMRYFGSKQLHKLMPEENPTHDPKVQKSRFGEYFLVLSVAARDRRAERKPVHPDKVATASIDPGVRKTMVTYSPENEESFMLGQGQASDLVKLLLVHDKLQSRLDTEKTLRSKERMKIKKHMIRIRMRIFYLKKEFRDQTTNFLAARYDVLLVPQLETAKMTISAERELTTKVARQMLTLSHSVLFNRLKEKCAEYGTVFLHVLEHYTSQTCPMCGFLNKCGETYTCKNCQFTCDRDIVGAAGIFLKAVRTENPCS

SEQ ID NO: 1688 - protein, 329 aa, Microglena sp.
RRPVRSLVKKKVSRSQKKYDGSLKTILPDMGIVVLGVDPGRSNIATVTYLADDKNKTWKLTRGAFLPQVGYQEADKAEGTAFADMIPMWESLRENGAALSTSRTDKISAYLSNYAKFSDEWWRLALRRRESRDNLQRYIGKRKVKDSFWAGIKRCMMKELPDMKVCVAYGSAITKLKPTGPGEVAVPTGAMFASCKRIFKEDVSVTDEFKTTLMSWETGKEKERVYKIPSVCSADVNLRLGGERFGHTKSKTMPKVADCDHLGVRLYNKRKGAQEKHRRGGFATSLVDSQNRSSGTQRYEDCDSLQKHAFTRTGIALLLSQSQGCTAWN

SEQ ID NO: 1689 - protein, 227 aa, Microglena sp.
IISYLSTIVKKKISLNSLKLWSFANLKKVETVSRKFGYRIVTDGFAVSILMNKPTCLTCSMPADAFSTRAHEYVTTDEGGIVSFLDNVVVAAVDPGVTDIVTVTGLNGGTRSYSSAKYYRKGLIFKSQRQTDVWNLETADIVGGIIPDRDSSSSEQIGAYARFYMGAAPILLAHRASRGYRNLRFRRYCKKQKLIVEIADFVAPRKKSAKVLVGFGDWRRSGGDANL

SEQ ID NO: 1690 - protein, 651 aa, Microglena sp.
KMATKPPTVAKLKELLKLAEVPYSSKSNKDDLVRLCEDNGLIARPPPEYKTVEKMCVVKCALKKAMSLDDEEFGKFREHVEQLVNVVSRMLRRSSLVLTFHITSLLEKGLDIPDLYNMKDTYWKDWLRIGVDGIFPDEESKISYEAVKDSIGDVIGNDDADYIKSYPIYFDQVLNYAGHTLSTVVSNNAWVPLIPRLARLTSTTLNKLNAPKTLDTSKIIRGYDVMQAIQQEVQNMEGWPESVQEYVNEVREMLSVPDGSRVYDNYGKDMDFPTMVRFNYWIQTRLEDMDARRIRLMPIFNVQRVHVRLDLKTLVNLFRHMFPNDQNIVELSKWEHVKNPESFMLPQRPAQKKKKSCGPGEWEAYKSVLKQYDDDVKDIKATDEYRHAKGFYDTLVNARKTVACSFFRKPPVKNGWVFDCSICTDGVSLSMQYSKTVQVLVSDLKKTCKKPRKEEGIKIAEKYDGSLKTILPDMGIVVLGVDPGRSNIATVTYLADDKNKTWKLTRGAFYHKSGIKKQTRQKELRFADMIPMWESLRENGAALSTSRTDKISAYLSNYAKFSDEWWRLALRRRESRDNLQRYIGKRKVKDSFWAGIKRCMMKELPDMKVCVAYGSAITKLKPTGPGEVAVPTGAMFASCKRIFQRGRFCDR

SEQ ID NO: 1691 - protein, 559 aa, Microglena sp.
PKQHPRLPHRAGKKKPAVVKSFSTHVCPHTNNNTTCSDSNCSCKPIFLTNIPDASKSRTSDQGSTSSALDFYEYWDSSRQDMYRQLLWLPKTGTQGLVSSSFNGFAHSTPTRSSFSITKTEPLKTSLEKTSCPSFKYIVTDGTVEDATKSNAKPKLRTLKLKLNPTKAQKSMLAEFAGCSRFMYNKAVAARLGVGSTHKSVFRIRDRYVTNKVRGEGKMPNPYFKNRQWLLQCPKSVRQSAIKSALANIKACFSNLKAGNIKQFSAPFRRKKTELERGWVIEMDQKNVSKDGDKLFIFKEILGNMRYFGSKQLHKLMPEENPTHDPKVQKSRFGEYFLVLSVAARDRRAERKPVNPDKVATASIDPGVRKTMVTYSPENEESFMLGQGQASDLVKLLLVHDKLQSRLDTEKTLRSKERMKIKKLMIRIRKTIFYLKKEFRDQTTNFLAARYDVLLVPQLETAKMTISAERELTTKVARQMLTLSHSVLFNRLKEKCEEYGTVFLHVLEHYTSQTCPMCGFLNKCGETYTCKNCQFTCDRDIVGAAGIFLKAVRTENPCS

SEQ ID NO: 1692 - protein, 278 aa, Microglena sp.
GKTRPTIRRSKKSRFGEYFLVLSVAARTEGQSGSLSIQTRLQLPPSTQASERQWSRTHLRMRESFMLGQGQASDLVKLLLVHDKLQSRLDTEKTLRSKERMKIKKLMIRIRKTIFYLKKEFRDQTTNFLAARYDVLLVPQLETAKMTISAERELTTKVARQMLTLSHSVLFNRLKEKCEEYGTVFLHVLEHYTSQTCPMCGFLEQVWRDIHLQELSIHLRQRHCGGSWHLPEGCSNRKSLFVKDSIPWGVDPYDTPMENSLSFLLHVPRAPGCLVRNS

SEQ ID NO: 1693 - protein, 422 aa, Microglena sp.
LLDTDTVGGYGCTSFRLMPIFNVQRVHVRLDLKTLVNLFRNMFPNDQNIVELSKWEHVKNPDSFMLPEPAQKKKKSCGPGEWEAYKSVLKQYDDDVKDIKATDEYRHAKGLYDTLVNARKTVAGSFFRKPPVKNGWVFDCSICTDGVSLSMQYSKTVQVLVSDLKKTCKKPRKEEGIKIAEKYDGSLKTILPDMGIVVLGVDPGRSNIATVTYLADDKNKTWKLTRGAFYHKSGIKKQTRQKELRFADMIPMWESLRENGAALSTSRTDKISAYLSNYAKFSDEWWRLALRRRESRDNLQRYIGKRKVKDSFWAGIKRCMMKELPDMKVCVAYGSAITKLKPTGPGEVAVPTGAMFASCKRIFKEDVSVTDEFKTTLMSWENGYRKRNVFTRIPSVCSADVKLRLGGERFGSHEIENDAKGR

SEQ ID NO: 1694 - protein, 489 aa, Microglena sp.
EISCRFQGGSSSTLEHLTMRLFHHVLTELGADLKEKTTKKRPRLFSILPRKSGFTISYVPISSMTLMKLLSMGDSPLESVRGDGRHENHSMLWRKYFNVQGLETKGSRFDNRILSDGKGVSVQMKHQVGKDIAGEGGGDNAGYPKDASIEDCQDASLRQGALRVGIDPGMTDIVTIASSDGRVESFSSARFSEAAGYNTSNRRTNKWNADTQDLVKSIQSPTTSSMQDHVRGYLSALPTLLQHRANRGYRSMRFFRYVGKQKTIEKVCDLIAPKAQKKTIEEKGCDVIAPKAKKTVVGFGNWSNQGYGISRSCSGPVKEIRKCLSRRQNVLFKNVDERNTSCTCHGCFQKLVNMKADSVVWRRVQNEPSALIDGAPTTTTTTTIEKQKTVVKNVKVHKVLHCRNSVKSASSNVRCGATWNRDVNAAKNLLLLLTTWMDGKERPAAFCGPSSSPPQKPQFPERQMWALNKPTHLGQLAAYNCYPLGQLKC

SEQ ID NO: 1695 - protein, 332 aa, Microglena sp.
ASQNSMTINSKRHCPIWVSSFWVWILVGATSLQSRIWQTTKARHGSLHAELFYHKSGIKKQKKQQEKRFSDMIPRWESLRENGAALSTSRTDDISAYLKNYDTFSDEWWRMALLRRESRDNFQRYIGKRKAMDSFWAGIKRNMKLDHPDLRVRVAYGSAITTLKATGPGEVAVPTGSMFASCKRLFKEEVHVTDEFKTTLMSWETGAKKECVYKIPSVQITTEGQIRLGYELLGHTPLKETPKVSYRDQLAVRVYCTRKQIQEKHRRGGLAPSLVDNNSIKRYPEVRGLRFSPETSTYSDRDRSSALTIARLHCMELLGQGRPLPFCRDACC

SEQ ID NO: 1696 - protein, 684 aa, Microglena sp.
IATSSTGALLQSVPTNVRGSTLGEDVESSRLLFDLLREPGQSKVDIRGRVKNQIIADLSILMATMASNHLWTNLERRITTYLKWKYPQIAKRLRSDIVAALIKCPTKNLDVIFKMSPHTTKLPTKLPTSRLRSAKSAVALAKKRVGRKEPEGSPLRVRLTKLQERLEKLSEAWLSSKNLRVDADNAKRFFAREVAFCLRGVLPLPSGNTFASRAHMTLPLYHKILSETIEEKRKTKNEKHRTFSLLPYKSGFTLSHIPISKMAFFYMVNECHFDSCKADVASKNHQGIWERFANLKKVETVSRKFGYRIVTDGFAVSILMNKPTCLTCSMPADAFSTRAHEYVTTDEGGIVSFLDNVVVAAVDPGVTDIVTVTGLNGGTRSYSSAQYYRKGLIFKSQRQTDVWNLETADIVGGIIPDRDSSSSEQIGAYARFYMGAAPILLAHRASRGYRNLRFRRYCKKQKLIVEIADFVAPRKKSAKVLVGFGDWKGLGATPISRRTCGPLQAIRFELRSRENVIMEDIDEFRTSQRCSCCENHLCNMVALTHRKKQDGTGWECTEGRKRIHKILHCKSSQSGAPRQKSGGMLHCGKTWDRDVNASRNILMLTLHQVFGRERPLAFRRDAPRSSSTTPPHPLILIWGHRRLNGLPKRLLGISSRTSSTFCTPQRCPKATICSLDDYKVSHFI

SEQ ID NO: 1697 - protein, 607 aa, Microglena sp.
QCIRNLHVLNIRMPCMATNASVKLARPPMPVVSPGPSSVDGRIMARSGLQATNVSLTQAASKATSSSRKKKPAVVKSFSTHVCPHTNNNPTCSDSNCSCKPIFLTNIPDASKSLKSRTSDQGSTSSALDFYEYWDSSRQDLYRQLLWLPKTGTQGLVSSSFNGFAHSTPTRSSFSITKTEPLKTSLEKTSCPSFKYIVTDGTVEDATKSNAKPKLRTLKLKLNPTKAQKSMLAEFAGCSRFMYNKAVAARLGVGSTHKSVFRIRDRYVTNKVRGKGKMPNPYFKNRQWLLQCPKSVRQSAIKSALANIKACFSNLKAGNIKQFSAPFRRKKTELERGWVIEMDQKNVSKDGDKLFIFKEILGNMRYFGSKQLHKLMPEENPTHDPKVQKSRFGEYFLVLSVAARDRRAERKPVNPDKVATASIDPGVRKTMVTYSPENEESFMLGQGQASDLVKLLLVHDKLQSRLDTEKTLRSKERMKIKKLMIRIRKTIFYLKKEFRDQTTNFLAARYDVLLVPQLETAKMTISAERELTTKVARQMLTLSHSVLFNRLKEKCEEYGTVFLHVLEHYTSQTCPMCGFLNKCGETYTCKNCQFTCDRDIVGQLASS

SEQ ID NO: 1698 - protein, 346 aa, Microglena sp.
GGRGKMPNPYFKNRQWLLQCPKSIRQSAIKSALANIKACFSNLKAGNIKQFSAPFRRKKTELERGWVIEMDQKNVSKDGDKLFIFKEILGNMRYFGSKQLHKLMPEENPTHDPKVQKSRFGEYFLVLSVAARDRRAERKPVNPDKVATASIDPGVRKTMVTYSPENEESFMLGQGQASDLVKLLLVHDKLQSRLDTEKTLRSKERMKIKKLMIRIRKTIFYLKKEFRDQTTNFLAARYDVLLVPQLETAKMTISAERELTTKVARQMLTLSHSVLFNRLKEKCEEYGTVFLHVLEHYTSQTCPMCGFLNKCGETYSCKNCQFTCDRDIVGAAGIFLKAVRTENPCS

SEQ ID NO: 1699 - protein, 239 aa, Microglena sp.
QPNPQRRQGVSVQMKHQASEDVAVDNAGYPKDAILEDCQDASLRVGVDPGMTDIVTVASSDGRVESFSSARFSEAAGYNTSNRRTKQMECRYARPRESPFHRRLRAVCTTCRTMSEVTSALSRHSFNTEPAEVTDRCDSFGMWVKQKTIEKVCDLIAPKAQKKTIEEKVCDVIAPRAQTTVVGFGNWSNQGYGISRSCSGPIKEIRRCLSRRKNVFVQKTSTNATLLVPATAASRSSST

SEQ ID NO: 1700 - protein, 621 aa, Microglena sp.
QCIRNLHVLNIRMPCMATNASVKLARPPMPLVSPGPSSVDGRIMARSERSGLQATNVSLTQAASKATSSSRKKKQAVVKSFSTHVCPHTNNNPTCSDSNCSCKPIFLTNIPDASKSLKSRTSDQGSTSSAHDFYEYWDSSRQDLYRQLLWLPKTGSQGLVSSSLNGFARSTPARSSFSITKTEPLKTSLENTSCPSFKYIVADGTVEDATKSNAKPKLGTLKLKLNPTKAQKSILAEFAGCSRFMYNKAVAARLGVGSTHKSVFRIRDRYVTNKVRGKGKIPNPYFKNRQWLLQCPKSVRQSAIKAAFANIKACFSNLKAGNIKQFSAPFRRKKTELERGWAIEMDQKSVSKDGDKLFIFKDTLGNMRYFGSKQLHKLMPEENPTHDPKVQKSRFGEYFLVLSVAARDRRAERKPVHPDKVATASIDPGVRKTMVTYSPENEESFMVGQGQASDLVKLLLVHDKLQSRLDTEKTLRSKERMKIKKLMIRIRKRIFYLKKEFRDQTTKFLAARYDVLLVPQLETAKMSISAERELTTKVARQMLTLSHSVLFNRLKEKCEEYGTVFLHVLEHYTSQTCPMCGFLNKCGETYTCKNCQFTCDRDIVGAAGIFLKAVRTENPCS

SEQ ID NO: 1701 - protein, 621 aa, Microglena sp.
QCIRNLHVLNIRMPCMATNASVKLARPPMPLVSPGPSSVDGRIMARSERSGLRATNVSLTQAASKATSSSRKKKQAVVKSFSTHVCPHTNNNPTCSDSNCSCKPIFLTNIPDASKSLKSRTSDQGSTSSAQDFYEYWDSSRQDLYRQLLWLPKTGSQGLVSSSLNGFARSTPARSSFSITKTEPLKTSLENTSCPSFKYIVADGTVEDATKSNAKPKLGTLKLKLNPTKAQKSILAEFAGCSRFMYNKAVAARLGVGSTHKSVFRIRDRYVTNKVRGKGKIPNPYFKNRQWLLQCPKSVRQSAIKAAFANIKACFSNLKAGNIKQFSAPFRRKKTELERGWAIEMDQKSVSKDGDKLFIFKDTLGNMRYFGSKQLYKLMPEENPTHDPKVQKSRFGEYFLVLFVAARDRRAERKPVHPDKVATASIDPGVRKTMVTYSPENEESFMLGQGQASDLVKLLLVHDKLQSRLDTEKTLRSKERMKIKKLMIRIRKRIFYLKKEFRDQTTKFLAARYDVLLVPQLETAKMTISAERELTTKVARQMLTLSHSVLFNRLKEKCEEYGTVFLHVLEHYTSQTCPMCGFLNKCGETYTCKNCQFTCDRDIVGAAGIFLKAVRTENPCS

SEQ ID NO: 1702 - protein, 227 aa, Microglena sp.
ANRGYRSMRFFRYVGKQKTIEKVCDVIAPKAQKTIVGFGNWSNQGYGISRSCSGPVKEIRMCLSRRQNVLFKNVDERNTSCTCHGCFQKLVNMKADSVVWRRVQNEPPSLNNGAPTTTTTTTTIEKQKTVVKNVKVHKVLHCRNSVKSASSNVRCGATWNRDENAAKNLLLLLTTWMDGKERPGAFCVPSSSPTPKTTVSGEANVGAQPTDPPGSVSSLQLLSSGPA

SEQ ID NO: 1703 - protein, 621 aa, Microglena sp.
YHNKKRTLPPSISMGVVTNNGDDDDDLDIMVVKKTLNSLCMDVSRQQICSRIQSMVLVINHAVAEAYLFANFHITRCLDDVAFDVKQLPHLDRNFYYRCILAVSTSNVRKDTLGKSLKDSMVAFDALRPAGYLKVDVRQWGQVIADVSIQMATMACNSVWANVDRVVIKYLRLKHPSLKKHFNKIVKAVVQYPESDIDKTIPSSLVHANLIKYVVRRLRDLLPLPRGKQFNTRAHLTMRLFHHVLTELGADLKEKTTKKRPRLFSILPRKSGFTISYVPISSMTLMKLLSMGNSPLESFRGDGRHENHSMLWRKYFNVQGLETKGSRFDNRILSDGKGVSVQMKHQAGEDVAVEGGDTAGYPKEASLEDCQDASLRQGALRVGIDPGMTDIVTIASSDGRVDSFSSARFSEAAGYNTSNRRTNKWNADTQDLVKSIPSPTTSSMHDMQDHVRGYLSALPTLLQHRANRGYRSMRFFRYVGKQKTIEKVCDVIAPKAQKKTVVGFGNWSNQGYGISRSCSGPVKEIRKCLSRRQNVLFKNVDERNTSCTCHGCFQKLVNMKADSVVWRRVQNEPSALINGAPTTTTTIEKQKTVVKNVKVHKVLHCRNSVKGASSNVRCGAT

SEQ ID NO: 1704 - protein, 788 aa, Microglena sp.
ECSREPVCRSRLHQNVFGVQFVMENGIGESSSLVHEADQHDDVAELVDYEGGEDEECAPGRAICVVKMKLSTFIPHDWLRKKMDTLVLDMNKLLGEGYIFANFHIARLFENGIAVPPVNRNFFYRCLLAVSTNKCKGSTLGEDFESSRLLFDLLREPGQSKVDIRGNVKNQIIADLSILMATMASNHLWTNLERRITTYLKWKYPQIAKRLRSDIVAAVIKCPTKNLDVIFKMSPHTTKLPTKLPTARLRSAKNAIALVKKRVGRKEPEGSPLRVRLTKLQERLEKLSEAWLSSKNLRVDEDNAKRFFARDVAFRLRGVLPLPSGKTFASRAHMTLPLYHKILSETIASDNEKLRTFSLLPYKSGFTLSHIPISKMAFFYMVNECHFDSCKADVASKNHQGIWERFANLKIVETFSRKFGYRIVTDGFAVSILMNKPTCLTCSMPAEAFSTRVDEYMTTDEGGIVSFRDNVTVAAVDPGVTDIVTVTGLDGGTRSYSSAQYYRKGLIFKSQRQTDVWNLETTDIVGDNIPDRDSSRSEQIGTYARFYMGAAPILLAHRASRGYRKLRFRRYCKIQKLIVEIADFVAPREKSTKVIVGFGDWKGLGGTPISRRTCGPLQAIRFELRSRENVIMEDVDEFRTSQRCSCCESRLCNMVALTHRKKQDGTGWECTEGRKRIHKILHCKSSQSGAPRQQSGGRLHCGKTWDRDVNASRNILMLTLHQVFGRERPLAFRRDTPRSSSKNPPPDTDMGTQTVERFTTEATRNIFENLFNLLHPPTLPKRDDLQSG

SEQ ID NO: 1705 - protein, 344 aa, Microglena sp.
DISGEGGGGDNAGYPKDASLEDCQDASLRQGALRVGIDPGMTDIVTIASSDGRVESFSSARFSEAAGYNTSNRRTNKWNADTQDLVKSIPSPTTSSMHDMQDHVRGYLSALPTLLQHRANRGYRSMRFFRYVGKQKTIEKVCDVIAPKAQKKTVVGFGNWSIQGYGISRSCSGPVKEIRKCLSRRQNVLFKNVDERNTSCTCHGCFQKLVNMKADSVVWSRVQNEPSALINGAPTTTTTTIEKQKTVVKNVKVHKVLHCRNSVKSASSNVRCGATWNRDVNAAKNLLLLLTTWMDGKERPGAFCVPSSSPTPKTTVSGEANVGTQPTDPPGSVSSLQLLSSGPA

SEQ ID NO: 1706 - protein, 217 aa, Microglena sp.
NQIRRRTCWAKTDLQDSLLPVLRSIVQRMSRVNPAEASKYKDDAAFLQGGSAGSVTFRAMHRDWDEFRTSQRCSCCESRLCNMVALTYRKKQDGTGWECTEGRKRINKILHCKSSQSEAPRQQSGGRLHCGKTWDRDVNASRNILMLTLHQVFGRERPLAFRRDTPRSFSKNPPPDTDMGTQTVERFTTEATRNIFENLFNLLHPPTLPKRDDLQSG

SEQ ID NO: 1707 - protein, 486 aa, Microglena sp.
CPTAHVRLDMKTLVNLFRHVFPKDPNIVELSKWKDVKDPDRFMLPLKPAVKKKKSCGPGEWEAYKLAQQKYDADVNDIKDTDEYRHAKGRYDTLVNARKTVAGSFFKKPPVKTGWVFDCSICTDGVSLSMQYSKTVQVRVSDLKKTSKRSRDDEGMSVSEQYDHKLKTTLPDMGIVVLGVDPGRSNIATVTYLADDKSKTWKLTRGAFYHKSGIKKKKKQQEKRFSDMIPRWESLRENGAALSTSRTDDISAYLKNYDTFSDEWWRMALLRRESRDNFQRYIGKRKAMDSFWAGIKRNMKLDHPDLRVRVAYGSAITTLKATGPGEVAVPTGSMFASCKRLFKEEVHVTDEFKTTLMSWETGAKKECVYKIPSVQITTEGQIRLGYELLGHTPLKETPNVSYRDQLAVRVYCTRKQIQEKHRRGGLAPSLVDNNSIKRYPEVRGLRFSPETSTYSDRDRSSALTIARLHCMELLGQGRPLPFCRDA

SEQ ID NO: 1708 - protein, 252 aa, Microglena sp.
TDWCVRQILHGCRPNPSCPSCFQGYRNLRFRRYCKKQKLIVEIADFVAPRKKSAKVLVGFGDWKGLGATPISRRTCGPLQAIRFELRSRENVIMEDIDEFRTSQRCSCCENHLCNMVALTHRKKQDGTGWECTEGRKRIHKISPLQKQSKRSATPTERWYASLREDLGPRCERFQKHPDAYTSPSIWRERPLAFRRDAPRSSSTTPPPPPDTDMGTQTVERFTKEATRNIFENLFNLLHPPTLPKSNDLQSG

SEQ ID NO: 1709 - protein, 287 aa, Microglena sp.
SSHQQMECRYARPREVHSIADYEQYARHAGPCQRLPQRSPTLLQHRASRGYRSMRFFRYVGKQKTIEKVCDLIAPKAQKKTIEEKVCDVIAPRAQTTVVGFGNWSNQGYGISRSCSGPIKEIRRCLSRRKNVLFKNVDERNTSCTCHGCFQKLVNMKADSVVWRRVQNEPPSLINGAPTTTTTIEKQKTVVKNVKVHKVLHCRNSVKSASSKVRCGATWNRDVNAAKNLLLLLTTWMDGKERPATFCVPSSSPTPKTTVSGEANVGAQPTDPLGSVSSLQLLSSGPA

SEQ ID NO: 1710 - protein, 303 aa, Microglena sp.
KQVTSSSFSAPFRRKKTELERGWVIEMDQKNVSKDGDKLFIFKEILGNMRYFGSKQLHKLMPEENPTHDPKVQKSRFGEYFLVLSVAARDRRAERKPVNPDKVATASIDPGVRKTMVTYSPENEESFMLGQGQASDLVKLLLVHDKLQSRLDTEKTLRSKERMKIKKLMIRIRKTIFYLKKEFRDQTTNFLAARYDVLLVPQLETAKMTISAERELTTKVARQMLTLSHSVLFNRLKEKCEEYGTVFLHVLEHYTSQTCPMCGFLNKCGETYTCKNCQFTCDRDIVGAAGIFLKAVRTENPCS

SEQ ID NO: 1711 - protein, 403 aa, Microglena sp.
FIARQTLLPKNHQGIWERFANLKKVETVSRKFGYRIVTDGFAVSILMNKPTCLTCSMPADAFSTRAHEYVTTDEGGIVSFLDNVVVSAVDPGVTDIVTVTGLNGGTRSYSSAKYYRKGLIFKSQRQTDVWNLETADIVGGIIPDRDSSSSEQIGAYARFYMGAAPILLAHRASRGYRNLRFRRYCKKQKLIVEIADFVAPRKKSAKVLVGFGDWKGLGATPISRRTCGPLQAIRFELRSRENVIMEDIDEFRTSQRCSCCENHLCNMVALTHRKKQDGTGWECTEGRKRIHKILHCKSSQSGAPRQQSGGMLHCGKTWDRDVNASRNILMLTLHQVFGRERPLAFRRDAPRSSSTTPPPPPDTDMGTQTVERFTKEATRNIFENLFNLLHPPTLPKSNDLQSG

SEQ ID NO: 1712 - protein, 626 aa, Microglena sp.
RTRSLQTCLFSWPQWPLTIFWTNLERRITTYLKWKYPQIAKRLRSDIVAALIKCPTKNLDVIFKMSPHTTKLPTKLPTSRLRSAKSAVALAKKRVGRKEPEGSPLRVRLTKLQERLEKLSEAWLSSKNLRVDADNAKRFFAREVAFCLRGVLPLPSGNTFASRAHMTLPLYHKILSETIEEKRKTKNEKHRTFSLLPYKSGFTLSHIPISKMAFFYMVNECHFDSCKADVASKNHQGIWERFANLKKVETVSRKFGYRIVTDGFAVSILMNKPTCLTCSMPADAFSTRAHEYVTTDEGGIVSFLDNVVVSAVDPGVTDIVTVTGLNGGTRSYSSAKYYRKGLIFKSQRQTDVWNLETADIVGGIIPDRDSSSSEQIGAYARFYMGAAPILLAHRASRGYRNLRFRRYCKKQKLIVEIADFVAPRKKSAKVLVGFGDWKGLGATPISRRTCGPLQAIRFELRSRENVIMEDIDEFRTSQRCSCCENHLCNMVALTHRKKQDGTGWECTEGRKRIHKILHCKSSQSGAPRQQSGGMLHCGKTWDRDVNASRNILMLTLHQVFGRERPLAFRRDAPRSSSTTPPPPPDTDMGTQTVERFTKEATRNIFENLFNLLHPPTLPKSNDLQSG

SEQ ID NO: 1713 - protein, 203 aa, Microglena sp.
GREEKISIKDDGTAIKKQTKTLREFSESDPNVVVVANDPGRCNIAFLTWKKNKVEEKDNGGRKRKRHCEFGSKRLTRERYYVESGVFKSRGPTKKWLSNIQDCLDDLKDNSPKRTSLESFDAYVTVMVNHWDSRWGEMSKSRWGAQRLRLYGGKKRVLARFFNEVQADVGERKTIVIAYGSSKFAPGGKGELSVPTTSAFKCV

SEQ ID NO: 1714 - protein, 787 aa, Microglena sp.
PVCRSRLHQNVFGVQFVMENGIGESSSLVHEADQHDDVAELVDYEGEEDCAPGRAICVVKMKLSTFIPHDWLRNKIDTLVLDMNKLLGEGYIFANFHIARLFENGIAVPPVNRNFFYRCIIAVSTNKCNGSTLGEDFESSRLLFDLLREPGQSKVDIRGRVKNQIIADLSILMATMASNHLWTNLERRITTYLKWKYPQIAKRLRSDIVAALIKCPTKNLDDIFKMSPHTTKLPTKLPTSRLRSAKSAVALAKKRVGRKEPEGSPLRVRLTKLQERRKKLSEAWLSSKNLRVDADNAKRFFAREVAFCLRGVLPLPSGNTLASRAHMTLPLYHKILSETIEEKRKTKNEKHRTFSLLPYKSGFTLSHIPISKMAFFYMVNECHFDSCKADVASKNHQGIWERFANLKKVETVSRKFGYRIVTDGFAVSILMNKPTCLTCSMPADAFSTRAHEYVTTDEGGIVSFLDNVVVAAVDPGVTDIVTVTGLNGGTRSYSSAQYYRKGLIFKSQRQTDVWNLETADIVGGIIPDRDSSSSEQIGAYARFYMGAAPILLAHRASRGYRNLRFRRYCKKQKLIVEIADFVAPRKKSAKVLVGFGDWKGLGATPISRRTCGPLQAIRFELRSRENVIMEDIDEFRTSQRCSCCENHLCNMVALTHRKKQDGTGWECTEGRKRIHKILHCKSSQSGAPRQQSGGMLHCGKTWDRDVNASRNILMLTLHQVFGRERPLAFRRDAPRSSSTTPPPPPDTDMGTQTVERFTKEATRNIFENLFNLLHPPTLPKSNDLQSG

SEQ ID NO: 1715 - protein, 251 aa, Microglena sp.
HTDAVADHRPRMKCKQPFFSINNHQHKKTIEKVCDLIAPKAQKKTIEEKVCDVIAPRAQTTVVGFGNWSNQGYGISRSCSGPIKEIRRCLSRRKNVLFKNVDERNTSCTCHGCFQKLVNMKADSVVWRRVQNEPPSLINGAPTTTTTIEKQKTVVKNVKVHKVLHCRNSVKSASSKVRCGATWNRDVNAAKNLLLLLTTWMDGKERPATFCVPSSSPTPKTTVSGEANVGAQPTDPLGSVSSLQLLSSGPA

SEQ ID NO: 1716 - protein, 358 aa, Microglena sp.
HVRCLQTRSLRGAHEYVTTDEGGIVSFLDNVVVAAVDPGVTDIVTVTGLNGGTRSYSSAQYYRKGLIFKSQRQTDVWNLETADIVGGIIPDRDSSSSEQIGAYARFYMGAAPILLAHRASRGYRNLRFRRYCKKQKLIVEIADFVAPREKSAKVLVGFGDWKGLGATPISRRTCGPLQAIRFELRSRENVIMEDIDEFRTSQRCSCCENHLCNMVALTHRKKQDGTGWECTEGRKRIHKILHCKSSQSGAPRQQSGGMLHCGKTWDRDVNASRNILMLTLHQVFGRERPLAFRRDAPRSSSTTPPHPLILIWGHRRLNGLPKRLLGISSRTSSTCCTPQRCPKATICSLDDYKVSHFI

SEQ ID NO: 1717 - protein, 435 aa, Microglena sp.
VHLSTWIKKFVYSKENRILAKEIKDEHGIDETVFHRYLLYDIHSWGVKEDLIAIHSLLPERTKMWLKIQHSILGRDEINRQWLKSVSNSAKMIRYNVFINRYLEATEDEGYAKLVNIAPIPTVKHAFITIDTDGLLGVLKDVGLIESLEKTLTNKEHWESVFDVENIRSTGKGVFTCTIDTDGVMACTHFLRAEKKKISIKDDGTAIKKQTKTLREFSESDPNVVVVANDPGRCNIAFLTWKKNKVEEKDKGGRKRKRHCEFGSKRLTRERYYVESGVFKSRGPTKKWLSNIQDCLDDLKDNSPKHTSLVSFDADVTVMVNHWDSRWGEMSKSRWGAQRLRLYGGKKRVLARFFNEVQADVGERKTIVVAYGSAKFAPGGKGELSVPTTSAFNAFSDRFKGRVAVIDEFRTTKIWHKDSTTVLQSVQSEKEGRTV

SEQ ID NO: 1718 - protein, 206 aa, Microglena sp.
YVGKQKTIEKVCDVIAPRAQTTVVGFGNWSTQGYDISRSCSGPIKEIRRCLSRRKNVLFKNVDERNTSCKCHGCFQRLVNMKADSVVWRGVCKESPIDGSITVEKQKMVVKNVKVHKVLHCRDSVKSASSNVRCGATWNRDVNAAKNLLLLLTTWMDGRERPGAFCVPSPPPKTTVSIEASVSAKPTDPPGFVSSLPCYPLGQLKC

SEQ ID NO: 1719 - protein, 599 aa, Microglena sp.
NWQGLRCPWCLQDRPSVDGRIMARSERSGLQATNVSLTQAASKATSSSRKKNPAVVKSFSTQVCPHTNNNPTCSDSNCSCKPIFLTNIPDASKSLKSRTSDQGSTSSAQDFYEYWDSSRQDLYRQLLWLPKTGSQGLVSSSLNGFARSTPARSSFSITKTEPLKTSLEKTSCPSFKYIVADGTVEDATKSNAKPKLRTLKLKLNPTKAQKSMLAEFAGCSRFMYNKAVAARLGVGSTHKSVFRIRDRYVTNKVRGKGKMPNPYFKNRQWLLQCPKSVRQSAIKAALANIKACFSNMKAGNIKQFSAPFRRKKRELERGWAIEMDQKNVSKDGDKLFIFKDILGNMRYFGSKQLHKLMPEENPTHDPKVQKSRFGEYFLVLSVASRDRRAEQEPVHPDKVATASIDPGVRKTMVTYSPENEESFMLGQGQASDLVKFLLVHDKLQSRLDTEKTLRSKERMKIKKHMIRIRKRIFYLKKEFRDQTTNFLAARYDVLLVPQLETAKMTISAERELTTKVARQMLTLSHSVLFNRLKEKCAEYGTVFLHVLEHYTSQTCPMCGFLNKCGETYTCKNCQFTCDRDIVGAAGIFLKAVRTENPCS

SEQ ID NO: 1720 - protein, 426 aa, Microglena sp.
KNKKKSHPRLFSILPRKNGFTISYVPISSMTFMKLLSMGDSPLENVSGDGRYENHTMLWRKYFNVQGLETKRSRFDNRILSDGKGVSVQMKQKGKEEVVEEGENAGYPKDANIVECKDAVGALRVGVDPGMTDIVTVASSAGRIESFSSARFSKVAGYNTSKRRTYKWNDETQDLVKSIPSPNTSNMVDLQDHVRAYLKALPILLQHRANKGYRSMRFFRYVGKQKTIEKVCDVIAPRAQTTVVGFGNWSNQGYGISRSCSGPIKEIRRCLSRRKNVLFKNVDERNTSCKCHGCFQRLVNMKADSVVWRGVCKESPIDGSITVEKQKMVVKNVKVHKVLHCRDSVKSASSNVRCGATWNRDVNAAKNLLLLLTTWMDGRERPEAFCVPSPPPKTTVSIEASVSAKPTDPPGFVSSLPCYPLGQLKC

SEQ ID NO: 1721 - protein, 241 aa, Microglena sp.
ASAENTLFAFKSIVIYPILLQHRANKGYRSMRFFRYVGKQKTIEKVCDVIAPRAQTTVVGFGNWSNQGYGISRSCSGPIKEIRRCLSRRKNVLFKNVDERNTSCKCHGCFQRLVNMKADSVVWRGVCKESPIDGSITVEKQKMVVKNVKVHKVLHCRDSVKSASSNVRCGATWNRDVNAAKNLLLLLTTWMDGRERPEAFCVPSPPPKTTVSIEASVSAKPTDPPGFVSSLPCYPLGQLKC

SEQ ID NO: 1722 - protein, 450 aa, Microglena sp.
SAPDNAIVPSRAYRVGRGRTSGSDKKTRKSHPRLFSILPRKNGFTISYVPISSMTFMKLLSMGDSPLESVSGDGRYENHTMLWRKYFNVQGLETKRSRFDNRILSDGKGVSVQMKQKGKEEVVEEGENAGYPKDANIIECKDAVGALRVGVDPGMTDIVTVASSAGRIESFSSARFSEVAGYNTSKRRTYKWNDETQDLVKSIPSPNTSNMVDLQDHVRAYLKALPILLQHRANKGYRSMRFFRYVGKQKTIGKVCDMIAPRAQTTVVGFGNWSNQGYGISRSCSGPIKEIRRCLSRCKNVLFKNVDERNTSCKCHGCFQRLVNMKADSVVWRGVCKESPIDGSITVEKQKMVVKNVKVHKVLHCRDSVKSASSNVRCGATWNRDVNAAKNLLLLLTTWMDGRERPEAFCVPSPPPKTTVSIEASVSAKPTDQPGFVSSLPCYPLGQLKC

SEQ ID NO: 1723 - protein, 228 aa, Microglena sp.
RIAHQRRPRVLLGHGTGKERKPVHPYKVATASIDPGVRKTMVTYSPENEESFMLGQGQASDLVKLLLVHDKLQSRLDTEKTLRSKERMKIKKQMIRIRKRIFYLKKEFRDQTTNFLAARYDVLLVPQLETAKMTISAERELTTKVARQMLTLSHSVLFNWLKEKCEEYGTVFLHVLEHYTSQTCPMCGFLNKCGETYTCKNCQFTCDRDIVGAASIFLKAVRTENPCS

SEQ ID NO: 1724 - protein, 460 aa, Microglena sp.
PCLCTTRYCRRPSKKKRKTKNEKHRTFSLLPYKSGFTLSHIPISKMAFFYMVNECHFDSCKADVASKNHQGIWERFAKLKKVETVSRKFGYRIVTDGFAVSILMNKLTCLTCSMPADAFSTRAHEYVTTDEGGIVSFLDNVVVAAVDPGVTDIVTVTGLNGGTRSYSSAQYYRKGLIFKSQRQTDVWNLETADIVGGIIPDRDSSSSEQIGAYARFYMGAAPILLAHRASRGYRNLRFRRYCKKQKLIVEIADFVAPREKSAKVLVGFGDWKGLGATPISRRTCGPLQAIRFELRSRENVIMEDIDEFRTSQRCSCCENHLCNMVALTHRKKQDGTGWECTEGRKRIHKILHCKSSQSGAPRQQSGGMLHCGKTWDRDVNASRNILMLTLHQVFGRERPLAFRRDAPRSSSTTPPPPPDTDMGTQTVERFTKEATRNIFENLFNLLHPPTLPKSNDLQSG

SEQ ID NO: 1725 - protein, 234 aa, Microglena sp.
KNYATFSNEWWRMALLRRESRDNFQRYIGKRKAMDSFWAGIKRNMKLDHPDLRVRVAYGSAITTLKATGPGEVAVPTGSMFASCKRLFKDEVHVTDEFKTTLMSWETGAKKECVYKIPSVQITTEGQIRLGYELLGHTPLKETPKVSYRDQLAVRVYCTRKQIQEKHRRGGLAPSLVDNNSIKRYPEVRGLRFSPETSTYSDRDRSSALTIARLHCMELLGQGRPLPFCRDACC

SEQ ID NO: 1726 - protein, 365 aa, Microglena sp.
YFNVQGLETKRSRFDNRILSDGKGVSVQMKQKGKEEVVEEGENAGYPKDANIVECKDAVGALRVGVDPGMTDIVTVASSAGRIESFSSARFSEVAGYNTSKRRTYKWNDETQDLVKSIPSPNTSNMSDLQDHVRAYLKALPILLQHRANKGYRSMRFFQYVGKQKTIEKVCDVIAPRAQTTVVGFGNWSNQGYGISRSCSGPIKEIRRCLSRRKNVLFKNVDERNTSCKCHGCFQRLVNMKADSVVWRGVCKESPIDGSITVDKQKMVVKNVKVHKVLHCRDSVKSASSNVRCGAIWNRDVNAAKNLLLLLTTWMDGRERPEAFCVPSPPPKTTVSIEASVSAKPTDPHGFVSSLPCYPLGQLKC

SEQ ID NO: 1727 - protein, 325 aa, Microglena sp.
NDIARYGYRRPGVDPGRSNIATVTYLADDKNKTWTLTRGAFYHKSGIKKQTRQKELRFSDMIPMWESLRENGAALSTSRTDKISVYLSNYANFSDEWWRLALRRRESRDNLQRYIGKRKVKDSFWAGIKRCMMKELPDMKVCVAYGSAITKLKPTGPGEVAVPTGAMFASCKRIFKEDVSVTDEFKTTLMSWETGKEKERVYKIPSVCSADVKLRLGGERFGHTKSKTMPKVADCDHLGVRLYNKRKGAQEKHRRGGFATSLVDSQKSIERYQEVRGLRFSPETCIYSDRDRSSALTIARLHCMELMGLGRPLPFAHSSSVVVDE

SEQ ID NO: 1728 - protein, 303 aa, Microglena sp.
KQVTSSSFQLRSDGRRQSLRGLGPLRWIRRNVSKDGDKLFIFKDILGNMRYFGSKQLHKLMPEENPTHDPKVHKSRFGEYFLVLSVAARDRRAERKPVHPDKVATASIDPGVRKTMVTYSPENEESFMLGQGQASDLVKLLLVHDKLQSRLDTEKTLRSKERMKIKMHMIRIRKRIFYLKKEFRDQTTNLLAARYDVLLVPQLETAKMTISAERELTTKVARQMLTLSHSVLFNRLKEKCAEYGTVFLHVLEHYTSQTCPMCGFLNKCGETYTCKNCQFTCDRDIVGAAGIFLKAVRTENPCS

SEQ ID NO: 1729 - protein, 427 aa, Microglena sp.
MGGIQVGPTEDADVNDIKATDEYRHAKGRYDTLVNARKTVAGSFFKKPPVKTGWVFDYSICTDGVSLSMQYSKTVQVRVSDLKKTSKRSRDDEGMSVSEQYDHKLKTTLPDMGIVVLGVDPGRSNIATVTYLADDKSKTWKLTRGAFYNKSGVKKQKKQQEKRFSDMIPRWESLRENGAALSTSRKDDISAYLKNYATFSDEWWRMALRRRESRDNFQRYIGKRKSMDSFWAGIKRNMKLDHPDLRVRVAYGSAITTLKATGPGEVAVPTGSMFASCKRLFKEEVHVTDEFKTTLMSWETGAKKECVYKIPSVQITTEGQIRLGYELLGHTPLKETPKVSYRDQLAVRVYCTRKQIQEKHRRGGLAPSLVDNNSIKRYPEVRGLRFSPETSTYSDRDRSSALTIARLHCMELLGQGRPLPFCRDACC

SEQ ID NO: 1730 - protein, 216 aa, Microglena sp.
CGYPKDASIEDCQDASLRQGALRVGIDPGMTDIVTIASSDVESSLFSSARFSEAAGYNTSNRRTNKWNADTQALVKSIPSPTTSSMHDMQDHVRGYLSALPTLLQHRANRGYRSMRFFRYVGKQKTIEKVCDLIAPKAQKKTIEEKVCDVIAPKAKKTVVGFRNWSNQGYGISRSCSGPVKEIRKCLSRRQNVLFKNVDERNTSCTCHGCFQSSST

SEQ ID NO: 1731 - protein, 242 aa, Microglena sp.
EQHRYSHVSGRRQKQDMEAYTRSFLPQVWYQETEKKQQEKRFSDMIPRWESLRENGAALSTSRKDDISAYLKNYATFSDEWWRMALRRRESRDNFQRYIGKRKAMDSFWEGIKRNMKLDHPDLRVRVAYGSAITTLKATGPGEVAVPTGSMFASCKRLFKEEVHVTDEFKTTLMSWETGAKKECVYKIPSVQITTEGQIRLGYELLGHTPLKETPKVSYRDQLAVRVYCTRKQIQEKHRRGG

SEQ ID NO: 1732 - protein, 381 aa, Microglena sp.
RNISRRLSKRWSSTQNRKSTQSSQRASCMRSTSKEVVSHLRALFPLPRGKQFNTRAHLTMRLFHHVLTELGEVGRVDPKDKKTRKSHPRLFSILPRKNGFTISYVPISSMTFMKLLSMGDSPLESVSGDGRYENHTMLWRKYFNVQGLETKRSRFDNRILSDGKGVSVQMKQKGKEEVVEEGENAGYPKDANIVECKAAVGALRVGVDPGMTDIVTVASSAGRIESFSSARFSKVAGYNTSKRRTYKWNDETQDLVKSIPSPNTSNMSDLQDHVRAYLKALPILLQHRANKGYRSMRFFRFVGKQKTIEKVCDVIAPRAQTTVVGFGNWSNQGYGISRSCSGPIKEIRRCLSRRKECFVQKTSTNATLLVNVTAASRGLST

SEQ ID NO: 1733 - protein, 740 aa, Microglena sp.
PRMEQVCDVCIKSSVMYTLCKMATKPPTVAKLKELLKLAEVAYSSKDKKDDIVRLCEDNGLIARPPPEYKTVEKMCVVKCALKKAMSLDDEEFGKFRGHVDQLVNVVCRMLRRSSLVLTFHVTRLMEGDLPIPNMYDMKDTYWKDWLRIGVDGVFPDEESRISYESVKDVIGKVLGSDDPDYINSYPIYFDQVLNYAGHTLSTVVSNNAWVPLVPRLTRLTKATLNALGAPKTIRVYDVMRVIQQEIQEMESWPESVQEYVREVRVRLKVPDGSRLYDDYGKDMDFPTMVRFNYWMQTRLEAIGARRIRLMPIFNVQRAHVRLDMKTLVNLFRHVFPKDPNIVELSKWENVKDPDRFMLPLKPSIKMKKSCGPGEWEAYKLAQHKYDADVKDIKATDEYRHSKGRYDTLVNARKTVAGSFFKKPPVKTGWVFDCSICTDGVSLSMQYSKTVQVRVSDLKKTSKRSRDEEGMSVSEQYDHKLKTTLPDMGIVVLGVDPGRSNIATVTYLADDKSKTWKLTRGAFYHKSGIKKQKKQQEKRFSDMIPRWESLRENGAALSTSRKDDISAYLKNYATFSDEWWRMALRRRESRDNFQRYIGKRKAMDSFWAGIKRNMKLDHPDLRVRVAYGSAITKLKATGPGEVAVPTGSMFASCKRLFKEEVHVTDEFKTTLMSWETGAKKECVYKIPSVQITAEGQIRLGYELLGHTPLKETPKVSYRDQLAVRVYCTRKKIQEKHRRVA

SEQ ID NO: 1734 - protein, 347 aa, Microglena sp.
ARNKRRTTVHINQKTPHYDGANTRTHVNVVVAAVDPGVTDIVTVTGLDGGTRSYSSVQYYRKGLIFKSQRQTDVWNLETADIVGDIIPDRDSSRSEQIGAYARFYMGAAPILLAHRASRGYRNLRFRRYCKKQKLIVEIADFVAPREKSAKVLVGFGDWKGLGATPISRRTCGPLQAIRFELRSRGNVIMEDVDEFRTSQRCSCCENRLCNMVALTHRKKQDGTGWECTEGRKRIHKILHCKSSQSGAPRQQSGGRLHCGKTWDRDVNASRNILMLTLHQVFGRERPLAFRRDAPRSSSRTPPPPNTDMGTQTVERFTKEATRNIFENLFNLLHPPTFPNSNDLQSG

SEQ ID NO: 1735 - protein, 585 aa, Microglena sp.
IATFFYRCLLAVSTNKCHGSTLGEDFESSRILFDLLREPGQSKVDIRGSMKNQIIADLTIIMATMASNHLWTNLERRIMTYLNWKYPKISKHLRADIVAAVIKCPTKYLDVIFKMSAHVVKLPTKLPTARLRVAKYAVDLAKKSVGRKEPKGSHLREKLAKLQARFKKLSEAWISSKNLRVDEDNVKRFIARDVAFCLRGVIPLPSGNNFSSRAHMTLPLYHKILSETIASGNEKLCTFSLLPYKSGFTISHIPISKMAFLYLVKECKLDSCKVDVASKNHHGIWERFANLKMVETVSRKFGYRIVTDGFAVSILMNKPTSLTCSMPKDEFSKRANEYMTTDESGLVSFRDNVVVAAIDPGVTDILTVTGLDGCTRSYSSAQYYRKGLIFKSQRQTGIWNLETTDIVADIPDRDSSNSEQIGQYARFYMGAAPMLLAHRAERGYRNLRFRRHCRKQKLIVEIADFVAPREKRTKVLVGFGDWKGLGATPISRRTSGPLQAIKFELRSRGNVIMEDVDEFRTSQRCSCCESSLCNMVALTHRKKQDGIGWECTEGRKRMHKILHCKSSQSGAPRQQSGCRLHCGKT

SEQ ID NO: 1736 - protein, 737 aa, Microglena sp.
LWKMATKPPTVAKLKELLKLAEVPYSSKSNKDDLVRLCEDNGLIARPPPEYKTVEKMCVVKCALKKAMSLNDEEFGKFREHVDKLVNVVSRMLRRSSLVLTFHITSLLEKGLEIPDLYNMKDTYWKDWLRIGVDGIFPDEESKISYEAVKDSIGDVIGNDDADYIKSYPIYFDQVLNYAGHTLSTVVSNNAWVPLIPRLARHTSTTLNKLNAPKTLDTSKIIRGYDMMQAIQQEVQNMEGWPESVQEYVNEVREMLSVSDGSRVYDNCGKDMDFPTMVRFNYWIQTRLEDMDARRIRLMPIFNVQRVHVRLDLKTLVNLFRHMFPNDQNIVELSKWEHVKNPDSFMLPQRPAQKKKKSCGPGEWEAYKSVPKQYDDDVKDIKATDEYRHAKGLYDTLVNARKTVAGSFFRKPPVKNGWVFDCSICTDGVSLSMQYSKTVQVLVSDLKKTCKNPRKEEGIKIAEKYDGSLKTILPDMGIVVLGVDPRRSNIATVTYLADDTNKTWTLTRGAFYHKSGIKKQTRQKELRFADMIPMWESLRENGAALSTSRTDKISVYLSNYAKFSEEWWRLALRRRESRDNLQRYIGKRKVKDSFWAGIKRCMMKELPDMKVCVAYGSAITKLKPTGLEEVAVPTGAMFASCKRIFKEDVSVTDEFKTTLMSWETGKEKERVYKIPSVCSADVKLRLGGERFGHTKSKTMPKVADCDHLGVRLYNKRKGAQEKHRRGGFATSLVDSQK

SEQ ID NO: 1737 - protein, 524 aa, Microglena sp.
ANVDRVVIKYLRLKHPSRKKHFKKIVKAVVQYPESKIDTIIPEGLVHAIHIKEVVSHLRALFPLPRGNQFNTRAHLTMRLFHHVLTELGEVGRVDPKDKKTRKSHPRLFSILPRKNGFTISYVPISSMTFVKLLSMGDSPLESVSGDGRYENHTMLWRKYFNVQGLETKRARFDNRILSDGEGVSVQMKQKGKEEVVEERENAGYPKDANIVECKDAVGALRVGVDPGMTDIVTVASSAGRIESFSSARFSEVAGYNTSKRRTCKWNDETQDLVKSIPSPNTSNMSDLQDHVRAYLKALRILLQHRANKGYRSMRFFRYVGKQKKIEKVCDVIAPRAQTTVVGFGNWSNQGYGISRSCSGPIKEIRRCLSRRKNVLFKNVDERNTSCKCHGCFQRLVNMKADSVVWRGVCKESPIDGSITVEKQKMVMKNVKVHKVLHCRDSVKSASSNVRCGATWNRDVNAAKNLLLLLTTWMDGRERPEAFCVPSPPPKTTVSIKASVSAKPTDPPGFVSSLPCYPLGQLKC

SEQ ID NO: 1738 - protein, 423 aa, Microglena sp.
VYCCRWNGRRRYKVKCQTQVEDLKAEAEPNQGSEIDAGRVCRVQPVHVQQGGGSTVGRRKHSQVCLPNSRQVCDEQGEGEGKMPNPYFKNRQWLLQCPKSVRQSAIKGALANIKACFSNLKAGNIKQFSAPFRRKKTELERGWAIEMDQKNVSKDGDKLFIFKEILGNMRYFGSKQLHKLMPEENPTHDPKVQKSRFGEYFLVLSVAARDRRAEWKPVHPDKVATTSIDPGVRKTMVTYSPENEESFMLGQGQASDLVKLLLVHDKLQSRLDTEITLRSKERMKIKMQMIRIRKRMFYLKKEFRDQTTNFLAARYDVLLVPQLETAKMTISAERELTTKVARQMLTLSHFVLFNRLKEKCEEYGTVFLHVLEHYTSQTCPMCGFLNKCGETYTCKNCQFTRDRDIVGAAGIFLKAVRTENPCS

SEQ ID NO: 1739 - protein, 686 aa, Microglena sp.
METIVNKEPPDKRTRPDRTAKIKDRKNGEENVVKCTLSRIIADKDNKDVIIKVIKERVDSVSKRTYLAGVAVNRILKEVFEGVPDAQLHTVSVPSVDQNFIRQLMVGSRQAHMETRDATVERFFHNNYWFREKIEGREVIVKKKKQYVGAIARYDGDRNLYSHASKKYLTNFNNHYRVHLSTWIKKFVYSKENRILAKEIKDEHGIDETVFHRYLLYDIHSWGVKEDLIAIHLLLPERTKMLLKIQHSILGRDKINRQWLKSVSNSAKMIRYNVFINRYLEATEDEGYAKLVNITPIPTVKHAFITIDTDGLLGVLKDVGLIKSLEKTLTNKEHWESVFDVENIRSTGKGVFTCTIDTDGVMACTHFLRAEKKKISIKDDGTAIKKQTKTLREFSESDPNVVVVANDPGRCNIAFLTWKKNKVKEKDKGGRKRKRHCEFGSKRLTRERYYAESGVFKSRGPTKKWLSNIQDCLDDLKDNSPKRTSLVSFDAYVTVMVNHWDSRWGEMSKSRWGAQRLRLYGGKKRVLARFFNEVQEDVGERKTIVVAYGSAKFAPGGKGELSVPTTSAFKAFSDRFKGRVAVIDEFRTTKIWHKDSTTVLQSVQSEKEGRTVRGLLWCSSTMENSKLFVNRDLNAAINIHNCFTMYPIRPGILARPKKYCKLEVVVGRKIDYKLTGSLQNAVSSEV

SEQ ID NO: 1740 - protein, 352 aa, Microglena sp.
RENGKVVTYRQIVSSRLLHDNIGINRRGLEGPAFKKKKSCGPGEWEAYKLAQQKYDADVKDINATDEYRHAKGRYDTLVNARKTVAGSFFKKPPVKTGWVFDCSICTDGVSLSMQYSKTVQVRVSDLKKTSKRSRDDEGMSVSEQYDHKLKTTLPDMGIVVLGVDPGNIVTVTYLADDKSKTWKLTRGAFFYHKSGIKNRKKQQEKRFSDMIPRWESLRENGAALSTLRKDDISAYLKNYATFSDEWWRMALRRRESRDNFQRYIGKRKAMDSFWAGIKRNMKLDHPDLRVRVAYGSAITKLKATGPGEVAVPTGSMFASCKRLFKEEVHVMGVPASRPILTGCETWYGADL

SEQ ID NO: 1741 - protein, 350 aa, Microglena sp.
HVRCLQARSLRGAHEYVTTDEGGIVSFLDNVVVSAVDPGVTDIVTVTGLNGGTRSYSSAKYYRKGLIFKSQRQTDVWNLETADIVGGIIPDRDSSSSEQIGAYARFYMGAAPILLAHRASRGYRNLRFRRYCKKQKLVVEIADFVAPRKKSAKVLVGFGDWKGLGATPISRRTCGPLQAIRFELRSRENVIMEDIDEFRTSQRCSCCENHLCNMVALTHRKKQDGTGWECTEGRKRIHKILHCKSSQSGAPRQQSGGMLHCGKTWDRDVNASRNILMLTLHQVFGRERPLAFRRDAPRSSSTTPPPPPDTDMGTQTVERFTKEATRNIFENLFNLLHPPTLPKSNDLQSG

SEQ ID NO: 1742 - protein, 400 aa, Microglena sp.
FMQGRHCFQKPSRNMERFANLKKVETVSRKFGYRIVTDGFAVSILMNKPTCLTCSMPADAFSTRAHEYVTTDEGGIVSFLDNVVVAAVDPGVTDIVTVTGLNGGTRSYSSAKYYRKGLIFKSQRQTDVWNLETADIVGGIIPDRDSSSSEQIGAYARYYMGAAPILLAHRASRGYRNLRFRRYCKKQKLIVEIADFVAPRKKSAKVLVGFGDWKGLGATPVSRRTCGPLQAIRFELRSRENVIMEDIDEFRTSQRCSCCENHLCNMVALTHHKKQDGTGWECTEGRKRIHKILHCKSSQSGAPRQQSGGMLHCGKTWDRDVNASRNILMLTLHQVFGRERPLAFRRDAPRSSSTSPPPDTDMGTQTVERFTKEATRNIFENLFNLLHPPTLPKSNDLQSG

SEQ ID NO: 1743 - protein, 246 aa, Microglena sp.
HACERPKNSRRFLLQKTTCQEWVVFDCSICTDGVSLSMQYSKTVQVLVSDLKKTCKKPRKEEGIKIAEKYDGSLKTILPDMGIVVLGVDPGRSNIATVTYLADDKNKTWKLTRGAFYHKSGIKKQTRQKELRFADMIPMWESLRENGAALSTSRTDKISAYLSNYAKFSDEWWRLALRRRESRDNLQRYIGKRKVKDSFWAGIKRCMMKELPDMKVCVAYGICHHETEAYWTGRSCSSHWGHVRIV

SEQ ID NO: 1744 - protein, 550 aa, Microglena sp.
TSIGKKSAVALAKKRVGRKEPEGSPLRVRLTKLQERLEKLSEAWLSSKNLRVDADNAKRFFAREVAFCLRGVLPLPSGNTFASRAHMTLPLYHKILSETIEEKRKTKNEKNIAHSRCLPYKSGFTLSHIPISKMAFFYMVNECHFDSCKADVASKNHQGIWERFANLKKVETVSRKFGYRIVTDGFAVSILMNKPTCLTCSMPADAFSTRAHEYVTTDEGGIVSFLDNVVVAAVDPGVTDIVTVTGLNGGTRSYSSAQYYRKGLIFKSQRQTDVWNLETADIVGGIIPDRDSSSSVQIGAYARFYMGAAPILLAHRASRGYRNLRFRRYCKKQKLIVEIADFVAPREKSAKVLVGFGDWKGLGATPISRRTCGPLQAIRFELRSRENVIMEDIDEFRTSQRCSCCENHLCNMVALTHRKKQDGTGWECTEGRKRIHKILHCKSSQSGAPRQQSGGMLHCGKTWDRDVNASRNILMLTLHQVFGRERPLAFRRDAPRSSSTTPPPPPDTDMGTQTVERFTKEATRNIFENLFNLLHPPTLPKSNDLQSGLL

SEQ ID NO: 1745 - protein, 697 aa, Microglena sp.
DGNETSDSREIEGATKIGRRLMEGDLPIPNMYDMKDTYWKDWLRIGVDGVFPDEESRISYEAVKDVIGKVLGSDEPDYINSYPIYFDQVLNYAGHTLSTVVSNNAWVPLVPRLTRLTKATLNALKAPKTIRVYDVMRVIQQEIQEMESWPESVQEHVREVRVRLKVPDGSRLYDDYGKDMDFPTMVRFNYWMQTRLESIGARRIRLMPIFNVQRAHVRLDMKTLVNLFRHVFPKDPNIVELSKWKDVKDPDRFMLPLKPAVKKKKSCGPGEWEAYKLAQQKYDADVNDIKDTDEYRHAKGRYDTLVNARKTVAGSFFKKPPVKTGWVFDCSICTDGVSLSMQYSKTVQVRVSDLKKTSKRSRDDEGMSVSEQYDHKLKTTLPDMGIVVLGVDPGRSNIATVTYLADDKSKTWKLTRGAFYHKSGIKKQKKQQEKRFSDMIPRWESLRENGAALSTSRTDDISAYLKNYDTFSDEWWRMALLRRESRDNFQRYIGKRKAMDSFWAGIKRNMKLDHPDLRVRVAYGSAITTLKATGPGEVAVPTGSMFASCKRLFKEEVHVTDEFKTTLMSWETGAKKECVYKIPSVQITTEGQIRLGYELLGHTPLKETPNVSYRDQLAVRVYCTRKQIQEKHRRGGLAPSLVDNNSIKRYPEVRGLRFSPETSTYSDRDRSSALTIARLHCMELLGQGRPLPFCRDA

SEQ ID NO: 1746 - protein, 793 aa, Microglena sp.
KMATKPPTVAKLKELLKLAEVPYSSKSNKDDLVRLCEDNGLIARPPPEYKTVEKMCVVKCALKKAMSLDDEEFGKFREHVDQLVNVVSRMLRRSSLVLTFHITSLLEKGLDIPDLYNMKDTYWKDWLRIGVDGIFPDEESKISYEAVKDSIGDVIGNVDTDYIKSYPIYFDQVLNYAGHTLSTVVSNNAWVPLIPRLTRLTSTTLNKLNAPKTLDTSKIIRGYDVMQAIQQEVQNMEGWPESVQEYVNEVREMLSVPDGSRFYDNYGKDMDFPTMVRFNYWIQTRLEDMDARRIRLMPIFNVQRVHVRLDLKTLVNLFRHMFPNDQNIVELSKWEHVKNPDSFMLPQRPAQKKKKSCGPGEWEAYKSVLKQYDDDVKDIKATDEYRHAKGLYDTLVNARKTVAGSFFRKPPVKNGWVFDCSICTDGVSLSMQYSKTVQVLVSDLKKTCKKPRKEEGIKIAEKYDGSLKTILPDMGIVVLGVDPGRSNIATVTYLADDKNKTWKLTRGAFYHKSGIKKQTRQKELRFADMIPMWESLRENGADLSTSRTDKISAYLSNYAKFSDEWWRLALRRRESRDNLQRYIGKRKVKDSFWAGIKRCMMKELPDMKVCVAYGSAITKLKPTGPGEVAVPTGAMFASCKRIFKEDVSVTDEFKTTLMSWETGKEKERVYKIPSVCSADVKLRLGGERFGHTKSKTMPKVADCDHLGVRLYNKRKGAQEKHRRGGFATSLVDSQKSIERYPEVRGLRFSPETCIYSDRDRSSALTIARLHCMELMGLGRPLPFAHSSSVVVDE

SEQ ID NO: 1747 - protein, 557 aa, Microglena sp.
YHGCFRRPKTCRICEVGRSSLGTSNRRRLNTNGDDGVQQRLGKRGQGRYQVLRLKHPSLKKHFKKIVKAVVQYPESKIDTIIPEGLVHAIHIKEVVTHLRVIFPLPRGKQFNTRAHLTMRLFHHVLTALGEVGRVDPKDKKTRKSHPRLFSILPRKNGFTISYVPISSMTFMKLLSMGDSPLESVSGDGRYENHTMLWRKYFNVQGLETKRSRFDNRILSDGKGVSVQMKQKGKEEVVEEGENAGYPKDANIVECKDAVGALRVGVDPGMTDIVTVASSAGRIESFSSARFSEVAGYNTSKRRTYKWNDETQDLVKSIPSPNTSNMSDLQDHVRAYLKALPILLQHRANKGYRSMRFFRYVGKQKTIEKVCDVIAPRAQTTVVGFGNWSNQGYGISRSCSGPIKEIRRCLSRRKNVLFKNVDERNTSCKCHGCFQRLVNMKADSVVWRGVCKESPIDGSITVEKQKMVVKNVKVHKVLHCRDSVKSASSNVRCGATWNRDVNAAKNLLLLLTTWMDGRERPEAFCVPSPPPKTTVSIEASVSAKPTDPPGFVSSFPC

SEQ ID NO: 1748 - protein, 330 aa, Microglena sp.
VGYRQNHPSESRACEPHQRRCQTPERSLAAAKGEAVQHSSAPDNETVSSRAYRVGSGSKRENNKKTPPSVQYPSTQERLQPFLTSLISSMTLMKLLSMGDSPLESFRCDGRHENHSMLWRKYFNVQGLETKGSRFDNRILSGGKGVSVQMKHQASEDVAVDNAGYPKDAILEDCQDASLRVGVDPGMTDIVTVASSDGRVESFSSARFSEAAGYNTSNRRTNKWNVDTQDLVKSIPSPTTSSMHDMQDHVRGYLSALRDTPFNTEPAEVTDRCDSFGNVGKQKTIEKVCDLIAPKATERRRSKKKVCDVIAPKGTDDRCWLRQLVQPRVW

SEQ ID NO: 1749 - protein, 508 aa, Microglena sp.
VGYQQNHPSESRACEPHQRRCQTPERSFAAAKGEAVQHSSAPDNETVSSRAYRVGSGSKRETTKKRPRLFSILPRKSGFTISYVPISSMTLMKLLSMGDSPLESFLGDGRHENHSMLWRKYFNVQGLETKGSRFDNRILSDGKGVSVQMKHQESEDVAVDNAGYPKDAILEDCQDASLRVGVDPGMTDIVTVASSAGRVESFSSARFSEAAGYNTSNRRTNKWNVDTQDLVKSIPSPTTSSMHDIQDHVRGYLSALPTLLRHRASRGYRSMRFFRYVGKKKTIEKVCDLIAPKAQKKTIKEKVCDVIAPRAQTTVVGFGNWSNQGYGISRSCSGPIKEIRRCLSRRKNVLFKNVDERNTSCTCHGCFQKLVNMKADSVVWRRVQNEPPSLINGAPTTTTTTTIEKQKTVVKNVKVHKVLHCRNSVKSASSKMRCGATWNRDVNAAKNLLLLLTTWMDGKERPATFCVPSSSPTPKPQFPERQMWALNQPTHLGQLAAYNCYPLGQLKC

SEQ ID NO: 1750 - protein, 377 aa, Microglena sp.
TPTAYWASSRTWVSSRVSKKTLTNKEHWESVFDVENIRSTGKGVFTCTIDTDGVMACTHFLRAEKKKISIKDDGTAIKTKTLREFSESDPNVVVVANDPGRCNIAFLTWKKNKVEEKDKGGRKRKRHCEFGSKRLTRERYYVESGVFKSRGPTKKWLSNIQDCLDDLKDNSPKRTSLVSFDAYVTVMVNHWDSRWGEMSKSRWGAQRLRLYGGKKRVLARFFNEVQADVGERKTIVVAYSSANFAPGGKGELSVPTTSAFNAFSDRFKGRVAVIDEFRTTKIWHKESTTVLQSVQSEKEGRTVRGLLWCSSTMENSKLFVNRDLNAAINIHNCFTMNPIRPGILARPKKYCKLEVVVGRKIDYKLTGSLQNAVSSEV

SEQ ID NO: 1751 - protein, 209 aa, Microglena sp.
RRKYVGKQKTIEKVCDVIAPRAQTSVVGFGNWSNQGYGISRSCSGPIKEIRRCLSRRKNVLFKNVDERNTSCKCHGCFQRLVNMKADSVVWRGVCKESPIDGSITVEKQKMVVKNVKVHKVLHCRDSAKSASSNVRCGATWNRDVNAAKNLLLLLTTWMDGRERPEAFCVPSPPPKTTVSIEASVSAKPTDPPGFVSSLPCYPLGQLKC

SEQ ID NO: 1752 - protein, 524 aa, Microglena sp.
STNHAVAEAYLFANFHITRCLDDGDFDVKQLPHLDRNFYYRCLLAVSTSNVRKDTLGQSFNDTMVAFDALRPAGYVKVDVRPWGQVIADVSIQMATMACNSVWANVDRVVIKYLRLKHPSLKKHFKKIVKAVVQYPESKIDTIIPESLVHAIHIKEVVSHLRALFPMPRGKQFNTRAHLTMRLFHHVLTELGEVGRVDPKDKKTKTNHPRLFNILPCKNGFTISYVLISSMTFMKLLSMGDSPLESVSGDGRYENHTMLWRKYFNVQGLETKRSRFDNQILSDGKGVSVQMKQKGKEEVAEEGENAGYPKDANIVECKDAVGALRVGVDPRMTDIVTVASSAGRIESFSSARFSEVAGYNTSKRRTYKWNDETQDLVKSIPSPNTSNMVDLQDHVRAYLKALPILLQHRANKGYRSMRFFRYVGKQKTIEKVCDMIAPREQTTVVGFGNWSNQGYGISRSCSGPIKEIRRCLSRRKNVLFKNVDERNTSCKMSRLLPEACQHEGRQRSLARSLQRVPNRRVYNC

SEQ ID NO: 1753 - protein, 290 aa, Microglena sp.
FMQGRRCFQKPSRNMERFANLKKVETVSRKFGYRIVTDGFAVSILMNKPTCLTCSMPADAFSTRAHEYVTTDEGGIVSFLDNVVVAAVDPGVTDIVTVTGLNGGTRSYSSAQYYRKGLILKSQRQTDVWNLETADIVGGIIPDRDSSSSEQIGAYAGFYMGAAPILLAHRASRGYRNLRFRRYCKKQKLIVEIADFVAPREKSAKVLVGFGDWKGLGATPISRRTCGPLQAIRFELRSRENVIMEDIDEFRTSQRCSCCENHLCNMVALTHRNKQDGYRLGMYRRTQADS

SEQ ID NO: 1754 - protein, 327 aa, Microglena sp.
VFSFPASLRRRGDARVFKESYFGVRPCLRDGLHYSLQITHAHLKWRNRMGVPASRSILIGCETWLRDMQDHVRGYLSALPTLLQHRASRGYRSMRFFRYVGKQKTIEKVCDLIAPKAQKKTIEGKVCDVIAPRAQTTVVGFGNWSNQGYGISRSCSGPIKEIRRCLSRRKNVLFKNVDERNTSCTCHGCFQKLVNMKAESVVRRRVQNEPPSLINGAPPTTIEKQKTVVKNVKVHKVLHCRNSVKSASSNVRCGATWNRDVNAAKNLLLLLTTWMDGKERPATFCVPSSSPTPKPQFPERQMWALNQPTHLCQLAAYNCYPLDQLKC

SEQ ID NO: 1755 - protein, 448 aa, Microglena sp.
KRKTSHILVVAYKSGFTLSHIPISKMAFFYMVNECHFDSCKADVASKNHQGIWERFANLKKVETVSRKFGYRIVTDGFAVSILMNKPKCLTCSMPADAFSTRAHEYVTTDEGGIVSFLDNVVVAAVDPGVTDIVTVTGLNGGTRSYSSAQYYRKGLIFKSQRQTDVWNLETADIVGGIIPDRDSSSSEQIGAYARFYMGAAPILLAHRASRGYRNLRFRRYCKKQKLIVEIADFVAPREKSAKVLVGFGDWKGLGATPISRRTCGPLQAIRFELRSRENVIMEDIDEFRTSQRCSCCENHLCNMVALTHRNKQDGTGWECTEGRKRIHKILHCKSSQSGAPRQQSGGMLHCGKTWDRDVNASRNILMLTLHQVFGRERPLAFRRDAPRSSSTTPPHPLILIWGHRRLNGLPKRLLGISSRTSLTFCTPQRCPKATICSLDDYKVSHFI

SEQ ID NO: 1756 - protein, 443 aa, Microglena sp.
RFSTRSSDGTRSTDSGLRAFPTPGKMIRYNVFINRYLEAQRTRATPSWSHRSHPNSQALLHHDRHRRPTGRPQGRGSRRESRKDADEQGALGVGLRCAKNIRSTGKGCFTCTIDTDGVMACTHFPRAEKKKISIKDDGTAIKKQTKTLLEFSESDPNVVVVANDPGRCNIAFLTWKKNKVEEKDKGGRKRKRHCEFGSKRLTRERYYVESGVFKSRGPTKKWLSNIQDCLDELKDNSPKRTSLELFDAYVTVMVNHWDSRWGEMSKSRWGAQRLRLYGGKKRVLARFFNEVQADVGERKTIVIAYGSSKFAPGGKGELSVPTTSAFYAFSDRFKGRVAVIDEFRTTKIWHKDSTTVLQSVQSEKEGRTVRGLLWCSSTMENSKLFVNRDLNAAINIHNCFTMYPTRPGILARPKKYCKLEVVVGRTIDYKLTGSLQNAVSSEV

SEQ ID NO: 1757 - protein, 531 aa, Microglena sp.
GRMRRGAMLLKEVKIQSIVQSIVQRIQSMVLLINHAVAEAYLFANFHITRCLDDGDFDVKQLPHLDRNFYYRCLFAVSTSNVRKDTLGQSFNDTMVAFDALRPAGYVKVDVRPWGQVIADVSIQMATMACNSVWANVDRVVIKYLRLKHPSLKKHFKKIVKAVVQYPESKIDTIIPEGLVHAIHIKEVVSHLRALFPLPRGKQFNTRAHLTMRLFHHVLTELGEVGRVDPKDKKTRKSHPRLFSILPRKNGFTISYVPISSMTFMKLLSMGDSPLESVSGDGRYENHTMLWRKYFNVQGLETKRSRFDNRILSDGKGVSVQMKQKGKEEVVEEGENAGYPKDANIVECKDAVGALRVGVDPGMTDIVTVASSAGRIESFSSARFSEVAGYNTSKRTYKWNDETQDLVKSIPSPNTSNMSDLQDHVRAYLKALPILLQHRANKGYRSMRFFRYVGKQKTIEKVCDVIAPRAQTTVVGFGNWSNQGYGISRSCSGPSKRSGGASHVVRMFCSKTSTNATLLVNVTAASRGLST

SEQ ID NO: 1758 - protein, 238 aa, Microglena sp.
GGRKRKRHCEFESKRLTRERYYVESGVFKSRGPTKKWLSNIQDCLDDLKDNSPKRTSLVSFDAYVAVMVNHWDSRWGEMSKSRWGAQRLRLYGGKKRVLARFFNEVQEAVGERKTIVVAYGSAKFAPGGKGELSVPTTSAFKSFSDRFKGRVAVIDEFRTTKIWHKDSTTVLQSVQSEKEGRTVQGLLWCSSTMEKSKFFVNRDLNAAINIHNCFTMYPIRPGILARPKKILQNWKLW

SEQ ID NO: 1759 - protein, 205 aa, Microglena sp.
GTRRFGDWKGLGATPISRRTCGPLQAIRFELRSRENVIMEDIDEFRTSQRCSCCENHLCNMVALTHRNKQDGTGWECTEGRKRIHKILHCKSSQSGAPRQQSGGMLHCGKTWDRDVNASRNILMLTLHQVFGRERPLAFRRDAPRSSSTTPPPPLILIWGHRRLNGLPKGLLGISSRTSLTFCTPQRCPKATICSLDDYKVSHFI

SEQ ID NO: 1760 - protein, 349 aa, Microglena sp.
RRPVRSLVKKKVSRSQKNTTAHLKRYCPIWVSSSWVWTQDGANIATVTYLADDKNKTWKLTRGEFYHKSGIKKQTRQKELRFADMIPMWESLRENGAALSTSRTDKISAYLSNYAKFSDEWWRLALRRRESRDNFQRYIGKRKVKDSFWAGIKRCMMKELPDMKVCVAYGSAITKLKPTGPGEVAVPTGAMFASCKRIFKEDVSVTDEFKTTLMSWETGEEKERVYKIPSVCSADVKLRLGGERFGHTKSKTMPKVADCDHLGVRLYNKRKGAQEKHRRGGFATSLVDSQKSIERYPEVRGLRFSPETCIYSDRDRSSALTIARLHCMELMGLGRPLPFAHSSSVVVDE

SEQ ID NO: 1761 - protein, 651 aa, Microglena sp.
KMATKPPTVAKLKELLKLAEVPYSSKSNKDDLVRLCEDNGLIARPPPEYKTVEKMCVVKCALKKAMSLDDEEFGKFREHVDQLVNVVSRMLRRSSLVLTFHITSLLEKGLDIPDLYNMKDTYWKDWLRIGVDGIFPDEESKISYEAVKDSIGDVIGNDDADYIKSYPIYFDQVLNYAGHTLSTVVSNNAWVPLIPRLARLTSTTLNRLNAPKTLDTSKIIRGYDVMQAIQQEVQNMEGWPESVQEYVNEVREMLSVPDGSRVYDNYGKDMDFPTMVRFNYWIQTRLEDMDARRIRLMPIFNVQRVHVRLDLKTLVNLFRHMFPNDQNIVELSKWEHVKNPESFMLPQRPARKKKKSCGPGEWDAYKSVLKQYDDDVKDIKATDEYRHAKGLYDTLVNARKTVAGSFFRKPPVKNGWVFDCSICTDGVSLSMQYSKTVQVLVSDLKKTCKKPRKEEGIKIAEKYDGSLKTILPDMGIVVLGVDPGRSNIATVTYLADDKNKTWKLTRGAFYHKSGIKKQTRQKELRFADMIPMWESLRENGAALSTSRTDNISAYLSNYAKFSDEWWRLALRRRESRDNLQRYIGKRKVKDSFWAGIKRCMMKELPDMKVCVAYGSAITKLKPTGPGEVAVPTGAMFASCKRIFKRGRFCDR

SEQ ID NO: 1762 - protein, 539 aa, Microglena sp.
VFQMEVEFMITYGKDMDFPTMVRFNYWIQTRLEDMDARRIRLMPIFNVQRVHVRLDLKTLVNLFRHMFPNDQNIVELSKWEHVKNPDSFMLPQRPAQKKKKSCGPGEWEAYKSVLKQYDDDVKDIKATDEYRHAKGLYDTLVNARKTVAGSFFRKPPVKNGWVFDCSICTDGVSLSMQYSKTVQVLVSDLKKTCKKPRKEEGIKIAEKYDGSLKTILPDMGIVVLGVDPGRSNIATVTYLADDKNKTWKLTRGAFYHKSGIKKQTRQKELRFADMIPMWESLRENGAALSTSRTDKISAYLSNYAKFSDEWWRLALRRRESRDNLQRYIGKRKVKDSFWAGIKRCMMKELPDMKVCVAYGSAITKMKPTGPGEVAVPTGAMFASCKRIFKEDVSVTDEFKTTLMSWETGKEKERVYKIPSVCSADVKLRLGGERFGHTKSKTMPKVADCDHLGVRLYNKRKGAQEKHRRGGFATSLVDSQKSIERYPEVRGLRFSPETCIYSDRDRSSALTIARLHCMELMGLGRPLPFAHSSSVVVDE

SEQ ID NO: 1763 - protein, 458 aa, Microglena sp.
TCSGTCSPNDQNIVELSKWEHVKNPDSFMLPQRPAQKKKKSCGPGEWEAYKSVLKQYDDDIKDIKATDEYRHAKGLYDTLVNARKTVAGSFFRKPPVKNGWVFDCSICTDGVSLSMQYSKTVQVLVSDLKKTCKKPRKEEGIKIAEKYNGSLKTILPDMGIVVLGVDPGRSNIATVTYLADDKNKTWTLTRGAFYHKSGIKKQTRQKELRFADMIPMWESLRENGAALSTSRTDKISAYLSNYAKFSDEWWRLALRRRESRDNLQRYIGKRKVKDSFWAGIKRCMMKELPDMKVCVAYGSAITKLKPTGPGEVAVPTGAMFASCKRIFKEDVSVTDEFKTTLMSWETGKEKERVYKIPSVCSADVKLRLGGERFGHTKSKTMPKVADCDHLGVRLYNKRKGAQDKHRRGNFATSLVDSQKSIERYPEVRGLRLSLETCIIWTGIALLLSQSQGCTAWN

SEQ ID NO: 1764 - protein, 444 aa, Microglena sp.
RRPEHSKENRILAKEFKDEHGIDETVFHRYLLYDIHSWGVKEDLIAIHSLLPERTKMLLKIQHSIIGRDEINRQWLKSVSNSAKMIRYNVFINRYLEATEDEGYAKLVNIAPIPTVKHSFITIDTDGLLGVLKDVGLVESLKKTLTNKEHWESVFDVENIRSTGKGVFTCTIDTDGVMACTHFLSDEKKKISIKDDRTAIKKQTKTLREFSESDPNVVVVANDPGRCNIAFLTWKKNKVEEKDKGGRKRKRHCEFGSKRLTRERYYVESGVFKSRGPTKKWLSNIQDCLDDLKDNSPKRTSLESFDAYVTVMVNHWDSRWGRCPSRGGARSACGSTVVRKRVLARFFNEVQADVGERKTIVIAYGSSKFAPGGKGELSVLQRARSMRLATVSRGELPSLTNSVPQRSGTRTAPPSSRVCSPKKKGARFEACYGAVPPWRTASCL

SEQ ID NO: 1765 - protein, 393 aa, Microglena sp.
TPEKQSQVPSSRNHLSRRGGCFDCSICTDGVSLSMQYSKTVQVRVSDLKKTSKRSRDDEGMSVSEQYDHKLKTTLPDMGIVVLGVDPGRSNIATVTYLADDKSKTWEAYTRSFLHKSGIKKQKKQQEKRFSDMIPRWESLRENGAALSTSRTDDISAYLKNYDTFSDEWWRMALLRRESRDNFQRYIGKRKAMDSFWAGIKRNMKLDHPDLRVRVAYGSAITTLKATGPGEVAVPTGSMFASCKRLFKEEVHVTDEFKTTLMSWETGAKKECVYKIPSVQITTEGQIRLGYELLGHTPLKETPKVSYRDQLAVRVYCTRKQIQEKHRRVAYPPLLSTTTRSSGTLRYEDCDSLQKPALTRTGTAPLLSQSQGCTAWNCWVKGDRFHFAGMRDG

SEQ ID NO: 1766 - protein, 290 aa, Microglena sp.
PCLCTKRYCRRPSKKNEKHRTFSLLPYKSGFTLSHIPISKMAFFYMVNECHFDSCKADVASKNHQGIWERFANLKKVETGSRKFGYRIVTDGFAVSILMNKPTCLTCSMPADAFSTRAHEYVTTDEGGIVSFLDNVVVSAVDPGVTDIVTVTGLNGGTRSYSSAKYYRKGLIFKSQRQTDVWNLETADIVGGIIPDRDSSSSEQIGAYARFYMGAAPILLAHRASRGYRNLRFRRYCKKQKLIVEIADFVAPRKKSAKVLVGFGDWKGLGATPISRRTCGPLQAIRFRAS

SEQ ID NO: 1767 - protein, 364 aa, Microglena sp.
ACSTARQYRSLSQILKKTCKKPRKEEGINIAEKYDGSLKTILPDMGIVVLGVDPGRSNIATVTYLADDKKKTWTLTRGAFYHKPGIKKQTRQKELRFADMIPMWESLRENGAALSTSRTDKISAYLSNYAKFSDEWWRLALRHGESRDNLQRYIGKRKVKDSFWAGIKRCMMKELPDMKVCVAYGSAITKLKPTGPGEVAVPIGAMFASCKRIFKEDVSVTDELKTTLMSWETGKEKERVYKIPSVCSADVKLRLGGERFGHTKSKTMPKVADCDHLGVRLYNKRKGSQEKHRRGGFATSLVDSQKSIERYPEVRGLRFSPETCIYLDRDRSSALTIARLHCMELMGLGRPLPFAHSSSVVVDE

SEQ ID NO: 1768 - protein, 679 aa, Microglena sp.
RMKKNTHPLLMGVVQDKGDDDINISVVKKTLNSLCMDVSRHQISSRIQSMVLLINHAVAEAYLFANFHITRCLDDGDFDVKQLPHLDRNFYYRCLLAVSTSNVRKDTLGQSFNDTMVAFDALRPAGYVKVDVRPWGQVIADVSIQMATMVCTSVWANVDRVVIKYLRLKHPSLKKHFKKIVKAVVQYPESKIDTIIPEGLVHAIHIKEVVSHLRALFPLPRGNQFNTRAHLTMRLFHHVLTELGEVGRVDPKDKKTRKSHPRLFSILPRKNGFTISYVPISSMTFMKLLSMGDSPLESVSGDGRYENHTMLWRKYFNVQGLETKRSRFDNRILSDGKGVSVQMKQKGKEEVVEEGENPGYPKDANIVECKDAVGALRVGVDPGMTDIVTVASSADRIESFSSARFSEVAGYNTSKRRTYKWNDETQDLVKSIPSPNTSNMSDLQDHVRAYLKALPILLQHRANKGYRSMRFFRYVGKQKTIEKVCDVIAPRAQTTVVGFGNWSNQGYGISRSCSGPIKEIRRCLSRRKNVLFKNVDEHNTSCKCHGCFQRLVNMKADRVVWRGVCKESPIDGSITVEKQKMVVKNVKVHKVLHCRDSVKSASSNVRCGATWNRDVNAAKNLLLLLTTWMDGRERPEAFCVPSPPPKTTVSIEASVSAKPTDPPGFVSSFPCYPLGQLKC

SEQ ID NO: 1769 - protein, 243 aa, Microglena sp.
YEQHVRPAGPCQSLSQSAPDPPTTQSNKGYRSMRFFRYVGKHKTIEKVCDVIAPRAQTTVVGFGNWSNQGYGISRSCSGPIKEIRRCLSHRKNVLFKNVDERNTSCKCHGCFQRLVNMKADRVVWRGVCKESPIDGSITVEKQKMVVKNIKVHKVLHCRDSVKSASSNVRCGATWNRDVNAAKNLLLLLTTWMDGRERPEAFCVPSPPPKTTVSIEASVIAKPTDPPGFVSSLPCYPLGQLKC

SEQ ID NO: 1770 - protein, 250 aa, Microglena sp.
VHRGRIRISAYLSNYAKFSDECGRLALRRRESRDNLQRYIGKRKVKDSFWAGIKRCMMKELPDMKVCVAYGSAITKLKPTGPGEVAVPTGAMFASCKRIFKEDVSVTDEFKTTLMSWETGKEKERVYKIPSVCSADVKLRLGGERFGHTKSKTMPKVADCDHLGVRLYNKRKGAQEKHRRGGFATSLVDSQKSIERYPEVRGLRFSPETCIYSDRDRSSALTIARLHCMELMGLGRPLPFSHSSSVVVDE

SEQ ID NO: 1771 - protein, 722 aa, Microglena sp.
PRMEHVCDVCIKSSVMYKLCKMATKPPTVAKLKELLKLAEVAYSSKDKKDDIVRLCEDNGLIARPPPEYKTVEKMCVVKCALKKAMSLDDEEFGKFREHVDQLVNVVSRMLRRSSLVLTFHVTRLMEGDLPIPNMYDMKDTYWKDWLRIGVDGVFPDEESRISYESVKDVIGKVLGSDDPDYINSYPIYFDQVLNYAGHTLSTVVSNNAWVPLVPRLTRLTKATLNALEAPKTIRVYDVMRVIQQEIQEMESWPESVQKYVREVRVRLKVPDGSRLYDNYGKDMDFPTMVRFNYWMQTRLEAIGARRIRLMPIFNVQRAHVRLDMKTLVNLFRHVFPKDPNIVELSKWKDVKDPDRFMLPLKPAFKKKKSCGPGEWEAYKLAQQKYDADVNDIKDTDEYRHAKGRYDTLVNARKTVAGSFFKKPPVKTGWVFDCSICTDGVSLSMQYSKTVQVRVSDLKKTSKRSRDDEGMSVSEQYDHKLKTTLPDMGIVVLGVDPGRSNIATVTYLADDKSKTWKLTRGAFYHKSGIKKQKKQQEKRFSDMIPRWESLRENGAALSTSRTDDISAYLKNYDTFSDEWWRMALLRRESRDNFQRYIGKRKAMDSFWAGIKRNMKLDHPDLRVRVAYGSAITTLKATGPGEVAVPTGSMFASCKRLFKEEVHVTDEFKTTLMSWETGAKKECVYKIPSVQITTEGQIRLGYELLGHTPLKEAPKSLIATSWR

SEQ ID NO: 1772 - protein, 861 aa, Microglena sp.
IFCYTPPYSPEFNAIELCFAKVKKDFRRLNYIPNDTKTHVSDMISLAFSNLTDKIIMGCFDHVWNTYVMFVKSSVMYKLCKMATKPPTVAKLKELLKLAEVAYSSKDKKDDIVRLCEDNGLIARPPPEYKTVEKMCVVKCALKKAMSLDDEEFGKFREHVDQLVNVVSRMLRRSSLVLTFHVTRLMEGDLPIPNMYDMKDTYWKDWLRIGVDGVFPDEESRISYEAVKDVIGKVLGSDDPDYINSYPIYFDQVLNYAGHTLSTVVSNNAWVPLVPRLTRLTKATLNALKSPKTIRVYDVMRVIQQEIQEMESWPESVQEYVREVRVRLKVPDGSRLYDDYGKDMDFPTMVRFNYWMQTRLESIGARRIRLMPIFNVQRAHVRLDMKTLVNLFRHVFPKDPNIVELSKWKDVKDPDRFMLPLKPAVKKKKSCGPGEWEAYKLAQQKYDADVNDIKDTDEYRHAKGRYDTLVNARKTVAGSFFKKPPVKTGWVFDCSICTDGVALSMQYSKTVQVRVSDLKKTSKRSRDDEGMSVSEQYDHKLKTTLPDMGIVVLGVDPGRSNIATVTYLADDKSKTWKLTRGAFYHKSGIKKQKKQQEKRFSDMIPRWESLRENGAALSTSRTDDISAYLKNYDTFSDEWWRMALLRRESRDNFQRYIGKRKAMDSFWAGIKRNMKLDHPDLRVRVAYGSAITTLKATGPGEVAVPTGSMFASCNRLFKEEVHVTDEFKTTLMSWETGAKKECVYKIPSVQITTEGQIRLGYELLGHTPLKETPKVSYRDQLAVRVYCTRKQIQEKHRRGGLAPSLVDNNSIKRYPEVRGLRFSPETSTYSDRDRSSALTIARLHCMELLGQGRPLPFCRDA

SEQ ID NO: 1773 - protein, 551 aa, Microglena sp.
GARGNCEKEETIRGCHRSLRWRSKPVQHASKKYLTNFNNHYRVHLSTWIKKFVYSKENRILAKEFKDEHGIDETVFHRYLLYDIHSWGVKEDLIAIHSLLPERTKMLLKIQHSIIGRDEINRQWLKSVSNSAKMIRYNVFINRYLEATEDEGYAKLVNIAPIPTVKHSFITIDTYGLLGVLKDVGLVESLEKTLTNKEHWESVFDVENIRSTGKGVFTCTIDTDGVMACTHFLRAEKKKISIKDDGTAIKKQTKTLREFSESDPNVVVVANDPGRCNIAFLTWKKNKVEEKDKGGRKRKRHCEFGSKRLTRERYYVESGVFKSRGPTKKWLSNIQDCLDDLKDNSPKRTSLESFDAYVTVMVNHWDSRWGEMSKSRWGAQRLRLYGGKKRVLARFFNEVQADVGERKTIVIAYGSSKFAPGGKGELSVPTTSAFNAFSDRFKGRVAVIDEFRTTKIWHKDSTTVLQSVQSEKEGRTVRGLLWCSSTMENSKLFVNRDLNAAINIHNCFTMYPTRPGILARPKKYCKLEVVVGRTIDYKLTGSLQNAVSSEV

SEQ ID NO: 1774 - protein, 636 aa, Microglena sp.
GNVGAILYHQKKKNTHPLLMGVVQDKGDDDINISVVKKTLNSLCMDVSRHQISSRIQSMVLLINHAVAEAYLFANFHITRCLDDGDFDVKQLTHLDQNFYYRCLLAVSTSNVRKDTLGQSFNDTMVAFDALRPAGYVKVDVRPWGQVIADVSIQMATMACNSVWANVDRVVIKYLRLKHPSLKKHFKKIVKAVVQYPESKIDTIIPEGLVHAIHIKEVVGHLRALFPLPRGKQFNTRAHLTMRLFHHVLTELGEVGRVDPKDKKTKKSHPRLFSILPRKNGFTISYVPISSMTFMKLLSMGDSPLESVSGDGRYENHTMLWRKYFNVQGLETKRSRFDNRILSDGKGVSVQMKQKGKEEVVEEGENAGYPKDANIVECNDAVGALRVGVDPGMTDIVTVASSAGRIESFSSARFSEVAGYNTSKRRTYKWNDETQDLVKSIPSPNTSNMVDLQDHVRAYLKALLILLQHRANKGYRSMRFFRYVGKQKTIEKVCDVIAPRAQTTVVGFGNWSNQGYGISRSCSGPIKEIRRCLSRRKNVLFKNVDERNTSCKCHGCFQRLVNMKADSVVWRGVCKESPIDGSITVEKQKMVVKNVKVHKVLHCRDSVKSASSNVRCGATWNRDVNAAKNLLLLLTT

SEQ ID NO: 1775 - protein, 203 aa, Microglena sp.
GGRKRKRHCEFGSKRLTRERYYVESGVFKSRGPTKKWLSNIQDCLDDLKDNSPKRTSLVSFDAYVTVMVNHWDSRWGEMSKSRWGAQRLRLYGGKKRVLARFFNEVQADVGERKTIVVAYGSAEFAPGGKGELSVPTTSAFKAFSDRFKGRVAVIDEFRTTKIWHKDSTTVLQSVQSEKEGRTVRGLLWCSSTMENSKLFVNR

SEQ ID NO: 1776 - protein, 783 aa, Microglena sp.
ECSREPVCRSRLHQNVFGVQFVMENGIGESSSLVHEADQHDDVAELVDYEGEEDEECAPGRAICVVKMKLSTFIPHDWLRKKIDTLVLDMNKLLGEGYIFANFHIARLFENGIAVPPVNRNFFYRCLIAVSTNKCKGSTLGEDFESSRLLFDLLREPGQSKVDIRGNVKNQIIADLSILMATMASNHLWTNLERRITTYLKWKYPQIAKRLRSDIVAAVIKCPTFKMSPHTTKLPTKLPTARLRSAKSAVALAKKRVGRKEPEGSPLRVRLTKLQERLEKLSEAWLSSKNLRVDADNAKRFFARDMAFCLSGVLPLPSGNTFASRAHMTLPLYHKILSETIEEKRKTKNEKHRTFSLLPYKSGFTLSHIPISKMAFFYMVNECHFDSCKADVASKNHQGIWERFANLKKVETVSRKFGYRFAVSILMNKPTCLTCSMPADAFSTRAHEYVTTDEGGIVSFLDNVVVAAVDLGVTDIVTVTGLNGGTRSYSSAQYYRKGLIFKSQRQTDVWNLETADIVGGIIPDRDSLSSEHIGAYARFYMGAAPILLAHRASRGYRNLRFRRYCKKQKLIVEIADFVAPREKSAKVLVGFGDWKGLGATPISRRTCGPLQAIRFELRSRENFIMEDIDEFRTSQRCSCCENHLCNMVALTHRKKQDGTGWECTEGRKRIHKILHCKSSQSGAPRQQSGGMLHCGKTWDRDVNASRNILMLTLHQVFGRERPLAFRRDAPRRSSTPPPPPPDTDMGTQTVERFTKEATRNIFENLFNLLHPPTLPKSNDLQSG

SEQ ID NO: 1777 - protein, 435 aa, Microglena sp.
KTKRSHPRLFSILPRKNGFTISYVPISSMTFMKLLSMGDSPLESVSGDGRYENHTMLWRKYFNVQGLETKRSRFDNRILSDGKGVSVQMKQKGKEEVVEEGENAGYPMDANIVECKDAVGALRVGVDPGMTDIVTVASSAGRIESFSSARFSEVAGYNTSKRRTYKWNDETQDLVKSIPSPNTSNMVDLQDHVIAYLKALPILLQHRANKGYQSMRFFRYVGKQKTIEKVCDVIAPRAQTTVVGFGNWSNQGYGISRSCSGPIKEIRRCLSRRKNVLFKNVDERNTSCKCHGCFQRLVNMKADSVVWRGVCKESPIDGSITVEKQKMVVKNVKVHKVLHCRDSVKSASSNVRCGATWNRDVNAAKNLLLLLTTWMDGRERLEAFCVPSPPPKTTVSIEASVSAKPTDPPGFVSSLPCYPLGQNGRSCFPTDFLFY

SEQ ID NO: 1778 - protein, 790 aa, Microglena sp.
ECSREPVCRSRLHQNVFGVQFVMENGIGESSSLVHEADQHDDVAELVDYEGEEDEECAPGRAICVVKMKLSTFIPHDWLRKKIDTLVLDMNKLLGEGYIFANFHIARLFENGITVPPVNRNFFYRCLIAVSTNKCKGSTLGEDFESSRLLFDLLREPGQSKVDIRGNVKNQIIADLSILMATMASNHLWTNLERRITTYLKWKYLQIAKRLRSDIVAAVIKCPTKNLDVIFKMSPHTTKLPTARLRSAKSAVALAKKRVGRKEPEGSPLRIRLTKLQERLEKLSEAWLSSKNLRVDADNAKRFFARDVALCLRGVLPLPSGNTFASRAHMTLPLYHKILSETIEEKRKTKNEKHRTFSLLPYKSGFTLSHIPISKMAFFYMVNECHFDSCKADVASKNHQGIWERFANLKKVETVSRKFGYRIVTDGFAVSILMNKPTCLTCSMPADAFSTRAHEYVTTYEGGIVSFLDNVVVAAVDPGVTDIVTVTGLNGGTRSYSLAQYYRKGLIFKSQRQTDVWNLETADIVGGIIPDRDSSSSEQIGAYARFYMGAAPILLAHRASRGYRNLRFRRYCKKQKLIVEIADFVAPREKSAKVLVEFGDWKGLGATPISRRTCGPLQAIRFELRSRENVIMEDIDEFRTSQRCSCCENHLCNMVALTHRKKQDGTGWECTEGRKRIHKILHCKSSQSGAPRQQCGGMLHCGKTWDRDVNASRNILMLTFHQVFGRERPLAFRRDAPRRSSTTPPPPPDTDMGTQTVERFTKEATRNIFENLFNLLHPPTLPKSNDLQSG

SEQ ID NO: 1779 - protein, 395 aa, Microglena sp.
TQPRLRNRCWQSLRGAAGSCTTRRCSTVGRREHSQVCLPNSRQVCDEQGEGEGNMPNPYFKNRQWLLQCPKSVRQSAIKAALANIKACFSNLKAGNIKQFSAPFRRKKTELERGWAIEMDQKNVSKDGDKLVIFKDILGNMRYFGSKQLHKLMPEENPTHDPKVQKSRFGEYFLVLSVAARDRRAERKPVHPDKVATASIDPGVRKTMVTYSPENEESFMLGQGQASDLVKLLLVHDKLQSRLDTEKTLRSKERMKIKMQMIRIRKRIFYLKKEFRDQTTNFLAARYDVLLVPQLETAKMTISAERELTTKVARQMLTLSHSVLFNRLKEKCAEYGTVFLQVLEHYTSQTCPMCGFLNKCGETYTCMNCQFTCDRDIVGAADIFLKAVRTENPCS

SEQ ID NO: 1780 - protein, 793 aa, Microglena sp.
ECSREPVCRSRLHQNVFGVQFVMENGIGESSSLVHEADQHDDVAELVDYEGEEDEECAPVRAICVVKMKLSTFIPHDWLRKKIDTLVLDMNKLLGEGYIFANFHIARLFENGIAVPPVNRNFFYRCLIAVSTNKCKGSTLGEDFESSRLLFDLLREPGQSKVDSWNVKNQIIADLSILMATMASNHLWTNLERRITTYLKWKYPQIAKRLRSDIVAAVIKCPTKNLDVIFKMSPHTTKLPTKLPTARLRSAKSAVALAKKRVGRKEPEGSPLRVRLTKLQERLEKLSEAWLSSKNLRVDADNAKRFFARDVAFCLRGVLPLPSGNTFASRAHMTLPLHHKILSETIEEKRKTKNEKHRTFSLLPYKSGFTLSHIPISKMAFFYMVNECHFDSCKADVASKNHQGIWERFANLKKVETVSRKFGYRIVTDGFAVSILMNKPTCLTCSMPADAFSTRAHEYVTTDEGGIVSFLDNLVVAAVDPGVTDIVTVTGLNGGTRSYSSAQYYRKGLIFKSQRQTDVWNLETADIVGGIIPDRDSSSSEQIGAYARFYMGVAPILLAHRASRGYRNLRFRRYCKKQKLIVEIADFVAPREKSAKVLVGFGDWKGLGATPISRRTCGPLQAIRFKLRSRENVIMEDIDEFRTSQRCSCCENHLCNMVALTHRKKQDGTGWECTEGRKRIHKILHCKSSQSGAPRQQSGGMLHCGKTWDRDVNASMNILMLTLHQVFGRERPLAFRRDAPRSSSTTPPTPPDTDMGTQTVERFTKEATRNIFENLFNLLHPPTLPKSNDLQSG

SEQ ID NO: 1781 - protein, 464 aa, Microglena sp.
CNVMTLPLYHKILSETIEEKRKTKNEKHRTFSLLPYKSGFTLSHIPISKMAFFYMVNECHFDSCKADVASKNHQGIWERFANLKKVETVSRKFGYRIVTDGFAVSILMNKPTCLTCSMPADAFSTRAHEYVTTDEGGIVSFLDNVVVAAVDPGVTDIVTVTGLNGGTRSYSLAQYYRKGLIFKSQRQTDVWNLETADIVGGIIPDRDSSSSEQIGAYARFYMGAAPILLAHRASRGYRNLRFRRYCKKQKLIVEIADFVAPREKSAKVLVGFGDWKGLGATPISRRTCGPLQAIRFELRSRENVIMEDIDEFRTSQRCSCCENHLCNMVALTHRKKQDGTGWECTEGRKRIHKILHCKSSQSGAPRQQSGGMLHCGKTWDRDVNASRNILMLTLHQVFGRERPLAFRRDAPRRSSTTPPPPLDTDMGTQTVERFTKEATRNIFENLFNLLHPPTLPKSNDLQSG

SEQ ID NO: 1782 - protein, 600 aa, Microglena sp.
RQAVATPGSELLLQVPPCGIDLQCSKGTLGQSFNDTMVAFDALRPAGYVKVDVRPWGQVIADVSIQMATMACNSVWANVDRVVIKYLRLKHPSLKKHFKKIVKAVVQYPESKIDTIIPEGLVHAIHIKEVVSHLSALFPLPRGKQFNTRAHLTMRLFHHVLTELGEVGRVDPTDQKTKKSNPRLFSILPRKNGFTILYVPISSMTFMKLLSMGDSPLESVSGDGRYENHTMLWRKYFNVQGLETKRSRFDNRILSDGKGVSVQMKQKGKEEVVEEGENAGYPKDANIVECKDAVGALRVGVDPGMTDIVTVASSAGRIESFSSDRFSEVAGYNTSKRRTYKWNDETQDLVKSIPSPNTSNMVDLQDHVRAYLKALPILLQHRANKGYRFMRFFRYVGKQKTIEKVCDVIAPRAQTTVVGFGNWSNQGYGISRSCSGPIKEIRRCLSRRKNFLFKNVDERNTSCKCHGCFQRLVNMKADSVVWRGVCKEPPVDGSITVEKQKMVVKNVKVHKVLHCRDSVKSASSNVRCGATWNRDVNAAKNLLLLLTTWMDGRERPEAFCVPSPPPKTTVSIEASVSAKPTDPPGFVSSLPCYPLGQLKC

SEQ ID NO: 1783 - protein, 410 aa, Microglena sp.
DNYGKDMDFPTMVRFNYWIHTRLEDMDARRIRLMPIFNVQRVHVRLDLKTLVNLFRHMFPNDQNIVELSKWEHVKNPDSFMLPQRPAQKKKKSCGPGEWEAYKSVLKQYDDDVKDIKATDEYRHAKGLYDTLVNARKTVAGSFFRKPPVKNGWVFDCSICTDGVSLSMQYSKTVHVLVSDLKKTCKKPRKEEGIKIAEKYDGSLKTILPDMGIVVLGVDPGQSNIATVTYLADDKNKTWTLTRGAFYHKSGIKKQTRQKELRFADMIPMWESLRENGAALSTSRTDKISAYLSNYAKFSDEWWRLALRRRESRDNLQRDIGKRKVQDSFWAGIKRCMMKELPDMKVCVAYGSAITKLKPIGPGEVAVPTGAMFASCKIIFKDDVSVTDEFGGRDNIRLHHKVCRTRSGFI

SEQ ID NO: 1784 - protein, 234 aa, Microglena sp.
KNYATFSDEWWRMALLRRESRDNFQRYIGKRKAMDSFWAGIKRNMKLDHPDLRVRVAYGSAITTLKATGPGEVAVPTGSMFASCKRLFKEEVHVTDEFKTTLMSWETGAKKECVYKIPSVQITTEGQIRLGYELLGHTALKETPKVSYRDQLAVRVYCTRKQIQEKHRRGGLAPSLVDNNSIKRYPEVRGLRFSPETSTYSDWDRSSALTIARLHCMELMGQGRPLPFCRDACC

SEQ ID NO: 1785 - protein, 302 aa, Microglena sp.
RIWQTIKNKTWTLTRGAFYHKSGIKKQTRQKELRFADMIPMWESLRENGAALSTSRTDKISAYLSNYAKFSEEWWRLALRRRESRDNLQRYIGKRKVKDSFWAGIKRCMMKELPDMKVCVAYGSAITKLKPNGPGEVAVPTGAMFASCKRIFKEDVSVTDEFKTTLMSWETGKEKERVYKIPSVCSADVKLRLGGERFGHTKSKTMPKVADCDHLGVRLYNKRKGAQEKHRRGGFASSLVDSQKSIERYPEVRGLRFSPETCIYSDRDRSSALTIARLHCMELMGLGRPLPFAHSSSVVVDE

SEQ ID NO: 1786 - protein, 332 aa, Microglena sp.
ASQNSMTINSKRHCPIWVSSFWVWILVGATLLQSRIWQTTKARHGSLHVELFTTSLVSRNRKNSKKNVFSDMIPRWESLRENGAALSTSRTDDISAYLKNYDTFSDEWWRMALLRRESRDNFQRYIGKRKAMDSFWAGIKRNMKLDHPDLRVRVAYGSAITTLKATGPGEVAVPTGSMFASCKRLFKEEVHVTDEFKTTLMSWETGAKKECVYKIPSVQITTEGQIRLGYELLGHTPLKETPKVSYRDQLAVRVYCTRKKIQEKHRRGGLAPSLVDNNSIKRYPEVRGLRFSPETSTYSDRDRSSALTIARLHCMELLGQGRPLPFCRDACC

SEQ ID NO: 1787 - protein, 366 aa, Microglena sp.
SAPDNAIVHHVLTELGEVGRVDPKDKKTKKKSPRLFSILPRKNGFTILYVPISSMTFMKLLSMGDSPLESVSGDGRYENHTMLWQKYFNVQGLETKRSRFDNRILSDGKGVSVQMKQKGKEEVVEEGENAGYPKDANIVECKDAVGALRVGVDPGMTDIVTVASSAGRIESFSSARFSEVAGYNTSKRRTYKWNDETQDLVKSIPSPNTSNMVDLQDHVRAYLKALPILLQHRANKGYRSMRFFRYVGKQKTIEKVCDVIAPRAQTTVVGFGNWSNQGYGISRSCSGPIKEIRRCLSRRKNVLFKNVDERNTSCKCHGCFQRLVNMKADSVVWRGVCKESPIDGSITVEKQKMVVENVKVHKVLHC

SEQ ID NO: 1788 - protein, 289 aa, Microglena sp.
HLLQVASSLSARLALAKLLGTNTSKRRTYKWNDETQDLVESIPSPNTSNMSDLQDHVRAYLKALPILLQHRANKGYRSMRFFRYVGKQKTIEKVCDVIAPRAQTTVVGFGNWSNQGYGISRSCSGPIKEIRRCLSRRKNVLFKNVDERNTSCKCHGCFQRLVNMKADSVVWRGICKESPIDGSITVEKQKMVVKNVKVHKVLHCRDSVKSASSNVRCGATWNRDVNAAKNLLLLLTTWMDGRERPEAFCVPSPPPKTTVSIEASVSAKLTDPPGFVSSLPCYILGQLKC

SEQ ID NO: 1789 - protein, 240 aa, Microglena sp.
YLGLLEKLRYVFPTSGGGMALRRRESRDNFQRYIGKRKAMDSFWAGIKRNMKLDHPDLRVRVAYGSAITKLKATGPGEVAVPTGSMFASCKRLFKEEVHVTDEFKTTLMSWETGAKKECVYKIPSVQITAEGQIRLGYELLGHTPLKETPKVSYRDQLAVKVYCTRKQIQEKHRRGGLAPSLVDNNSIKRYPEVRGLRFSPETSTYSDRDRSSALTIARLHCMELLGQGRPLPFCRDACC

SEQ ID NO: 1790 - protein, 686 aa, Microglena sp.
METIVNKEPPDKRTRPDRASKIKDRRNGEENVVKCTLSRIIADKDNKDVIIKVIKERVDSVSKRTYLAGVAVNRILKEVFEGVPDAQLHTVSVPSVDQNFIRQLMVGSRQANMETRDATVERFFHNNYWFREKIEGREVIVKKKKQYVGAIARYDGDQNLYSHASKKYLTNFNNHYRVHLSTWIKKFVYSKENRILAKEFKDEHGIDETVFQRYLLYDIHSWGVKEDLIAIHSLLPERTKMLLKIQHSIIGRDEINRQWLKSVSNSAKMIRYNVFINRYLEATEDEGYAKLVNIAPIPTVKHAFITIDTDGLLGVLKDVGLVESLEKTLTNKEHWESVFDVENIRSTGKGVFTCTIDTDGVMACTHFLRAEKKKISIKDDGTAIKKQTNTLREFSESDPNVVVVANDPGRCNIAFLNWKKNKVEEKDKGGRKRKRHCEFGSKRLTRERYYVESGVFKSRGPTKKWLSNIQDCLDDLKDNSPKRTSLKSFDAYVTVIVNHWDSRWGEMSKSRWGAQRLRLYGGKKRVLARFFNEVQADVGERKTIVIAYGSSKFAPGGKGELSVPTTSAFNAFSDRFKGRVAVIDEFRTTKIWHKDSTTVLQSVQSEKRRAHGSRLAIVQFTMENSKLFVNRDLNAAINIHNCFTMYPTRPGILARPKKYCKLEVVVGRTIDYKLTGSLQNAVSSEV

SEQ ID NO: 1791 - protein, 226 aa, Microglena sp.
SSSLSVKLTFGTSRRLISSVVSFRIETLRVLNRLVRTPDSTWVPPQSFLPIVLRGYRFRRYCKKQKLIVEIADFVAPREKSAKVLVGFGDWKDLQAIRFELRSRENVIMEDIDEFRTSQRCSCCENHLCNMVALTHRKKQDGTGWECTEGRKRIHKILHCKSSQSGAPRQQSGGRLHCGKTWDRDVNASRNILMLTLHQVFGRERPLAFRRDAPRSSSTPPPPPPP

SEQ ID NO: 1792 - protein, 285 aa, Microglena sp.
KNKKSHPRLFSILPRKNGFTISYVPISSMTFMKLLSMGDSPLESVSGHGCYENHTMLWRKYFNVQGLETKRSRFDNRILSDGKGVSVQMKQKGKEEVVEEGENAGYPKDANIVECKDAVGALRVGVDPGMTDIVTVASSAGRIESFSFSEVAGYNTSKRRTYKWNDETQDLVKSIPSPNTSNMVDLQDHVRAYLKALPILLQHRANKGYRSMRFFRYVGKQKTIEKVCDVIAPRAQTTVVGFGNWSNQGYGISRSCSGPIKEIRRCLSRRKNVLFKKRRRTQHFL

SEQ ID NO: 1793 - protein, 686 aa, Microglena sp.
METIVNKEPPDKRTRPDRAAKIKDRKNGEENVVKCTLSRIIADKDNKDVIIKVIKERVDSVSKRTYLAGVAVNRILKEVFEGVPDAQLHTVSVPSVDQNFIRQLMVGSRQAHMETSDATVERFFHNNYWFREKIEGREVIVKKKKQYVGAIARYNGDRNLYSHASKKYLINFNNHYRVHLSTWIKEFVYSKENRILAKEIKDEHGIDETVFHRYLLYDIHSWGVKEDLIAIHSLLPERTKMLLKIQHSILGRDEINRQWLKSVSNSAKMIRYNVFINRYLEATEDEGYAKLVNIAPIPTVKHAFITIDTDGLLGVLKDVGLIESLEKTLTNKEHWDSVFDVENIRSTGKGVFTCTIDTDGVMACTHFLRAEKKKISIKDDGTAIKKQTKTLREFSESDPNVVVVANDPGRCNIAFLTWKKNKVEEKDKGGRKRKRHCEFGSKRLTRERYYVESGVFKSRGPTKKWLSNIQDCLDDLKDNSPKRTSLVSYDAYVTVMVNHWDSRWGEMSKSRWGAQRLRLYGGKKRVLARFFNEVQEDVGERKTIVVAYGSAKFAPGGKGELSVPTTSAFKAFSDRFKGRVAVIDEFRTTKIWHKDSTTVLQSVQSEKEGRTVRGLLWCSSTMENSKLFVNRDLNAAINIHNCFTMYRIRPGILARPKKYCKLEVVVGRKIDYKLTGSLQNAVSSEV

SEQ ID NO: 1794 - protein, 666 aa, Microglena sp.
GSTLGEDFESSRLLFDLLREPGQSKVDIRGSVKNQIIADLSILMATMASNHLWTNLERRITTYLKWKYPQIAKRLRSDIVAALIKCPTKNLDVIFKMSPHTTKLPTKLPTSRLRSAKSAVALAKKRVGRKEPEGSPLRVRLTKLQERLEKLSEAWLSSKNLRVDADNAKRFFAREVAFCLRGVLPLPSGNTFASRAHMTLPLYHKILSETIEEKRKTKNEKHRTFSLLPYKSGFTLSHIPISKMALFYMVNECHFDSCKADVASKNHQGIWERFANLKKVETVSRKFGYRIVTDGFAVSILMNKPTCLTCSMPADAFSTRAHEYVTTDEGGIVSFLDNVVVAAVDPGVTDIVTVTGLNGGTRSYSSAKYYRKGLIFKSQRQTDVWNLETADIVGGIIPDRDSSSSEQIGAYARFYMGAAPILLAHRASRGYRNLRFRRYCKKQKLIVEIADFVAPREKSAKVLVGFGDWKGLGATPISRRTCGPLQAIRFELRSRENVIMEDIDEFRTSQRCSCCENHLCNMVALTHSKKQDGTSWECTEVRKRIHKILHCKSSQSGAPRQQSGGMLHCGKTWDRDVNASRNILMLTLHQVFGRERPLAFRRDAPRSSSTTPPHPLILIWGHRRLNGLPKRLLGISSRTSSTFCTPQRCPKATICSLDDYKVSHFI

SEQ ID NO: 1795 - protein, 237 aa, Microglena sp.
ASQNSMTINSKRHCPIWVSSFWVWILVGATSLQSRIWQTTKARHGSLHAELFTTSLVSRNRKNSKKKRFSDMIPRWESLRENGAALSTSRTDDISAYLKNYATFSDEWWRMALLRRESIDNFQRYIGKRKAMDSFWAGIKRNMKLDHPDLRVRVAYGSAITTLKATGPGEVAVPTGSMFASCKRLFKEEVHVTDEFKTTLMSWETGAKKECVYKIPSVQITTEGQIRLGYELLGHTH

SEQ ID NO: 1796 - protein, 397 aa, Microglena sp.
TPEKTVAGSFFRKPPVKNGWVFDCSICTDGVSLSMQYSKTVQVLVSDLKKTCKKPRKEEGIKIAEKYDGSLKTILPDMGIVVLGVDPGRSNIATVTYLADDKNKTWKLTRGAFYHKSGIKKQTRQKELRFADMIPMWESLRENGAALSTSRTDKISAYLSNYAKFSDEWWRLALRRRESRDNLQRYIGKRKVKDSFWAGIKRCMMKELPDMKVCVAYGSAITKLKPTGPGEVAVPTGAMFASCKRIFKEDVSVTDEFKTTLMSWETGKEKERVYKIPSVCSADVKLRLGGERFGHTKSKTMPKVADCDHLGVRLYNKRKGAQEKHRRGGFATSLVDSQKSIERYPEVRGLRFSPETCIYSDRDRSSALTIARLHCMELMGLGRPLPFAHSSSVVVDE

SEQ ID NO: 1797 - protein, 314 aa, Microglena sp.
TRVFTDIVTVTGLNGGTRSYSSVQYYRKGLIFKSQRQTDVWNLETADIVGGIIPDRDSSSSEQIGAYARFYMGAAPILLAHRASRGYRNLRFRRYCKKQKLIVEIADFVAPREKSAKVLVGFGDWKGLGATPISRRTCGPLQAIRFELRSRENVIMEDIDEFRTSQRCSCCENHLCNMVALTHRKKQDGTGWECTEGRKRIHKILHCKSSQSGAPRQQSGGMLHCGKTWDRDVNASRNILMLTLHQVFGRERPLAFRRDAPRSSSTTPPPPPDTDMGTQTVERFTKEATRNIFENLFNLLHPPTLPKSNDLQSG

SEQ ID NO: 1798 - protein, 505 aa, Microglena sp.
VGYRQNHPRESRACEPHQRRCQTPERSLAAAKGGAVQHSSAPDNETVSSRAYRVGSGSKRENNKKTPPSVQYPSTQERLHHFLRPYISSMTLMKLLSMGDSPLESFRGDGRHENHSMLWRKYFNVQGLETKGSRFDNRILSDGKGVSVQMKHQASEDVAVDNAGYPKDAILENCQDASLRVGVDPGMTDIVTVASSDGRVESVSSARFSEAAGYNTSNRRTNKWNVDTQDLVKSIPSPTTSSMHDMQDHVRGYLSALPTLLQHRASRGYRSMRFFRYVGKQKTIEKVCDLIAPKAQKKTIEEKVCDVIAPRAQTTVVGFGNWSNQGYGISRSCSGPIKEIRRCLSRRKNVLFKNVDERNTSCTCHGCFQKLVNMKADSVVWRRVQNEPPSLINGAPTTTTTIEKQKTVVKNVKVHKVLHCRNSVKSASSKVRCGATWNRDVNAAKNLLLLLTTWMDGKERPATFCVPSSSPTPKTTVSGEANVGAQPTDPLGSVSSLQLLSSGPA

SEQ ID NO: 1799 - protein, 214 aa, Microglena sp.
GTQVQAHISKSFDAYVTVMVNHWDSRWGEMSKSRWGAQRLRLYGGKKRVLARFFNEVQADVGERKTIVIAYGLLSLPLVARVNFLSLQRARSMRLATVFKGLVAVIDEFRTTKIWHKDSTTVLQSVQSEKRRAHGSRLAMVQFHHGEQQVVVNRDLNAANYIHTIALQCTTTRPGNSCEAKEIIAKLEVVVGRTIDYKLTKVLYRTQCRAKCRR

SEQ ID NO: 1800 - protein, 254 aa, Microglena sp.
RSLFEHAVQQDSTGPCLRFEEDCKKPRKEEGIKIAEKYDGSLKTILPDMGIVVLGVDPGRSNIATVTYLADDKNKTWTLTRGAFYHKSGIKKQTRQKELRFADMIPMWESLRENGAALSTSRTDKISAYLSNYAKFSDEWWRLALRRRESRDNLQRYIGKRKVKDSFWAGIKRCMMKELPDMKVCVAYGSAITKLKPTGPGEVAVPTGAMFASCKRIFKEDVSVTDEFKTTLMSWETGKEKERVYKIQVFVQQT

SEQ ID NO: 1801 - protein, 793 aa, Microglena sp.
KMATKPPTVAKLKELLKLAEVPYSSKSNKDDLVRLCEDNGLIARPPPEYKTVEKMCVVKCALKKAMSLDDEEFGKFREHVDQLVNVVSRMLRRSSLVLTFHITSLLEKGLDIPDLYNMKDTYWKDWLRIGVDGIFPDEESKISYEAVKDSIGDVIGNDDADYIKSYPIYFDQVLNYAGHTLSTVVSNNAWVPLIPRLTRLTSTTLNKLNAPKTLDTSKIIRGYDVMQAIQQEVQNMEGWPESVQEYVNEVREMLSVPDGSRVYDNYGKDMDFPTMVRFNYWIQTRLEDMDARRIRLMPIFNVQRVHVRLDLKTLVNLFRHMFPNDQNIVELSKWEHVKNPDSFMLPQRPAQKKKKSCCPGEWDAYKSVLKQYDDDVKDINATDEYRHAKGLYDTLVNARKTVAGSFFRKPPVKNGWVFDCSICTDGVSLSMQYSKTVQVLVSDLKKTCKKPRKEEGIKIAEKYDGSLKTILPDMGIVVLGVDPGRSNIATVTYLADDKNKTWTLTRGAFYHKSGIKKQTRQKELRFADMIPMWESLRENGAALSTSRTDKISAYLSNYAKFSDEWWRLALRRRESRDNLQRYIGKRKVKDSFWAGIKRCMMKELPDMKVCVAYGSAITKLKPTGPGEIAVPTGAMFASCKRIFKEDVSVTDEFKTTLMSWETGKEKERVYKIPSVCSADVKLRLGGERFGHTKSKTMPKVADCDHLGVRLYNKRKGAQEKHRRGGFATSLVDSQKSIERYPEVRGLRFSPETCIYSDRDRSSALTIARLHCMELMGLGRPLPFAHSSSVVVDE

SEQ ID NO: 1802 - protein, 802 aa, Microglena sp.
ECSREPVCRSRLHQNVFGVQFVMENGIGESSSLVHEADQHDDVAELVDYEGEEDGECAPGRAICVVKMKLSTFIPHDWLRNKIDTLVLDMNKLLGEGYIFANFHIARLFENGIAVPPVNRNFFYRCLIAVSTNKCKGSTLGEDFESSRLLFDSLREPGQSKVDIRGRVKNQIIADLSILMATMASNHLWTNLERRITTYLKWKYPQIAKRLRSDIVAALIKCPTKNLDVIFKMSPHTTKLPTKLPTSRLRSAKSAVALAKKRVGRKEPEGSPLRVRLTKLQERLEKLSEAWLSSKNLRVDADNAKRLFAREVAFCLRGVLPLPSGNTFASRAHMTLPLYHKILSETIEEKRKTKNEKHRTFSLLPYKSGFTLSHIPISKMAFFYMVNECHFDSCKADVASKNHQGIWERFANLKKVETVSRKFGYRIVTDGFAVSILMNKPTCLTCSMPADAFSTRAHEYVTTDEGGIVSFLDNVVVAAVDPGVTDIVTVTGLNGGTRSYSSAKYYRKGLIFKSQRQTDVWNLETADIVGGIIPDRDSSSSEQIGAYARFYMGAAPILLAHRASRGYRNLRFRRYCKKQKLIVEIADFVAPRKKSAKVLVGFGDWKGLGATPISRRTCGPLQAIRFELRSRENVIMEDIDEFRTSQRCSCCENHLCNMVALTHRKKQDGTGWECTEGRKRIHKILHCKSSQSGAPRQQSGGMLHCGKTWDRDVNASRNILMLTLHQVFGRERPLAFRRDAPRSSSTTPPPPLILIWGHRRLNGLPKRLLGISSRTSSTFCTPQRCPKATICSLDDYKVSHFI

SEQ ID NO: 1803 - protein, 585 aa, Microglena sp.
MPRRRWDTSKIIRGYDVMQAIQQEVQNMEGWPESVQEYVNEVREMLSVPDGSRVYDNYGKDMDFPTMIRFNYWIQTRLEDMDARRIRLMPIFNVQRVHVRLDLKTLVNLFRHMFPNDQNIVELSKWEHVKNPDSFMLPQRPAQKKKKSCCPGEWDAYKSVLKQYDDDVKDIKATDEYRHAKGLYDTLVNARKTVAGSFFRKPPVKNGWVFDCSICTDGVSLSMQYSKTVQVLVSDLKKTRKKPRKEEGIKIAEKYDGSLKTILPDMGIVVLGVDPGRSNIATVTYLADNKNKTWKLTRGAFYHKSGIKKQTRQKELRFADMIPMWESLRENGAALSTSRTDKISAYLSNYAKFSDEWWRLALRRRESRDNLQRYIGKRKVKDSFWAGIKRCMMKELPDMKVCVSYGSAITKLKPTGPGEVAVPTGAMFASCKRIFKEDVSVTDEFKTTLMSWETGKEKERVYKIPSVCSADVKLRLGGERFGHTKSKTMPKVADCDHLGVRLYNKRKGAQEKHRRGGFATSLVDSQKSIERYPEVRGLRFSPETSTYSDRDRSSALTIARLHCMEFMGLGRPLPFAHSSSVVVDE

SEQ ID NO: 1804 - protein, 235 aa, Microglena sp.
ERVFKSRGPTKKWLSNIQDCLDDLKDNSPKRTSLESFDAYVTVMVNHWDSRWGEMSKSRWGAQRLRLYGGKKRVLARFFNEVQADVGERKTIVIAYGSSKFAPGGKGELSVPTTSAFNAFSDRFKGRVAVIDEFRTTKIWHKDSTTVLQSVQSEKEGRTVRGLLWCSSTMENSKLFVNRDLNAAINIHNCFTMYPTRPGILARPKKYCKLEVVVGRTIDYKLTGSLQNAKCRAKV

SEQ ID NO: 1805 - protein, 290 aa, Microglena sp.
FMQGRRCFQKPSRIWERFANLKKVETVSRKFGYRIVTDGFAVSILMNKPTCLTCSMPADAFSTRAHEYVTTDEGGIVSFLDNVVVAAVDPGVTDIVTVTGLNGGTRSYSSAQYYRKGLIFKSQRQTDVWNLETADIVGGIIPDRDSSSSEQIGAYARFYMGAAPILLAHRASRWYRNLRFRRYCKKQKLIVEIADFVAPREKSAKVLVGFGDWKGLGATPISRRTCGPLQAIRFELRSRENVIMEDIDEFRTSQRCSCCENHLCNMVALTHRKKARRYRLGMYRRTQADS

SEQ ID NO: 1806 - protein, 302 aa, Microglena sp.
RIWQTIKNKTWKLTRGAFYHKSGIKKQTRQKELRFADMIPMWESLRENGAALSTSRTDKISAYLSNYAKFSDEWWRLALRRRESRDNLQRYIGKRKVKDSFWAGIKRCMMKELPDMKVCVAYGSAITKLKPTGPGEVAVPTGAMFASCKRIFKEDVSVTDEFKTTLMSWETGKEKELVYKIPSVCSADVKLRLGGERFGHTKSKTMPKVADCDHLGVRLYNKRKRAQEKHRRGGFATSLVDSQKSIERYPEVRGLRFSPETSTYSDRDRSSALTIARLHCMELMGLGRPLPFAHSSSVVVDE

SEQ ID NO: 1807 - protein, 509 aa, Microglena sp.
YPESDIYKIIPASLVHANLIKDVVRRLRDLLPLPRGKQFNTRAHLTMRLFHHVLTELGADLKEKTNKKRPRLFSILPRKSGFTISYVPISSMTLMKLLSMGDSPLESFRGDGRHENHSMLLWRKYFNVQGLETKGSRFDNRILSDGKGVSVQMKHQASEDVAVDNAGYPKDAILEDCQDASLRVGVDPGMTDIVTVASSAGRVESFSSARFSEAAGYNTSNRRTNKWNVDTQDLVKSIPSPTTSSMHDMQDHVRGYLSALPTLLQHRASRGYRSMRFFRYVGKQKTIEKVCDLIAPKAQKKTIEEKVCDVIAPRAQTTVVGFGNWSNQGYGISRSCSGPVKEIRKCLSRRQNVLFKNVDERNTSCTCHGCFQKIVNMKADSVVWRRVQNEPPSLINGAPTTTTTTFEKQKTVVKNVKVHKVLHCRNSVKSASSNVRCGATWNRDVNAAKNLLLLLTTWMDGKERPAAFCVPSSSPTPKTTVSGEANVGAQQTDPPGSVSSLQLLSSGPA

SEQ ID NO: 1808 - protein, 727 aa, Microglena sp.
VLTMKEFGKFREHVDQLVNVVSRMLRRSSLVLTFHITSLLEKGLEIPDLYNMKDTYWKDWLRIGVDGIFPDEKSKISYEAVKDSIGDVIGNDDADYIKSYPIYFDQVLNYAGHTLSTVVSNNAWVPLIPRLARLTSTTLNKLNAPKTLDTSKIIRGYDVMQAIQQEVQNMEGWPESVQEYVNEVREMLSVPDGSRVYDNYGKDMDFPTMVRFNYWIQTRLEDMDARRIRLMPIFNVQRVHVRLDLKTLVNLFRHMFPNDQNIVELSKWEHVKNPDSFMLPQRPAQKKKKSCGPGEWEAYKSVLKQYDDDVKDIKATDEYRHAKGLYDTLVNARKTVADSFFRKPPVKNGWVFDCSICTDGVSLSMQYSKTVQVLVSDLKKTCKNPRKEKGIKIAEKYDGSLKTILPDMGIVVLGVDPGRSNIATVTYLADDKNKTWTLTRGAFYHKSGIKKQTRQKELRFADMIPMWESLRENGAALSTSRTDKISAYLSNYAKFSEEWWRLALRRRESRDNLQRYIGKRKVKDSFWAGIKRCMMKELPDMKVCVAYGSAITKLKPTGPGEVAVPTGAMFASCTRIFKEDVSVTDEFKTTLMSWETGKEKERVYKIPSVCSADVKLRLGGERFGHTKSKTMPKVVDCDHLGVRLYNKRKGAQEKHRRGGFATSLVDSQKSIERYPEVRGLRFSPETCIYSDRDRSSALTIARLHCMELMGLGRPLPFAHSSSVVVDE

SEQ ID NO: 1809 - protein, 709 aa, Microglena sp.
LWKMATKPPTVAKLKELLKLAEVPYSSKSNKDDLVRLCEDNGLIARPPPEYKTVEKMCVVKCALKKAMSLDDEEFGKFREHVDQLVNVVSRMLRRSSLVLTFHITSLLEKGLEIPDLYNMKDTYWKDWLRIGVDGIFPDEESKISYEAVKDSIGDVIGNDDADYIKSYPIYFDQVLNYAGHTLSTVVSNNAWVPLIPRLARRTSTTLNKLNAPKTLDTSKIMRGYDVMQAIQQEVQNMEGWPESVQEYVNEVREMLSVPDGSRVYDNYGKDMDFPTMVQFNYWIQTRLEDMDARRIRLMPIFNVQRVHVRLDLKTLVNLFRHMFPNDQNIVELSKWEHVKNPDSFMLSQRPAQKKKKSCGPGEWEAYKSVLKQYDDDVKDIKATDEYRHAKGLHDTLVNARKTVAGSFFRKPPVKNGWVFDCSICTDGVSLSMQYSKTVQVLVSDLKKTCKKPRKEEGIKIAEKYNGSLKTILPDMGIVVLGVDPGRSNITTVTYLADDKNKTWTLTRGAFYHKSGIKKQTRQKELRFAEMIPMWESLRENGAALSTSRTDKISAYLSNYAKFSEEWWRLALRRRESRDNLQRYIGKRKVKDSFWAGIKRCMMKELPDMKVCVAYGSAITKLKPTGPGEVAVPTGAMFASCKRIFKEDVSVTDEFKTTLMSWETGKEKERVYKIPSVYSADVKLRLGGERFGHTKSKTMPKVVDCDHLG

SEQ ID NO: 1810 - protein, 239 aa, Microglena sp.
TRPTIQRSTNHGSANISSSCLSLPWTGGQSGSLSIQTRLQLHPSTQASAKQWSRTHQRMRNPSCLVRDRHPTLSNSCWFMTSCSQGWILRKTLRTKERMKIKMQMIRIRKRIFYLKKEFRDQTTNFLAARYDVLLVPQLETAKMTISAERELTTKVARQMLTLSHSVLFNRLKEKCEEYGTVFLHVLEHYTSQTCPMCGFLNKCGETYTCKNCQFTCDRDIVGAAGIFLKAVRTENPCS

SEQ ID NO: 1811 - protein, 289 aa, Microglena sp.
HVVHFTTSRVSRSRQGRRNCVFADMIPMWESLRENGAALSTSRTDKISAYLSNYAKFSDEWWRLALRRRESRDNLQRYIGKRKVKDSFWAGIKRCMMKELPDMKVCVAYGSAITKLKPTGPGEVAVPTRAMFASCKRIFKEDVSVTDEFKTTLMSWETGKEKERVYKIPSVCSADVKLRLGGERFGHTKSKTMPKVADCDHLGVRLYNKRKGAQEKHRRGGFATSLVDSQKSIERYPEVRGLRFSPETCIYSDRDRSSALTIARLHCMELMGLGRPLPFAHSSSVVVDE

SEQ ID NO: 1812 - protein, 293 aa, Microglena sp.
NKTWTLTRGAFYHKSGIKKQTRQKELRFADMIPMWESLRENGAALSTSRTDKISAYLSNYAKFSEEWWRLALRRRESRDNLQRYIGKRKVKDSFWAGIKRCMMKELPDMKVCVAYGSAITKLKPTGPGEVAVPTGAMFASCKRIFKEDVSVTDEFKTTLMSWETGKEKERVYKIPSVCSADVKLRLGGERFGHTKSKTMPKVVDCDHLGVRLYNKRKGAQEKHRRGGFATSLVDSQKIDRAVPRGTRTAILSRNMHLLGPGSLFCSHNRKAALHGIDGSRTTSSICPQQLCCC

SEQ ID NO: 1813 - protein, 205 aa, Microglena sp.
RVSVQMKQKGKEEVVEEGENAGYPKDANIVECKDAVGVLRVGVDLGMTDIVTVASSAGRIESFSSARFSEVAGYNTSKRRTYKWNDETQDLVKSIPSPNTSNMSDLQDHVRAYLKALPILLQHRANKGYRSMRFFRYVGKQKTIEKVCDVIAPRAQTTVVGFGNWSNQGYGISRSCSGPIKEIRRCLSRRKNVLFKKRRRTQHLL

SEQ ID NO: 1814 - protein, 457 aa, Microglena sp.
EYVNEVREMLSVPDGSRVYDNYGKDMDFPTMVRFNYWIQTRLEDMDARRIRLMPIFNVQRVHVRLDLKTLVNLFRHMFPNDQNIVELSKWEHVKNPDSFMLPQRPAQKKKKSCGPGEWEAYKSVLKQYDDDVKDIKATDEYRHAKGLYDTLVNARKTVAGSFFRKPPVKNGWVFDCSICTDGVSLSMQYSKTVQVLVSDLKKTCKNLRKEEGIKIAEKYDGSLKTILPDMGIVVLGVDPGRSNIATVTYLADDKNKTWTLTRGAFYHKSGIKKQTRQKELRFADMIPMWESLRENGAALSTSRTDKISAYLSNYAKFSEEWWRLALRRRESRDNLQRYIGKRKVKDSFWAGIKRCMMKELPDMKVCVAYGSAITKLKPTGPGEVAVPTGAMFASCKRIFKEDVSVTDEFKTTLMSWETGKEKERVYKIPSVCSADVKLRLGGERFWSHEIENDAKGR

SEQ ID NO: 1815 - protein, 682 aa, Microglena sp.
KMATKPPTVAKLKELLKLAEVPYSSKSNKDDLVRLCEDNGLIARPPPEYKTVEKMCVVKCALKKAMSLDDEEFGKFREHVDQLVNVVSRMLRRSSLVLTFHITSVLEKGLDIPDLYNMKDTYWKDWLRIGVDGIFPDEESKISYEAVKDSIGDVIGNDDADYIKSYPIYFDQVLNYAGHTLSTVVSNNAWVPLIPRLARLTSTTLNKLNAPKTLDTSKIIRGYDVMQAIQQEVQNMEGWPESVQEYVNEVREMLSVPDGSRVYDNYGKDMDFPTMVRFNYWIQTRLEDMDARRIRLMPIFNVQRVHVRLDLKTLVNLFRHMFPNDQNIVELSKWEHVKNPRSFMLPQRPAQKKKKSCGPGVWEAYKSVLKQYDDDVKDIKATEEYRHAKGLYDTLVNARKTVAGSFFRKPPVKNGWVFDCSICTDGVSLSMQYSKTVQVLVSDLKKTCKKPRKEEGIKIAEKYDGSLKTILPDMGIVVLGVDPGRSNIATVTYLADDKNKTWKLTRGAFYHKSGIKKQTRQKELRFADMIPMWESLRENGAALSTSRTDKISAYLSNYAKFSDEWWRLALRRRESRDNFQRYIGKRKVKDSFWAGIKRCMMKELPDMKVCVAYGSAITKLKPTRPGEVAVPAGAMFASCKRIFKEDVSVTDEFKTTLMSWETGKEKETCLQDPKCLFSRREA

SEQ ID NO: 1816 - protein, 448 aa, Microglena sp.
KRKQQKKRPRLFSILPRKSGFTISYVPISSMTLMKLLSMGDSPLESFRGDGRHENHSMLWRKYFNVQGLETKGSRFDNRILSDGKGVSVQMKHQGSEDVDVEGGDNAGYPKDAILEDCQDASLRVGVDPGMTDIVTVASSAGRVESFSSARFSEAAGYNTSNRRTKKWNVDTQDLVKSIPSPTTSSMHDMQDHVRGYLSALPTLLQHRASRGYRSMRFFRYVGKQKTIEKVCDLIAPKAQKKTIEEKVCDVIAPRAQTTVVGFGNWSNQGYGISRSCSGPIKVIRRCLSRRKNVLFKNVDERNTSCTCHGCFQKLVNMKGDSVVWRRVQNEPPSLINGAPTTTTIEKQKTVVKNVKVHKVLHCRNSVKSASSNVRCGATWNRDVNAAKNLLLLLTTWMDGKERPATFCVPSSSPTPKTTVSGEANVGAQPTDPPGSVSNLQLLSSGPA

SEQ ID NO: 1817 - protein, 661 aa, Microglena sp.
YQDKKRTLPPSISMGVVTNNGDDDDDLDIMVVKKTLNSLCMDVSRQQICSRIQSMVLVINHAVAEAYLFANFHITRCLDDVDFDVKQLSHLDRNFYYRCILAVSTSNVRKDTLGQSLKDSMVAFDALRPAGYLKVDVRQWGQVISDVSIQMATMACNSVWANVDRVVIKYLRLKHPSLKKHFNKIVKAVVQYPESDIDKIIPASLVHANLIKDVVRRLRDLLPLPRGKQFNTRAHLTMRLFHHVLTELGADLKEKTTKKRPRLFSILPRKSGFTISYVPISSMTLMKLLSMGDSPLESFRGDGRHENHSMLWRKYFNVQGLETKGSRFDNRILSDGKGVSVQMKHQASEDVAVEGGDNAGYPKDAILEDCQDASLRVGVDPGMTDIVTVASSAGRVESFSSARFSEAAGYNTSNRRTNKWNVDTQDLVKSIPSPTTSSMHDMQDHVRGYLSALPTLLQHRASRGYRSMRFFRYVGKQKTIEKVCDLIAPKAQKKTIEEKVCDVIAPKAQKTIVGFGNWSNQGYGISRSCSGPVKEIRKCLSRRQNVLFKNVDERNTFCTCHGCFQKLINMKADSVVWRRVQNEPPSLINGAPTTTTTTTLWCNLEPRRERCQEPSSASDDVDGRERATGDILCALIIAHPKNHSFRRGKCGRSTNRPTWVS

SEQ ID NO: 1818 - protein, 503 aa, Microglena sp.
SQGRRIRAQLQAPRTFTSIGTRHGRLVSSIVVASKDRLARFGFELIEWICSQHSCSIIVLDHQDGAPEDELGKDLMSIVQVYCCRWNGRRRYKVKCQTQVEDLKAEAEPNQGSEIDAGRVCRVQPVHVQQGGGSTVGRRKHSQVCLPNSRQVCDEQGEGEGKMPNPYFKNRQWLLQCPKSVRQSAIKAALANIKACFSNLKACNIKQFSAPFRRKKTELERGWVIEMDQKNVSKDGDKLFIFKDILGNMRYFGSKQLHKLMPEGNPTHDPKVQKSRFGEYFLVLSVAVRDRRAERKPVHPDKVATASIDPGVRKTMVTYSPENEESFMLGQGQASDLVKLLLVHDKLQSRLDTEKTLRSKERMKIKMQMIRIRKRIFYLKKEFRDQTTNFLAARYDVLLVPQLETAKMTISAERELTTKVARQMLTLSHSVLFNRLKEKCEEYGTVFLHVLEHYTSQTCPMCGFLNKCGETYTCKNCQFTCDRNIVGAAGIFLKAVRTENPCS

SEQ ID NO: 1819 - protein, 258 aa, Microglena sp.
ASQNSMTINSKRHCPIWVSSFWVWILVGATSLQSRIWQTTTARHGSLHAELFTTSLVSRNRKNSKKKRFSDMIPRWESLRENGAALSTSRKDDISAYLKNYATFSDEWWRMALRRRESRDNFQRYIGKRKAMDSFWAGIKRNMKLDHPDLRVRVAYGSAITTLKATGPGEVAVPTGSMFASCKRLFKDEVHVTDEFKTTLMSWENRCQEGMCLQNSKCPNNHGRADSSRLRVVGSHPIEGDSKGLLSRPVGGEGVLHT

SEQ ID NO: 1820 - protein, 289 aa, Microglena sp.
HVVHFTTSRVSRSRQGRRNCVFADMIPMWESLRENGAALSTSRTDKISAYLSNYAKFSDEWWRLALRRRESRDNLQRYIGKRKVKDSFWAGIKRCMMKELPDMKVCVAYGSAITKLKPTGPGEVAVPTGAMFASCKRIFKEDVSVTDEFKTTLMSWETGKEKERVYKIPSVCSADVKLRLGGERFGHTKSKTMPKVADCDHLGVRLYNKRKGAQEKHRRGGFATSLVDSQKSIERYPEVRGLRFSPETCIYSDRDRSSALTIARLHCMELMGLGRPLPFAHSSSVVVDE

SEQ ID NO: 1821 - protein, 314 aa, Microglena sp.
RIPTASCCPQRPAQKKKKSCGPGEWEAYKSVLKQYDDDVKDIKATDEYRHAKGLYDTLVNARKTVAGSFFRKPPVKNGWVFDCSICTDGVSLSMQYSKTVQVLVSDLKKTCKKPRKEEGIKIAEKYDGSLKTILPDMGIVVRGVDPGRSNIATVTYLADDKNKTWTLTRGAFYHKSGIKKQTRQKELRFADMIPMWESLRENGAALSTSRTDKISAYLSNYAKFSDEWWRLALRRRESRDNLQRYIGKRKVKDSFWAGIKRCMMKELPDMKVCVAYGSAITKVKPTGPGEVAVPTGAMFASCKRIFKRGRFCDR

SEQ ID NO: 1822 - protein, 220 aa, Microglena sp.
QEKRFSNMIPRWESLRENGAALSTSRKDDISAYLKNYATFSDEWWRMALRRRESRDNFQRYIGKRKAMDSFWAGIKRNMKLDHPDLRVRVAYGSAITKLKATGPGEVAVPTGSMFASCKRLFKEEVHVTDEFKTTLMSWETGAKKECVYKIPSVQITTEGQIRLGYELLGHTPLKETPKVSYRDQLAVRVYCTRKKNPRKTQEGWLSPLSCRQQIDQAVP

SEQ ID NO: 1823 - protein, 803 aa, Microglena sp.
PRMEHVCDVCIKSSVMYKLCKMATKPPTVAKLKELLKLAEVAYSSKDKKDDIVRLCEDNGLIARPPPEYKTVEKMCVVKCALKKAMSLDDEEFGKFRGHVDQLVNVVSRMLRRSSLVLTFHVTRLMEGDLPIPNMYDMKDTYWKDWLRIGVDGVFPDEQSRISYKAVNDVIGKVLGSDDPDYINSYPIYFGQVLNYAGHTLSTVVSNNAWVPLVPRLTRLTKATLNALGAPKTIRVYDVMRVIQQEIQEMESWPESVQEYVREVQVRLKVPDGSRLYDDYGKDMDFPTMVRFNYWMQTRLEAIGARRIRLMPIFNVQRAHVRLDMKTLVNLFRHVFPKDPNIVELSKWENVKDPDRFMLPLKPSVKKKKSCGPGEWEAYKLAQQKYDADVKDIKATDEYRHAKGRYDTLVNARKTVAGSFFKKPPVKTGWVFDCSICTDGVSLSMQYSKTVQVRVSDLKNKSKRSRDEEGMSVSEQYDHKLKTTLPDMGIVVLGVDPGRSNIATVTYLADDKSKTWKLTRGAFYHKSGIKKQKKQQEKRFSDMIPRWESLRENGAALSTSRKDDISAYLKNYATFSDEWWRMALRRKESRDNFQRYIGKRKAMDSFWAGIKRNMKLDHPDLRVRVAYGSAITKLKATGPGEVAVPTGSMFASCKRLFKEEVHVTDEFKTTLMSWETGAKKECVYKIPSVQITTEGQIRLGYELLGHTPLKETPKVSYRDQLAVRVYCTRKKIQEKHRRGGLAPSLVDNNSIKRYPEVRGLRFSPETSTYSDRDRSSALTIARLHCMELLGQGRPLPFCRDACC

SEQ ID NO: 1824 - protein, 510 aa, Microglena sp.
VGYRQNHPSESRACEPHQRRCQTPERSLAAAKGEAVQHSSAPDNETVSSRAYRVGSGSKRENNKKTPPSVQYPSTQERLHHFLRPYIVHDTHEASQHGRFAARELPWRWTSRESVHVVEKVLQCQGLETKGSRFDNRILSDGKGVSVQMKHQASEDVAVDNAGYPKDAILEDCQDASLRVGVDPGMTDVVTVASSAGRVESFSSARFSEAAGYNTSNRRTNKWNVDTQDLVKSIPLPTTSSMHDMQDHVRGYLSALPTLLQHRASRGYRSMRFFRYVGKQKTIEKVCDLIAPKAQKKTIEKKVCDVIAPKAQKTIVGFGNWSNQGYGISRSCSGPVKEIRKCLSRRQNVLFKNVDERNTSCTCHGCFQKLINMKADSVVWRRVQNETPSLINGAPTTTTTTTTTTTIEKQKTVVKNVKVHKVLHCRNSVKSASSNVRCGATWNRDVNAAKNLLLLLTTWMDGKERPATFCVPSSSPTPKTTVSGEANVGAQPTDPPGSVSSLQLLSSGPT

SEQ ID NO: 1825 - protein, 341 aa, Microglena sp.
RRRYQDRRKYDGSLKTILPDMGIVVLGVDPGRSNIATVTYLADDKNKTWTLTRGAFYHKSGIKKQTRQKELRFADMIPMWESLRENGAALSTSRTDKISAYLSNYAKFSDEWWRLALRRRESRDNLQRYIGKRKVKDSFWAGIKRCMMKELPDMKGCVAYGSAITKLKPTGPGEVAVPTGAMFASCKRIFKEDVSVTDEFKTTLMSWETGKEKERVYKIPSVCSADVKLRLGGERFGHTKSKTMPKVADYRDHLGVRLYNKRKGAQEKHRRGGFATSLVDSQKSIERYPEVRGLRFSPETCIYSDRDRSSALTIARLHCMELMGLGRPLPFAHSSSVVVDE

SEQ ID NO: 1826 - protein, 618 aa, Microglena sp.
QCIRNLHVLNIRMPCMATKASVKLARPPMPLVSPGPSSVDGQIMARSERSGLQATNVSLTQAASKATSSSRKKKPAVVKSFSTHVCPHTNNNTTCSDSNCSCKPIFLTNIPDASKSRTSDQGSTSSALDFYEYWDSSRQDMYRQLLWLPKTGTQGLVSSSFNGFAHSTPTRSSFSITKTEPLKTSLEKTSCPSFKYIVTDGTVEDATKSNAKPKLRTLKLKLNPTKAQKSMLAEFAGCSRFMYNKAVAARLGVGITHKSVFRIRDRYVTNKVRGEGKMPNPYFKNRQWLLQCPKSVRQSAIKSALANIKACFSNLKAGNIKQFSAPFRRKKTELERGWVIEMDQKNVSKDGDKLFIFKEILGNMRYFGSKQLHKLMPEENPTHDPKVQKSRFGEYFLVLSVAARDRRAERKPVNPDKVATASIDPGVRKTMVTYSPENEESFMLGQGQASDLVKLLLVHDKLQSRLDTEKTLRSKERMKIKKLMIRIRKTIFYLKKEFRDQTTNFLAARYDVLLVPQLETAKMTISAERELTTKVARQMLTLSHSVLFNRLKEKCEEYGTVFLHVLEHYTSQTCPMCGFLNKCGETYTCKNCQFTCDRDIVGAAGIFLKAVRTENPCS

SEQ ID NO: 1827 - protein, 491 aa, Microglena sp.
RETLLCTRSGILSQGVLPLPSGNTFASRAHMTLPLYHKILSETIEEKRKTKNEKHRTFSLLPYKSGFTLSHIPISKMAFFYMVNECHFDSCKADVASKNHQGIWERFANLKKVETVSRKFGYRIVTDGFAVSILMNKPTCLTCSMPADAFSTRAHEYVTTDEGGIVSFLDNVVVAAVDPGVTDIVTVTGLNGGTRSYSSAQYYRKGLIFKSQRQTDVWNLETADIVGGIIPDRDSSSSEQIGAYARFYMGAAPILLAHRASRGYRNLRFRRYSKKQKLIVEIADFVAPRKKSAKVLVGFGDWKGLGATPISRRTCGPLQAIRFELRSRENVIMEDIDEFRTSQRCSCCENHLCNMVALTHRKKQDGTGWECTEGRKRIHKILHCKSSQSGAPRQKSGGMLHCGKTWDRDVNASRNILMLTLHQVFGRERPLAFRRDAPRSSSTTPPPPPDTDMGTQTVERFTKEATRNIFENLFNLLHPPTLPKSNDLQSG

SEQ ID NO: 1828 - protein, 801 aa, Microglena sp.
PRMEHVCDVCIKSSVMYKLCKMATKPPTVAKLKELLKLAEVAYSSKDKKDDIVRLCEDNGLIARPPPEYKTVEKICVVKCALKKAMSLDDEEFGKFREHVDQLVNVVSRMLRRSSLVLTFHVTRLMEGDLPIPNMYDMKDTYWKDWLRIGVDGVFPDEESRISYEAVKDVIGKVLGSDDPDYINSYPIYFDQVLNYAGHTLSTVVSNNAWVPLVPRLTRLTKATLNALKAPKTIRVYDVMRVIQQEIQEMESWPESVQEYVREVRVRLKVPDGSRLYDDYGKDMDFPTMVRFNYWIQTRLEDMDARRIRLMPIFNVQRVHVRLDLKTLVNLFRHMFPNDQNIVELSKWKDVKDPDRFMLPLKPAVKKKKSCGPGEWEAYKLAQQKYDADVNDIKDTDEYRHAKGRYDTLVNARKTVAGSFFKKPPVKTGWVFDCSICTDGVSLSMQYSKTVQVRVSDLKKTSKRSRDDEGMSVSEQYDHKLKTTLPDMGIVVLGVDPGRSNIATVTYLADDKSKTWKLTRGAFYHKSGIKKQKKQQEKRFSDMIPRWESLRENGAALSTSRTDDISAYLKNYDTFSDEWWRMALLRRESRDNFQRYIGKRKAMDSFWAGIKRNMKLDHPDLRVRVAYGSAITTLKATGPGEVAVPTGSMFASCKRLFKEEVHVTDEFKTTLMSWETGAKKECVYKIPSVQITTEGQIRLGYELLGHTPLKETPKVSYRDQLAVRVYCTRKQIQEKHRRGGLAPSLVDNNSIKRYPEVRGLRFSPETSTYSDRDRSSALTIARLHCMELLGQGRPLPFCRDA

SEQ ID NO: 1829 - protein, 623 aa, Microglena sp.
VNLTVYKEFACTKYQNAMYGNQSFCKIGKASDALGVSRTVLRRWADNGTIRTIRTIRTPGNQRLFDPSSIQGYLIEQEKQPSSRQVILYARVSSHKQQPDLLRQQLFLQTHISDKHSGCEQVIEIKDVGSGLNFKRPGLLRVLGLVTAGLVSSIVVASKDRLARFGFELIEWICSQHSCSITKTEPLKTSLEKTSCPSFKYIVADGTVEDATKSNAKPKLRTLKLKLNPTKAQKSMLAEFAGCSRFMYNKAVAARLGVGSTHKSVFRIRDRYVTNKVRGKGKMPNPYFKNRQWLLQCPKSVRQSAIKSALANIKACFSNLKAGNIKQFSAPFRRKKTELERGWVIEMDQKNVSKDGDKLFIFKEILGNMRYFGSKQLHKLMPEENPTHDPKVQKSRFGEYFLVLSVAARDRRAERKPVNPDKVATASIDPGVRKTMVTYSPENEESFMLGQGQASDLVKLLLVHDKLQSRLDTEKTLRSKERMKIKKLMIRIRKTIFYLKKEFRDQTTNFLAARYDVLLVPQLETAKMTISAERELTTKVARQMLTLSHSVLFNRLKEKCEEYGTVFLHVLEHYTSQTCPMCGFLNKCGETYTCKNCQFTCDRDIVGAAGIFLKAVRTENPCS

SEQ ID NO: 1830 - protein, 801 aa, Microglena sp.
PRMEHVCDVCIKSSVMYKLCKMATKPPTVAKLKELLKLAEVAYSSKDKKDDIVRLCEDNGLIARPPPEYKTVEKMCVVKCALKKAMSLDDEEFGKFREHVDQLVNVVSRMLRRSSLVLTFHVTRLMEGDLPIPNMYDMKDTYWKDWLRIGVDGVFPDEESRISYESVKDVIGKVLGSDDPDYINSYPIYFDQVLNYAGHTLSTVVSNNAWVPLVPRLTRLTKATLNALEAPKTIRVYDVMRVIQQEIQEMESWPESVQKYVREVRVRLKVPDGSRLYDNYGKDMDFPTMVRFNYWMQTRLEAIGARRIRLMPIFNVQRAHVRLDMKTLVNLFRHVFPKDPNIVELSKWKDVKDPDRFMLPLKPAFKKKKSCGPGEWEAYKLAQQKYDADVNDIKDTDEYRHAKGRYDTLVNARKTVAGSFFKKPPVKTGWVFDCSICTDGVSLSMQYSKTVQVRVSDLKKTSKRSRDDEGMSVSEQYDHKLKTTLPDMGIVVLGVDPGRSNIATVTYLADDKSKTWKLTRGAFYHKSGIKKQKKQQEKRFSDMIPRWESLRENGAALSTSRTDDISAYLKNYDTFSDEWWRMALLRRESRDNFQRYIGKRKAMDSFWAGIKRNMKLDHPDLRVRVAYGSAITTLKATGPGEVAVPTGSMFASCKRLFKEEVHVTDEFKTTLMSWETGAKKECVYKIPSVQITTEGQIRLGYELLGHTPLKETPNVSYRDQLAVRVYCTRKQIQEKHRRGGLAPSLVDNNSIKRYPEVRGLRFSPETSTYSDRDRSSALTIARLHCMELLGQGRPLPFCRDA

SEQ ID NO: 1831 - protein, 309 aa, Microglena sp.
AFQVGTCKESRKLHVAPEACTEEEKSCSPGEWEAYKSVLKQYDDDVKDIKATDEYRHAKGLYDTLVNARKTVAGSFFRKPPVKNGWVFDCSICTDGVSLSMQYSKTVQVLVSDLKKTCKKPRKEEGIKIAEKYDGSLKTILPDMGIVVMGVDPGRSNIATVTYLADDKNKTWKLTRGAFYHKSGIKKQTRQKELRFADMIPMWESLRENGAALSTSRTDNISAYLSNYAKFSDEWWRLALRRRESRDNLQRYIGKRKVKDSFWAGIKRCMMKELPDMKVCVAYGSAITKLKPTGPGEVAVAHWGHVRIV

SEQ ID NO: 1832 - protein, 598 aa, Microglena sp.
GFIQQEIQEMESWPESVQEYVREVRVRLKVPDGSRLYDDYGKDMVFPTMVRFNYWMQTRLEAIGARRIRLMPIFNVQRAHVRLDMKTLVNLFRHVFPKDPNIVELSKWKNVKDPDLFMLPLKPAFKKKKSCGPGEWEAYKLAQQKYDADVNDVKDTDEYRHAKGRYDTLVNARKTVAGSFFKKPPVKTGWVFDCSICTDGVSLSMQYSKTVQVRVSDLKKTSKRSRDDEGMSVSEQYDHKLKTTLPDMGIVVLGVDPGRSNIATVTYLADDKSKTWKLTRGAFYHKSGIKKQKKQQEKRFSDMIPRWESLRENGAALSTSRKDDISAYLKNYATFSDEWWRMALRRRESRDNFQRYIGKRKAMDSFWAGIKRNMKLDHPDLRVRVAYGSAITTLKATGPGEVAVPTGSMFASCKRLFKEEVHVTDEFKTTLMSWETGAKKECVYKIPSVQITTEGQIRLGYELLGHTPLKETPKVSYRNQLAVRVYCTRKQIQEKHRRGGLVPSLVDNNSIKRYPEVRGLRFSPETALTRTGTAPLLSQSQGCTAWNCWVKGDRFHFAGMRVVDGLQKNMMVFHCPVGCYTIRLHHKVYRTLQKAVSF

SEQ ID NO: 1833 - protein, 792 aa, Microglena sp.
ECSREPVCRSRLHQNVFGVQFVMENGIGESSSLVHEADQHDDVAELVDYEGEEDGECAPGRAICVVKMKLSTFIPHDWLRNKIDTLVLDMNKLLGEGYIFANFHIARLFENGLAVPPVNRNFFYRCLIAVSTNKCNGSTLGEDFESSRLLFDLLREPGQSKVDIRGRVKNQIIADLSILMATMASNHLWTNLERRITTYLKWKYPQIAKRLRSDIVAALIKCTTKNLDVIFKMSPHTTKLPTKLPTSRLRSAKSAVALAKKRVGRKEPEGSPLRVRLTKLQERLEKLSEAWLSSKNLRVDADNAKRFFAREVAFCLRGVLPLPSGNTFASRAHMTLPLYHKILSETIEEKRKTKNKKHRTFSLLPYKSGFTLSHIPISKMAFFYMVNECHFDSCKADVASKNHQGIWERFANLKKVETVSRKFGYRIVTDGFAVSILMNKPTCLTCSMPADAFSTRAHEYVTTDEGGIVSFLDNVVVAAVDPGVTDIVTVTGLNGGTRSYSSAKYYRKGLIFKSQRQTDVWNLETADIVGGIIPDRDSSSSEQIGAYARFYMGAAPILLAHRASRGYRNLRFRRYCKKQKLIVEIADFVAPRKKSAKVLVGFGDWKGLGATPISRRTCGPLQAIRFELRRRENVIMEDIDEFRTSQRCSCCENHLCNMVALTHRKKQDGTGWECTEGRKRIHKILHCKSSQSGAPRQQSDGMLHCGKTWDRDVNASRNILMLTLHQVFGRERPLAFRRDAPRSSSTTPPPDTDMGTQTVERFTKEATRNIFENLFNLLHPPTLPKSNDLQSG

SEQ ID NO: 1834 - protein, 330 aa, Microglena sp.
ASQNSMTIKLKTTLPDMGIVVLGVDPGRSNIATVTYLADDKSKTWKLTRGAFYHKSGIKKQKKQQEKRFSDMIPRWESLRENGAALSTSRTDDISAYLKNYDTFSDEWWRMALLRRESRDNFQRYIGKRKAMDSFWAGIKRNMKLDHPDLRVRVAYGSAITTLKATGPGEVAVPTGSMFASCKRLFKEEVHVTDEFKTTLMSWETGAKKECVYKIPSVQITTEGQIRLGYELLGHTPLKETPKVSYRDQLAVRVYCTRKQIQEKHRRGGLAPSLVNNNSIKRYPEVRGLRFSPETSTYSDRDRSSALTIARLHCMELLGQGRPLPFCRDA

SEQ ID NO: 1835 - protein, 704 aa, Microglena sp.
GACGSARQCSEPHVAAFQSGADFPCHEAHGGDLPIPNMYDMKDTYWKDWLRIGVDGVFPDEESRISYEAVKDVIGKVLGSDDPDYINSYPIYFDQVLNYAGHTLSTVVSNNAWVPLVPRLTRLTKATLNALKSPKTIRVYDVMRVIQQEIQEMESWPESVQEYVREVRVRLKVPDGSRLYDDYGKDMDFPTMVRFNYWMQTRLESIGARRIRLMPIFNVQRAHVRLDMKTLVNLFRHVFPKDPNIVELSKWKDVKDPDRFMLPLKPAVKKKKSCGPGEWEAYKLAQQKYDADVNDIKDTDEYRHAKGRYDTLVNARKTVAGSFFKKPPVKTGWVFDCSICTDGVSLSMQYSKTVQVRVSDLKKTSKRSRDDEGMSVSEQYDHKLKTTLPDMGIVVLGVDPGRSNIATVTYLADDKSKTWKLTRGAFYHKSGIKKQKKQQEKRFSDMIPRWESLRENGAALSTSRTDDISAYLKNYDTFSDEWWRMALLRRESRDNFQRYIGKRKAMDSFWAGIKRNMKLDHPDLRVRVAYGSAITTLKATGPGEVAVPTGSMFASCKRLFKEEVHVTDEFKTTLMSWETGAKKECVYKIPSVQITTEGQIRLGYELLGHTPLKETPKVSYRDQLAVRVYCTRKKIQEKHRRGGLAPSLVDNNSIKRYPEVRGLRFSPETSTYSDRDRSSALTIARLHCMELLGQGRPLPFCRDA

SEQ ID NO: 1836 - protein, 470 aa, Microglena sp.
KVDVCQWGQVIADVSIQMATMACNSVWANVDRVVIKYLRLKHPSLKKHFNKIVKAVVQYPDSDIDKIIPASLVHANLIKDVVRRLRDLCRCQGEAVQHSSAPDNETVSSRACRVGSESKRENNKKTPRLFSILPRKSGFTISYVPISSMTLMKLLSMGDSPLESVRGDGRHENHSMLWRKYFNVQGLETKGSRFDNRILSDGKGVSVQMKHQVGKDIAGEGGGDNAGYPKDASIEDCQDASLRQGALRVGIDPGMTDIVTIASSDGRVESFSSARFSEAAGYNTSNRRTNKWNADTQDLVKSIPSPTTSSMHDMQDHVRGYLSALPTLLQHRANRGYRSMRFFRYVGKQKTIEKVCDLIAPKAQKKTIEEKVCDVIAPKAKKTVVGFGNWSNQGYGISRSCSGPVKEIRKCLSRRQNVLFKNVDERNTSCTCHGCFQKLVNMKADSVAWRRVKKRALRPHRRGSYNNNNV

SEQ ID NO: 1837 - protein, 340 aa, Microglena sp.
RRRYQDRRKYDGSLKTILPDMGIVVLGVDPGRSNIATVTYLADDKNKTWTLTRGAFYHKSGIKKQTRQKELRFADMIPMWESLRENGAALSTSRTDKISAYLSNYAKFSDEWWRLALRRRESRDNLQRYIGKRKVKDSFWAGIKRCMMKELPDMMVCVAYGSAITKLNPTGPGEVAVPNGAMFASCKIIFKEDVSVTDEFKTTLMSWETGKEKERVYKIPSVCSADVKLRLGGERFGHTKSKTLPKVADCDHLGVRLYNKRKGAQEKHRRGGFATSLVDSQKSIERYPEVRGLRFSPETCIYSDRDRSSALTIARLHCMELMGLGRPLPFAHSSSVVVDE

SEQ ID NO: 1838 - protein, 656 aa, Microglena sp.
GSELTVSSQMKESRISYESVKDVIGKVLGSDDPDYINSYPIYFDQVLNYAGHTLSTVVSNNAWVPLVPRLTRLTKATLNALGAPKTIRVYDVMRVIQQEIQEMESWPESVQEYVREVRVRLKVPDGSRLYDDYGKDMDFPTMVRFNYWMQTRLEAIGARRIRLMPIFNVQRAHVRLDMKTLVNLFRHVFPKDPNIVELSKWKDVKDPDRFMLPLKPAVKKKKSCGPGEWEAYKLAQQKYDADVNDIKDTDEYRHAKGRYDTLVNARKKVAGSFFKKPPVKTGWVFDCSICTDGVSLSMQYSKTVQVRVSDLKKTSKRSRDDEGMSVSEQYDHKLKTTLPDMGIVVLGVDPGRSNIATVTYLADDKSKTWKLTRGAFYHKSGIKKQKKQQEKRFSDMIPRWESLRENGAALSTSRTDDISAYLKNYATFSDEWWRMALLRRESRDNFQRYIGKRKAMDSFWAGIKRNMKLDHPDLRVCVAYGSAITTLKATGPGEVAVPTGSMFASCKRLFKEEVHVTDEFKTTLMSWETGAKKECVYKIPSVQITTEGQIRLGYELLSHTPLKETPNVSYRDQLAVRVYCTRKQIQEKHRRGGLAPSLVDNNSIKRYPEVRGLRFSPETSTYSDRDRSSALTIARLHCMELLGQGRPLPFCRDACC

SEQ ID NO: 1839 - protein, 624 aa, Microglena sp.
VNLTVYKEFACTKYQNAMYGNQRFCKIGKASDAHGVSRTVLRRWADNGTIRTIRTPGNQRLFDPSSIQGYLIEQEKKTSSRKVILYARVSSHKQQPDLLRQQLFLQTHISDKHSGCEQVIEVKDVGSGLNFECPGLLRVLGLVTAGLVSSIVVASKDRLARFGFKLIEWICSQHSCSIIVLNHQDGAPEDELGKDLVSIVQVYCCRWNGRRRYKVKCQTQVEDLKAEAEPNQGSEIDAGRVCRVQPVHVQQGGGSTVGRRKHSQVCLPNSRQVCDEQGEGGGKMPNPYFKNRQWLLQCPKSVRQSAIKAALANIKACFSNLKAGNIKQFSAPFRRKKTELARGWAIEMDQKNVSKDGDKLFIFKDILGNMRYFGSKQLHKLMPEENPTHDPKVKKSRFGEYFLVLSVAARDRRAERKPVHPDKVATASIDPGVRKTMVTYSPENEESFMLGQGQASNLVKLLLVHDKLQSRLDTEKTLLSKERMKIKKQMIRIRKRIFYLKKEFRDQTTNFLAARYDVLLVPQLETAKMTISAEWELTTKVARQMLTLSHSVLFNRLKEKCEEYGTVFLHVLEHYTSQTCPMCGFLNKCGETYTCKNCQFTCDRDIVGAAGIFLKAVRTENPCL

SEQ ID NO: 1840 - protein, 642 aa, Microglena sp.
STTQLQRHTYSQIFHITRCLDDGDFDVKQLPHLDRNFYYRCILAVSTSNVRKDTLGQSLKDSMVAFDALRPAGYLKVDVCQWGQVIADVSIQMATMACNSVWANVDRVVIKYLRLKHPSLKKHFNKIVKAVVQYPDSDIDKIIPASLVHANLIKDVVRRLRDLLPLPRGKQFNTRAHLTIRLFHHVLTELGADLKEKTTKKRPRLFSILPRKSGFTISYVPISSMTLMKLLSMGDSPLESVRGDGRHENHSMLWRKYFNVQGLETKGSRFDNRILSDGKGVSVQMKHQVGKNGGGDNAGYPKDASIEDCQDASLRQGALRVGIDPGMTDIVTIASSDGRVESFSSARFSEAAGYNTSNRRTNKWNADTQDLVKSIPSPTTSSMQDHVRGYLSALPTLLQHRANRGYRSMRFFRYVGKQKTIEKVCDLIAPKAQKKTIEEKVCDVIAPKAKKTVVGFGNWSNQGYGISRSCSGPVKEIRKCLSRRQNVLFKNVDERNTSCTCHGCFQKLVNMKSESVVWRRVQNEPSALIDGAPTTTTTFEKQKTVVKNVKVHKVLHCRNSVKSASSNVRCGATWNRDVNAAKNLLLLLTTWMDGKERPAAFCVPSSSPTPKTTVSGEANVGAQPTDPPGSVSSLQLLSSGPA

SEQ ID NO: 1841 - protein, 709 aa, Microglena sp.
GNCQLVWYHQNNNHSLSMGVVTNNRDDDDLDIMVVKKTLNSLCMDVSRQQICSRIQSMVLVINHAVAEAYLFANFHITRCLDDGDFDIKQLPHLDRNFYYRCILAVSISNVRNDTLDQSLKDSMVAFDALRPAGYVKVDVRPWGQVIADVSIQMATMACNSVWGNVDRVVIKYLRLKHPSLKKHFKKIVKAVVQYPDSDIDKIIPAGLVHANLIKDVVRRLRDLLPLPRGKQFNTRAHLTMRLFHHVLTELGADLKEKTTKKRPRLFSILPRKSGFTISYVPISSMTLMKLLSMGDSPLESVRGDGRHENHSMLWRKYFNVQGLETKGSRFDNRILSDGKGVSVQMKHQVGKEGGGDNAGYPKDASIEDCQDASLRQGALRVGIDPGMTDIVTIASSDGRVESFSSARFSEAAGYNTSNCRTNKWNADTQDLVKSIPSPTTSSMHDMQDHVRGYLSALPTLLQHRANRGYRSMRFFRYVGKQKTIEKVCDLIAPKAQKKTIEEKVCDVIAPKAKKTVVGFGNWSNQGYGISRSCSGPVKEIRKCLSRRQNVLFKNVDERNTSCTCHGCFQKLVNMKADSVVWRRVKNEPSALIDGAPTTTTTTTTFEKQKTVVKNVKVHKVLHCRNSVKSASSNVRCGATWNRDVNAAKNLLLLLTTWMDGKERPAAFCVPSSSPTPKTTVSGEANVGAQPTDPPGSVSSLQLLSSGPA

SEQ ID NO: 1842 - protein, 306 aa, Microglena sp.
VESFSSARFSEAAGFNTSNRRTNKWNADTQDLVKSIPSPTTSSMHDMQDHVRGYLSALPTLLQHRANRGYRSMRFFRYVGKQKTIEKVCDLIAPKAQKKTIEEKVCDVIAPKAKKTVVGFGNWSNQGYGISRSCSGPVKEIRKCLSRRQNVLFKNVDERNTSCTCHGCFQKLVNMKADSVSWRRVQNEPSALIDGAPTTTTTFEKQKTVVKNVKVHKVLHCRNSVKSASSNVRCGATWNRDVNAAKNLLLLLTTWMDGKERPAAFCVPSSSPTPKTTVSGEANVGAQPTDPPGSVSSLQLLSSGPA

SEQ ID NO: 1843 - protein, 236 aa, Microglena sp.
GAHDCLGFRGRVAWNGRLPVEYGVRVGGGRSIQRFRCRQKVHGAFDARSELFVIKSLWHTDKHYGGVTLRPVNNVTLRPVNNEVQADVGERKTIVIAYGSSKFAPGGKAELSVPTTSAFNAFSDRFKGRVAVIDKFRTTKIWHKDSTTVLQSVQSKKEGRTVRGLLWCSSTMENSKLFVNSDLNAAINIHNCFTMYPTRPGILARPKKYCKLEVVVGRTIDYKLTGSLQNAVSSEV

SEQ ID NO: 1844 - protein, 487 aa, Microglena sp.
RETLLCTRSGILSQGGSTFTIRKHCCVSGSHDPASVPQDIVGDHRRKTKNEKHRTFSLLPYKSGFTLSHIPISKMAFFYMVNECHFDSCKADVASKNHQGIWERFANLKKVETVSRKFGYRIVTDGFAVSILMNKPTCLTCSMPADAFSTRAHEYVTTDEGGIVSFLDNVVVAAVDPGVTDIVTVTGINGGTRSYSSAKYYRKGLIFKSQRQTDVWNLETADIVGGIIPDRDSSSSEQIGAYARFYMGAAPILLAHRASRGYRNLRFRRYCKKQKLIVEIADFVAPRKKSAKVLVGFGDWKGLGATPISRRTCGPLQAIRFELRSRENVIMEDIDEFRTSQRCSCCENHLCNMVALTHRKKQDGTGWECTEGRKRIHKILHCKSSQSGAPRQQSGGMLHCGKTWNRDVNASRNILMLTLHQVFGRERPLAFRRDAPRSSSTTPPPPPDMGTQTVERFTKEGTRNVFENLFNLLHPPTLPKSNDLQSG

SEQ ID NO: 1845 - protein, 366 aa, Microglena sp.
QTAFAVSILMNKPTCLTCSMPADAFSTRAHEYVTTDEGGIISFLDNVVVAAVDPGVTDIVTVTGLNGGTRSYSSAQYNRKGLIFKSQRQTDVWNLETADIVGGIIPDRDSSSSEQIGAYARFYMGAAPILLAHRASRGYRNLRFRRYCKKQKLIVEIADFVAPREKSAKVLVGFGDWKGLGATPISRRTCGPLQAIRFELRSRENVIMEDIDEFRTSQRCSCCENHLCNMVALTHRKKQDGTGWECTEGRKRIHKILHCKSSQSGAPRQQSGGMLHCGKTWDRDVNASRNILMLTLHQVFGRERPLAFRRDAPRSSSTTPPPPPDTDMGTQTVERFTKEATRNIFENLFNLLHPPTLPKSNDLQSG

SEQ ID NO: 1846 - protein, 368 aa, Microglena sp.
RSLLEHAVQQDSTGLVSDLKKTCKKPRKEEGIKIAEKYDGSLKTILPDMGIVVLGVDPGRSNIATVTYLADDKNKTWKLTRGAFYHKSGIKKQTRQKELRFADMIPMWESRRENGAALSTSRTDKISAYLSNYAKFSDEWWRLALRRRESRDNLQRYIGKRKVKDSFWAGIKRCMMKELPDMKVCVSYGSAITKLKPTGPGEVAVPTGAMFASCKRIFKEDVSVTDEFKTTLMSWETGKEKERVYKIPSVCSADVKLRLGGERFGHTKSKTMPKVADCDHLGVRLYNKRKGAQEKHRRGGFATSLVDSQKSIERYPEVRGLRFSPETCIYSDRDRSSALTIARLHCMELMGLGRPLPFAHSSSVVVDE

SEQ ID NO: 1847 - protein, 470 aa, Microglena sp.
PCLCTTRYCRRPSKKNEKRKTKNEKHRTFSLLPYKSGFTLSHIPISKMAFFYMVNECHFNSCKADVASKNHQGIWERFANLKKVETVSRKFGYRIVTDGFAVSILMNKPTCLTCSMPADAFSTRAHEYVTTDEGGIVSFLDNVVVAAVDPGVTDIVTVTGLNGGTRSYSSAKYYRKGLIFKSQRQTDVWNLETADIVGGIIPDRDSSSSEQIGAYARFYMGTAPILLAHRASRGYRNLRFRRYCKKQKLIVEIADFVAPRKKSAKVLVGFGDWKGLGATPISRRTCGPLQAIRFELRSRENVIMEDIDEFRTSQRCSCCENHLCNMVALTHRKKQDGTGWECTEGRKRIHKILHCKSSQSGAPRQQSGGMLHCGKTWNRDVNASRNILMLTLHQVFGRERPLAFRRDAPRSSSTTPPPPPDTDMGTQTVERFTKEATRNIFENLFNLLHPQRCPKATICSLDDYKVSHFI

SEQ ID NO: 1848 - protein, 309 aa, Microglena sp.
RETLLCTRRGILSQGGFSLTIRKHFCVSGSHDPASVPQDIVGDHRRKTKNEKLRTLSLLPYKSGFTMSHIPISKMAFFYMVNECHFDSCKADVASKNHQGIWERFANLKKVDTVSRKFGYRIVTDGFAVSILMNKPTCLTCSMPADSFSTRAHEYVTTDEGGIVSFRDNVVVAAVDPGVTDIVTVTGLDGGTRSYSSAQYYRKGLIFKSQRQTDVWNLETADIVGDIIPDRDSSRSEQIGAYARFYMGAAPILLAHRASRGYRNLRFRRYCKNRKLIVEIADFVAPREKSAKVLVGFCVIGKVWGDANL

SEQ ID NO: 1849 - protein, 330 aa, Microglena sp.
PGPPYRYTLHIMNGCVDATVFRRLRVHGAAALACKNKTWTLTRGAFYHKSGIKKQTRQKELRFADMIPMWESLRENGAALSTSRTDKISAYLSNYAKFSDEWWRLALRRRESRDNLQRYIGERKVKDSFWAGIKRCMMKELPDMKVCVSYGSAITKLKPTGPGEVAVPTGAMFASCKRIFKEDVSVTDEFKTTLMSWEAGKEKESFYKIPSVCSADVKLRLGGERFGHTKSKTMPKVADCNHTGVRLYNKRKGAQEKHRRGGFATSIVDSQKSIERYPEVRGLRFSPETCIYSDRDRSSALTIARLHCMELMGLGRPLPFAHSSSVVVDE

SEQ ID NO: 1850 - protein, 299 aa, Microglena sp.
HQAVSAPFRRKKTELERGWAIEMDQKNVSKDGDKLFIFKDILGNMRYFGSKQLHKLMPEEKPTHDPKVHKSRFGEYFLVLSVAATDRREERKPVHPDKVATASIDPGVRKTMVTYSPDNEESFMLGQGQASDLVKLLLVHDKLQSRLDTEKTLRSKDRMKIKKHMIRIRKRIFYLKKEFRDQTTNFLAARYDVLLVPQLETAKMTISAERELTTKVARKMLTLSHSVLFNRLKEKCAEYGTVFLHVLEHYTSQTCPMCGFLNKCGETYTCKNCQFTCDRDIVGAAGIFLKAVRTENPCS

SEQ ID NO: 1851 - protein, 517 aa, Microglena sp.
PTSITTTESISPHGSRSSFTRRKTGSWPRRSKMSTALTRPYSTDTLLYDIHSWGVKEDLIAIHSLLPERTKMLLKIQHSILGRDEINRQWLKSVSNSAKMIRYNVFINRYLEATEDEGYAKLVNIAPIPTVKHAFITIDTDGLLGVLKDVGLIESLEKTLTNKEHWESVFDVENIRSTGKGAFTCTIDTDGVMACTHFFRAEKKKISIKDDGTAIKKQTKTLREFSESDPNVVVVANDPGRCNIAFLTWKKNKVEEKDNGGRKRKRHCEFGSKRLTRERYYVESGVFKSRGPTKKWLSNIQDCLDDLKGNSPKRTSLVSFDAYVTVMVNHWDSRWGEMSKSRWGAQRLRLYGGKKRVLARFFNEVQEDVGERKTIVVAYSSAKFAPGGKGELSVPTTSAFKAFSYRFKGRVAVIDEFRTTKIWHKDSTTVLQSVQSEKEGRTVRGLLWCSSTMENSKLFVNRDLNAAINIHNCFTMYPIRPGILARPKKYCKLEVVVGRKIDYKLTGSLQNAVSSEV

SEQ ID NO: 1852 - protein, 239 aa, Microglena sp.
CLRKTRPTIQRSTNPASANISSSCLSLPRTGGQSGSLSIQTRLQLHPSTQASAKQWSRTHQIMRNPSCLVRDLVKLLLVHDKLQSRLDTEKTLRSKDRMKIKKHMIRIRKRIFYLKKEFRDQTTNFLAARYDVLLVPQLETAKMTISAERELTTKVARQMLTLSHSVLFNRLKEKCAEYGTVFLHVLEHYTSQTCPMCGFLNKCGETYTCKNCQFTCNRDIVGAAGIFLKAVRTENPCS

SEQ ID NO: 1853 - protein, 297 aa, Microglena sp.
ISEAAGYNTSNRRTNKWNADTQDLVKSIPSPTTSSMHDMQDHVRCYLSALPTLLQHRANRGYRSMQFFRYVGKQKTIEKVCDLIAPKAQKKTIEEKVCDVIAPKAKKTVVGFGNWSNQGYGISRSCSGPVKEIRKCLSRRQNVLFKNVDERNTSCTCHGCFQKLVNMKADSVVWRRVQNEPSALIDGAPTTTTFEKQKTVVKNVKVHKVLHCRNSVKSASSNVRCGATWNRDVNAAKNLLLLLTTWMDGKERPAAFCVPSSSPTPKTTFSGEANVGAQPTDPPGSVSSLQLLSSGPA

SEQ ID NO: 1854 - protein, 390 aa, Microglena sp.
SMGDSPLESVSGDGRYENHTMLWRKYFNVQGLETKRSRFDNRILSDGKGVSVQMKQKGKEEVVEEGENAGYPKDANIVECKDAVGALRVGVDPGMTDIVTVASSAGRIESFSSARFSEVAGYNTSKRRTYIWNDETQDLVKSIPSPYTSNMSDLQDHVRAYLKALPILLQHRANKGYRSMRFFRYVGKQKTIEKVCDVIAPRAQTTVVGFGNWSNQGYGISRSCSGPIKEIRRCLSRRKNVLFKNVDERNTSCKCHGCFQRLVNMKADSVVWRGVCKESPMDGSITVEKQKMVVKNVKVHKVLHCRDSVKSASSNVRCGATWNRDVNAGKNLLLLLTTWMDGRERPEAFCVPSPPPKTTVSIEASVSVKPTDPPGFVSSLPCYPLGQLKC

SEQ ID NO: 1855 - protein, 643 aa, Microglena sp.
DISTKESQIRSIPCFATSQNRPGGRNAHYVLNIRMPCMATNASVKLARPPMPLVSPGPSSVDGRIMARSERSGLQATNVSLTQAASKATSSSRKKNPAVVKSFSTHVCPHTNNNPTCSDSNCSCKPIFLTNIPDASKSLKSRTSDQGSTSSAQDFYEYWDSSRQDLYRQLLWLPKTGSQGLVSSSLNGFARSTPARSSFSITKTEPLKTSLEKTSCPSFKYIVADGTVEDATKSNAKPKLRTLKLKLNPTKAQKSMLAEFAGCSRFMYNKAVAARLGVGSTHKSVFRIRDRYVTNKVRGEGKMPNPYFKNRQWLLQCPKSVRQSAIKAALANIKACFSNLKAGNIKQFSAPFRRKKTELERGWAIEMDQKNVSKDGDKLFIFKDILGNMRYFGSKQLHKLMPEEKPTHDPKVQKSRFGEYFLVLSVAARDRRAERKPVHPDKVATASIDPGVRKTMVTYSPENEESFMLGQGQASDLVKLLLVHDKLQSRLDTEKTLRSKERMKIKMQMIRIRKRIFYLKKEFRDQTTNFLAARYDVLLVPQLETAKMTISAERELTTKVARQMLTWSHSVLFNRLKEKCEEYGTVFLHVLEHYTSQTCPMCGFLNKCGETYTCKNCKFTCDRDIVGAAGIFLKAVRTENPCS

SEQ ID NO: 1856 - protein, 336 aa, Microglena sp.
SRRVKKRSLKKEKNAGYPKDANIVECKDAVGALRVGVDPGMTDIVTVASSAGRIESFSSARFSEVAGYNTSKRRTYKWNDETQDLVKSIPSPNMSNMVDLQDHVRAYLEALPILLQHRANKGYRSMRFFRYVGKQKTIEKVCDVIAPRAQTTVVGFGNWSNQGYGISRSCSGPIKEIRRCLSRRKNVLFKNVDERNTSCKCHGCFQRLVNMKADSVVWRGVCKESPIDGSITVEKQKMVVKNVKVHKVLHCRDSVKSASSNVRCGATWNRDVNAAKNLLLLLTTWMDGRERPEAFCVPSPPPKTAVSIEASVSAKPTDPPGFVSSLPCYPLGQLKC

SEQ ID NO: 1857 - protein, 327 aa, Microglena sp.
CPKSVRQSAIKAALANIKACFSNLKAGNIKQFSAPFRRKKTELERGWAIEMDQHNISKDGDKLFIFKDTLGNMRYFGRKQLQKLMPEKNPTHDPKVQKSRFGEYFLVLSVAARDRREERKPVHPGKVATASIDPGVRKTMVTYSPENEESFMLGKGQASNLVKLLLVHDKLHSRLDTEKTLRSKERMKIKMQMIRIRKIIFYLKKEFRDQTTNFLAARYDVLLVPQLETAKMTISAERELTTKVARQMLTLSHSVLFNRLKEKCEEYGTVFLHVLEHYTSQTCPMCGFLNKCGETYTCKNCQFTCDRDIVGAAGIFLKAVRTENPCS

SEQ ID NO: 1858 - protein, 655 aa, Microglena sp.
GSELTASFQMKSRISYESVKDVIGKVLGSDDPDYINSYPIYFDQVLNYAGHTLSTVVSNNAWVPLVPRLTRLTKATLNALGAPKTIRVYDVIRVIQQEIQEMESWPESVQEYVREVRVRLKVPDGSRLYDDYGKDMDFPTMVRFNYWMQTRLEAIGARRIRLMPIFNVQRAHVRLDMKTLVNLFRHVFPKDPNIVELSKWKNVKDPDRFMLPLKPAVKKKKSCGPGEWEAYKLAKQKYDADVNDIKATDEYRHAKGRYDTLVNARKTVAGSFFKKPPVKTGWVFDCSICTDGVSLSMQYSKTVQVRVSDLKKTSKRSRDDEGMSVSEQYDHKLKTTLPDMGIVVLGVDPGRSNIATVTYLADDKSKTWKLTRGAFYHKSGIKKQKKQQEKRFSDMIPRWESLRENGAALSTSRTDDISVYLKNYATFSDEWWRMALRRRESRDNFQRYIGKRKAMDSFWAGIKRNMKLDHPDLRVRVAYGSAITTLKATGPGEVAVPTGSMFASCKRLFKEEVHVTDEFKTTLMSWETGAKKECVYKIPSVQITTEGQIRLGYELLGHTPLKETPKVSYRDQLAVRVYCTRKQIQEKHRRGGLAPSLVDNKSIKRYPEVRGLRFSPETSTYSDRDRSSALTIARLHCMELLGQGRPLPFCRDACC

SEQ ID NO: 1859 - protein, 397 aa, Microglena sp.
TPEKTVAGSFFRKPPVKNGWVFDCSICTDEVSLSMQYSKTVQVLVSDLKNTCKKPRKEEGIKIAEKYDGSLKTILPDMGIVVLGVDPGRSNIATVTYLADDKNKTWTLTRGAFYHKSGIKKQTRQKELRFADMIPMWESLRENGAALSTSRTDKISAYLSNYAKFSDEWWRLALRRRESRDNLQRYIGKRKVKDSFWAGIKRCMMKELPDMKVCVAYGSAITKLKPTGPGEVAVPTGAMFASCKRIFKEDVSVTDEFKTTLMSWETGKEKERVYKIPSVCSADVKLRLGGERFGHTKSKTMPKVADCDHLGVRLYNKRKGAQEKHRRGGFATSLVDSQKSIERYPEVRGLRFSPETCIYSDRDRSSALTIARLHCMELMGLGRPLPFAHSSSVVVDE

SEQ ID NO: 1860 - protein, 451 aa, Microglena sp.
KRKQQKKRPRLFSILPRKSGFTISYVPISSMTLMKLLSMGDSPLESFRGDGRHENHSMLWRKYFNAQGLETKGSRFDNRILSDGKGVSVKMKHQASEDVAVEGGDNAGYPKDAILEDCQDASLRVGVDPGMTDIVTVASSDGRAESFSSARFSEAAGYNTSNRRTNKWNVDTQDLVKSIPSPTTSSMHDMQDHVRGYLSALPTLLQHRASRGYRSMRFFRYVGKQKTIEKVCDLIAPKAQKKTIEEKVCDVIAPKAQKTIVGFGNWSNQGYGISRSCSGPVKEIRKCLSRRQNVLFKNVDERNTSCTCHGCFQKLINMKADSVVWRRVQNEPPSLINGAPTTTTTTTIEKQKTVVKNVKVHKVLHCRNSVKSASSNVRCGATWNRDVNAAKNLLLLLTTLMDGKERPATFCVPSSSPTPKNTVSGEANVGAQPTDPPGSVSSLQLLSSGPA

SEQ ID NO: 1861 - protein, 424 aa, Microglena sp.
AFQVGTCKESRHLHVAPEAAQKKKKSCGPGEWEAYKSVLKQYDDDVKDIKATDEYRHAKGLYDTLVNAQKTVAGSFFRKPPVKNGWVFDCSVCTDGVSLSMQYSKTVQVLVSDLKKTCKNPRKEEGIKIAEKYDGSLKTILPDMGIVVLGVDPGRSNIATVTYLADDKKKTWTLTRGAFYHKSGIKKQTRQKELRFADMIPMWESLRENGAALSTSRTDKISAYLSNYAKFSEEWWRLALRRRESRDNLQRYIGKRKVKDSFWAGIKRCMMKELPDMKVCVAYGSAITKLKPTGPGEVAVPTGAMFASCKRIFKEDVSVTDEFKTTLMSWETGKEKERVYKIPSVCSADVKLRLGGERFGHTKSKTMPKVADCDHLGVRLYNKRKGAQEKHRRGGFSTSLVDSQKSIERYPEVRGLRFSPETCI

SEQ ID NO: 1862 - protein, 371 aa, Microglena sp.
GGRGRCQTRTSRIANGCFSAPKAYAKSAIKAALANIKACFSNLKAGNIKQFSAPFRRKKTELERGWAIEMDQKNVSKDGDKLFIFKDILGNMRYFGSKQLHKLMPEENPTHDPKVHKSRFGEYFLVLSVAARDRRAERKPVHPDKVATASIDPGVRKTMVTYSPENEESFMLGQGQASDLVKLLLVHDKLQSRLDTEKTLRSKERMKIKMQMIRIRKRIFYLKKEFRDQTTNFLAARYDVLLVPQLETAKMTISAERELTIKVARQMLTLSHSVLFNWLKEKCEEYGTVFLHVLEHYTSQTCPMCGFLNKCGETYTCKNCQFTCDRDIVGAAGIFLKAVRTEKSPGELTPMIPIWRIHCLSYYMSPGPPDV

SEQ ID NO: 1863 - protein, 289 aa, Microglena sp.
HLLQVASSLSARLVLAKLLGTIQASVAPTKWNDETQDLVKSIPSPNTSNMVDLQDHVRAYLKALPILLQHRANKGYRSMRFFRYVGKQKTIEKVCDVIAPRAQTTVVGFGNWSNQGYGISRSCSGPIKEIRRCLSRRKNVLFKNVDERNTSCKCHGCFQRLVNMKADSVVWRGVCKESPIDGSISVEKQKMVVKNVKVHKVLHCRDSVKSASSNVRCGATWNRDVNAAKNLLLLLTTWMDGRERPEAFCVPSPPPKTTVSIEASVSAKPTDPPGFVSSLPCYPLGQLKC

SEQ ID NO: 1864 - protein, 331 aa, Microglena sp.
GGRGRCQTRTSRIANGFASVPKSVRQSAIKAALANIKACFSNLKAGNIKQFSAPFRRKKTELERGWAIEMDQKNVSKDGDKLFIFKDILGNMRYFGSKQLHKLMPEENPTHDPKVHKSRFGEYFLVLSVAARDRRAERKPVHPDKVATASIDPGVRKTMVTYSPENEESFMLGQGQTSDLVKLLLVHDKLQSRLDTEKTLRSKERMKIKMQMIRIRKRIFYLKKEFRDQTTNFLAARYDVLLVPQLETAKMTISAERELTTKVARQMLTLSHSVLFNRLKEKCEEYGTVFLQVLEHYTSQTCPMCGFLNKCGETYTCHLRQRHCGGSWHLP

SEQ ID NO: 1865 - protein, 321 aa, Microglena sp.
TPTAYWASSRTWVSSRVSKKTLTNKEHWESVFDVEKHPFYWKGVFTCTIDTDGVMACTHFLRAEKKKISIKDDGTAIKKQTKTLREFSESDPNVVVVANDPGRCNIAFLTWKKNKVEEKDNGGRKRKRHCEFGSKRLTRERYYVESGVFKSRGPTKKWLSNIQDCLDDLKDNSPKRTSLESFDAYVTVMVNHWDSRWGEMSKSRWGAQRLRLYGGKKRVLARFFNEVQADVGERKTIVIAYGSSKFAHGGKGELSVPTTSAFNAFRDRFKGELPSLTNSVPQRSGTRTAPPSSRVCSPKKKGARFEACYGAVPPWRTASCL

SEQ ID NO: 1866 - protein, 510 aa, Microglena sp.
TSLSEETFQEDCQSGGPVPRIENRHNHPRGPRACDPHQRGCQSLEGSLSAARGKQFNTRAHLTMRLFHHVLTELGEVGRVDPKDRKTKKSHPRLFSILPRKNGFTISYVPISSMTFMKLLSMGDSPLESVSGDGRYENHTMLWRKYFNVQGLETKRSRFDNRILSDGKEVSVQMKQKGKEEVVEEGENAGYPKDANIVECKDAVGALRVGVDPGMTDIVTVASSAGRIESFSSARFSEVAGYNTSKRRTYKWNDETQDLVKSIPSPNTSNMVDLQDHVRAYLTALPILLQHRANKGYRSMRFFRYVGKQKTIEKVCDVIAPRAQTTVVGFGNWSNQGYGISRSCSGPIKEIRRCLSLRKNVLFKNVDERNTSCKCHGCFQRLVNMKADIVVWRGVCKESPIDGSITVGKQKMVVKNVKVHKVLHCRDSVKSASSNVRCGATWNRDVNAAKNLLLLLTTWMDGRERPEAFCVPSPPPKTTVSIEASVSAKPTDPPGFVTSLPCYPLGQLKC

SEQ ID NO: 1867 - protein, 789 aa, Microglena sp.
ECSREPVCRSRLHQNVFGVQFVMEHGVVLVHEADQHDDVAELVDYEGDKDEECAPARAICVVKMKLSTFIPHDWLRKKIDTLVLDMNKLLGEGYIFANFHIARLFENGIAVPPVNCNFFYRCLLAVSTNKCKGSTLGEDFESSCLLFDLLREPGQSKVDIRGNVKNQIIADLSILMATMASNHLWTNLERRITTYLKWKYPQIAKRLRSDIVAAVIKCPTKNLDVIFKMSPHVAKLPTKLPIARLRSAKSAVALAKKRVGRKEPEVSPLRVRLTKHQARFEKLSEAWLSSKNLRVDEDNAKRFFARDVAFCLRGVLPLPSGNTFASRAHMTLPLYHKILSETIEEKRKTKNEKLCTFSLLPYKSGFTLSHIPISKMAFFYMVNECHFDSCKADVASKNHQGIWERFANLKKVETVSRKFGYRIVTDGFAVSILMNKPTCLTCSMPADSFSTRAHEYVTTDEGGIVSFRNNVVVAAVDPGVTDIVTVTGLDGGTRSYSSAQYYRKGLIFKSQRQTDVWNLETADIVGGIIPDRDSSRTEQIGAYARFYMGAAPILLAHRASRGYRNLRFRRYCKKQKLIVEIADFVAPREKSAKVLVGFGDWKGLGATPISRWTCGPLQAIRFELRSRGNVIMEDVNEFRTSQRCSCCENRLCNMVALTHRKKQDGNGWECTEGRKRIHKILHCKSSQSGAPRQQSGGRLHCGKTWDRDVNASRNILMLTLHQVFGRERPLAFCRDAPRSSSKTPPPPDTDMGTQTVERFTKEATRNIFENLFNLLHPPTLPKSNDLQSG

SEQ ID NO: 1868 - protein, 788 aa, Microglena sp.
CTKLCKMATKPPTVAKLKELLKLAEVAYSSKDKKDDIVRFCEDNGLIARPPPEYKTVEKMCVVKCALKKAMSLDDEEFGKFRGHVDQLVNVVSRMLRRSSLVLTFHVTRLMEGDLPIPNMYDMKDTYWKDWLRIGVDGVFPDEESRISYEAVKDVIGKVLGSDDPDYINSYPIYFNQVLNYAGHTLSTVVSNNAWVPLVPRLTRLTKGTLKALGAPKTIRVYDVMRFIQQEIQEMESWPESVQEYVREVRVRLKVPDGSRLYDDYGKDMDFPTMVRFNYWMQTRFEAIGARRIRLMPIFNVQRAHVRLDMKTLVNLFRHVFPKDPNIVELSKWENVKDPDRFMLPLKPAFKKKKSCGPGEWEAYKLAQQKYDADVKDIKATDEYRHAKGRYDTLVNARKTVAGSFFKKPPVKTGWVFDCSICTDGVSLSMQYSKTVQVRVSDLKKTSKRSRDEEGMSVSEQYDHKLKTTLPDMGIVVLGVDPGRSNIATVTYLADDKSKTWKLTRAAFYHKSGIKKQKKQQEKRFSDMIPRWESLRENGAALSTSRKDDISAYLKNYATFSDEWWRMALRRRESRDNFQRYIGKRKAMDLFWAGIKRNMKLDHPDLRVRVAYGSAITKLKATGPGEVAVPTGSMFASCKRLFKEEVHVTDEFKTTLMSWETGAKKECVYKIPSVQITTEGQIRLGYELLGHTPLKETPKVSYRDQLAVRVYCTRKKIQENHRRGGLAPSLVDNKSIKRYPEVQGLRFSPETSTYSDRDRSSALTIARLHCVGLLGQGRPLPFCRDACC

SEQ ID NO: 1869 - protein, 459 aa, Microglena sp.
PFLCTTRYCRRPSKKNEKRKTKSFAHSRCCLTNLDSLCRTFRFPKMAFFYMVNECHFDSCKADVASKNHQGIWERFANLKKVETVSRKFGYRIVTDGFAVSILMNKPTCLTCSMPADSFSTRAHEYVTTDEGGIVSFRDNVVVAAVDPGVTDIVTVTGLDGGTRSYSSAQYYRKGLIFKSQRQTDVWNLETADIVGDIIPDRDSSRSEQIGAYARFYMGAAPILLAHRASRGYRNLRFHRYCKKQKLIVEIADFVAPREKSAKVLVGFGDWKGLGATPISRRTCGPLQAIRFELRSRGNVIMEDVDEFRTSQRCSCCENRLCNMVALTHRKKQDGTGWECTEGRKRIHKILHCKSSQSGAPRQQSGGRLHCGKTWDRDVNASRNILMLTLHQVFGRERPLAFRRDAPRSSSRTPPPPDTDMGTQTVERFTKEATRNIFENLFNLLHPPTLPKSNDLQSG

SEQ ID NO: 1870 - protein, 257 aa, Microglena sp.
RVSVQMKQKGKEEVVEEGENAGYPKNANIVECKDAVGALRCRSRPWNDNIVTVASSACRIESFSSARFSEVAGYNTSKRRTYKWNDETQDLVKSIPSPNTSNMSDLQDHVRAYLKALPILLQHRANKGYRSMRFFRYVGKQKTIEKVCDVIAPRAQTTVVGFGNWSNQGYGISRSCSGPIKEIRRCLSRRKNVLFKNVDGRNTSCKCHGCFQRLVNMKADSVVWRGVCKESPIDGSITVEKQKMVGEERQGPQSTAL

SEQ ID NO: 1871 - protein, 562 aa, Microglena sp.
PKQHPRLPHRAGKKNPAVVKSFSTHVCPHTNNNPTCSDSNCSCKPIFLTNIPDASKSLKSRTSDQGSTSSAQDFYEYWDSSRQDWYRQLLWLPKTGSQGLVSSSLNGFARSTPARSSFSITKTEPLKTSLDKTSCPSFKYIVADGTVEDATKSNAKTKLRTLKLKLNPTKAQKSMLAEFAGCSRFMYNKAVAARLGVGSTHKSVFRIRDRYVTNKVRGKGKMPNPYFKNRQWLLQCPKSVRQSAIKAALANIKACFSNLKAGNIKQFSAPFRRKKTELERGWAIEMDQKNVSKDGDKLFIFKDILGNMRYFGSKQLHKLMPEENPTHDPKVQKSRFGEYFLVLSVAARDRRAERKPVHPDKVATASIDPGVRKTMVTYSPENEESFMLGQGQASDLVKLLLVHDKLQSRLDTEKTLRSKERMKIKKQMIRIRMRFFYLKKEFSDQTTNFLAARYDVLLVPQLETAKMTISAEQELTTKVARQMLTLSHSVLFNRLKEKCAEYGTVFLHVLEHYTSQTCPMCGFLNKCGETYTCKNCQFTCDRDIVGAAGIFLKAVRTENPCS

SEQ ID NO: 1872 - protein, 595 aa, Microglena sp.
HTPQRTRRTILSVYAKTMVSSPDPPEYKTVEKMCVVKCALKKAMSLDDEEFGKFRGHVDQLVNVVSRMLRRSSLVLTFHVTRLMEGDLPIPNMYDMKDTYWKDWLRIGVDGVFPDEESRISYEAVKDVIGKVLDSDDPDYINSYPIYFDQVLNYAGHTLSTVVSNNAWVPLVPRLTRLTKATLKALGAPKTIRVYDVMRVIQQEIQEMESWPESVQEYVREVRVRLKVPDGSRLYDDYGKDMDFPTMVRFNYWMQTRLEAIGERRIRLMPIFNVQRAHVRLDMKTLVNLFRHVFPKDPNIVELSKWENVKDPDRFMLPLKPAVKKKKSCGPGEWEAYKLAQQKYDADVKDIKATDEYRHAKGRYDTLVNARKTVAGSFFKKPPVKTGWVFDCSICTDGVSLSMQYSKTVQVRVSDLKKTSKRSRDEEGMSVSEQYDHKLKTTLPDMGIVVLGVDPGRSNIATVTYLADDKSKTWKLTRGAFYHKSGIKKQKKQQEKRFSDMIPRWESLRENGAALSTSRKDDISAYLKNYATFSDEWWRMALRRRESRDNFQRYIGKRKAMDSFWAGIKRNMKLDHPDLRVRIAYGSAIKTMKAT

SEQ ID NO: 1873 - protein, 555 aa, Microglena sp.
PSCQPSCQQLDFVRQRVQWLLRRRGSVGRNQRSPLRVRLTKLQARFEKLSEAWLSSKNLRVDEDNAKRFFARDVAFCLRGVLPLPSGNTFASRAHMTLPLYHKILSETIEEKRKTKNEKLRTFSLLPYKSGFTMSHIPISKMAFFYMVNECHFDSCKADVASKNHQGIWERFANLKKVDTVSRKFGYRIVTDGFAVSILMNKPTCLTCSMPSDSFSTQAHEYVTTDEGGIVSFRDNVVVAAVDPGVTDIVTVTGLDGGTRSYSSAQYYRKGLIFKSQRQTDVWNLETADIVGDIIPDRDSSRSEQIGAYARFYMGAAPILLAHRASRGYRNLRFRRYCKKQKLIVEIADFVAPREKSAKVLVGFGDWKGLGATPISRRTCGPLQAIRFELRSRGNVIMEDVDEFRTSQRCSCCENRLCNMVALTHRKKQDGTGWECTEGRKRIHKILHCKSSQSGAPRQHSGGRLHCGKTWDRDVNASRNILMLTLHQVFGRERPLAFRRDAPRSSSKTPPPPDTDMGTQTVERFTKEATRNIFENLFNLLHPPTLPKSNDLQSG

SEQ ID NO: 1874 - protein, 319 aa, Microglena sp.
IKDANIVECKDSVGALRVGVDPGMTDIVTVASSAGRIESFSSARFSEVAGYNTSKRRTYKWNDETQDLVKSIPSPNTSNMSDLQDHVRAYLKALPILLQHRANKGYRSMRFFRYVGKQKTIEKVCDVIAPRAQTTVVGFGNWSNQGYGISRSCSGPIKEIRRCLSRRKNVLFKNVDERNTSCKCHGCFQRLVNMKADSVVWRGVCKESPIDGSITVEKQKMVVKNVKVHKVLHCRDSVKSASSNVRCGATWNRDVNAAKNLLLLLTTWMDGRERPEAFCVPSPPPKTTVSIEASVSAKPTDPPGFFSSFPCYPLGQLKC

SEQ ID NO: 1875 - protein, 331 aa, Microglena sp.
TPEKKVAGSFFKKPPVKTGWVFDCSICTDGVSLSMQYSKTVQVRVSDLKKASKRSRDDEGMSVSEQYDHKLKTTLPDMGIVVLGVDPGRSNIATVTYLADDKSKTWKLTRGAFYHKSGIKKQKKQQEKCFSDMIPRWESLRENGAALSTSRTDDISAYLKNYATFSDEWWRMALLRRESRDNFQRYIGKRKAMDSFWAGIKRNMKLDHPDLRVRVAYGSAITTLKATGPGEVAVPTGSMFASCKRLFKEEVHVTDEFKTTLMSWETGAKKECVYKNSKCPNNHGRADSSRLRVVESHPIEGDSKCLLSRPVGGEGVAAHVNKSKKNTGGVA

SEQ ID NO: 1876 - protein, 349 aa, Microglena sp.
RRPVRSLVKKKVSRSQKNTTAHLKRYCPIWVSSSWVWTQDGATSLTVTYLADDKNKTWTLTRGAFYHKSGIKKQTRQKELRFADMIPMWESLRENGAALSTSRTDKISAYLSNYAKFSDEWWRLALRRRESRDNLQRYIGKRKVKDSFWAGIKRCMMKELPDMKVCVAYGSAITKLKPTGPEEVAVPTGAMFASCKRIFKEDVSVTDEFKTTLMSWETGKEKERVYKIPSVCSADVKLRLGGERFGHTKSKTMPKVADCDHLGVRLYNKRKGAQEKHRRGGFATSLVDSQKSIERYPEVRGLRFSPETCIYSDRDRSSALTIARLHCMELMGLGRPLPFAHSSSVVVDE

SEQ ID NO: 1877 - protein, 793 aa, Microglena sp.
KMATKPPTVAKLKELLKLAEVPYSSKSNKDDLVRLCEDNGLIARPPPEYKTVEKMCVVKCALKKAMSLDDEEFGKFREHVDQLVNVVSRMLRRSSLVLTFHITSLLEKGLDIPDLYNMKDTYWKDWLRIGVDGIFPDEESKISYEAVKDSIGDVIGNDDADYIKSYPIYFDQVLNYAGHTLSTVVSNNAWVPLIPRLARLTSTTLNRLNAPKTLDTSKIIREYDVMQAIQQEVQNMEGWPESVQEYVNEVREMLSVPDGSRVYDNYGKDMDFPTMVRFNYWIQTRLEDMDARRIRLMPIFNVQRVHVRLDLKTLVNLFRHMFPNDQNIVELSKWEHVKNPESFMLPQRPAVKKKKSCGPGEWEAYKSVLKQYDDDVKDIKATDEYRHAKGLYDTLVNARKTVAGSFFRKPPVKNGWVFDCSICTDGVSLSMQYSKTVQVLVSDLKKTCKKPRKEEGIKIAEKYDGSLKTILPDMGIVVLGVDPGRSNIATVTYLADDKNKTWKLTRGAFYHKSGIKKQTRQKELRFADMIPMWESLRENGAALSTSRTDNISAYLSNYAKFSDEWWRLALRRRESRDNLQRYIGKRKVKDSFWAGIKRCMMKELPDMKVCVAYGSAITKLKPTGPGEVAVPTGAMFASCKRIFKEDVSVTDEFKTTLMSWETGKEKERVYKIPSVCSADVKLRLGGERFGHTKSKSMPKVADCDHLGVRLYNKRKGAQEKHRRGGFATSLVDSQKSIERYPEVRGLRFSPETCIYSDRDRSSALTIARLHCMELMGLGRPLPFAHSSSVVVDE

SEQ ID NO: 1878 - protein, 631 aa, Microglena sp.
SEKVLGSDDPDYINSYPIYFDQVLNYAGHTLSTVVSNNAWVPLVPRLTRLTKATLNALKAPKTIRVYDVMRVIQQEIQEMESWPESVQEYVREVRVRLKVPDGSRLYDDYGKDMDFPTMVRFNYWMQTRLESIGAHRIRLMPIFNVQRAHVRLDMKTLVNLFRHVFPKDPNIVELSKWKDVKDPDRFMLPLKPAVKKKKSCGPGEWEAYKLAQQKYDADVNDIKDTDEYRHAKGRYDTLVNARKTVAGSFFKKPPVKTGWVFDCSICTDGVSLSMQYSKTVQVRVSDLKKTSKRSRDNEGMSVSEQYDHKLKTTLPDMGIVVLGVDPGRSNIATVTYLADDKSKTWKLTRGAFYHKSGIKKQKKQQEKRFSDMIPRWESLRENGAALSTSRTDDISAYLKNYDTFSDEWWRMALLRRESRDNFQRYIGKRKAMDSFWAGIKRNMKLDHPDLRVRVAYGSAITTLKATGPGEVAVPTGSMFASCKRLFKEEVHVTDEFKTTLMSWETGAKKECVYKIPSVQITTEGQIRLGYELLGHTPLKETPNVSYRDQLAVRVYCTRKQIQEKHRRGGLAPSLVDNNSIKRYPEVRGLRFSPETSTYSDRDRSSALTIARLHCMELLGQGRPLPFCRDA

SEQ ID NO: 1879 - protein, 479 aa, Microglena sp.
NKKSVRKQERPIYAGHTLSTVVSNNAWVPLVPRLTRLTKATLKALKAPTTIRVYDVMRVIRQEVQEMESWPDSVQKYVREVRVRLKVPDGDRLYDDYGKCVDFQTMVRFNYWMQTRLETMEERRIRLMPIFSVHRVHVRLDLKTLVNMFRHYFPKDPNIAELSKWKHVKNPDNFMLPQRPAQKKKKSCGPGEWEVYKSALKKYDDDVKDIKATEEYRHANGLYDTLVNARKTVACSFFKNPPVKNGWVFDCSICTDGVSSSMQYSKKVQIRVSDLKKTSMRSRDNEGLSVAKQYDRKLEPTLTEMGIVVLGVDPGRSNIETVTYLAKGKSKTWQLTRGAFYHKSGIKKQKKQQEKRFSDMILRWESLRENGAALGTSRKDDISAYLKNYATFSDEWWRMALRRRESRDNFQRYIGKRKAMDSFWAGIKRNMKLDHPDLRVRIAYGSAIKTMKATGPGEVAVPTDLCSLPASASSKRRFM

SEQ ID NO: 1880 - protein, 336 aa, Microglena sp.
SRRVKKRSLKKEKTQAIPKTQNIVECKDAVGALRVGVDPGMTDIVTVASSAGRIESFSSARFSEVAGYNTSKRRTYKWNDETQDLVKSIPSPNTSNMVDLQDHVRAYLKALPILLQHRANKGYRSMRFFRYVGKQKTIEKVCDVIAPRAQTTVVGFGNWSNQGYGISRSCSGPIKEIRRCLSRRKNVLFKNVDKRNTSCKCHGCFQRLVNMKADSVVWRGVCKESPIDGSITVEKQKMVVKNVKVHKVLHCRDSVKSASSNVRCGATWNRDVNAAKNLLLLLTTWMDGRERPEAFCVPSPPPKTTVSIEASVSAKPTDPPGFVSSLPCYPLGQLKC

SEQ ID NO: 1881 - protein, 300 aa, Microglena sp.
KKQKKSHPRLFSILPRKNGFTISYVPISSMTFMKLLSMGDSPLESVSGDGRYENHTMLWRKYFNVQGLETKRSRFDNRILSDGKGVSVQMKQKGQEEVVEEGENAGYPKDTNIVECKDAVGAMRVGVDHGMTDIVTVASIAGRIESFSSARFSEVAGYNTSKRRTYKWNDETQDLVKSIPSPNTSNMVDLQDHVRAYLKALPILLQHRANKGYRFMRFFRYVGKQKTIEKVCDVIAPRAQTTVVGFGNWSNQGYGISRSCSGPSKRSGGASHVVRMFCSKTSTNATLLVNVTAASRGLST

SEQ ID NO: 1882 - protein, 595 aa, Microglena sp.
AYLFAHFHITRCLDDGDFDVKQLPHLDRNFYYRCLLAVSTSNVRKDTLGQSFNDTMVAFDALRPAGYVKVDVRPWGQVIADVSIQMATMACNSVWANVDRVVIKYLRLKHPSLKKHFKKIVKAVVQYPESKIDTIIPEGLVHAIHIKEVVSHLRTLFPLPRGKQFNTRAHLTMRLFHHVLTELGEVGRVDPKDKKTKKSHPRLFSILPRKNGFTISYVPILSMTFMKLLSMGDSPLKSVSGDGRYENHTMLWRKYFNVQGLETKRSCFDNRILSDGKGVSVQMKQNGKEEVVEEGENAGYPKDANIVECKDAVGALRVGVDPGMTDIITIASSACRIESFSSARFSEVAGYNTSKRRTYKWNDETQDLVKSIPSPNTSNMVDLQDHVRAYLKALPILLQHRANKGYRSMRFFRYVGKQKTIEKVCDVIAPRAQTTVVGFGNWSNQGYGISRSCSGPIKEIRRCLSRRKNVLFKNDDERNTSCKCHGCFQRLVNMKADSVVWRGVCKESPIDGSITVEKQKMVVKNVKVHKVLHCRDSVKSASSNVRCGATWNRDVNAAKNLLLLLTTWMDGRESDLRHSVFPRLPPKPQFPSRRV

SEQ ID NO: 1883 - protein, 655 aa, Microglena sp.
CMRNLHVLNIRMPCMATNASVKLARPPMPLVSPGPSSVDWRIMARSERSGLQATNVSLTQAASKATSSSWKKNPAVVKSFSTHVCPHTNNDPTCSDSNCSCKPIFLTNIPDASKSRTSDQGSTSSAQDFYEYWDSSRQDLYRQLLWLPKTGSQGLVSSSLNGFARSTPVRSSFLITKTEPLKTSLEKTSCPSFKYIVADGTVKDATKSNAKPKLRTLKLKLNPTKAQKSMLAEFAGCSRFMYNKAVAARLGVGSTHKSVFRIRDRYVTNKVKGEGKMPNRYFKNRQWLLQCTKSVRQSAIKAALANIKACFSNLKAGNIKQFSAPFRRKKTELERGWAIEMDQHNISKDGDKLFIFKDTLGNMRYFGSKQLQKLMPEKNPTHDPKVQKSRFGEYFLVLSVAARDRREERKPVHPGKVATASIDPGVRKTMVTYSPENEESFMLGKGQASDLVKLLLVHDKLHSRLDTEKTLRSKERMKIKKQMIRIRKRFFYLKKEFRDQTTNFLAARYDVLLVPQLETAKMTISAERELTTKVARQMLTLSHSVLFNRLNEKCEEYGTVFLHVLEHYTSQTCPMCGFLKQVWEERHTPARTVNSPATEILWGSWHLPEDSSNRKSLFVKDSSPGGVDPYDTPMENSLSFLLHVPRTPGCVIRNS

SEQ ID NO: 1884 - protein, 399 aa, Microglena sp.
NCFYCHLKDPNIVELSKWKNVKDPDRFMLPLKPAFKKKKSCGPGEWEAYKLAQQKYDADVKDIEATDEYRHAKGRYGTLVNARKTVAGSFFKKPPVKTGWVFDCSICTDGVSLSMQYSKTVQVRVSDLKKTSKRSRDDEGMSVSEQYDHKLKTTLPDMGIVVLGVDPGRSNIATVTYLADDKSKTWKLTRGAFYHKSGIKKQKKQQEKRFSDMIPRWESLRENGAALSTSRKDDISAYLKNYATFSDEWWRMALRRRESRDNFQRYIGKRKAMDSFWAGIKRNMKLDHSDLRVRVAYGSAITNLKATGPGEVAVPTGSMFASCKRLFKEEVHVTDEFQDDSHVLGNRCQEGMCSQNSKCPNNHGRADSSRLRVVGSHPIEGDSKGLLSRPVGGEGVLHT

SEQ ID NO: 1885 - protein, 622 aa, Microglena sp.
QCIRNLHVLNIRMPCMATNASVKLARPPMPLVSPGPSSVDGRIMARSERSGLQATNVSLTQAASKATSSSRKKKPAVVKSFSTHVCPHTNNNPTCSDSNCSCKPIFLTNIPDASKSLKSRTSDQGSTSSAQDFYEYWDSSRQYLYRQLLWLPKTGSQGLVSSSLNGFARSTPARSSFSITKTEPLKTSLEKTSCPSLKYIVADGTVEDATKSNAKPKLRTLKLKQNPTKAQKSMLAGFAGCSRFMYNKAVAARLGVGSTHKSVFRIRDRYVTNKVRGEGKMPNPYFKNRQWLLQCPKSVRQSAIKAALANIKACFSNLKAGNIKQFSAPFRRKKTELERGWAIEMDQKNVSKDGDKLFIFKDILGNMRYFGSKQLHKLMPEENPTHDPKVQKSRFGEYFLVLSVAARDRRADRKPVHPDKVATASIDPGVRKTMVTYSPENEESFMLGQGHASDLVKLLLVHDKLQSRLDTEKTLRSKKRMKIKMQMIRIRKRIFYLKKEYRDQTTNFLAARYDVLLVPQLETAKMTISAERELTTKVARQMLTLSHSVLFNRLKEKCEEYGTVFLHVLEHYTSQTCPMCGFLNKCGGETYTCKNCQFTCDRDIVGAAGIFLKAVRTENPCS

SEQ ID NO: 1886 - protein, 268 aa, Microglena sp.
QTIELAPSSISLNNRILKILPRTFKDDCILKISNKNTKKHKNLTIENNVDVVRYKGEYFSHILDVVVNNVKNESKDYTMCGIDPGVRSFATVYSCSILDNGKVFSYNTGDYTHRIDLLKKLNKKKSDMMTRRVVRKKQYNKIEKKKKDVVDCLHWETINHVLNHNDIVFYGDIKSQDITKVNKNKTLNQDFNDLKFYIFKNRLEYKASVLQKKVVIMNECYTTKTCSSCGTLNDDVGNKKVFTCPICNLVTGRDANASKNILMKGLLS

SEQ ID NO: 1887 - protein, 801 aa, Microglena sp.
PRMEHVCDVCIKSSVMYKLCKMATKPPTVAKLKELLKLAEVAYSSKDKKDDIVRLCEDNGLIAKPPPEYKTVEKMCVVKCALKKAMSLDDEEFGKFREYVDQLVNVVSRMLRRSSLVLTFHVTRLMEGDLPIPNMYDMKDTYWKDWLRIGVDGVFPDEESRISYEAVKDVIGKVLGSDDPDYINSYPIYFDQVLNYAGHTLSTVVSNNAWVPLVPRLTRLTKATLNALKAPKTIRVYDVMRVIQQEIQEMESWPESVQEYVREVRVRLKVPDGSRLYDDYGKEMDFPTMVRFNYWMQTRLEAIGARRIRLMPIFNVQRAHVRLDMKTLVNLFRHVFPKDPNIVELSKWKDVKDPDRFMLPLKPAFKKKKSCGPGEWEACKLAQQKYDADVNDIKDTDEYRHAKGRYDTLVNARKTVAGSFFKKPPVKTGWVFDCSICTDGVSLSMQYSKTVQVRVSDLKKTSKRSRDDEGMSVSEQYDHKLKTTLPDMGIVVLGVDPGRSNIATVTYLADDKSKTWKLTRGAFYHKSGIKKKKKQQEKRFSDMIPRWESLRENGAALSTSRTDDISAYLKNYDTFSDEWWRMALLRRESRDNFQRYIGKRKAMDSFWAGIKRNMKLDHPDLRVRVAYGSAITTLKATGPGEVAVPTGSMFASCKRLFKEEVHVTDEFKTTLMSWETGAKKECVYKIPSVQITTEGQIRLGYELLGHTPLKETPNVSYRDQLAVRVYCTRKQIQEKHRRGGLAPSLVDNNSIKRYPEVRGLRFSPETSTYSDRDRSSALTIARLHCMELLGQGRPLPFCRDA

SEQ ID NO: 1888 - protein, 786 aa, Microglena sp.
CIKLCKMATKPPTVAKLKELLKLAEVAYSSKDKKDDIVRLCEDNGLIARPPPEYKTVEKMCVVKCALKKAMSLDDEEFGKFREHVDQLVNVVSRMLRRSSLVLTFHVTRLMEGDLPIPNMYDMKDTYWKDWLRIGVDGVFPDEESRISYEAVKDVIGKVLGSDDPDYINSYPIYFDQVLNYAGHTLSTVVSNNAWVPLVPRLTRLTKATLNALKAPKTIRVYDVMRVIQQEIQEMESWPESVQEYVREVRVRLKVPDGSRLYDDYGKEMDFPTMVRFNYWMQTRLESIGARRIRLMPIFNVQRAHVRLDMKTLVNLFRHVFPKDPNIVELSKWKDVKDPDRFMLPLKPAFKKKKSCGPGEWEAYKLAQQKYDADVNDIKDTDEYRHAKGRYDTLVNARKTVAGSFFKKPPVKTGWVFDCSICTDGVSLSMQYSKTVQVRVSDLKKTSKRSRDNEGMSVSEQYDHKLKTTLPDMGIVVLGVDPGRSNIATVTYLADDKSKTWKLTRGAFYHKSGIKKQKKQQEKRFSDMIPRWESLRENGAALSTSRTDDISAYLKNYDTFSDEWWRMALLRRESRDNFQRYIGKRKAMDSFWAGIKRNMKLDHPDLRVRVAYGSAITTLKATGPGEVAVPTGSMFASCKRLFKEEVHVTDEFKTTLMSWETGAKKECVYKIPSVQITTEGQIRLGYELLGHTPLKETPNVSYRDQLAVRVYCTRKQIQEKHRRGGLAPSLVDNNSIKRYPEVRGLRFSPETSTYSDRDRSSALTIARLHCMELLGQGRPLPFCRDA

SEQ ID NO: 1889 - protein, 679 aa, Microglena sp.
PRMEHVCDVCIKISVMYKLCKMATKPPTVAKLKELLKLAEVAYSSKDKKDDIVRLCEDNGLIARPPPDYKTVEKMCVVKCALKKAMSLDDEEFGKFRGHVDQLVNVVSRMLRRSSLVLTFHVTRLMEGDLPIPNMYDMKDTYWKDWLRIGVDGVFPDEESRISYESVKDVIGKVLGSDDPDYINSYPIYFDQVFNYAGHTLSTVVSNNAWVPLVPRLTRLTKATLNALGAPKTIRVYDVMRVIQQEIQEMESWPESVQEYVREIRVRLKVPDGSRLYDDYGKDMDFPTMVRFNYWMQTRLEAIGARRIRLMPIFNVQRAHVRLDMKTLVKLFRHVFPKDPNIVELSKWENVKDPDRFMLPLKPSVKKKKSCGPGEWEAYKLAQQKYDADVKDIKATDEYRHSKGRYDTLVNAQKTVAGSFFKKPPVKTGWVFDCSICTDGVSLSMQYGKTVRFRVSDLKKSSKRSRDEEGKSVSEQYDHKLKTTLPDMGIVVLGVDPGRSNIATVTYLADDKSKTWKLTRRAFYHKSGIKKQKKQQEKRFSDMIPRWESLRENGAALSTSRKDDISAYLKNYATFSDEWWRMALRRRESRDNFQRYIGKRKAMDSFWAGIKRNMKLDHPDLRVRVAYGSAITKLKATGPREVAVPTGSMFASCKRLFKEEVHVTDEFKTTLMSWETGAK

SEQ ID NO: 1890 - protein, 586 aa, Microglena sp.
IKCPEDAGHIEDHSGYDVMQAIQQEVQNMEGWPESVQEYVNEVRERLSVPDGSRVYDNYGKDMDFPTMVRFNYWIQTRLEDMDARRIRLMPIFNVQRVHVRLDLKTLVNLFRHMFPNDQNIVELSKWEHVKNPESFMLPQRPAQKKKKSCGPGEWEAYKSVLKQYDDDVKDIKATDEYRHAKGLYDTLVNARKTVAGSFFRKPPVKNGWVFDCSICTDGVSLSMQYSKTVQVLVSDLKKTCKKPRKEEGIKIAEKYDGSLKTILPDMGIVVLGVDPGRSNIATVTYLADDKNKTWKLTRGAFYHKSGIKKQTRQKELRFADMIPMWESLRENGAALSTSRTDKISAYLSNYAKFSDEWWRLALRRRESRDNLQRYIGKRKVKDSFWAGIKRCMMKELPDMKVCVAYGSAITKLKPTGPGEVAVPTGAMFASCKRIFKEDVSVTDEFKTTLMSWETGKEKERVYKIPSVCSADVNLRLGGERFGHTKSKTMPKVADCDHLGVRLYNKRKGAQEKHRRGGFATSLVDSQKSIERYPEVRGLRFSPETCIYSDRDRSSALTIARLHCMELMGLGRPLPFSHSSSVVVDE

SEQ ID NO: 1891 - protein, 507 aa, Microglena sp.
VGYRQNHPSESRACEPHQRRCQTPERSLAAAKGKQFNTRAHLTMRLFHHVLTELGADLKEKTTKKRPRLFSILPRKSGFTISYVPISSMTLMKLLSMGDLPLESFRGDGRHENHSMLWRKYFNVQGLETKGSRFDNRILSDGKGVSVQMKHQASEDVAVEGGDNAGYPKDASIEDCQDASLRVGVDPGMTDIVTVASSAGRVESFSSACFSEAAGYNTSNRRTNKWNVDTQDLVKSIPSPTTSSMHDMQDHVRGYLSALPTLLQHRASRGYRSMRFFRYVGKQKTIEKVCDLIAPKAQKKTIEEKVCDVIAPKAQKTIVGFGNWSNRGYGISRSCSGPVKEIRKCLSRRQNVLFKNVDERNTSCTCHGCFQKLINMKADSVVWRRVQNEPPSLINGAPTTTTTIEKQKTVVKNVKVHKVLHCRNSVKSASSNVRCGATWNRDVNAANNLLLLLTTWMDGKERPATFCVPSSSPTPKTTVSGEANVGAQPTDPPGSVSSLQLLSSGPA

SEQ ID NO: 1892 - protein, 620 aa, Microglena sp.
STTQLQRHTYSQTFISQDASMMETLTSSSCHTWIGTFITGASLRYQPPMFERILWARASMIPWLLSTQVKVDVRPWGQVIADVSIQMATMACNSVWANVDRVVIKYLRLKHPSLKKHFKKIVKAVVQYPESKIDTIIPEGLVHAIHIKEVVSHLRALFPLPRGKQFNTRAHLTMRLFHHVLTELGEVGRVDPKDKKNKKKSPPSVQYPSSQERLHNLYVPISSMTFMKLLSMGDSPLESVSGDGRYENHTMLWRKYFNVQGLETKRSRFDNRILSDGKGVSVQMKQKGKEEVVEEGENAGYPKDANIVECKDAVGALRVGVDPGMTDIVTVASSAGRIESFSSARFSEVAGYNKSKRRTYKWNDETQDLVKSIPSPNTSNMVDLQDHVRAYLKALPILLQHRANKGYRSMRFFRYVGKQKTIEKVCDVIAPRAQTTVVGFGNWSNQGYGISRSCSGPIKEIRRCLSRRKNVLFKNVDERNTSCKCHGCFQRLVNMNADSVVWHGVCKESPIDGSITVEKQKMVVKNVKVHKVLHCRDSVKSASSNVRCGATWNRDVNAAKNLLLLLTTWMDGRERPEAFCVPSPPPKTTVSIEASVSAKPTDPPGFVSSLPCYPLGHLKC

SEQ ID NO: 1893 - protein, 621 aa, Microglena sp.
QCIRNLHVLNIRMPCMATNASVKLARPPMPLVSPGPSSVDGRIMARSERSGLQATNVSLTQAASKATSSSRKKKPAVVKSFSTHVCPHTNNNPTYSDSNCSCKPIFLTNIPDASKSLKSRTSDQGSTSSTQDFYEYWDSSRQDLYRQLLWLPKTGSQGLVSSSLNGFARSTPARSSFSITKTEPLKTSLEKTSCPSFKYIVADGTVEDATKSNAKTKLRTLKLKLNPTKAQKSMLAEFAGCSRFMYNKAVAARLGVGSTHKSVFRIRDRYVTNKVRGEGKMPNPYFKNRQWLLQCPKSVRQSAIKAALANFKACFSNMKAGNIKHFSAPFRRKKTELERGWAIEMDQKNVSKDGDKLFIFKDILGNMRYFGSKQLHKLMPEENPTHDPKVQKSRFGEYFLVLSVATRDRRGDRKPVHPEKVATASIDPGVRKTMVTYSPENEESFMFGQGQASDLVKLLLVHDKLQSRLDTEKTLRSKERMKIKNQMIRIRKRIFNLKKEFRDQTTNFLAARYDVLLVPQLETAKMTISAERELTTKVARQMLTLSHSVLFNRLKEKCEEYGTVFLHVLGHYTSQTCPMCGFLNKCGETYTCKNSQFTCDRDIVGAAGIFLKAVRTENPCS

SEQ ID NO: 1894 - protein, 451 aa, Microglena sp.
KPTKKRPRLFSILPRKSRFTISYVPISSMTLMKLLSMGDSPLESVRGDGRHENHSMLWRKYFNVQGLETKGSRFDNRILSDGKGVSVQMKHQVGKDIAGEGGGDNAGYPKDASIEDCQDASLRQGALRVGIDPGMTDIVTIASSDGRVESFSSARFSEAAGYNTSNRRTNKWNADTQDLVKSIPSPTTSSMQDHVRGYLSALPTLLQHRANRGYRSMRFFRYVGKQKTIEKVCDLIAPKAQKKTIEEKVCDVIAPKAKKTVVGFGNWSNQGYGISRSCSGPVKEIRKCLSRRQNVLFKNVDERNTSCTCHGCFQKLVNMKADSVVWRRVQNEPSALIDGAPTTTTTTFEKQKTVVKNVKVHKVLHCRNSVKSASSNVRCGATWNRDVNAAKNLLLLLTTWMDGKERPAAFCVPSSSPTPKTTVSGEANVGAQPTDPPGSVSSLQLLSSGPA

SEQ ID NO: 1895 - protein, 399 aa, Microglena sp.
AEAEPNQGSEIDAGRVCGVQPVHVQQGGGSTVGRREHSQVCLPNSRQVCDEQGEGEGKMPNPYFKNRQWLLQCPKSVRQSAIKAALANIKACFSNLKAGNIKQFSAPFRRKKTELERGWAIEMDQRNVSKDGDKLFIFKDILGNMRYFGSKQLHKLMPEENPTHDPKVHKSRFGEYFLVLSVAATDRRAERKPVHPDKVATASIDPGVRKTMVTYSPENEESFMLGQGQASDLVKLLLVHDKLQSRLDTEKTLRSKERMKIKKHMIRIRKRIFYLKKEFRDQTTNFLPARYDVLLVPQLETAKMTISAERELTTKVARQMLTLSHSVLFNRLKEKCAEYGTVFLHVLEHYTSQTCPMCGFLNKCGETYTCKNCQFTCDRDIVGAAGIFLKAVRTENPCS

SEQ ID NO: 1896 - protein, 586 aa, Microglena sp.
IKCPKTLDTSKIIRGYNVMQAIQQEVQNMEGWPESVQEYVNEVREMLSVPDGSRVYDNYGKDMDFPTMVRFNYWIQTRLEDMDARRIRLMPIFNVQRVHVRLDLKTLVNLFRHMFPNDQNIVELSKWEHVKNPDSFMLPQRPAQKKKKSCGPGEWEAYKSVLKQYDDDVKDIKATDEYRHAKGLYDTLVNARKTVAGSFFRKPPVKNGWVFDCSICTDGVSLSMQYSKTVQVLVSDLKKTCKKPRKEEGIKIAEKYDGSLKTILPDMGIVVLGVDPRRSNIATVTYLADDKNKTWTLTRGAFYHKSGIKKQTRQKELRFADMIPMWESLRENGAALSTSRTDKISAYLSNYAKFSDEWWRLALRRRESRDNLQRYIGKRKVKDSFWAGIKRCMMKELPDMKVCVAYGSAITKLKPTGPEEVAVPTGAMFASCKRIFKEDVSVTDEFKTTLMSWETGKEKERVYKIPSVCSADVKLRLGGERFGHTKSKTMPKVADCDHLGVRLYNKRKGAQEKHRRGGFATSLVDSQKSIERYPEVRGLRFSPETCIYSDRDRSSALTIARLHCMELMGLGRPLPFAHSSSVVVDE

SEQ ID NO: 1897 - protein, 553 aa, Microglena sp.
AGKKNQQSSSHSLRTHVCPHTNNNPTCSDSNCSCKPIFLTNIPDASKSLKSRTSDQGSTSSAQDFYEYWDSSLQDLYRQLLWLPKTGSQGLVSSSLNGFARSTPARSSFSITKTEPLKTSLEKTSCPSFKYIVTDGTVEDATKSNAKPKLRTLKLKLNPTKAQKSMLAEFAGCSRFMYNKAVAARLGVGSTHKSVFRIRDRYVTNKVRGKGKMPNPYFKNRQWLLQCPKSVRQSAIKSALANIKACFSNLKAGNIKQFSAPFRRKKTELERGWVIEMDQKNVSKDGDKLFIFKEILGNMRYFGSKQLHKLMPEENPTHDPKVHKSRFGEYFLVLSVAARDRRAERKPVHPDKVATASIDPGVRKTMVTYSPENEESFMLGQGQASDLVKLLLVHDKLQSRLDTEKTLRSKERMKIKKHMIRIRKRIFYLKKEFRDQTTNFLAARYDVLLVPQLETAKMTISAERELTTKVARQMLTLSHSVLFNRLKEKCEEYGTVFLHVLEHYTSQTCPMCGFLNKCGETYTCKNCQFTCDRDIVGAAGIFLKAVRTENPCS

SEQ ID NO: 1898 - protein, 628 aa, Microglena sp.
METIVNKEPPDKRTRPDRASKIKDRRNGEVNVVKCTLSRIIADKDNKDVIIKVIKERVDSVSKRTYLAGVAVNRILKEVFEGVPDAQLHTVSVPSVDQNFIRQLMVGSRQANMETRDATVERFFHNNYWFREKIEGREVIVKKKKQYAGAIARYDGDRNLYSHASKKYLTNFNNHYRVHLSTWIKKFVYSKENRILAKEFKDEHGIDETVFQRYLLYDIHSWGVKEDLIAIHSLLPERTKMLLKIQHSIIGRDEINRQWLKSVSNSAKMSRYNVFINRYLEATEDEGYAKLVNIAPIPTVKHAFITIDTDGLLGVLKDVGLVESLEKTLTNKEHWESVFDVENIRSTGKGVFTCTIDTDGVMACTHFLRAEKKKISIKDDGTAIKKQTNTLREFSESDPNVVVVANDPGRCNIAFLTWKKNKVEEKDKGGRKRKRHCEFGSKRLTRERYYVESGVFKSRGPTKKWLSNIQDCLDDLKDNSPKRTSLESFDAYVTVMVNHWDSRWGEMSKSRWGAQRLRLYGGKKRVLARFFNEVQADVGERKTIVIAYGSSKFAPGGKGELSVPTTSAFNAFSDRFKGRVAVINEFRTTKIWHKDSTTVLQSVQSEKKGARFEACYGAVPPWRTASCL

SEQ ID NO: 1899 - protein, 602 aa, Microglena sp.
GNCPLVWYHQNNNHSLSMGVVTNNGDDDDLDIMVVKKTLNSLCMDVSRQQICSRIQSMVLVINHAVAEAYLFANFHITRCLDDGDFDVKQLPHLDRNFYYRCILAVSISNVRNDTLDQSLKDSMVAFDALRPAGFLKVDVCQWGQVIADVSIQMATMACNSVWANVDRVVIKYLRLKHPSLKKHFNKIVKAVVQYPDSDIDKIIPAGLVHANLIKDVVRRLRDLLPLPRGKQFNTRAHLTMRLFHHVLTELGADLKEKTTKKRPRLFSILPRKSGFTISYVPISSMTLMKLLSMGDSPLESVRGDGRHENHSMLWRKYFNVQGLETKGSRFDNRILSDGKGVSVQMKHQVGKDIAGEGGGDNAGYPKDASIEDCQDASLRQGALRVGIDPGMTDIVTIASSDGRVESFSSARFREAAGYNTSNRRTNKWNADTQDLVKSIPSPTTSSMHDMQDHVRGYLSALPTLLQQRANRGYRSMRFFRYVGKQKTIEKVCDLIAPKAQKTTIEKVCDVIAPKAKKTVVGFGNWSNQGYGISRSCSGPVKEIRKCLSRRQNVLFKNVDERNTSCTCHGCFQKLVNMKADSVVWRRVQNEPSALIDNNNNV

SEQ ID NO: 1900 - protein, 397 aa, Microglena sp.
TPEKTVAGSFFRKPPVKNGWVFDCSICTDGVSLSMQYSKTVQVLVSDLKKTCKKPRKEECIKIAEKYDGSLKTILPDMGIVVLGVDPGRSNIATVPYLADDKNKTWTLTRGAFYHKSGIKKQTRQKELRFADMIPMWESLRENGAALSTSRTDKISAYLSNYAKFSDEWWRLALRRRESRDNLQRYIGKRKVKDSFWAGIKRCMMKELPDMKVCVAYGSAITKLKPTGPGEVAVPIGAMFASCKRIFKEDVSVTDEFKTTLMSWETGKEKERVYKIPSVCSADVKLRLGGERFGHTKSKTMPKVVDCDHLGVRLYNKRKGAQEKHRRGGFATSLVDSQKSIERYPEVRGLRFSPETCIYSDRDRSSALTIARLHCMELMGLGRPLPFAHSSSVVVDE

SEQ ID NO: 1901 - protein, 711 aa, Microglena sp.
GNCQLVWYHQNNNHSLSMGVVTNNGDDDDLDIMVVKKTLNSLCMDVSRQQICSRIQSMVLVINHAVAEAYLFANFHITRCLDDGDFDVKQLPHLDRNFYYRCILAVSISNVRNDTLDQSLKDSMVAFDALRPAGYLKVDVCQWGQVIADVSIQMATMACNSVWANVDRVVIKYLRLKHPSLKKHFNKIVKAVVQYPDSDIDKIIPAGLVHANLIKDVVRRLRDLLSLPRGKQFNTRAHLTMRLFHHVLTELGADLKEKTTKKRPRLFSILPRKSGFTISYVPISSMTLMKLLSMGDSPLESVRGDGRQENHSMLWRKYFNVQGLEKKGSRFDNRILSDGKGVSVQMKHQVGKDVAGEGRGDNAGYPKDASIEDCQDASLRQGALRVGIDPGMTDIVTIASSDGRVESFSSARFSEAAGYNTSNRRTKKWNADTQDLVKSIPSPTTSSMHDMQDHVRGYLSALPTLLQHRANRGYRSMRFFRYGGKQKTIEKVCDLIAPKAQKKTIEEKVCDVIAPKAKKTVVGFGNWSNQGYGISRSCSGPVKEIRKCLSRRQNVLFKNVDERNTSCTCHGCFQKLVNMKADSVVWRRVQNEPSALIDGAPTTTTTTFEKQKTVVKNVKVHKVLHCRNSVKSASSNVRCGATWNRDVNAAKNLLLLLTTWMDGKERPAAFCVPSSSPTPKTTVSGEANVGAQPTDPPGSVSSLQLLSSGPA

SEQ ID NO: 1902 - protein, 363 aa, Microglena sp.
ACSTARSTGPCLRSEEDCKNPRKEEGIKIAEKYDGSLKTILPDMGIVVLGVDPGRSNIATVTYLADDKNKKWTLTRGAFYHKSGIKKQTRQKELRFADMIPMWESLRENGAALSTSRTDKISAYLSNYAKFSEEWWRLALRRRESRDNLQRYIGKRKVKDSFWAGIKRCMMKELPDMKVCVAYGSAITKLKPTGPGEVAVPIGAMFASCKRIFKEDVSVTDEFKTTLMSWETGKEKERVYKIPSVCSADVKLRLGGERFGHTKSKTMPKVADCDHLGVRLYNKRKGAQEKHRRGGFATSLVDSQKSIERYPEVRGLRFSPETCIYSDRDRSSALTIARLHCMELMGLGRPLPFAHSSSVVVDE

SEQ ID NO: 1903 - protein, 308 aa, Microglena sp.
LFHHVLTELGEVGRVDPKDKKTRKSHPRLFSILPRKNGFTISYVPISSMTFMKLLSMGDSPLESVSGDGRYENHTMLWRKYFNVQGLETKRSRFDNRILSDGKGVSVQMKQKGKEEVVEEGENAGYPKDANIVECKDAVGALRVGVDPGMTDIVTVASSAGRIESFSSARFSEVAGYNTSKRHTYKWNDETQDLVKSIPSPNTSNMSDLQDHVRAYLKALPILLQHRANKGYRSMRFFRYVGKQKTIEKVCDVIAPRAQTTVVGFGNWSNQGYGISRSCSGPIKEIRRCLSRRKNVLFQKRRRTQHFL

SEQ ID NO: 1904 - protein, 394 aa, Microglena sp.
KFQMEVDFMMTMAKTWTSRPWSGFNYWMQTRLEAIGARRIRLMPIFNVQRAHVRLDMKTLVNLFRHVFPKDPNIVELSKWKNVKDPDRFMLPLKPAVKKKKSCGLGEWEAYKLAQQKYDTDVNDIKATDEYRHAKGRYDTLVNARKTVAGSLFKKPPIKTGWVFDCSICTDGVSLSMQYSKTVQVRVSDLKKTSKRSRYDEGMSVSEQYDHKLKTTLPDMGIVVLGVDPGRSNIATVTYLADDKSKTWKLTRGSFYHKSGIKKQKKQQEKRFSDMIPRWESLRENGAALSTSRTDDISAYLKNYATFSDEWWRMALLRRESRDNFQRYIGKRKAMDSFWAGIKRNMKLDHPDLRVRVAYGSAITTLKATGPGEVAVLRDLCSLPASASSKRRFM

SEQ ID NO: 1905 - protein, 299 aa, Microglena sp.
RSSWVQYQQSSHKKMECRYARPREVHSIADYEQYARHAGPCQRLPQRAPNPPSTPSQERLPIDAILSICGQTEDDLKRLCDLIAPKAQKKTIEEKVCDVIAPKAKKTVVGFGNWSNQGYGISRSCSGPVKEIRKCLSRRQNILFKNVDERNTSCTCHGCFQKLVNMKADSVVWRRVQNEPSALIDGAPTTTTTTTFEKQKTVVKNVKVHKVLYCRNSVKSASSNVRCGATWNQDLNAAKNLLLLLTTWMDGKERPAAFCVPSSSPTPKTTVSGEANVGAQPTDPPGSVSSLQLLSSGPA

SEQ ID NO: 1906 - protein, 669 aa, Microglena sp.
YVRYEGYLLEGLAKDRVDGVFPDEESRISYEAVKDVIGKVLGSDDPDYINSYPIYFDQVLNYAGHTLSTVVSNNAWVPLVPRLTRLTKATLNAMGAPKTIRVYDVMRVIQQEIQEMESWPESVQEYVREVRVRLKVPDGSRLYDDYGKDMDFPTMVRFNYWMQTRLEAIGARRIRLMPIFNVQRAHVRLDMKTLVNLFRHVFPKDPNIVELSKWKNVKDPDRFMLPLKPAFKKKKSCGPGEWEAYKLAQQKYDADVNDLKDTDEYRHAKGRYETLVNAQKTVAGSFFKKPPVKTGWVFDCSICTDGVSLSMQYSKTVQVRVSDLKKTSKRSRDDEGMSVSEQYDHKLKTTLPDMGIVVLGVDPGRSNIATVTYLADDKSKTWKLTRGAFYHESGIKKQKKQQEKRFSDMIPRWESLRENGAALSTSRKDDISAYLKNYATFSDEWWRMALRRRESRDNFQRYIGKRKAMDSFWAGIKRNMKLDHPDLRVRVAYGSAIMTLKATGPGEVAVPTGSMFASCKRLFKEEVHVTDEFKTTLMSWETGAKKECVYKIPSVQITTEGQIRLGYELLGHTPLKETPKVSYRNQLAVRVYCTRKQIQEKHRRGGLAPSLVDNNSIKRYPEVRGLRFSPETSTYSDRDRSSALTIARLHCMELLGQGRPLPFCRDACC

SEQ ID NO: 1907 - protein, 288 aa, Microglena sp.
KNKKKSPRLFSILPRKNGFTISYVPISSMTFMKLLSMGDSPLESVSGDGRYENHTMLWRKYFNVQGLETKRSRFDNRILSDGKGVSVQMKQKGKEEVVEEGENAGNPKDANIVECKDAVGALRVGVDPGMTDIVTVASSAGRIESFSSARFSKVAGYNTSKRRTYKWNDETQDLVKSIPSPNTSNISDLQDHVRAYLKALPILLQHRANKGYRSMRFFRYVGKQKTIEKVCDVIAPRAQTTVVGFGNWSKQGYGISRSCSGPIKEIRRCLSRRKNVLFKNVDERKHFL

SEQ ID NO: 1908 - protein, 236 aa, Microglena sp.
HLLQVASSLSARLALAKLLGTNTSKRRTYKWNDETQDLVKSIPSPNTSNMSDLQDYVRAYLKALPILQQHRANKGYRSMRFFRYVGKQKTIEKVCDVIAPRAQTTVVGFGNWSNQGYGISRSCSGPIKRDQEGASHVVRMFCSKNVDERNTSCKCHGCFQRLVNMNADSVVWRGVCKESPIDGSITVEKQKMVVKNVKVHKVLHCRDSVKSASSNVRLWCNLEPRRERLPRTFFCF

SEQ ID NO: 1909 - protein, 336 aa, Microglena sp.
DPREPVQVRVSPKDPNIVELSKWENVKDPDRFMLPLKPSVKKKKSCGPGEWDAYKLAQQKYDADVKDIKATDEYRHAKGRYDTLVNARKTVAGSFFKKPPVKTGWVFDCSICTDGVSLSMQYSKTVQVRVSDLKNKSKRSRDEEGMSVSEQYDQKLKTTLPDMGIVVLGVDPGRSNIATVTYLADDKSKTWKLTSGAFDHKSGIKKQKKQQENMIPRWESLRENGAALSTSRKDDISAYLKNYATFSDEWWRMALRRRESRDNFQRYIGKRKAMDSFWAGIKRNMKLDHPDLRVRVAYGSAITKLKATGPGEVAVPTGSMFASCKRLFNRGGSCDR

SEQ ID NO: 1910 - protein, 230 aa, Microglena sp.
SRRVKKRFVEEGENAGYPKDANIVECKDAVGALRVGVDPGMTDIVTVASSAGRIESFSSARFSEVAGYNTSKRRTYKWNDETQDLVKSIPSPNTSNMSDLQDHVRAYLKALPILLQHRANKGYRSMRFFRYVGKQKTIEKVCDVIAPRAQTTVVGFGNWSNQGYGISRSCSGPIKEIRRCLSRRKNVLFKNVDERNTSCKCHGCFQRLVNMKADSVVWREVCKESQSTGL

SEQ ID NO: 1911 - protein, 480 aa, Microglena sp.
LVQIGSWPHGKQICTILQGYHLPRGRSFSVGIGEQKTPPGRLKTPPGRLKHPSLKKHFKKIVKAVVQYPDSDIDKIIPAGLVHANLIKDVVRRLRDLLPLPRGKQFNTRAHLTMRLFHHVLTELGADLKEKTTKKRPRLFSILPRKSGFTISYVPISSMTLMKLLSMGDSPLESVRGDGRHENHSMLWRKYFNVQGLETKGSRFDNRILSDGKGVSVQMKHQVGKDIAGEGGGDNAGYPKDASIEDCQDASLRQGALRVGIDPGMTDIVTIASSDGRVESFSSARFSEAAGYNTSNRRTNKWNADTQDLVKSIPSPTTSSMHDMQDHVRGYLSALPTLLQHRANRGYRSMRFFRYVGKQKTIEKVCDLIAPKAQKKTIEEKVCDVIAPKAKKTVVGSGNWSNQGYGISRFVFWTSERDQEVPFTSSECSVQKRRRTQHFLYLPRLLPEARQHEGRQRRLAQSSKRALRPHRRGSYNNNNV

SEQ ID NO: 1912 - protein, 303 aa, Microglena sp.
EQHRYSHVSGRRQKQDMEAYTRSFLPQVWYQETEKTARKRFSDMIPRWESLLENGAALSTSRTDDISAYLKNYATFSDEWWRMALLRRESRDNFQRYIGKRKAMDSFWAGIKRNMKLDHPDLRVRVAYGSAITTLKATGPGEVTVPTGSMFASCKRLFKEEVHVTYEFKTTLMSWETGAKKECVYKIPSVQITTEGQIRLGYELGHTPLKETPKVSYRDQLAVRVYCTRKKIQEKHRRGGLAPSLVDNNSIKRYPEVRGLRFSPETSTYSDRDRSSALTIARLHCMELLGQGRPLPFCRDACC

SEQ ID NO: 1913 - protein, 676 aa, Microglena sp.
IATSFYRCLIAVSTNKCKGSTLGEDFESSRLLFDLLREPGQSKVDIRGNVKNQIIADLSILMATMASNHLWTNLERRITTYLKWKYPQIAKRLRSDIVAAVIKCPTKNLDVIFKMSPHTTKLPTKLPTARLRSAKSAVALAKKRVGRKEPEGSPLRVRLTKLQERLEKLSEAWLSSKNLRVDADNAKRFFARDVAFCLRGVLPLPSGNTFASRAHMTLPLYHKILSETIEEKRKTKNEKHRTFSLLPYKSGFTLSHIPISKMAFFYMVNECHFDSCKADVTSKNHQGIWERFANLKKVETVSRKFGYRIVTDGFAVSILMNKPTCLTCSMPADAFSTRAHEYVTTDEGGIVSFLDNVVVAAVDPGVTDIMTVTGLNGGTRSYSSAQYYRKGLIFKSQRQTDVWNLETADIVGGIIPDRDSSSSEQIGAYARFYMGAAPILLAHRASRGYRNLRFRRYSKKQKLIVEIADFVAPREKSAKVLVGFGDWKGLGATPISRRTCGPLQAIRFELRSRENVIMEDIDEFRTSQRCSCCENHLCNMVALTHRKKQDGTGWECTEGRKRIHKILHCKSSQSGAPRQQSGGMLHCGETWDRDVKASRNILMLTLHQVFGRERPLAFRRDAPRSSSTTPPPPPDTDMGTQTVERFTKEATRNIFENLFNLLHPPTLPKSNDLQSG

SEQ ID NO: 1914 - protein, 223 aa, Microglena sp.
RRRTRRLSQGRKYRRVQGRSGCAACRSRPGMTDIVTVASSAGRIESFSSARFSEVAGYNTSKRRTYKWNDETQDLVKSIPSPNTSNMVDLQDHVRAYLKALPILLQHRANKGYRSMRFFRYVGKQKTIEKVCDVIAPRAQTTVVGFGNWSNQGYGISRSCSGPIKEIRRCLSRRKNVLFKNVDERNTSCKMSRLLPEACQHEGRQRSLARSLQRVPNRRVYNC

SEQ ID NO: 1915 - protein, 292 aa, Microglena sp.
SSSPQRQTDVWNLETADIVGGIIPDRDSSSSEQIGAYARFYMGAAPILLAHRASRGYRNLRFRRYCKKQKLIVEIADFVAPRKKSAKVLVGFGDWKGLGATPISRRTCGPLQAIRFELRSRENVIMEDIDEFRTSQRCSCCENHLCNMVALTHRKKQDGTGWECTEGRKRIHKILHCKSSQSGAPRQQSGGMLHCGKTWDRDVNASRNILMLTLHQVFGRERPLAFRRDAREVFPRQPPPPKILIWGHRRLNGLPKRLLGISSRTSSTFCTPQRCPKATICSLDDYKVSHFI

SEQ ID NO: 1916 - protein, 504 aa, Microglena sp.
SQGRRIRAQLQAPRTFYEYWDSSRQDLYRQLLWLPKTGSQGLVSSSLNGFARSTPAQSSFSITKTEPLKTSLEKTSCPSFKYIVADGTVEDATKSNAKPKLRTLKLKLNPTKAQKSMLAEFAGCSRFMYNKAVAARLGVGSTHKSVFRIRDRYVTNKVRGKGKMPNPYFKNRQWLLQCPKSVRQNAIKSALANIKACFSNLKAGNIKQFSAPFRRKKTELERGWVIEMDQKNVSKDGDKLFIFKEILGNMRYFGSKQLHKLMPEENPTHDPKVQKSRFGEYFLVLSVAARDRRAERKPVNPDKVATASIDPGVRKTMVTYSPENEESFMLGQGQASDLVKLLLVHDKLQSRLDTEKTLRSKERMKIKKLMIRIRKTIFYLKKEFRDQTTNFLAARYDVLLVPQLETAKMTISAERELTTKVARQMLTLSHSVLFNRLKEKCEEYGTVFLHVLEHYTSQTCPMCGFLNKCGETYTCKNCQFTCDRDIVGAAGIFLKAVRTENPCS

SEQ ID NO: 1917 - protein, 325 aa, Microglena sp.
NDIARYGYRRPGCGPGRSNIATVTYLADDKNKTWTLTRGEFYHKSGIKKQTRQKELRFADMIPMWESLRENGAALSTSRTDKISAYLSNYAKFSDEWWRLALRHRESRDNLQRYIGKRKVKDSFWAGIKRCMMKELPDMKVCVAYGSAITKLKPTGPGEVAVPTGAMFASCKRIFKEDVSVTDEFKTTLMSWETGKEKERVYKIPSVCSADVKLRLGGERFGHTKSKTMPKVADCDHLGVRLYNKRKGAQEKHRRGGFATSLVDSQKSIERYPEVRGLRFSPETCIYSDRDRSSALTIARLHCMELMGLGRPLPFAHSSSVVVDE

SEQ ID NO: 1918 - protein, 464 aa, Microglena sp.
PCLCTTRYCRRPSKKNEKTKNEKHRTFSLLPYKSGFTLSHIPISKMAFFYMVNECHFDSCKADVASKNHQGIWERFANLKKVETVSRKFGYRIVTDGFAVSILMNKPTCLTCSMPADAFSTRAHEYVTTDEGGIVSFLDNVVVAAVDPGVTDIVTVTGLNGGTRSYSSAKYYRKGLIFKSQRQTDVWNLETADIVGGIIPDRDSSNSEQIGAYARFYMGAAPILLAHRASRGYRNLRFRRYCKKQKLIVEIADFVAPRKKSAKVLVGFGDWKGLGATPISRRTCGPLQAIRFELRSRENVIMEDIDEFRTSQRCSCCENHLCNMVALTHRKKQDGTGWECTEGRKRIHKILHCKSSQSGAPRQQSGGMLHCGKTWDRDVNASRNILMLTLHQVFGRERPLAFRRDAPRSSSTTPPPPPDTDMGTQTVERFTKEATRNIFENLFNLLHPPTTICSLDDYKVSHFI

SEQ ID NO: 1919 - protein, 782 aa, Microglena sp.
DGNETSDSREIEGATKIGRSSILIKGQEGRYCPFMRRQWSHRQTPPEYKTVEKMCVVKCALKKAMSLDDEEFGKFREHVDQLVNVVSRMLRRSSLVLTFHVTRLMEGDLPIPNMYDMKDTYWKDWLRIGVDGVFPDEESRISYESVKDVIGKVLGSDDPDYINSYPIYFDQVLNYAGHTLSTVVSNNAWVPLVPRLTRLTKATLNALGAPKTIRVYDVMRVIQQEIQEMESWPESVQEYVREVRVRLKVPDGSRLYDDYGKDMDFPTMVRFNYWMQTRLEAIGARRIRLMPIFNVQRAHVRLDMKTLVNLFRHVFPKDPNIVELSKWKDVKDPDRFMLPLKPAVKKKKSCGPGEWEAYKLAQQKYDADVNDIKDTDEYRHAKGRYDTLVNARKKVAGSFFKKPPVKTGWVFDCSICTDGVSLSMQYSKTVQVRVSDLKKTSKRSRDDEGMSVSEQYDHKLKTTLPDMGIVVLGVDPGRSNIATVTYLADDKSKTWKLTRGAFYHKSGIKKQKKQQEKRFSDMIPRWESLRENGAALSTSRTDDISAYLKNYATFSDEWWRMALLRRESRDNFQRYIGKRKAMDSFWAGIKRNMKLDHPDLRVRVAYGSAITTLKATGPGEVAVPTGSMFASCKRLFKEEVHVTDEFKTTLMSWETGAKKECVYKIPSVQITTEGHIRLGYELLGHTPLKETPNVSYRDQLAVRVYCTRKQIQEKHRRGGLAPSLVDNSSIKRYPEVRGLRFSPETSTYSDRDRSSALTIANLHCMELLGQGRPLPFCRDACC

SEQ ID NO: 1920 - protein, 448 aa, Microglena sp.
QCDCSITCLQSWERSDEWIRKIKKQEKSHPRLFSILPRKNGFTISYVPISSMTFMKLLSMGDSPLESVSGDGRYENHTMLWRKYFNVQGLETKRSRFDNRILSDGKGVSVQMKQKGKEEVVEEGENAGYPKDANIVECKDAVGALRVGVDPGMTDIVTVASSAGRIESFSSARFSEVAGYNTSKRRTYKWNDETQDLVKSIPSPNTSNMSDLQDHVRAYLKALPILLQHRANKGYRSMRFFRYVGKQKTIEKVCDVIAPRAQTTVVGFGNWSNQGYGISRSCSGPIKEIRRCLSRRKNVLFKNVDERNTSCKCHGCFQRLVNMKADSVVWRGVCKESPIDGSITVEKQKMVVKNVKVHKVLHCRDSVKSASSNVRCGATWNRDVNAAKNLLLLLTTWMDGRERPEAFCVPSPPPKTTVSIKASVSAKPTDPPGFVSSLPCYPLGQLKC

SEQ ID NO: 1921 - protein, 335 aa, Microglena sp.
HLLTEIHQTSSLYRHYSNGNPSDIVTIASSDGRVESFSSARFSEAAGYNTSNRRTNKWNADTQDLVKSIPSPTTSSMHDMQDHVRGYLSALPTLLQHRANRGYRSMRFFRYVGKQKTIEKVCDLIAPKAQKKTIEEKVCDVIAPKAKKTVVGFGNQGYGISCSCSGRVKEIRKCLSRRQNVLFKNVDERNTSCTCHGCFQKLVNMKADSVVWRRVQNEPSALIDGAPTTTTFEKQKTVVKNVKVHKVLHCRNSVKSASSNVRCGATWNRDVNAAKNLLLLLTTWMDGKERPAAFCVPSSSPTPKTTVSGEANVGAQPTDPPGSVSSLQLLSSGPA

SEQ ID NO: 1922 - protein, 444 aa, Microglena sp.
ILVTHRSAAYKSVLKQYDDDVKDIKATNEYRHAKGLYDTLVNARKTVAGSFFRKPPVKNGWVFDCSICTDGISLSMQYSKTVQVLVSDLKKTCKKPRKEEGIKIAEKYDGSLQTILPDMGIVVLGVDPGRSNIATVTYLADDKDKTWTLTRGAFYHKSGIKKQTRQKELRFADMIPMWESLRENGAALSTSRTDKISAYLSNYAKFSDEWWRLALRRRESRDNLQRYIGKRKVKDSFWAGIKRCMMKELPDMKVCVAYGSAITKLKPTGPGEVAVPTGAMFASCKRIFKEDVSVTDEFKTTLTSWETGKEKERVYKIPSVCSVDVKLRLGGERFGHTKSKTMPKVADCDHLGVRLYNKRRGAQEKHRRGGFATSLVDSQKSIERYPEVRGLRFSPETCIYSDRDRSSALTIARLHCMELMGLGRPLPFAHSSSVIVDESKLVLL

SEQ ID NO: 1923 - protein, 342 aa, Microglena sp.
RVSVQMKQKGKEEVVEEGENAGYPKDANIVECKDAVGALRVGVDPGMTDIVTVASSAGRIESFSSARFSEVAGYNTSKRRTYKWNDETQDLVKSIPSPNTSNMSDLQDHVRAYLKALPILLQHRANKGYRSMRFFRYVGKQKTIEKVCDVIAPRAQTTVVGFGNWSNQGYGISRSCSGPIKEIRRCLSRRKNVLFKNVDERNTSCKCHGCFQRLVNMKADSVVWRGVCKESPIDGSITVEKQKMVVKNVKVHKVLHCRDSVKSASSNVRCGATWNRDVNAAKNLLLLLTTWMDWRERLEAFCVPSPPPKTTVSIEASVSAKPTDPPGFVSSLPCYPLGQLKC

SEQ ID NO: 1924 - protein, 688 aa, Microglena sp.
RNVGAILYHQKKKNTHPLLMGVVQDKGDDDINISVVKKTLNSLCMDVSRHQISSRIQSMVLLINHAVAEAYLFANFHITRCLDDGDFDVKQLPHLDRNFYYRCLLAVSTSNVRKDTLGQSFNDTIVAFDALRPAGYVKVDVRPWGQVIADVSIQMATMACNSVWANVDRVVIKYLRLKHPSLKKHFKKIVKAVVQYPESKIDTIIPEGLVHAIHIKEVVSHLRALFPLPRGKQFNTRAHLTMRLFHHVLTELGEVGRVDPKDKKTRKSHPRLFSILPRKNGSTISYVPIYSMTFMKLLSMGDSPLESVSGDGRYENHTMLWRKYFNVQGLETKRSRFDNRILSDGKGVSVQMKQKGKEEVVEEGENAGYPKVANIVECKDAVGALRVGVDPGMTDIVTVASSAGRIESFSSARFSEVAGYNTSKRRTYKWNDETQDLVKSIPSPNTSNMSDLQDHVRAYLKALPILLQHRANKGYRSMRFFRYVGKQKTIEKVCDVIAPRAQTTVVGFGNWSNQGYGISRSCSGPIKEIRRCLSRRKNVLFKNVDERNTYCKCHGCFQRLVNMKADSVVWRGICKESPIDGSITVEKQKMVVKNVKVHKVLHCRDSVKSASSNVRCGATWNRDVNAAKNLLLLLTTWMDGRERPEAFCVPSPPPKTTVSIEASVSAKPTDPPGFVSSLPCYPLGQLKC

SEQ ID NO: 1925 - protein, 976 aa, Microglena sp.
RGRLLAVIRFTLVRITQRFVRRAQQFEKLLSSIPLAVRRCCPFVRMPFQSCLPVCSPNLLCRCSVCCHPQQFIVAADHDGLRWAFIDVYSCSQIKSKRLKRKRKELSMLLRSTISNNIAENPFITCKDLVGIICKSCNVRLSISTASRHIKQCGFSRKKAFPTVLYGHSKENVEMFCDKYRESSNVVCIDEAGFYAGEHSKYGYSKIGSRLTTKTMSNLRRVKFTLLLAISSQGIIDYQLLEHNCKKEDFIKFFKTLVIPNNTTIVMDNIRFHHSSEIKDISECKGWKLLYTPPYCPRANAIEQIFESMKRDYRASCPLTSTCNFDYLMQICCVLEMWRYKDFSKYMINTRDWVRNVRESLSADPDYIKTFSGVQFVMENGIGESSSLVHEADQHDDVAELVDYEGEEDEECAPGRAICVVKMKLSTFIPHDWLRKKIDTLVLDMNKLLGEGYIFANFHIARLFENGIAVPPVNRNFFYRCLIAVSTNKCKGSTLGKDFESSRLLFDLLREPGQSKVDIRGKVKNQIIADLSILMATMASNHLWTNLERRITTYLKWKYPQIAKRLRSDIVAAVIKCPTKNLDVIFKMSPHTTKLPTKLPTTRLRSAKSAVALAKKRVGRKEPEGSPLRVRLTKLQERLEKLSEAWLSSKNLRVDADNAKRFFARDVAFCLRGVLPLPSGNTFASAHDPASAPQDIVGDHRRKTKNEKRKTSHILVVALQIWIHSAAHSDRFYMGAAPILLAHRASRGYRNLRFRRYCKKQKLIVEIADFVAPREKSAKVLVGFGDWKGLGATPISRRTCGPLQAIRFELRSRENVIMEDIDEFRTSQRCSCCENHLCNMVALTHRKKQDGTGWECTEGRKRIHKILHCKSSQSGAPRQQSGGMLHCGKTWDRDVNASRNILMLTLHQVFGRERPLAFRRDAPRSSSTTPPPPPDTDMGTQTVERFTKEATRNIFENLFNLLHPPTLPKSNDLQSG

SEQ ID NO: 1926 - protein, 302 aa, Microglena sp.
RSRPRLSASFSESDPNVVVVANDPGRCNIAFLTWKKNKVEEKDKGGRKRKRHCEFGSKSLTRERYYVESGVFKSRGPTKKWLSNIQDCLDDLKDNSPKRTSLESFDAYVTVMVNHWDSRWGEMSKSRWGAQRLRLYGGKKRVLARFFNEVQADVGERKQIVIAYGSSKFAPGGKGELSVPTTSAFNAFSDRFKGRVAVIDEFRTTKIWHKDSTTVLQSVQSEKKGRTVRGLLWCSSTMENSKLFVNRDLNAAINIHNCFTMYPTRPGILARPKKYCKLEVVVGRTIDYKLTGSLQNAVSSEV

SEQ ID NO: 1927 - protein, 628 aa, Microglena sp.
KFQKNPPGGRNAHYVLNIRMPCMATNASVKLARPPMPLVSPGPSSVDGRIMARSERSGLQATNVSLTQAASKATSSSRKKKPAVVKSFSTHVCPHTNNNPTCSDSNFSCKSIFLTNIQDASKSLKSRTSDQGSTSSAQDFYEYWDSSRQDLYRQLLWLPKTGSQGLVSSSLNGFARSTPARSSFSITKTEPLKTSLEKTSCPSFKYIVADGTVEDATKPNAKPKLSTLKLKLNPTKAQKSMLAEFAGCSRFMYNKAVAARLGVGSTHKSVFRIRDRYVTNKVRGEGKMPNPYFKNRQWLLQCPKSVRQSAIKAALANIKACFSNLKAGNIKQFSAPFRRKKTELERGWAIEMDQKNVSKDGDKLFIFKDILGNMRYFGSKQLHKLMPEENPTHDPKVKKSRFGEYFLVLSVAARDRRAERKPVHPDKVATASIDPGVRKTMVTYSPENEESFMLGQGQASDLVKLLLVHDKLQSRLDTEKTLRSKERMKLRLQMIRIRKRIFYLKKEFRDQTTNFLAARYDVLLVPQLEKAKMTISAERELTTKVARQMLTLSHSVLFNRLKEKCEEYGTVFLHVLEHYTSQTCPMCGFLNKCGETYTCKNCQFTCDRDIVGAAGIFLKAVRTENPCS

SEQ ID NO: 1928 - protein, 491 aa, Microglena sp.
VNLTVYKEFACTKYQNAMYGNQRFCKIGKASDALGVSRTVLRRWADNGTIRTIRTPGNQRLFDPSSIQGYLIEQEKKPSSRQVILYARVSSHKQQPDLLRQQLFLQTHISDKHSGCEQVIEVKDVGSGLNFKRPGLLRVLGLVTARGEGKMPNPYFKNRQWLLQCPKSVRQSAIKAALANIKACFSNLKAGNIKQFSAPFRRKKTELERGWAIEMDQKNVSKDGDKLFIFKDILGNMRYFGSKQLHKLMPEVNPTHDPKVHKSRFGEYFLVLSVAARDRRAERKPVHPDKVATASIDPGVRKTMVTYSPENEESFMLGQGQASDLVKLLLVHDKLQSRLDTEKTLRSKERMKIKMQMIRIRKRIFYLKKEFRDQTTNFLAARYDVLLVPQLETEKMTISAERELTTKVARQMLTLSHSVLFNRLKEKCEEYGTVFLHVLEHYTSQTCPMCGFLNKCGETYTCKNCQFTCDRDIVGAAGIFLKAVRTENPCS

SEQ ID NO: 1929 - protein, 206 aa, Microglena sp.
AHVCKHQWHDAGCLFWTHVECISGDTQSTVFSNNFGTRFELRSRENVIMEDIDEFRTSQRCSCCENHLCNMVALTHRKKQDGTGWECTEGRKRIHKILHCKSSQSGAPRQQSGGMLHCGKTWDRDVNASRNILMLTLHQVFGRERPLAFRRDAPRSSSTTPPHPLILIWGHRRLNGLPKRLLGISSRTSSTFCTPQRCPKATICSG

SEQ ID NO: 1930 - protein, 449 aa, Microglena sp.
SGSMRASSQNCLLKTTISVFFIFTAILVASQKSLRQSSIACISAVRVSAVRVSAVRVSAVRVSAVRVSDLKKTSKRSRDEEGMSVSEQYDHKLQTTLPDMGIVVLGVDPGRSNIATVTYLADDKSKTWELTRGAFYRKSGIKKQKKQQEKRFSDMIPRWESLRENGAALSTSRKDDISAYLKNYATFSDEWWRMALRRREFRDNFQRYIGKRKAMDSFWAGIKRNMKLDHPDLRVRVAYGSAITKLKATGPGEVAVPTGSMFASCKRLFKEEVHVTDEFKTTLMSWETGAKKECVYKIPSVQITTEGQIRLGYELLGHTPLKETPMVSYRDQLAVRVYCTRKKIQEKHRRGGLAPSLVDNNSIKRYPEVRGLRFSPETSTYSDRDRSSALTIARLHCMELLGQGRPLPFCRDACCWATKNMMVFHFTVGCYTIRLHHKVYRTLQKAVSF

SEQ ID NO: 1931 - protein, 229 aa, Microglena sp.
KKRSLKKEKNAGYPKDANIVECKDAVGALRVGVDPGMTDIVTVASSAGRIESFSSARFSEVAGYNTSKRRTYKWNDETQDLVKSIPSPNTSNMSDLQDHVRAYLKALPILLQHRANKGYRSMRFFRYVGKQKTIEKVCDVIAPRAQTTVVGFGNWSNQGYGISRSCSGPIKEIRRCLSRRKNVLFKNVDERNTSCKCHGCFQRLVNMKADSVVWRGVLQRVPNRRVYNC

SEQ ID NO: 1932 - protein, 795 aa, Microglena sp.
LWKMATKPPTVAKLKELLKLAEVPYSSKSNKDDLVRLCEDNGLIARPLPEYKTVEKMCVVKCALKKAMSLDDEEFGKFREHVDQLVNVVSRMLRRSSLVLTFHITSLLEKGLEIPDLYNMKDTYWKDWLRIGVDGIFPDEESKISYEAVKDSIGDVIGNDDADYIKSYPIYFDQVLNYAGHTLSTVVSNNAWVPLIPRLARLTSTTLNKLNAPKTLDTSKIIRGYDVMQAIQQEVQTMEGWPESVQEYVNEVREMLSVPDGSRVYDNYGKDMDFPTMVRFNYWIQTRLEDMDARRIRLMPIFNVQRVHVRLDLKTLVNLFRHMFPNDQNIVELSKWEHVKNPDSFMLSQRPAQKKKKSCGPGEWEAYKSVLKQYDDDVKDIKATDEYRHAKGLYDTLLNARKTVAGSFFRKPPVKNGWVFDCSICTDGVSLSMQYSKTVQVLVSDLKKTCKNPRKEEGIKIAEKYDGSLKTILPDMGIVVLGVDPGRSNIATVTYLADDKNKTWKLTRGAFYHKSGIKKQTRQKELRFADMIPMWESLRENGAALSTSRTDKISAYLSNYAKFSDEWWRLALRRRESRDNLQRYIGKRKVKDSFWAGIKRCMMKELPDMKVCVAYGSAITKLKPTGPGEVAVPTGAMFASCKRIFKEDVSVTDEFKTTLMSWETGKEKERVYKIPSVCSADVKLRLGGERFGHTKSKTMPKVADCDHLGVRLYNKRKGAQDKHRRGGFATSLVDSQKSIERYPEVRGLRFSPETCIYSDRDCSSALTIARLHCMELMGLGRPLPFAHSSSVVVDE

SEQ ID NO: 1933 - protein, 267 aa, Microglena sp.
HDSYVGVSLRENGAALSTSRTDKISAYLSNYAKFSDEWWRLALRRRESRDNLQRYIGKRKKVKDSFWAGIKRCMMKELPDMKVCVAYGSAITKLKPTGPGEVAVPTGAMFASCKRIFKEDVSVTDEFKTTLMSWETGKEKERVYKIPSVCSADVKLRLGGERFGHTKSKTMPKVADCDHLGVRLYNKRKGAQEKHRRGGFATSLVDSQKSIERYPEVRGLRFSPETCIYSDRDRSSALTIARLHCMELMGLGRPLPFAHSSSVVVDE

SEQ ID NO: 1934 - protein, 323 aa, Microglena sp.
TQNDIARYGYRRSGVDPGRSNIATVTYLADDKSKTWKLTRGAFYHKSGIKKQKKQQEKRFSDMIPRWESLRENGAALSTSRTDNISAYLKNYATFSDEWWRMALLRRESRDNFQRYIGKRKAMDSFWAGIKRNMKLDHPDLRVRVAYGSAITTLKATGPGEVAVPTGSMFASCKRLFKEEVHVTDEFKTTLMSWETGAKKECVYKIPSVQITTEGQIRLGYELLGHTPLKETPKVSYRDQLAVRVYCTRKQIQEKHRRGGLAPSLVGNNSIKRYPQVRGLRFSPETSTYSDRDRSSALTIARLHCMELLGQGRPLPFCRDACC

SEQ ID NO: 1935 - protein, 548 aa, Microglena sp.
SVQEYVREVRVRLKVPDGSRLYDDYGKDMDFPTMVRFNYWMQTRLEAIGARRIRLMPIFNVQRAHVRLDMKTLVNLFRHVFPKDPNIVELSKRKNVKDPDRFMLPLKPAFKKKKSCGSGEWEAYKLSQQKYDADVNDIKATDEYRHAKGRYDTLVNAQKTVAGSFFKKPPVKTGWVFDCSICTDGVSLSMQYSKTVQVRVSDLKKTSKRSRDDEGMSVSEQYDHKLKTTLPDMGIVVLGVDPGRSNIATVTYLADDKSKTWKLTRGAFYHKSGIKKQKKQQEKRFSDMIPRWESLRENGAALSTSRKDDISAYLKNYATFSGEWWRMVLRRRESRDNFQRYIGKRKAMDSFWAGIKRNMKLDHPDLRVRVAYGSAITTLKATGPGEVAVPTGSMFASCKRLFKEEVHVTDEFKTTLMSWETGAKKECVYKIPSVQITTEGQIRLVTSCWVTPPLKETPKVSYRDQLAVRVYCTRKQIQEKHRRGGLAPSLVDNNSIKRYPEVRGLRFSPETSTYSDRDRYSALTIARLHCMELLGQGRPLPFCRDACC

SEQ ID NO: 1936 - protein, 443 aa, Microglena sp.
DSALDPRTGRDQPTVAQERSNSAKMIRYNVFINRYLEATEDEGLRQAGQHRSPSQHFKHAFITIDTDGLLGVLKDVGLIESLEKTLTNKEHWESVFDVENIRSTGKGVFTCTIDTDGVMACTHFLRAEKKKISIKDDGTAIKKQTKTLREFSESDPNVVVVANDPGRCNIAFLTWKKNKVEEKDKGGRKRKRHCEFGSKRLTRERHYVESGVFKSRGPTKKWLSNIQDCLDDLKDNSPKRTSLVSFDAYETVMVNHWDSRWGEMSKSRWGAQRLRLYGGKKRVLARFFKEVQADVGERKTIVVAYGSAKFAPGGKGELSVPTTSAFNAFSDRFKGRVAVIDEFRTTKIWHKDSTTVLQSVQSEKEGRTVRGLLWCSSTMENSKLFVNRDLNAAINIHNCFTMYPTRPGILARPKKYCKLEVVVGRTIDYKLTGSLQNAVPSEV

SEQ ID NO: 1937 - protein, 247 aa, Microglena sp.
HVTFHRCERLLSASSRHEPPGSVWRRRESRDNLQRYIGKRKVKDSFWAGIKRCMMKELPDKKVCVAYGSAITKLKPTEPGEVAVPTGAMFASCKRIFKEDVSVTDEFKTTLMSWETGKEKERVYKIPSVSSADVKLRLGGERFGHTKSKTMPKVADCDHLGVRLYNKRKGAQEKHRRGGFATSLVDSQKSIERYPEVRGLRFSPETCIYSDRDRSSALTIARLHCMELMGLGRPLPFAHSSSVVVDE

SEQ ID NO: 1938 - protein, 248 aa, Microglena sp.
HLLQVASSLFSSARFSEVAGYNTSKRRTYKWNDETQYLVKSIPSPNTSNMVVLQDHVRAYLKALPILLQHRANKGYRSMRFFRYVGKQKTIGKVCDMIAPRAQTTVVGFGNWSNQGYGISRSCSGPIKEIRRCLSRRKNVLFKNVDERNTSCKCHGCFQRLVNMKADSVVWRGVCKESPIDGSITVEKQKMVVKNVKVHKVLHCRDSVKSASSNVRCGATWNRDVNAAKNLLLLLTTCMDGRERPEAF

SEQ ID NO: 1939 - protein, 996 aa, Microglena sp.
NEKGKNCPCFYVPRYPIILQRTNPFITCKDLVGIICKSCNVRLSISTASRHIKQCGFSRKKAFPTVLYGHSKENVEMFCDKYRESSNVVCIDEAGFYAGEHRKYGYSKIGSRLTLLLAISSQGIIDYQLLEHNCKKEDFIKFFKTLVIPKKTTIVMDNIRFHHYSEIKDISECKGWKLLYTPPYCPRANAIEQIFGSMKRDYRSSCPLTSTCNFDYLMQICCVLEMWRYKDLSKYMINTRDWVWNVRESLSADPDYIKNVFGVQFVMENGIGESSSLVHEADQHDDVAELVDYEGEEDEECAPGRAICVVKMKLSTFIPHDWLRNKIDTLVLDMNKLLGEGYIFANFHIARLFENGIAVPPVNRNFFYRCLIAVSTNKCKGSTLGEDFESSRLLFDLLREPGQSKVDIRGNVKNQIIADLSILMATMASNHLWTNLERRITTYLKWKYPQIAKRLRSDIVAALIKCPTKNLDVIFKMSPHTTKLPTKLPTSRLRSAKSAVALAKKRVGRKEPEGSPLRVRLTKLQEGLEKLCEAWLSSKNLRVDADNAKRFFAREVAFCLRGVLPLPSGNTFASRAHMTLPLYHKILSETIEEKRKTKNEKHRTFSLLPYKSGFTLSHIPISKMAFFYMVNECHFDSCKADVASKNHQGIWERFANLKKVETVSRKFGYRIVTDGFAVSILMNKPTCLTCSMPADEFSTRAHEYLTTDEGGIVSFLDNVVVAAVDPGVTDIVTVTGLNGGTRSYSSAQYYRKGLIFKSQRQTDVWNLETADIVGGIIPDRDSSSSEQIGAYARFYMGAAPILLAHRASRGYRNLRFRRYCKKQKLIVEIADFVAPREKSAKVLVGFGDWKGLGATPISRRTCGPLQAIRFELRSRENVIMEDIDEFRTSQRCSCCENHLCNMVALTHRKKQDGTGWECTEGRKRIHKILHCKKQSKRSATPTERWYASLREDLGPRCERFQKHPDAYTSPSLWERASSRVSPRRAEKFLDNPTPTP

SEQ ID NO: 1940 - protein, 249 aa, Microglena sp.
HIVTVASSAGRVESFSSARFSEAAGYNTSNRRTNKWNVDTQDLVKSIPSPTTSSMHDMQDHVRGYLSALPTLLQHRASRGYRSMRFFRYVGKQKTIEKVCDLIAPKAQKKTIEEKVCDMIAPKAQKTIVGFGNWSNQGYGISRSCSGPVKEIRKCLSRRQNVLFKNVDERNTSCTCHGCFQKLINMKADSVVWRRVQNEPPSLINGAPTTTTTIEKQKTVVKNVKYCTVATVSKAHHPMCAVVQPGTET

SEQ ID NO: 1941 - protein, 243 aa, Microglena sp.
CLRKTRPTIQRSTNPASANISSSCLSLPTDRRAERKPVHPDKVATASIDPGVRKTMVTYSPENEESFMLGQGQASDLVKLLLVHDKLQSRLDTEKTLRSKERMKIKKHMIRIRKRIFYLKKEFRDQTTNFLAARYDVLLVPQLETAKMTISAERELTTKVARQMLTLSHSVLFNRLKEKCAEYGTVFLHVLEHYTSQTCPMCGFLNKCGETYTCKNCQFTCDRDIVGAAGIFLKAVRTENPCS

SEQ ID NO: 1942 - protein, 437 aa, Microglena sp.
EEKSCGPGEWEAYKLAQQKYDADVKDIKATDVYRHAKGRYDTLVNARKTVAGSFFKKPPVKTGWVFDCSICTDGVSLSMQYSKTVQVRVSDLKKNSKRSRDEEGMSVAEQYDHKLKTTLPDMDVVVLGVDPGRSNIATVTYLADNKSKTWKLTRGAFYHKSGIKKQKKQQEKSFSDMIPRWESLRENGAALSTSRKDDISTYLKNYATFSDEWWRMALRRRESRDNFQRYIGKRKAMDSFWAGIKRNMKLDHPDLRVRVAYGSAITKLKATGPGEVAVPTGSMFASCKRLFKEEVHVTDEFKTTLMSWETGAKKECVYKIPSVQITTEGQIRLGYELLGHIPLKETPKVSYRDQLAVRVYCTRKKIQEKHRRGGLAPSLVNNKSIERYPEVRGLRFSPETSTYSDRDRSSALTIARLHCMELLGQGRPLPFCRDACC

SEQ ID NO: 1943 - protein, 617 aa, Microglena sp.
YVTVTHVHLQCQMSGNKKHFTLQLERLLSLQDSTPKRFGKWLTRRKFFATEHLPDKEELICKIFKKCVIIIFMIKRSKLFKKKISSMLEYPLKSKWTIFLDKLNSSEDQNTIAIYLFKIFVQESISREKVLQPFWTPAYKIISETLLLPIETGYVDWGSSSSNHWSQKQEDKSQFLTVQTRKLVNKSSQKIYCQSSMSSLAGKWAKEAILEERIKPLKTIQMKIFPTKKQKTILDEFINTSRYVSNKAIECVENGHKPHFPSLRDLLVTSNTKKHSGTYKKLSKEIEDLHTLKHNTVDKLDKQKIIQEINTKNSTMRDEMKEIAYEENHNLQGFETITPKKIRANAVKSVCDAYKSAFTNLNNGILKILPRTFKDDCILKISNKNTKKHKNLTIENNVDIVRYKGEYFAHILDVVVKNVKNESKDYTMCGIDPGVRSFATVYSCSILDNGKVSSYNTGDYTHRIDLLKKLNKKKSDMMTRRVVRKKQYNKMEKKKKDVVDCLHWETINHVLNHHDIVFYGDIKSQDITKGNKNKTLNQDLNDLKFYIFKNRLEYKASVLQKKVVIMNECYTTKTCSSCGTLNDDVGNKKAFTCPICNLVTGRDANASKNILMKGLLS

SEQ ID NO: 1944 - protein, 586 aa, Microglena sp.
IKCPKTLDTSKIIRGYDVMQAIQQEVQNMEGWPESVQEYVNEVREMLSVPDGSRVYDNYGKDMDFPTMVRFNYWIQTRLEDMDARRIRLMPIFNVQRVHVRLDLKTPREPVQAHVPNDQNIVELSKWEHVKNPESFMLPQRPAQKKKKSCGPGEWDAYKSVLKQYDDDVKDIKATDEYRHAKGLYDTLVNARKTVAGSFFRKPPVKNGWVFDCSICTDGVSLSMQYSKTVQVLVSDLKKTCKKPRKEEGIKIAEKYDGSLKTILPDMGIVVLGVDPGRSNIATVTYLADDKNKTWKLTRGAFYHKSGIKKQTRQKELRFADMIPMWESLRENGAALSTSRTDKISAYLSNYAKFSDEWWRLALRRRESRDNLQRYIGKRKVKDSFWAGIKRCMMKELPGMKVCVAYGSAITKLKPTGPGEVAVPTGAMFASCKRIFKEDVSVTDEFKTTLMSWETGKEKERVYKIPSVCSADVNLRLGGERFGHTKSKTMPKVADCDHLGVRLYNKRKGAQEKHRRGGFATSLVDSQKSIERYPEVRGLRFSPETCIYSDRDRSSALTIARLHCMELMGLGRPLPFAHSSSVVVDE

SEQ ID NO: 1945 - protein, 216 aa, Microglena sp.
GLVQTRLQLPVNPDKVATASIDPGVRKTMVTYSPENEESFMLGQGQASDLVKLLLVHDKMQSRLDTEKTLRSKERMKIKKLMIRIRKTIFYLKKECRDQTTNFLAARYDVLLVPQLETAKMTISAERELTTKVARQMLTLSHSVLFNRLKEKCEEYGTVFLHVLEHYTSQTCPMCGFLNQCGETYTCKNCQFTCDRDIVGAAGIFLKAVRTENPCS

SEQ ID NO: 1946 - protein, 261 aa, Microglena sp.
QDSTEVPDRTARRNIYRKGLIFKSQRQTDVWNLETADIVGGIIPDRDSSSSEQIGAYARFYMGAAPILLAHRASRGYRNLRFRRYCKKQKLIVEIADFVAPRKKSAKVLVGFGDWKGLGATPISRRTCGPLQAIRFELRSRENVIMEDIDEFRTSQRCSCCENHLCNMVALTHRKKQDGTGWECTEGRKRIHKILHCKSSQSGAPRQQSGGMLHCGKTWDRDVNASRNILMLTLHQVFGRERPLAFRRDAPRSSSTTPPPP

SEQ ID NO: 1947 - protein, 621 aa, Microglena sp.
VNLTVYKEFACTKYQNAMYGNQSFCKIGKASDALGVSRTVLRRWADNGTIRTPGNQRLFDPSSIQGYLIEQEKKTSSRQVILYARVSSHKQQPDLLRQQLFLQTHISDKHSGCEQVIEVKDVGSGLNFKRPGLLRVLGLVTAGLVSSIIVASKDRLARFGFELIEWICSQHSCSIIVLDHQDGAPEDELGKDLMSIVQVYCCRWNGRRLYKVKCQTQVEDLKAEAEPNQGSEIDAGRVCGVQPVHVQQGGGSTVGRRSTHKSVFRIRDRYVTNKVRGKGKMPNPYFKNRQWLLQCPKSVRQSAIKSALANIKACFSNLKAGNIKQFSAPFRRKKTELERGWVIEMDQKNVSKDGDKLFIFKEILGNMRYFGSKQLHKLMPEENPTHDPKVQKSRFGEYFLVLSVAARDRRAERKPVNPDKVATASIDPGVRKTMVTYSPENEESFMLGQGQASDLVKLLLVHDKLQSRLDTEKTLRSKERMKIKKLMIRIRKTIFYLKKEFRDQTTNFLAARYDVLLVPQLETAKMTISAERELTTKVARQMLTLSHSVLFNRLKEKCEEYGTVFLHVLEHYTSQTCPMCGFLNKCGETYTCKNCQFTCDRDIVGAAGIFLKAVRTENPCS

SEQ ID NO: 1948 - protein, 702 aa, Microglena sp.
TSCLERVIFFANFHIARLFENGIAVPPVNRNFFYRCIIAVSTNKCNGSTLGEDFESSRLLFDLLREPGQSKVDIRGRVKNQIIADLSILMATMASNHLWTNLERRITTYLKWKYPQIAKRLRSDIVAALIKCPTKNLDDIFKMSPHTTKLPTKLPTSRLRSAKSAVALAKKRVGRKEPEGSPLRVRLTKLQERLEKLSEAWLSSKNLRVDADNAKRFFAREVAFCLRGVLPLPSGNTFASRAHMTLPLYHKILSETIEEKRKTKNEKHRTFSLLPYKSGFTLSHIPISKMAFFYMVNECHFDSCKADVASKNHQGIWERFANLKKVETVSRKFGYRIVTDGFAVSILMNKPTCLTCSMPADAFSTRANEYVTTDEGGIVSFLNNVVVAAVDPGVTDIVTVTGLNGGTRSYSSAQYYRKGLIFKSQRQTDVWNLETADIVGGIIPDRDSSSSEQIGAYARFYMGAAPILLAHRASRGYRNLRFRRYCKKQKLIVEIADFVAPREKSAKVLVGFGDWKGLGATPISRRTCGPLQAIRFELRSRENVIMEDIDEFRTSQRCSCCENHLCNMVALTHRKKQDGTGWECTEGRKRIHKILHCKSSQSGAPRQQSGGMLHCGKTWDRDVNASRNILMLTLHQVFGRERPLAFRRDAPRSSSTTPPPDTDMGTQTVERFTKEATRNIFENLFNLLHPPTLPKSNDLQSG

SEQ ID NO: 1949 - protein, 477 aa, Microglena sp.
HEDPREPIQARVPKDPNIVELSKWKDVKDPDRFMLPLKPAFKKKKSCGPGEWEACKLSQQKYDADVNDIKDTDEYRHAKGRYDTLVNARKTVAGSFFKKPPVKTGWVFDCSICTDGVSLSMQYSKTVQVRVSDLKKTSKRSRDDEGMSVSEQYDHKLKTTLPDMGIVVLGVDPGRSNIATVTYLADDKSKTWKLTRGAFYHKSGIKKQKKQQEKRFSDMIPRWESLRENGAALSTSRTDDISAYLKNYDTFSDEWWRMALLRRESRDNFQRYIGKRKAMDSFWAGIKRNMKLDHPDLRVRVAYGSAITTLKATGPGEVAVPTGSMFASCKRLFKEEVHVTDEFKTTLMSWETGAKKECVYKIPSVQITTEGQIRLGYELLGHTPLKETPNVSYRDQLAVRVYCTRKQIQEKHRRGGLSPSLVDNNSIKRYPEVRGLRFSPETSTYSDRDRSSALTIARLHCMELLGQGRPLPFCRDA

SEQ ID NO: 1950 - protein, 309 aa, Microglena sp.
HPHLFCHLNREICNNHTPECPNKGLIFKSQRQTDVWNLETADIVGGIIPDRDSSSSEQIGAYARFYMGAAPILLAHRASRGYRNLRFRRYCKKQKLIVEIADFVAPRKKSAKVLVGFGDWKGLGATPISRRTCGPLQAIRFELRSRENVIMEDIDEFRTSQRCSCCENHLCNMVALTHRKKQDGTGWECTEGRKRIHKILHCKSSQSGAPRQQSGGMLHCGKTWDRDVNASRNILMLTLHQVFGRERPLAFRRDAPRSSSTTPPPPPDTDMGTQTVERFTKEATRNIFENLFNLLHPPTLPKSNDLQSG

SEQ ID NO: 1951 - protein, 394 aa, Microglena sp.
RYIRSYRSEQRCCLRFSTRSSDGTRSTDSGSRAFSNSAKMIRYNVFINRYLEATEDEGYAKLVNIAPIPTVKHAFITIDTDGLLGVLKDVGLNESLEKTLTNKEHWESVFDVENIRSTGKGVFTCTIDTDGIMACTHFLRAEKKKISIKDDGTAIKKHTKTLREFSESDPNVVVVANDPGRCNIAFLTWKKNKVDEKDKGGRKRKRHCEFGSKRLTRERYYVESGVFKSRGPTKKWLSNIQDCLDDLKDNSPKRTSLVSFDAYVTVMVNHWDSRWGEMSKSRWGAQRLRLYGGKKRVLARFFNEVQEDVGERKTILLSLPLVARVNFLSLQRARSRRLAIVSRGELPSLTNSVPQRSGTRTAPPSSRVCSPKKKGAWFEACYGAVPPWRTASCL

SEQ ID NO: 1952 - protein, 392 aa, Microglena sp.
TPEKQSQVPSSRNHLSRRGVFDCSICTDGVSLSMQYSKTVQVRVSDLKKTSKRSRDEEGMSVSEQYDHKLKTTLPDMGIVVLGVDPGRSNSATVTYLADDKSKAWKLTRGAFYHKSGIKKQKKQQEKRFSDMIPRWESLRENGAALSTSRKDDISAYLKNYATFSDEWWRMALRRRESRDNFQRYIGKRKAMDSFWAGIKRNMKLDHPDLRVRVAYGSAITKLKATRPGEVAVPTGSMFASCKRLFKEEVHVTDEFKTTLMSWETGAKKECVYKIPSVQITTEGQIRLGYELLGHTPLKETPKVSYRDQLVVRVYCTRKKIQEKHRRGGLAPSLVDNNSIRRYPEVRGLRFSPETSTYSDRDRSSALTIARLHCMELLGQGRPLPFFRDACC

SEQ ID NO: 1953 - protein, 674 aa, Microglena sp.
METIVNKEPPDKRTRPDRAAKIKDRKNGEENVVKCTLSRIIADKDNKDVIIKVIKERVDSVSKRTYLAGVAVNRILKEVFEGVPDAQLHTVSVPSVDQNFIRQLMVGSRQVHMETRDATVQRFFHNNYWFREKIEGREVIVKKKKQYVGAIARYDGDRNLYSHASKKYLTNFNNHYRVHLSTWIKKFVYSKENRILAKEIKDEHGIDETVFHRYLLYDIHSWGVKEDLIAIHSLLPERTKMLLKIQHSILGRDEINRQWLKSVSNSAKMIRYNVFINRYLEATEDEGYAKLVNIASIPTVKHAFITIDTDGLLGVLKDVGLIESLEKTLTNKEHWESVFDVENIRSTGKGVFTCTIDTDGVMACTHFLRAEKKKISIKDDGTAIKKQTKTLREFSESDPNVVVVANDPGRCNIAFLTWKKNKVEEKDKGGRKRKRHCKFGSKRLTRERYYVESGVFKSRGPTKKWLSNIQDCLDDLKDNSPKRTSLVSFDAYVAVMVNHWDSRWGEMSKSRWGAQRLRLYEVQEAVGERKTIVVAYGSAKFAPGGKGELSVPTTSAFKAFSDRFKGRVAVIDEFRTTKIWHKDSTTVLQSVQSEKEGRTVRGLLWCSSTMENSKLFVNRDLNAAINIHNCFTMYPIRPGILARPKKYCKLEVVVGRKIDYKLTGSLQNVVLSEV

SEQ ID NO: 1954 - protein, 619 aa, Microglena sp.
IATSSTGAFLQSVSTNKCNGSTLGEDFESSRLLFDLLREPGQSKVDIRGNVKNQIIADLSILMATMASNHLWTNLERRITTYLKWKYPQIAKRLRSDIVAAVIKCPTKNLDVIFKMSPHAAKLPTKLPTARLRSTKSAVALAKKRVGRKEPEVSPLRVRLTKLQARFEKLSEAWLSSKNLRVDEDNAKSFFARDVAFCLRGVLPLPSGNTFASRAHMTLPLYHKILSETIEERKTKNEKLRTFSLLPYKSRFTLSHIPISKMAFFYMVNECHFDSCKADVASKNHQGIWERFANLKKVETVSRKFGYRIVTDGFAVSILMNKPTCLTSSMPTDAFSTRAHEYVTTDEGGIVSFRDNVVVAAVDPGVTDIVTVTGLDGGTRSYSSAQYYRKGLIFKSQRQTDVWNLETADIVGDIIPDRDSSRSEQIGAYARFYMGAAPISRRTCGPLQAIRFELRSRENVIMEDVDEFRTSQRCSCCENRLCNMVAHTHRKKQDGTGWECTEGRKRIHKILHCKSSQSGAPRQQSGGRLHCGKTWDRDVNASRDILMLTLHQVFGRERPLAFHRDAPRSSSKTPPPPDTDMGTQTVERFTKEATRNIFENLFNLLHPPTLPKSNDLQSG

SEQ ID NO: 1955 - protein, 332 aa, Microglena sp.
ASQNSMTINSKRHCPIWVSSFWVWILVGATSLQSRIWQTTKARHGSLHAELFTTSLVSRNRKKQQEKRFSDMIPRWESLRENGAALSTSRKDDISAYLKNYATFSDEWWRMALRRRESRDNFQRYIGKRKAMDSFWAGIKRNMKLDHPNLRVRVAYGSAITKLKATGPGEVAVPTGSMFASCKRLFKEEVHVTDEFKTTLVSWETGAKKECVYKIPSVQITTEGQICLGYELLGHTPLKETPKVSYRDQLAVRVYCTRKKIQEKHRRGGLAPSLVDNKSIKRYPEVRGLRFSPETSTYSDRDRSSALTIARLHCMELLGQGRPLPFCRDACC

SEQ ID NO: 1956 - protein, 346 aa, Microglena sp.
MPADAFSTRAHEYVTTDEGGIVSFRDNVVVAAVDPGVTDIVTVTGLDGGTRSYSSAQYYRKGLIFKSQRQTDVWNLETADIVGDIIPDRDSSRSEQIGAYARFYKGAAPILLAHRASRGYRNLRFRRYCKKQKLIVEIADFVAPREKSAKVLVGFGDWKGLGATPISRRTCGPLQAICFELRSRENVIMEDVDEFRTSQRCSCCENRLCNMVALTHRKKQDGTGWECTEGRKRIHKILHCKSSQSGAPRQQSGGRLHCGKTWDRDVNASRNILMLTLHQVFGRERPLAFRRDAPRGSSKTPPPPDTDMGTQTVERFTKEATRNIFENLFNLLHPPTLPKSNDLQSG

SEQ ID NO: 1957 - protein, 592 aa, Microglena sp.
WKYPQIAKRLRSDIVAAVIKCPTKNLDVIFKMSPHVAKLPTKLPTARLRSAKSAMALAKQRVGRKEPEVSPLRVRLTKLQARFEKLSEAWLSSKNLRVDEDNAKRFFARDVAFCLRGVLPLPSGNTFAPRAHMTLPLYQKILSETIKEKRKTKNEKLRTFSLLPYKSGFTLSHIPISKMAFFYMVNECHFDSCKADVASKNHQGIWERFANLKKVETVSRKFGYRIVTDGFAVSILMNKPTCLTCSMPADAFSTRAHEYVTTDEGGILSFRDNVVVAAVDPGVTDIVTVTGLDGGTRSYSSAQYYRKGLIFKSQRQTDVWNLETVDIVGDIIPDRDSSRSEQIGAYARFYKGAAPILLAHRASRGTETSAFAGTAKKQKLIVEIADFVAPREKSAKVLVGFGDWKGLGATPISRRTCGPLQAIRFELRSRENVIMEDVDEFRTSQRCSCCENRLCNMVALTHRKKQDGTGWECTEGRKRIHKILHCKSSQSGAPRQHSGGRLHCGKTWDRDVNASRNILMLILHQVFRRERPLAFRRDAPRSSSKTPPPPDTDMGTQTVERFTKEATRNIFENLFNLLHPPTLPKSNDLQSG

SEQ ID NO: 1958 - protein, 639 aa, Microglena sp.
LWKMATKPPTVAKLKELLKLAEVPYSSKSNKDDLVRLCEDNGLIARPPPEYKTVEKMCVVKCALKKAMSLDDEEFGKFREHVDQLVNVVSRMLRRSSLVLTFHITSLLEKGLEIPDLYNMKDTYWKDWLRIGVDGIFPDEESKISYEAVKDSIGDVIGNDDADYIKSYPIYFDQVLNYAGHTLSTVVSNNAWVPLIPRLARLTSTTLNKLNAPKTLDTSKIIRGYDVMQAIQQEVQNMEGWPESVQEYVNEVREMLSVPDGSRVYDNYGKDMDFPTMVRFNYWIQTRLEDMDARRIRLMPIFNVQRVHVRLDLKTLVNLFRHMFPNDQNIVELSKWEHVKNPDSFMLPQRPAQKKKKSCGPGEWEAYKSVLKQYDDDVKDIKATDEYRHAKGLYDTLVNARKTVAGSFFRKPPVKNGWVFDCSICTDGVSLSMQYSKTVQVLVSDLKKTCKNPHKEEGIKIAEKYDGSLKTILPDMGIVVLGVDPGRSNIATVTYLADDKNKTWTLTRGAFYHKSGIKKLTRQKELRFADMIPMWESLRENGAALSTSRTDKISAYMSNYAKFSEEWWRLALRRRESRDNLQRYIGKRKVKDSFWAGIKRCMMKELPDMKVCVAYGSAITEAYWTGRSRSSHWGHVRIV

SEQ ID NO: 1959 - protein, 278 aa, Microglena sp.
ACSTAKTVQVLVSDLKKTCKNPRKEEGIKIAEKYDGSLKTILPDMGIVVLGVDPGRSNIATVTYLADDKNKTWTLTRGAFYHKSGIKKQTRQKELRFADMIPMWESLRENGAALSTSRTDKISAYLSNYAKFSEEWWRLALRRRESRDNLQRYIGKRKVKDSFWAGIKRCMMKELPDMKVCVAYGSTIMKLKPTGPGEVAVPTGGMFASCKRIFKEDVSVTDEFKTTLMSWKTGKEKERVYKIPSVCSADVKLRLGGERFGHTKSKTMPKVADCDHLG

SEQ ID NO: 1960 - protein, 459 aa, Microglena sp.
EHVKNPDSFMLPQRPAQKKKKSCGPGEWEAYKSVLKQYDDDVKDIKATDEYRHAKGLYDTLVNARKTGAGSFFRKPPVKNGLVFDSSICTDGVSLSMQYSKTVHVLVSDLKKTCKKPRKEEGIKIAEKYDGSLKTILPDMGIVVLGVDPGRSNIATVTYLADDKNKTWTLTRGAFYHKSGIKKQTRQKELRFADMIPMWESLRENGAALSTSRTDKISAYLSNYAKFSDEWWRLALRRRESRDNLQRYIGKRKVKDSFWAGIKRCMMKELPDMKVCVAYGSAITKLKPTGPGEVAVPTGAMFASCKRIFKEDVSVTDEFKTTLMSWETGKEKERVYKIPSVCSADVKLRLGGERFGHTKSKTMPKVADCDHLGVRLYNKRKGAQEKHRRGGFATSLVDSQKSIERYPEVRGLRFSPETCIYSDRDRSSALTIARLHCMELMGLGRPLPFAHSSSVVVDE

SEQ ID NO: 1961 - protein, 403 aa, Microglena sp.
SSCCRQERGPSFLAWVIRHSRASLAMDVTRTIQCCGESTLMSKVLRRKGLALTTESSATAKGVSVQMKQKGKEEVVEEGENAGYPKDANIVECKDAVGALRVGVDPGMTDIVTVASSAGRIESFSSARFSEVAGYNTSKRRTYKWNDETQDLVKSIPSPNTSNMSDLQDHVRAYLKALPILLQHRANKGYRSMRFFRYVGKQKTIEKVCDVIAPRAQTTVVGFGNWSNQGYGISRSCSGPIKEIRRCLSRRKNVLFKNVDERNTSCKCHGCFQRLVNMKADSVVWRGVCKESPIDGSITVEKQKMVVKNVKVHKVLHCRDSVKSASSNVRCGATWNRDVNAAKNILLLLTTWMDGRERPEAFCVPSPPPKTTVSIEASVSAKPTDPPGFVSSLPCYPLGQLKC

SEQ ID NO: 1962 - protein, 278 aa, Microglena sp.
SPFHLRLRAVCTTCRTMSEVTSARSRPSFNTEPNRGYRSMRFFRYVGKQKTIEKVCDLIAPKAQKKTIEEKVCDVIAPKAKKTVVGFGNWSNQGYGISRSCSGPVKEIRKCLSRRQNVLFKNVDERNTSCTCHGCFQKLVNMKADSVVWRRVQNEPSALIDGAPTTTTTTTTTTFEKQKTVVKNVKVHKVLHCRNSVKSASSNVRCGATWNRDVNAAKNLLLLLTTWMDGKERPAAFCVPSSSPTPKTTVSGEANVGAQPTDPPGSVSSLQLLSSGPA

SEQ ID NO: 1963 - protein, 531 aa, Microglena sp.
RKHFNKIVKAVVQYPDSDIDKIIPAGLVHANLIKDVVRRLRDLLPLPRGSSSTLKAHLTMRLFHHVLTELGADLKEKTTKKRPRLFSILPRKSGFTISYVPISSMTLMKLLSMGDSPLESVQWRWTSRESFHLWRKYFNVQGLETKGSRFDNRILSDGKGVSVQMKHQVGKDIAGEGGGDNAGYPKDASIEDCRDASLRQGALRVGIDPGMTDIVTIASSDGRVESFSSARFSEAAGYNTSNRRTNKWNADTQDLVKSIPSLTTSSMHDMQDHVRGYLSALPTLLQHRANRGYRSMRFFRYVGKQKTIEKVCDLIAPKAQKKTIEEKVCDVIAPKAKKTVVGFGNWSNQGYGISRSCSGPVKEIRKCLSRRQNVLFKNVNERNTSCTCHGCFQKLVNMKADSVVWRRVQNEPSALIDGAPTTTTTTTFEKQKMVVKNVKVHKVLHCCNSVKSASSNVRCGATWNRDVNAAKNLLLLLTTWMDVKERPAAICVPSSSPTPKSTVSGEANVGAQPTDPPGSVSSLQLLSSGPA

SEQ ID NO: 1964 - protein, 506 aa, Microglena sp.
RFSDHAIEDSGMIPALTCHRWLVLLINHAVAEAYLFANFHITRCLDDGDFDVKQLPHLDRNFYYRCLLAVSTSNVRKDTLGQSFNDTMVAFDALRPAGYVKVDVRPWGQVIADVSIQMATMACNSVWANVDRVVIKYLRLKHPSLKKHFKKIVKAVVQYPESKIDTIIPEGLVHAIHIKEVVSHLRALLPLPRGKQFNTRAHLTMRLFHHVLTELGADLKEKTTKKRPRLFSILPRKSGFTISYVPISSMTLMKLLSMGDSPLESVRGDGRLENHSMLWRKYFNVQGLEKKGSRFDNRILSDGKGVSVQMKHQVGKDIAGEGGGDNAGYPKDASIEDCQDASLRQGALRVGIDPGMTDIVTIASSDGRVESFSSARFSEAAGVQYQQSSHKQMECRYARPREVHFIADYRAVCTTCRTMSEVTSARSRPSFNTRANRGYRSMRFFRYVGKQKTIEKVCDLIAPKAQKKTIEEKVCDVIAPKARRPLLALATGPTRAMASVVRVLDQ

SEQ ID NO: 1965 - protein, 318 aa, Microglena sp.
NEMEYHVLEYIGQYYENDGFVVITINILLNTHLIFKSQRQTDFWNLETADIVGGIIPDRDSSSSEQIGAYARFYMGAAPILLAHRASRGYRNLRFRRYCKKQKLIVEIADFVAPREKSTKVLVGFGDWKGLGATPISRRTCGPLQAIRFELRSRENVIMEDIDEFRTSQRCSCCETRLCNMVALTHRKKQDGTGWECTEGRKRIHKILHCKSSQSGAPRQQSGGRLHCGKTWDRDVNASRNILMLTLHQVFGRERPLAFRRDAPRGSSKTPPTLDTDMGTQTVLRFTTEATRNIFENLFNLLHPPTLPKSNDLQSGCL

SEQ ID NO: 1966 - protein, 621 aa, Microglena sp.
QCIRNLHVLNIRMPCMATNASVKLARPPMPLVSPGPSSVDGRIMAQSERSGLQATNVSLTQAASKATSSSRKKKPSSRQVILYARVSSHKQQPDLLRQQLFLQTHISDKHSGCEQVIEVKDVGSGLNFKRQDFYEYWDSSRQDLYRQLLWLPKTGSQGLVSSSLNGFARSTPARSSFSITKTEPLKTSLEKTSCPSFKYIVADGTVEDATKSNAKPKLRTLKLKLNPTKAQKSMLAEFAGCSRFMYNKAVAARLGVGSTHKSVFRIRDRYVTNKVRGEGKMPNPSFKNRQWLLQCPKSVRQSAIKAALANIKACFSNLKAGNIKQFSAPFRLKKTELERGWAIEMDQKNVSKDGDKLFIFKDILGNMRYFGSKQLHKLMPEENPTHDPKVQKSRFGEYFLVLSVAARGRRAERKPVHPDKVATASIDPGVRKTMVTYSPENEESFMLGQGQASDLVKLLLFHDKLQSRLDTEKTLRSKERMKIKMQMIRIRKRIFYPKKEFRDQTTNFLAARYDVLLVPQLETAKMTISAERELTTKVARQMLTLSHSVLFNRLKEKCEEYGTVFLHVLEHYTSQTCPMCGFLNKCGETYTCKNCQFTCDRDIVGAAGIFLKAVRTENPCS

SEQ ID NO: 1967 - protein, 305 aa, Microglena sp.
EQHRYSHVSGRRQKQDMEAYTRSFFTTSLVSRNRKKQQEKRFSDMIPRWESLRENGAALSTSRKDDISAYLKNYATFSDEWWRMALRRRESRYNFQRYIGKRKAMDSFWAGIKRNMKLDHPDLRVRVAYGSAITTLKATGPGEVAVPTGSMFASCKRLFKEEVHVTDEFKTTLMSWETGAKKECVYKIPSVQITTEGQIRLGYELLGHTPLKETPKVSYRDQLAVRVYCTRKQIQEKHRRGGLAPSLVDNNLIKRYPEVRGLRFSPETSTYSDRDRSSALTIARLHCMELLGQGRPLPFCRDACC

SEQ ID NO: 1968 - protein, 518 aa, Microglena sp.
ITALHPADSVSFFCRYFRECQLKDQPHLSDRLFPSTVAQKNTGSLLMCNASCQEVSLPDGSFYRTIHSFYCSTDCSPCMPLFTISYVPISSMTLMKLLSMGDLPLESVRGDGRHENHSMLWRKYFNVQGLEKKGSRFDNRILSDGKGVSVQMKHQVGKDIAGEGGGDNAGYPKDASIEDCQDASLRQGALRVGIDPGMTDIVTIASSDGRVESFSSARFSEAAGYNTSNCRTNKWNADTQDLVKSIPSLTTSSMHDMQDHVRGYLSALPTLLQHRANRGYRSMRFFRYVGKQKTIEKVCDLIAPKAQKKTIEEKVCDVIAPKAKKTVVGFGNWSNQGYGISRSCSGPVKEIRKCLSRRQNVLFKNVDERNTSCTCHGCFQKLVNMKADSVVWRRVQNEPSALIDGAPTTTTTTTFEKQKTVVKNVKVHKVLHCRNSVKSASSNVRCGATWNRDVNAAKNLLLLLTTWMDGKERPAAFCVPSSSPTPKTTVSGEANVGAQPTDPPGSVSSLQLLSSGPA

SEQ ID NO: 1969 - protein, 688 aa, Microglena sp.
GNVGAILYHQKKKNTHPLLMGVVQEKGDDDINIRVVKKTLNSLCMDVSRHQISSSIQSMVLLINHAVAEAYLFANFHITRCLDDGDFDVKQLPHLDRNFYYRCLLAVSTSNVRKDTLGQSFNDTMVAFDALRPAGYVKVDVRPWGQVIADVSIQMATMACNSVWANVDRVVIKYLRLKHPSLKKHFKKIVKAVVQYPESKIDTIIPEGLVHAIHIKEVVSHLRALFPLPRGKQFNTKAHLTMRLFHHVLTELGEVGRVDPKDKKTKKSHPRLFSILPRKNGFTISYVPISSMTFMKLLTMGDSQLESVSGDGRYENHTMLWRKYFNVQGLETKRSRFDNRILSDGKGVSVQMKQKGKEEIVEEGENAGYPKDANIVECKDAVGALRVGVDPGMTDIVTVASSAGRIESFRSARFSEVAGYNTSKRRTYKWNDETQDLVKSIPSPNTSNMVDLQDHVRAYLKALPILLQHRANKGYRSMRFFRYVGKQKTIEKVYDVIAPRAQTTVVGFGNWSNQGYGISRSCSGSIKEIRRCLSRRKNVLFKNVDERNTSCKCHGCFQRLVNMKADSVVWRGVCKESPIDGSITVEKQKMVVKNVKVHKVLHCRDSVKSASSNVRCGATWNRDVNAAKNLLLLLTTWMDGRERPEAFCVPSPPPKTTVSIEASVSAKPTDPPGFVSSLPCYPLGQLKC

SEQ ID NO: 1970 - protein, 637 aa, Microglena sp.
CNVITRCLDDGDFDVKQLPHLDRNFYYRCILAVSISNVRNDTLDQSLKDSMVAFDALRPAGYVKVDVRPWGQVIADVSIQMATMACNSVWANVDRVVIKYLRLKHPSLKKHFKKIVKAVVQYPDSDIDKIIPAGLVHANLIKDVVRRLRDLLPLPRGKQFNARAHLTMRLFHHVLTELGEDLKEKTTKKRPRLFSILPRKSGFTISYVPISSMTLMKLLSMGDSPLESVRGNGRHENHSMLWRKYFNVQGLETKGSHFDNRILSDGKGVSVQMKPQCGKDIAGEGGGDNAGYPKDASIEDCQDASLRQGALRVGINPGMTDIVTIASSDGRVESFSSARFREAAGYNTSNRRTNKWNADTQDLVKSIPSPTTSSMHDMQDHVRGYLSALPTLLQHRANRGYRSMRFFRYVGKQKTIEKVCDLIAPKAQKKTIEEKVCDVIAPKTKKTVVGFGNWSNQGYGISRSCSGPVKEIRKCLSRRQNVLFKNVDERNTSCTCHGCFQKLVNMKADSVVWRRVQNEPSALIDGAPTTPTTFEKQKTVVKNVKVHKVLHFRNSVKSASSNVRCGATWNRDMNAAKNLLLLLTTWMDGKERPAAFCVPSSSPTPKTTVSGEANVGAQPTDPPGSVSSLQLLSSGPA

SEQ ID NO: 1971 - protein, 299 aa, Microglena sp.
NHSMLWRKYFNVQGLEKKGSRFDNRILSDGKGVSVQMKHQVGKDIVGVGGRDNAGYPKNASIEDCQDASLRQGALRVGIDPGMTDIVTIASSDGRVESFSSARFSEAAGYNTSNRRTNKWNADTQDLVKSIPSPTTSSMHDMQDHVRGYLSALPTLLQHRANRGYRSMRFFRYVGKQKTIEKVCDLIAPKAQKKTIEEKVCDVIAPKAKKTVVGFGNWSNQGYGISRSCSGPVKEIRKCLSRRQNVLFKKRRRTQHFLYLPRLLPEARQHEGRQRRLAQSSKRALRPHRRGSYNNNNNV

SEQ ID NO: 1972 - protein, 212 aa, Microglena sp.
IPRWESLRENGAALSTSRKDDISAYLKNYATFSDEWWRMALRRREFRDNFQRYIGKRKAMDSFWAGIKRNMKLDHPDLRVRVAYGSAITTLKATGPGEVAVPTGSMFASCKRLFKEEVHVTDEFKTTLMSWETGAKKECVYKIPSVQTTTEGQIRLGYELLGHTPLKETPKVSYRDQLAVRVYCTRKQNPRKTQEGWLSPLSCRQQLDQAVP

SEQ ID NO: 1973 - protein, 436 aa, Microglena sp.
RRAWKRPHVHRFKYIVADGTVEDATKSNAKPKLRTLKLKLNPTKAQKLMLAEFAGCSRFMYNKALAARLASEHSQVCLPNSRQVCDEQGEGEGKMPNPYFKNRQWLLQCPKSVRQSAIKAALANIKACFSNLKAGNIKQFSAPFRRKKTELERGWAIEMDQKNVSKDGDRLFIFKDILGNMRYFGSKQLHKLMPEENPTHDPKVQKSRFGEYFLVLSVAARDRRAERKPVHPDKVATASIDPGVRKTMVTYSPENEESFMLGQGQASDLVKLLLVHDKLQSRLDTEKTFRSKERMKIKKQMIRIRKRIFYLKKEFRDQTTNFLAARYDVLLVPQLETAKMTISAERELATKVARQMLTLSHSVLFNRLKEKCEEYGTVFLHVLEHYTSQTCPMCGFLNKCGGETYTCKNCQFTCDRDIVGAAGIFLKAVRTENPCS

SEQ ID NO: 1974 - protein, 244 aa, Microglena sp.
CLRKTRPTIQRSKNPASANISSSCLSLPGTGGAERKPVHPDKVATASIDPGVRKTMVTYSPENEESFMLGQGQASDLVKLLQVHDKLQSRLDTEKTLQSKERMKIKKQMIRIRKRIFYLKKEFRDQTTNFLAARYDVLLVPQLETAKMTISAERELTTKVARQMLTLSHSVLFNRLKEKCEEYGTVFLHVLEHYTSQTCPMCGFLNKCGGETYTCKNCQFTCDRDIVGAAGIFLKAVRPENPCS

SEQ ID NO: 1975 - protein, 813 aa, Microglena sp.
PRMEHVCDVCIKSSVMYKLCKMATKPPTVAKLKELLKLAEVAYSSKDKKDDIVRLCEDNGLIARPPPEYKTVEKMCVVKCALKKAMSLDDEEFGKFRGHVDQLVNVVSRMLRRSSLVLTFHVTRLMEGDLPIPNMYDMKDTYWKDWLRIGVDGVFPDEESIISYEAVKDVIGKVLGSDDPDYINSYPIYFDQVLNYAGHTLSTVVSNNAWVPLVPRLTRLTKATLKALGAPKTIRVYDVMRVIQQEIQEMESWPESVQEYVREVRVRLKVPDGSRLYDDYGKDMDFPTMVRFNYWMQTRLEAMGARRIRLMPIFNVQRAHVRLDMKTLVNLFRHVFPKDPNIVELSKWENVKDPDRFMLPLKPAVKKKKSCGPGEWEAYKLAQQKYDADVKDIKATDEYRHAKGRYDTLVNARKTVAGSFFKKPPVKTRWVFDCSICTDGFSLSMKYSKTVQVRVSDLKKTSKRSRDEEGMSVAEQYDHKLKTTLPDMGIVVLGVDPGRSNIATVTYLADDKSKTWKLTRGAFYHKSGIKKQKRQQEKRFTDMIPMWASLRENGAALSTSRMDDISVYLSNYATFSDEWWRLALRRRESRDNHQRYIGKRKAMDSFWAGIKRNMMMDHPDLRVRVAYGSAITKLKATGPGEVAVPTGSMFASCKRIFKEEVHVTDEFKTTLMSWETGAKKECVYKIPSVSLNAEGQISIGDEWLLCHTLLKKPPKVAERDQSAVRVYCTRKKIQEKHRKGALATSLFDVNKSIKQYPEVRGLRFSPETSTYSDRDRSSALTITRLHCMELLGLGRPLPFSRCKVRVVDGLQQT

SEQ ID NO: 1976 - protein, 348 aa, Microglena sp.
ALKQYDADVKDIKATDEYRHAKGRYDTLVNARKTVAGSFFRKPPVKNGWVFDCSICTDGVSLSMQYSKKVQVRVSDLKKTSMRSRDNEGLSVAEQYDRKLETTLTEMGIVVLGVDPGRSNIATVTYLAKGKSKTWKLTRGAFYHKSGIEKQKKQQEKRFSDMIPRWESLRENGAALSTSRKGDISAYLKNYATFSDEWWRMALRRRESRDNFQRYIGKRKAMDSFWAGIKRNMKLDHPDLRVRIAYGSAIKTMKATGPGEVAVPTGSMFASCKRLFKEEVHVTDEFKTTLMSWETGAKKECVYKIPSVQITMEGQIRLGYELLGHTPLKETPKVSYRDQVGGEGVLHT

SEQ ID NO: 1977 - protein, 464 aa, Microglena sp.
TRAHRRFYCQSSMSSLVGKWANEAILEEKIKPLKTIQMKLFPTKKQKQILDEFINTSRYVSNKAIEYVDKGHKPYFQTLRDLLVTSNTKKNSNTYKKLSKEIEDLHTLKQGTVDQSDKQKIIEEIKTKNKIMRDEMKEIAYEKNHNLQGFETFTPKEIRANAVKSVCDAYKSAFTNLKNGNIKFFKMKYKTKKNSRQTVELAPSSISFNNGILRILPNTFKYDCVLKISNKNRKKHKNLTIKNNVDIVRHKGQYVIHILDTILNNIDNETNEYTMCGVDPGVRCFATTYSCSIKNNGEVSSYNTRDYTHRIDLLKKLNKKRIDIMERKAVRKKQYNKIEKKKKNIVDCLHWETIHHVLKHNDFVFYGDIKSQDITKGNKNNTLNQDFNDLKFYIFKTRLEYKASVLKRKVVIMNECYTTKTCSNCGTLNNDVGSKKVFTCPICNLVAGRDANASKNILMKGLLS

SEQ ID NO: 1978 - protein, 375 aa, Microglena sp.
KHSGTYKKLSKEIEDLHTLKYNTVDKLDKRKIIQEINTKNKTMRDEMKEIAYEKNHNLQGFETITPKEIRANAVKSVCDAYKSAFTNLKNGNIKFFKMKYKEKKNQRQTIELDPSSISLNNGILKILPRTFKDDCILKISNKNTKKHKNQTIENNVDIVRYKGEYFAHILDVVVKNVKNESKDYTMCGIDPGVRSFATVYSCSILDNGKVSSYNTGDYTHRIDLLKKLNKKKSYMMTRRVVRKKQYNKIEKKKKDVVDCLHWETINHVLNHNHIVFYGDIKSQDITKGNKNKTLNQDFNDLKFYIFKNRLEYKASVLQKKVVIMNECYTTKTCSSCGTLNDDVGNKKVFTCPICNLITGRDANASKNVLMKGLLS

SEQ ID NO: 1979 - protein, 630 aa, Microglena sp.
ECSREPVCRSRLHQNVFGVQFVMEHGVVLVHEADQHDDVAELVDYEGDEDEERAPGRAICVVKMKLSTFIPHDWLRRKIDTLVLDMNKLLGEGYIFANFHIARLFENGIAVPPVNRNFFYRCLLAVSTNKCNGSTLGEDFESIRLLFDLLREPGQSKVDIRGNVKNQIIADLSILMATMASNHLWTNLERRITTYLKWKYPQIAKLLRSDIVAAVIKCPTKNLDVIFKMSPHVAKLPTKLPTARLCLAKSAVALAKKRVGRKEPEVSPLRVRLTKLQARFEKLSEAWLSSKNLRVDEDNAKRFFARDVAFCFRGVLPLPSGNTFASRAHMTLPLYHKILSETIEERKTKNEKLRTFSLLPYKSRFTLSHIPISKMAFFYMVNECHFDSCKADVASKNHQGIWERFANLKKVETVSRKFGYRIVTDGFAVSILMNKPTCLTCSMPADAFSTRAHEYVTTDEGGIVSFRDNVVVAAVDPGVTDIVTVTGLDGGTRSYSSAQYYRKGLIFKSQRQTDVWNLETADIVGDIIPDRDSSRSEQIGAYARFYMGAAPIILAHRASRGYRNLRFRRYCKKQKLIVEIADFVAPREKSAKVLVGFGDWKGLGATPISRRTCGPLQAIRFELRYGDTDG

SEQ ID NO: 1980 - protein, 409 aa, Microglena sp.
KSKKSHPRLFSIPSRKNGFTISYVPKSSMTFMKLLSMGDSPLESVSGDGRYENHTMLWRKYFNVQGLETKRSRFDNRILSDGKGVSVQMKQKGKEEVVEEGENAGYPKDANIVECKDAVGALRVGVDPGMTDIVTVASSAGRIESFSSARFSEVAGYNTSKRRTYKWNDETQDLVKSIPSPNTSNMVDLQDHVRAYLKALPILLQHRANKGYRSMRFFRYVGKQKTIEKVCDVIAPRAQTTVVGFGNWSNQGYGISRSCSGTIKEIRRCLSRRKNVLFKNVDERNTSCKCHGCFQRLVNMKADSVVWRGVCKESPIDGSITVEKQKMVVKNVKVHKVLHCRDSVKSASSNVRCGATWNRDMNAAKNLLLLLTTWTAEDATVTISVIPGSTPTRSAPTASLHSTIFASLG

SEQ ID NO: 1981 - protein, 289 aa, Microglena sp.
HLLQVASSLFSSARFSEVAGYNTSKRRTYKWNDETQDLVKSIPSPNTSNMSDLQDHVRAYLKALPILLQHRANKGYRSMRFFRYVGKQKTIEKVCDVIAPRAQTTVVGFGNWSNQGYGISRSCSGPIKEIRRCLSRRNNVLFKNVDERNTSCKCHGCFQRLVNMKADSVVWRGVCKESPIDGSITVEKQKMVVKNVKVHKVLHCRDSVKSASSNVRCGATWNRDVNAAKNLLLLLTTWMDGRERPEAFCVPSPPPKTTVSIEASVIAKPTDPPGFVSSLPCYPLGQLKC

SEQ ID NO: 1982 - protein, 448 aa, Microglena sp.
QCDCFHHVLTELGEVGRVDPKDKKTRKSHPRLFSTLPRKNGFTISYVPISSMTFMKLLSMGDLPLKSVSGDGRYENHTMLWRKYFNVQGLETKRSRFDNRILSDGKGVSVQMKQKGKEEVVEEGENAGYPKDANIVECKDAVGALRVGVDPGMTDIVTVASSAGRIESFSSARFSEVAGYNTSKRRTYKWNDETQDLVKSIPSPDTSNMSDLQDHVRAYLKALPILLQHRANKGYRSMRFFRYVGKQKTIEKVCDVIAPRAHTTVVGFGNWSNQGYGISRSCSGPIKEIRRCLSRRNNVLFKNVDERNTSCKCHGCFQRLVNMKADSVVWRGVCKESPIDGSITVEKQKMVVKNVKVHKVLHCRDSVKSASSNVRCGATWNRDVNAAKNLLLLLTTWMDGRERPEAFCVPSPPPKTTVSIEASVSAKPTDPTGFVSSLPCYPLGQLKC

SEQ ID NO: 1983 - protein, 425 aa, Microglena sp.
KNKKKSPPSVQYPSSQERLHNFVRPISSMTFMKLLSMGDSPLESVSGDGRYENHTMLWRKYFNVQGLETKRSRFDNRILSDGKGVSVQMKQKGREEVVEEGENAGYPKDANIVECKDAVGALRVGVDPGMTDIVTVASSAGRIESFSSARFSEVAGYNTSKRRTYKWNDETQDLVKSIPSPDTSNLSDLQDHVRAYLKALPILLQHRAIKGYRSMRFFRYVGKQKTIEKVCDVIAPRAQTTVVGFGNWSNQGYGISRSCSGPIKEIRRCLSRRNNVLFKNVDERNTSCKCHGCFQRLVNMKADSVVWRGVCKESPIDGSITVEKQKMVVKNVKVHKVLHCRDSVKSASSNVRCGATWNRDVNAAKNLLLLLTTWMDGRERPEAFCVPSPPPKTTVSIEASVSAKPTDPTGFVSSLPCYPLGQLKC

SEQ ID NO: 1984 - protein, 587 aa, Microglena sp.
IKCPEDAGHIEDHSGGDDVMQAIQQEVQNMEGWPESVQEYVNEVREMLSVPDGSRVYDNYGKDMDFPTMVRFNYWIQTRLEDMDARRIRLMPIFNVQRVHVRLDLKTLVNLFRHMFPNDQNIVELSKWEHVKNPDSFMLPQRPAQKKKKSCGPGEWEAYKSVLKQYDDDVKDIKATDEYRHAKGLYDTLVNARKTVAGSFFRKPPVKNGWVFDCSICTDGVSLSMQYSKTVQVLVSDLKKTCKKPRKEEGIKIAEKYDGSLKTILPDMGIVVLGVDPGRSNIATVTYLADDKNKTWTLTRGAFYHKSGIKKQTRQKELRFAVMIPMWESLRENGAALSTWRTDKISAYLSNYAKFSDEWWRLALRRRESRDNLQRYIGKRKVKDSFWAGIKRCMMKELPDMKVCVAYGSAITKLKPTGPGEVAVPTGAMFASCTRIFKEDVSVTDEFKTTLMSWETGKEKERVYKIPSVCSADVKLRLGGERFGHTKSKTMPKVADCDHLGVRLYNKRKGAQEKHRRGGFATSLVDSQKSIERYPEVRGLRFSPETCIYSDRDRSSALTIARLHCMELMGLGRPLPFAPSSSVVVDE

SEQ ID NO: 1985 - protein, 621 aa, Microglena sp.
QCIRNLHVLNIRMPCMATKASVKLARPPMPLVSPGPSSVDGRIMARSERSGLQATNVSLTQAASKATSLSRKNNPAVVKSFSTHVCPHTNNNPTCSDSNCSCKPIFLTNIPDASKSLKSRTSDQGSTSSAQDFYEYWDSSRQDLYRQLLWLPKTGSQGLVSSSLNGFARSTPARSSFSITKTEPLKTSLEKTSCPSFKYIVADGTVEDATKSNAKPKLRTLKLKLNPTKAQKSMLAEFAGCSRFMYNKAVAARLGVGSTHKSVFRIRDRYVTNKVRGKGKMPNPYFKNRQWLLQCPKSVRQSAIKSALANIKACFSNLKAGNIKQFSAPFRRKKTELERGWVIEMDQKNVSKDGDKLFIFKDILGNMRYFGSKQLHKLMPEENPTHDPKVQKSRFGEYFLVLSVAARDRRAERKPVNPDKVATASIDPGVRKTMVTYSPENEESFMLGQGQASDLVKLLLVHDKLQSRLDTEKTLRSKERMKIKKLMIRIRKTIFYLKKEFRDQTTNFLAARYDVLLVPQLETAKMTISAERELTTKVARQMLTLSHSVLFNRLKEKCEEYGTVFLHVLEHYTSQTCPMCGFLNKCGETYTCKNCQFTCDRDIVGAVGIFLKAVRTENPCS

SEQ ID NO: 1986 - protein, 472 aa, Microglena sp.
IKCPEDAGHIEDHSGYDVMQAIQQEVQNMEGWPESVQEYVNEVREMLSVPDGSRVYDNYGKDMDFPTMVRFNYWIQTRLEDMDARRIRLMPIFNVQRVHVRLDLKTLVNLFRHMFPNDQNIVELSKWEHVKNPDSFMLPQRPAQKKKKSCGPGEWEAYKSVLKKYDDDVKDINATDEYRHAKGLYDTLVNARKTVAGSFFRKPPVKNGWVFDCSICTDGVSLSMQYSKTVQVLVSDLKKTCKKPRKEEGIKIAEKYDGSLKTILPDMGIVVLGVDPGRSNIATVTYLADDKNKTWTLTRGAFYHKSGIKKQTRQKELRFADMIPMWESLRENGAALSTSRTDKISAYLSNYAKFSDEWWRLALRRRESRDNLQRYIGKRKVKDSFWAGIKRCMMKELPDMKVCVAYGSAITKLKPTGPGEVAVPTGAMFASCKRIFKEDVSVTDEFKTTLMSWETGKEKERVYKIQVFVQQT

SEQ ID NO: 1987 - protein, 436 aa, Microglena sp.
EEKKSCGPGELEAYKLAQQKYDADVNDIKDTDEYRHAKGRYDTLVNARKTVAGSFFKKPPVKTGWVFDCSICTDGVSLSMQYSKTVQVRVSDLKKTSKRSRDDEGMSVSEQYDHKLKTTLPDMGIVVLGVDPGRSNIATVTYLADDKSKTWKLTRGAFYHKSGIKKQKKQQEKRFSDMIPRWESLRENGAALSTSRTIDISAYLKNYDTFSDEWWRMALLRRESRDNFQRYIGKRKAMDSFWAGIKRNMKLDHPDLRVRVAYGSAITTLKATGPGEVAVPTGSMFASCKRLFKEEVHVTDEFKTTLMSWETGAKKECVYKIPSVQITTEGQIRLGYELLGHTPLKETPNVSYRDQLAVRVYCTRKQIQEKHRRGGLAPSLVDNNSIKRYPEVRGLRFSPETSTYSDRDRSSALTIARLHCMELLGQGRPLPFCRDA

SEQ ID NO: 1988 - protein, 615 aa, Microglena sp.
QCIRNLHVLNIRMPCMATNASVKLARSPMPVVSPGPSSVDGRIMARSGLQATNVSLTQAASQATSSSRKKKPAVVKSFSTHVCPHTNNNPTCSDSNCSCKPIFLTNIPDASKSRTSDQGSTSSSLDFYEYWDSSRQDLYRQLLWLPKTGTQGLVSSSFNGFAHSTPTRSSFSITKTEPLKTSLEKNLMSIVQVYSYRWNGRRRYKVKCQTQVEDLKAEAEPNQGSEIDAGRVCGVQPVHVQQGGGSTVGRRSTHKSVFRIRDRYVTNKVRGKGKMPNPYFKNRQWLLQCPKSVRQSAIKSALANIKACFSNLKAGNIKQFSAPFRRKKTELERGWVIEMDQKNVSKDGDKLFIFKEILGNMRYFGSKQLHKLMPEENPTHDPKVQKSRFGEYFLVFSVAARDRRAERKPVNPDKVATASIDPGVRKTMVTYSPENEESFMLGQGQASDLVKLLLVHDKLQSRLDTEKTLRSKERMKIKKLMIRIRKTIFYLKKEFRDQTTNFLAARYDVLLVPQLETAKMTISAERELTTKVARQMLTLSHSVLFNRLKEKCEEYGTVFLHVLEHYTSQTCPMCGFLNKCGETYTCKNCQFTCDRDIVGAAGIFLKAVRTENPCS

SEQ ID NO: 1989 - protein, 801 aa, Microglena sp.
PRMEHVCDVCIKSSVMYKLCKMATKPPTVAKLKELLKLAEVAYSSKDKKDDIVRLCEDNGLIARPPPEYKTVEKMCVVKCALKKAMSLDDEEFGKFREHVDQLVNVVSRMLRRSSLVLTFHVTRLMEGDLPIPNMYDMKDTYWKDWLRIGVDGVFPDEESRISYEAVKDVIGKVLGSDDPDYINSYPIYFDQVLNYAGHTLSTVVSNNAWVPLVPRLTRLTKATLNALKAPKTIRVYDVMRVIQQEIQEMESWPESVQEYVREVRVRLKVPDGSRLYDDYGKDMDFPTMVRFNYWMQTRLEAIGARRIRLMPIFNVQRAHVRLDMKTLVNLFRHVFPKDPNIVELSKWKDVKDPDRFMLPLKPAVKKKKSCGPGEWEAYKLVQQKYDADVNDIKDTDEYRHAKGRYDTLVNARKTVAGSFFKKPPVKTGWVFDCSICTDGVSLSMQYSKTVQVRVSDLKKTSKRSRDDEGMSVSEQYDHKLKTTLPDMGIVVLGVDPGRSNIATVTYLADDKSKTWKLTRGAFYHKSGIKKQKKQQEKRFSDMIPRWESLRENGAALSTSRTDDISAYLKNYDTFSDEWWRMALLRRESRDNFQRYIGKRKAMDSFWAGIKRNMKLDHPDLRVRVAYGSAITTLKATGPGEVAVPTGSMFASCKRLFKEEVHVTDEFKTTLMSWETGAKKECVYKIPSVQITTEGQIRLGYELLGHTPLKETPNVSYRDQLAVRVYCTRKQIQEKHRRGGLAPSLVDNNSIKRYPEVRGLRFSPETSTYSDRDRSSALTIARLHCMELLGQGRPLPFCRDA

SEQ ID NO: 1990 - protein, 394 aa, Microglena sp.
HARERPKNSRRFLLQETTCQDGWVFDCSICTDGVSLSMQYSKTVQVRVSDLKKKSKRSRDDEGMSVSEQYDHKLKTTLPDMGIVVLGVDPGRSNIATVTYLADDKSKTWKLTRGAFYHKSGIKKQKKQQEKRFSDMIPRWESLRENGAALSTSRTDDISAYLKNYDTFSDEWWRMALLRRESRDNFQRYIGKRKAMDSFWAGIKRNMKLDHPDLRVRVAYGSAITTLKATGPGEVAVPTGSMFASCKRLFKEEVHVTDEFKTTLMSWETGAKKECVYKIPSVQITTEGQIRLGYELLGHTPLKETPKVSYRDQLAVRVYCTRKQIQEKHRRGGLAPSLVDNNSIKRYPEVRGLRFSPETSTYSDRDRSSALTIARLHCMELLGQGRPLPFCRDA

SEQ ID NO: 1991 - protein, 418 aa, Microglena sp.
PCLCTTRYCRRPSKKKRKTKNEKHRTFSLLPYKSGFTLSHIPISKMAFFYMVNECHFDSCKADVASKNHQGIWERFANLKKVETVSRKFGYRIVTDGFAVSILMNKPTCLTCSMPAGAFSTRAHEYLTTDEGGIVSFLDNVVVAAVDPGVTDIVTVTGLNGGTRSYSSAQYYRKGLIFKSQRQTDVWNLETADIVGGIIPDRDSSSSEQIGAYARFYMGAAPILLAHRASRGYRNLRFRRYCKKQKLIVEIADFVAPRKKKSAKVLVGFGDWKGLGATPISRRTCGPLQAIRFELRSRENVIMEDIDEFRTSQRCSCCENHLCNMVALTHRKKQDGTGWECTEGRKRIHKILHCKSSQSGAPRQQSGGMLHCGKTWDRDVNASRNILMLTLHQVFGRERPLAFRRDAPRSSSTTPPHP

SEQ ID NO: 1992 - protein, 251 aa, Microglena sp.
TDWCVCQVLHGCRPNSSCPSCFEGYRNLRFRRYCKKQKLIVEIADFVAPREKSAKVLVGFGDWKGLGATPISRRTCGPLQAIRFELRSRGNVIMEDVDEFRTSQRCSCCENRLCNMVALTHRKKQDGTGWERTEGRKRIHKILHCKSSQSGAPRQQSGVRLHCGKTWDRDVNASRNILMLTLHQVFGRERPLAFRQDAPRSSSRTPPPPDTDMGTQTVERFTKEATRNIFENLFNLLHPPTLPKSNDLQSG

SEQ ID NO: 1993 - protein, 825 aa, Microglena sp.
PRMEHVCDVCIKSSVMYKLCKMATKPPTVAKLKELLKLAEVAYSSKDKKDDIVRLCEDNGLIARPPPEYKTVEKICVMKCALKKAMSLDDEEFGKFRGHVDQLVNVVSRMLRRSSLVLTFHVTRLMEGDLPIPNMYDMKATHRKDWLRIGVDGVFPDEESRISYKAVKDVIGKVLGSDDPDYINSYPIYFDQVLNYAGHTLSTVVSNNAWVPLVPRLTRLTKDTLKALGAPKTIRVYDVMRVIQQEIQEMESWPESVQEYVREVRVRLKVPDGSRLYDDYGKDMDFPTMVRFNYWMQTRLEDIGARRIRLMPIFNVQRAHVRLDMKTLVNLFRHVFPKDPNIVELSKWENVKDPDRFMLPLKPSVKKKKSCGPGEWEAYKLAQQKYDADVKDIKATDEYRHAKGRYDTLVNARKTVAGSFFEKPPVKTGWVFDCSICTDGVSLSMQYSNTVQVRVSDLKKTSKRSRDEEGMSVSEQYDHKLKTTLPDMGIVVLGVDPGRSNIATVTYMADDKSKTWKLTRGAFYHKSGIKKQKKQQEKRFSDMIPRWESLRENGAALSTSRKDDILAYLKNYATFSDEWWRMALRRRESRDNFQRYIGKRKAMNSFWAGIKRNMKLDHPDLRVRVAYGSAITKLKATGPGEVAVPTGSMFASCKRLFKEEVHVTDEFKTTLMSWETGAKKECVYKIPSLQITTEGQIRLGYELLGHTPLKETPKVSYRDQLAVRVYCTRKKIQEKHRRGGLAPSLVDNNSIKRYPEVRGLRFSPETSTYSDRDRSSALTIARLHCMELLGQGRPLPFCRDACCWATKKYDGVPLQCGLLHHKVTP

SEQ ID NO: 1994 - protein, 228 aa, Microglena sp.
ISNQDLEPPERLASLRHQHQGITNPLHTMFRNQSKSAGRQERPLIVIAYGSAKSAPGGKGELSVPTTSAFKAFSDRFKGRVAVIDEFRTTKIWHKDSTTVLQSVQSEKEGRTVRGLLWCSSTMENSKLFVNRDLNAAINIHNCFTMYPIRPGILARPKKYCKLEVVVGRKIDYKLTGFFTERSVERSVGDKHIQEDFGGLGILCNIIPLSECKANGINMYLRVTRATA

SEQ ID NO: 1995 - protein, 206 aa, Microglena sp.
YVGKQKTIEKVCDVIAPRAQTTVVGFGNWSNQGYGISRSCSGPIKEIRRCLSRRKNVLFKNVDERNTSCKCHGCFQRLVNMKADSVVWRGVCKESPIDGSITVEKQKMVVKNVKVHKVLHCRDSVKSASSNVRCGATWNRDVNAAKNLLLLLTTWMDGRERPGAFCVPSPPPKTTVSIEASVSAKPTDPPGFVSSLPCYPLGQLKC

SEQ ID NO: 1996 - protein, 460 aa, Microglena sp.
IGVLHTLSPLSGVLSKLIKPSVKKKKSCGPGEWEAYKLAQQKYDADVKDIKATDEYRHAKGRYDTLVNARKTVAGSFFKKPPVKTGWVFDCSICTDGVSLSMQYSKTVQVRVSDLKKTSKRSRDEEGMSVSEQYDHKLKTTLPDMGIVVLGVDPGRSNIATVTYLADDKSKTWKLTRGAFYHKSGIKKQKKQQEKRFSDMIPRWESLRENGAALSTSRKDDISAYLKNYATFSDEWWRMALRRRESRDNFQRYIGKRKAMDSFWAGIKRNMKLDHPDLRVRVAYGSAITKLKATGPGEVAVPTGSMFASCKRIFKEEVHVTDEFKTTLMSWETGAKKECVYKIPSVQITTEGQIRLGYELLGHTPLKETPKVSYRDQLAVRVYCTRKKIQENHRRGGLAPSLVDNKSIKRYPEVRGLRFSPETSTYSDRDRSSALTIARLHCMELLGQRRPLPFCRDACC

SEQ ID NO: 1997 - protein, 242 aa, Microglena sp.
VQHRYSHVSGRRQKQDMEAHTRSFLPQVWYQKTEKNSKEKRFSDMIPRWESLRDNGAALSTSRTDDISAYLKNYATFSDEWWRMALRRRESRDNFQRYIGKRKAMDSFWAGIKRNMKLDHPDLRVRVAYGSAITKLKATGPGEVAVPTGSMFASCKRLFKEEVHVTDEFKTTLIVFGKRRQEGMCLQDSKCPNNHGRSDSSRLRVVGSHPLKETPKVSYRDQLAVRVYCTRKKIQENTGGVA

SEQ ID NO: 1998 - protein, 258 aa, Microglena sp.
GGRKRKRHCEFGSKRLTRERYYVESGVFKSRGPTKKWLSNIQECLDNLKDNSPKRTSLVSFDAYVTVMVNHWDSRWGEMSKSRWGAQRLRLYGGKKRVLARFFNEVQEDVGERKTIVVAYGSAKFAPGGKGELSVPTTSAFKAFSDRFKGRVAVIDEFRTTKIWHKDSTTVLQSVQSEKKGRTVRGLLWCSSTMENSKLFVNRDLNAAINIHNCFTMYPIRPGILARPKKYCKLEVVVGRKIDYKLTGSLQNAVSSEV

SEQ ID NO: 1999 - protein, 613 aa, Microglena sp.
WKDWLRIGVDGVFPDEESKISYEAVKDIIGKVLGSDDPDYINSYPIYFDQVLNYAGHTLSTVVSNNAWVPLVPRLTRLTKATLKALGAPKTIRVYDVMRVLQQEIQEMESWPESVQEYVREVRVRLKVPDGSRLYDDYGKDMDFPTMVRFNYWMQTRLEAIGARRIRLMPIFNVQRAHVRLDMKTLVNLFRHVFPKDPNIVELSTWENVNDPDRFMLPLKPAVKKKKSCGPGEWEAYKLAQQKYDADVKDIKATDEYRHAKGRYDTLVKARKTVAGSFFKKPPVKTGWVFDCSICTDGVSLSMQYSKTVQVRVSDLKKTSKRSRDEEGMSVSEQYDHKLKTTLPDMGIVVLGVDPGRSNIASVTYLADDKSKTWKLTRGAFYHKSGIKKQKKQQEKSFSDMIPRWESLRENGAALSTSRKDDISAYLKNYATFSDEWWRMALRRRESRDNFQRYIGKRKAMDSFGAGIKRNMKLDHPDLRVRVAYGSAITKLKATGPGEVAVPMGSMFASCKRLFKEEVHVTDEFKTTLMSWETGAKKECVYKIPSVLITTEGQIRLGYELLGHTPLKETPKVSYRDQLAVRVYCTRKKIQENTQEGWLSPLSCRQQLDQAVP

SEQ ID NO: 2000 - protein, 626 aa, Microglena sp.
STTQLQRHTYSQTFISQRCLDDGDFDVKQLPHLDRNFYYRCLLAVSTSNVRKDTLGQSFNDTMFAFDALRPAGYVKVDVRPWGQVIADVSIQMATMACNSVWANVDRVVIKYLRLKHPSLKKHFKKIVKAVVQYPESKIDTIIPEGLVHAIHIKEAVSHLRALFPLPRGKQFNTRAHLTMRLFHHVLTELGEVGRVDPKDKKTRKSHPCLFSILPRKNGFTISYVPISSMTFMKLLSMGDSPLESVSGDGRYENHTMLWRKYFNVQGLETKRSRFDNRILSDGKGVSVQMKQKGKEEVAEEGENAGYPKDANIVECKDAVGALRVGVDPGMTDIVTVASSAGRIESFSSARFSEVAGYNTSKRRTYKWNDETQDLVKSIPSPNTSNMSDLQDHVRAYLKALPILLQHRANKGYRSMRFFRYVGKQKTIEKVCDVIAPRAQTTVVGFGNWSNQGYGISRSCSGPIKEIRRCLSRRKNVLFKNVDERNTSCKCHGCFQRLVNMKADSVVWRGVCKESPIDGSITVEKQKMVVKNVKVHKVLHCRDSVKSASSNVRCGATWNRDVNAAKNLLLLLTTWMDGRERPEAFCVPSPPPKTTVSIEASVSAKPTDPPGFVSSLPCYPLGQLKC

SEQ ID NO: 2001 - protein, 340 aa, Microglena sp.
RRGIKIAEKYDGSLKTILPDMGIVVLGVDPGRSNIATVTYLADDKNKTWTLTRGAFYHKSGIKKQTRQKELRFADMIPMWESLRENGAALSTSRTDKISAYLSNYAKFSEEWWRLALRRRESRDNLQRYIGKRKVKDSFWAGIKRCMMKELPDMKVCVAYGSAITKLKPTGPGEVAVPTGAMFASCKRIFKEDVSVTDEFRTTLMSWETGKEKERVYKIPSVCSADVKLRLGGERFGHTKSKTMPKVADCDHLGVRLYNKRKRAQEKHRRGGFATSLVDSQKSIERYPEVRGLRFSPETCIYSDRDRSSALTIARLHCMELMGLGRPLPFAHSSSVVVDE

SEQ ID NO: 2002 - protein, 261 aa, Microglena sp.
RRRKRRLSKDANIVECKDAVGALRVGVDPGMTDIVTVASSAGRIESFSSARFSEVAGYNTSKRRTYKWNDETQDLVKFIPSPNTSNMVDLQDHVSAYLKALPILLQHRANKGYRSMRFFRYVGKQKTIEKVCDVIAPRAQTTVVGFGNWSNQGYGISRSCSGPIKEIRRCLSRRKNVLFKNVDERNTSCKCHGCFQRLVNMKADSVVWRGVCKESPIDGSITVEKQKMVVKTSRSTKYCTVETVSKAHHPMCAVVQPGTET

SEQ ID NO: 2003 - protein, 312 aa, Microglena sp.
HLLTVESSLFSSARFSEAAGYNTSNRRTNKWNADTQDLVKSIPSPTTSSMHDMQDHVRGYLSALPTLLQHRANRGYRSMRFFRYVGKQKTIEKVCDLIAPKAQKKTIEEKVCDVIAPKAKKTVVGFGNWSNQGYGISRSCSGPVKEIRKCLSRRQNVLFKNVDERNTSYTCHGCFQKLVNMKADSVAWRRVQNEPSALIDGAPTTTTTFEKQKTVVKNVKVHKVLHCRNSVKSASSNVRCGATWNRDVNAAKNLLLLLTTWMDGKERPAAFCVPSSSPTPKTTVSGEANVGAQQSDPPGSVSSLQLLSSGPA

SEQ ID NO: 2004 - protein, 466 aa, Microglena sp.
WICSKHSCSKHSCSKHSCSIIVLDHQDGAPEDELGKDLMSIVRVYCCRWNGRRRYKVKCQTQVEDLKAEAEPNKGSEIDAGRVCRVQPVHVQQGGAARLGVGSTHKSVFRIRDRYVTNKVRGEGRMPNPYFKNRQWLLQCPKSVRQSAIKAALANIKACFSNLKAGNIKQFSAPFRRKKTELERGWVIEMDQKNVSKDGDKLFIFKDILGNMRYFSSKQLHKLMPELNPTHDPKVHKSRFGEYFLVLSVAARDRRAERKPVHPDKVATASIDPSVRKTMVTYSPENEESFMLGQGQASDLVKLLLVHDKLQSRLDTEKTLRTKERMKIKMQMIRIRKRIFYLKKEFRDQTTNFLAARYNVLLVPQLETAKMTISSERELTTKVARQMLTLSHSVLFNRLKEKCEEYGTVFLHVLEHYTSQTCPMCGFLNKCGETYTCKNCQFTCDRDIVGAAGIFLKAVRTENPCS

SEQ ID NO: 2005 - protein, 621 aa, Microglena sp.
QCIRNLHVLNVRMPCMATNASVKLARPPMPLVSPGPSSVDGRIMARSERSGLQATNVSLTQAASKATSSSRKKKPAVVKSFTTHVCPHTNNNPTCSDSNCSCKPIFLTNIPDASKSSKSRTSDQGSTSSAQDFYEYWDSSRQDLYRQLLWLPKTGSQGLVSSSLNGFARSTPARSSFSITKTEPLKTSLEKTSCPSFKYIVADGTVEDATKSNAKPKLRTLKLKLNPTKAQKSMLAEFAGCSRFMYNKAVAARLGVGSTHKSVFRIRDRYVTNKVRGEGKMPNPYSKNRQWLLQCPKSVRQSAIKAALANIKACFSNLKAGNIKQFSAPFRRKKTELERGWAIEMDQKNVSKDGDKLFIFKDILGNMRYFGSKQLHKLIPEENPTHDPKVQKSRFGEYFLVLSVAARDRRAERKPVHPDKVATASIDPGVRKPMVTYSPENEESFMLGQGQASDLVKLLLVHDKLQSRLDTEKTLRSKERMKIKMQMIRIRKRIFYLKKEFRDQTTNFLAARYDVLLVPQLETAKMTISAERELTTKVARQMLTLSHSVLFNRLKEKCEEYGTVFLHVLEHYTSQTCPMCGFLNKCGETYTCKNCQFTCDRDIVGADGIFLKAVRTENPCS

SEQ ID NO: 2006 - protein, 317 aa, Microglena sp.
GREEKISIKDDGTAIKKQTKTLCEFSESDPNVVVVANDPGRCNIAFLTWKKNKVEEKDKGGRKRKRHCEFGSKRLTRERYYVENGVFKSRGPTKKWLSNIQDCLDDLKDNSPKRTSLVSFDAYVTVMVNHWDSRWGEMSKSRWGAQRLRLYGGKKRVLARFFNEVQADVGERKTIVIAYGSAKFAPGGKGELSVPTTSAFKAFSDRFKGQVAVIDEFRTTKIWYKDSTTVLQSVQSEKEGRTVRGLLWCSSTMENSKLFVNRDLNAAINIHNCFTMYPIRPGILARPKKYCKLEVVVGRTIDYKLTGSLHNAVSSEV

SEQ ID NO: 2007 - protein, 803 aa, Microglena sp.
PRMEHVSDVCIKSSVMYKLCKMATKPPTVAKLKELLKLAEVAYSSKDKKDDIVRLCEDNGLIARPPPEYKTVEKMCVVKCALKKAMSLDDEEFGKFREHVDQLVNVVSRMLRRSSLVLTFHVTRLMEGDLPIPNMYDMKDTYWKDWLRIGVDGVFPDEESRISYESVKDVIGKVLGSDDPDYINSYPIYFDQVLNYAGHTLSTVVSNNAWVPLVPRLTRLTKATLNALKAPKTIRVYDVMRVIQQEIQEMESWPESVQEYVREVRVRLKVPDGSRLYDDYGKDMDFPTMVRFNYWMQTRLEAIGARRIRLMPIFNVQRAHVRLDMKTLVNLFRHVFPKDPNIVELSKWKDVKDPDRFMLPLKPAVKKKKLCGPGEWEAYKLAQQKYDADVNDIKDTDEYIHAKGRYDTLVNARKKVAGSFFKKPPVKTGWVFDCSICTDGVSLSMQYSKTVQVRVSDLKKTSKRSRDDEGMSVSEQYDHKLKTTLPDMGIVVLGVDPGRSNIATVTYLADDKSKTWKLTRGAFHHKSGIKKQKKQQEKRFSDMIPRWESLRENGAALSTSRTDDISAYLKNYATFSDEWWRMALLRRESRDNFQRYIGKRKAMDSFWAGIKRNMKLDHPDLRVRVAYGSAITTLKATGPGEVAVPTGSMFASCKRLFKEEVHVTDEFKTTLMSWETGAKKECVYKIPSVHITTEGQIRLGYELLGHTPLKETPNVSYRDQLAVRVYCTRKQIQEKHRRGGLAPSLVDNNSIKRYPEVRGLRFSPETSTYSDRDRSSALTIARLHCMELLGQGRPLPFCRDACC

SEQ ID NO: 2008 - protein, 325 aa, Microglena sp.
WLVPTFLGPRRKRFQSRTTERRLRSRPRLSASFSESDPNVVVVANDPGRCNIAFLTWKKNKVEEKDNGGRKRKRHCEFGSKRLTRERYYVESGVFKSRGPTKKWLSNIQDCLDDLKDNSPKRTSLESFDAYVTVMVNHWDSRWGEMSKSRWGAQRLRLYGGKKRVLARFFNEVQADVGERKTIVIAYGSSKFAPGGKGELSVPTTSAFNAFSDRFKGRVAVIDEFRTTKIWHKDSTTVLQSVQSEKKGRTVRGLLWCSSTMENSKLFVNRDLNAAINIHNCFTMYPTRPGILARPKKYCKLEVVVGRTIDYKLTGSLQNAVSSEV

SEQ ID NO: 2009 - protein, 443 aa, Microglena sp.
DSALDPRTGRDQPTVAQERFQQRQDDPVQRLYQSIPRGHRGRGLRQAGQHRSHPNSQARLHHDRHPTAYWASSRTWVSSRVSKKTLTNKEHWESVFDVENIRSNGKGVFTCTIDTDGVMACTHFLRAEKKKISIKDDGTAIKKQTKTLREFSESDPNVVVVANDPGRCNIAFLTWKKNKVEEKDKGGRKRKRHCEFRSKRLTRERYYVESGVFKSRGPTKKWLSNIQDCLDDLKDNSPKRTSLVSFDAYVTVMVNHWDSRWGEMSKSRWGAQRLRLYGGKKRVLARFFNEVQEDVGERKTIVVAYGSAKFAHGGKGELSVPTTSAFKAFSDRFKGRVAVIDEFRTTKIWHKDSTTVLQSVQSEKEGRTVRGLLWCSSTMENSKLFVNRDLNAAINIHNCFTMYPIRPGILARPKKYCKLEVVVGRKIDYKLTGSLQNAVSSKV

SEQ ID NO: 2010 - protein, 242 aa, Microglena sp.
EQHRYSHVSGRRQKQDMEAYTRSFFTTSLVSRNRKNSKKKRFSDMIPRWESLRENGAALSTSRKDDISAYLKNYATFSDEWWRMALRRRESRDNFQRYIGKRKAMDSFWAGIKRNMKLDHPDLRVRIAYGSAIKTMKATGPGEVPVPTGSMFASCKRLFKEEVHVTDEFKTTLMSWETGAKKECVYKIPSVQITTEGQIRLGYELLGHTPLKETPKVSYLDQLAVRVYCTRKKSMKNTGGVA

SEQ ID NO: 2011 - protein, 381 aa, Microglena sp.
PVKTGWVFDCSICTDGVSLSMQYSKTVQVRVSDLKKTSKRSRDEEGMSVAEQYDHKLKTTLPDMGIVVLGVDPGRSNIATVTYLADDKSKTWKLTRGAFYHKSGIKKQKKQQEKRFSDMIPRWESLRENGAALSTSRKDDISAYLKNYATFSDEWWRMALRRRESRDNFQRYIGKRKAMDSFWAGIKRNMKLDHPDLRVRIAYGSAIKTMKATGPGEVAVPTGSMFASCKRLFKEEVHVTDEFKTTLMSWENGAKKECVYKIPSVSLNAEGQIRLGDEWFCHTLLKKPPKVAERDQLAVRVYCARKKIQEKHRRGGLAPSLVDNQSIKRYPEVKGLRFSPETSTYSDRDRSSALTIARLHCMELLGLGRPLPFSLCKAACC

SEQ ID NO: 2012 - protein, 285 aa, Microglena sp.
KNKKSHPRLFSILPRKNGFTISYVPISSMTFMKLLSMGDSPLQSISGDGRYENHTMLWRKYFDVQGLETKRSRFDNRILSDGKGVSVQMKQKAKEEVVEEGENAGYPKNANIVECKDAVGALRVGVDPGMTDIVTVASSAGRIEYFSFSEVAGYNTSKRRTYKWNDETQDLVKSIPSPNTSNMVDLQDHVRAYLKALPILLQHRANKGYRSMRFFRYVGKQKTIEKVCDVIAPRAQTTVVGFGNWSNQGYGISRSCSGPIKEIRRCLSRRKNVLFKKRRRTQHFL

SEQ ID NO: 2013 - protein, 713 aa, Microglena sp.
RETRRGFFSKVIEYNFWTLIQGNGDKMETIVNKEPPDKRTLPDGASKIKDRNNGEENVVKCTLSRIIADKDNKDVIIKVIKERVDSVSKRTYLAGVAVNRILKEVFKGVPDAQLHTVSVPSVDQNFIRQLMVGSRQAHMETRDATVERFFHNNYWFREKIEGREVIVKKKKQYVGAIARYDGDRNLYSHASKKYLTNFNNHYRVHLSTWIKKFVYSKENRILAKEIKDEHGIDETVFHRYLLYDIHSWGVKELDLIALHSLLPERTKMLLKIQHSILGRDEINRQWLKSVSNSAKMIWYNVFINRYLEATEDEGYAKLVNIAPIPTVKHAFITIDTDGLLGVLKDVGLIESLEKTLTNKEHWESVFDVENIRSAGKGVFTCTVDTDGVMACTHFLRAEKKKISIKNDGTAIKKQTKTLREFSESDPNVVVVANDPGRCNIACLTWKKNKVEEKYKGGRKRKRHCEFGSKRLTRERYYVESGVFKSRGPTKKWLSNIQECLDDLKDNSPKRTSLVSFDAYVAVMVNHWDSRWGEMSKSRWGAQRLRLYGGKKRVLARFFNEVQEAVGERKTIVVAYGSAKFAPGGKGELSVPTTSAFKAFSDRFKGRVAVIDEFRTTKIWHKDSTTVLQSVQSEKEGRTVRGLLWCSSTMENSKLFVNRDLNAAINIHNCFTMYPVRPGILARPKKYCKLEVVVGRKIDYKLTGSLQNAVSSEV

SEQ ID NO: 2014 - protein, 457 aa, Microglena sp.
RYIRSYRSEQRCCLRFSTRSSDGTRSTDSGSRAFPTAPKMIRYNVFINRYLEATEDEGYAKLVNIAPIPTFKHAFITIDTDGLLGVLKDVGLVESLKKTLTNKEHWESVFDVENIRSTGKGVFTCTIDTDGVMACTHFLRAEKKKISIKDDGTAIKKQTKTLREFSESDPNVVVVANDPGRCNIAFLTWKKNKVEEKDKGGRKRKRHCEFGSKRLTRERYYVESGVFKSRGPTKEWLSNIQDCLDDLKDNSPKRTSLVSFDAYVTVMVNHWDSRWGEMSKSRWGAQRLRLYGGKKRVLARFFNEVQADVGERKTIVVAYGSAKFAPGGKGELSVPTTSAFKAFSDRFKGRVAVIDEFRTTKIWHKDSTTVLQIVHSEKEGRTVRGLLWCSSTMENSKLFVNRDLNAAIHIHNCFTMYPTRPGILARPKKYRKLEVVVGRTIDYKLTGSLQNAVSSEV

SEQ ID NO: 2015 - protein, 575 aa, Microglena sp.
GEHKETMSTITTLNNNKNKYLIEQEKKPSSRQVILYARVSSHKQQPDLLRQQLFLQTHISDKHSGCEQVIEVKDVGSGLNFKRPGLLRVLGLVTAGLVSSIVVASKDRLARFGFELIEWICSQHSCSIIVLDHQDGAPKTSLEKTSCPSFKYIVADGTVEDATKSNAKPKLRTLKLKLNPTKAQKSMLAEFAGCSRFMYNKAVAARLGVGSTHKSVFRIRDRYVTNKVRGEGKMPNPYFKNRQWLLQCPKSVRQSAIKAALANIKACFSNLKAGDIKQFSAPFRRKKTELERGWAIEMDQKNVSKDGDKLFIFKDILGNMRYFGSKQLHKLMPEENPTHDPKVHKSRFGEYFLVLSVAAGDRRTERKPVHPDKVATASIDPGVRKTMVTYSPENEESFMLGQGQASDLVKLLLVHDKLQSRLDTEKTLRSKERMKIKMQMIRIRKRIFYLKKEFRDQTTNFLAARYDVLLVPQLETAKMTISAERELTTKVARQMLTLSHSVLFNRLKEKCEEYGTVFLHVLEHYTSQTCPMCGFLNKCGGETYTCKNCQFTCDRDIVGAAGIFLKAVRTENPCS

SEQ ID NO: 2016 - protein, 246 aa, Microglena sp.
HRFVYLTVLLNVTLRPVNNESMTNKEHWESVFDVENIRSTGKGVFTCTDGVMACTHFLRAEKKNISIKDDRTAIKKQTKILREFSESDPNVVVVANDPGRCNIAFLTWKKNKVEEKDKGGRKRRRHCEFGSKKLTRERYYVESGVFKSRGPTKKWLSNIQDCLDDLKDNSPKRTSLVSFDAYVTVMVNHWDSRWGEMSKSRWGAQRLRLYGDKIRVLARFFNEVQADVGERKTIVVAYGSAKFSPG

SEQ ID NO: 2017 - protein, 245 aa, Microglena sp.
PNTSNMVDLQDHVRAYLKALPILLQHRANKGYRSMRFFRYVGKQKTIEKVCDVIAPRAQTTVVGFGNWSNQGYGISRSCSGPIKEIRRCLSRRKNVLFKNVDERNTSCKCHGCFQRLVNMKADSVVWRGVCKESPIDGSITVEKQKMVVKNVKVHKVLHCKDSVKSASSNVRCGATWNRDVNAAKNLLLLLTTWMDGREQPEAFCVPSPPPKTTVFIEASVSAKPTNPPGFVSSLPCYPLGQLKC

SEQ ID NO: 2018 - protein, 618 aa, Microglena sp.
CIRNLHVLNIRMPCMATNASVKLAGPPMPLVSPGPSSVDGRIMARSERSGLQATNVSLTQAASKATSSSRKKNPAVVKSFSTHVCPHTNNNPTCSDSNCSCKPIFLTNIPYASKSRTSDQGSTSSAQDFYEYWDSSRQDLYRQLLWLPKTGSQGLVSSSLNGFARSTPVRSSFSITKTEPLKTSLEKTSCPSFKYIVADGTVEDATKSNAKPKLRTLKLKVNPTKAQKSMLAEFAGCSRFMYNKAVAARLGVGSTHKSVFRIRDRYVTNKVKGEGKMPNPYFKNRQWLLQCPKSVRQSAIKAALANIKACFSNLKAGNIKQFSAPFRRKKTELERGWAIEMDQHNISKDGDKLFIFKDTLGNMRYFGSKQLQKLMPEKNPTHDPKVQKSRFGEYFLVLSVAARDRREERKPVHPGKVATASIDPSVRKTMVTYSPENEESFMLGKGQASDLVKLLLVHDKLHSRLDTEKTLRSKERMKIKKQMIRIRKRFFYLKKEFRDQTTNFLAARYDVLLVPQLETAKMTISAERELTTKVSRQMLTLSHYVLFNRLNEKCEEYGTVFLHVLEHYTSQTCPMCGFLNKCGGETYTCKNCQFTCDRDIVGAAGIILKTVRTENPCS

SEQ ID NO: 2019 - protein, 564 aa, Microglena sp.
YHGCFRRPKTCRIREGGRSSLGTGIADVSIQMATMACNSVWENVDRVVIKYLRLKHPSLKKHFKKIVKAVVQYPESKIDTIIPEGLVHAIHIKEVVSHLRALFPLPRGKQFNTRAHLTMRLFHHVLTELGEVGRVDPKDKKTRKSHPRLFSILPRKNGFTISYVPISSMTFMKLLSMGDSPLESVSGDGRYENHTMLWRKYFNVQGLETKRSRFDNRILSDGKGVSVQMKQKGKEEVVEEGENAGYPKDANIECKDAVGALRVGVDPGMTDIVTVESSAGRIESFSSARFSEVAGYNTSKRRTYKWNDETQDLVKSIPSPNTSNMSDLQDHVRAYLKALPILLQHRANKGYRSMRFFRYVGKQKTIEKVCDVIAPRAQTTVVGFGNWSNQGYGISRSCSGPIKEIRRCLSRRKNVLFKNVDERNTSCKCHGCFQRLVNMKADSVVWRGVCKESPIDGSITVEKQKMVVKNVKVHKVLHCRDSVKSASSNVRCGATWNRDVNAAKNLLLLLTTWMDGRERLEAFCVPSPPPKTTVSIEASVSAKPTDPPGFVSSLPCYPLGQLKC

SEQ ID NO: 2020 - protein, 552 aa, Microglena sp.
ALSCRTTHGFSLVPRLTRLTKATLNALGAPKTIRVYDVMRVIQQEIQEMESWPESVQEYVREVRVKLKVPDGSRLYDDYGKDMDFPTMVRFNYWMQTRLEAIGARRIRLMPIFNVQRAHVRLDMKTLVNIFRHVFPKDPNIVELSKWKNVKDPTRFMLPLKPAIKKKKSCGPGEWEAYKLAQQKYDSDVNDIKASDEYRHAKGRYDTLVNARKTVACSFFKKPPVKNGWVFDCSICTDGVSLSMQYSKTVQVRVSDLKKTSKRSRDDEGMSVSEQYDHKLKTTLPDMGIVVLGVDPGRSNIATVTYLADDKSKTWKLTRGAFYHKSGIKKQKKQQEKRFSDMIPRWESLRENGAALSTSRTDDISAYLKNYATFSDEWWRMALRRRESRDNFQRYIGKRKAMDSFWAGIKRNMKLDHPDLRVRVAYGSAITTLKATGPGEVAVPTGSMFASCKRLFKEEVHVTDEFKTTLMSWETGAKKECVYKSPSVQITTEGQIRLGYELLGHTPLKETPKVSYRDQFAVRVYCTRKQIKEKHRRGGLAPSLVENNSIKP

SEQ ID NO: 2021 - protein, 539 aa, Microglena sp.
MTQCPQTNNNPTCSDSNCSCKPIFLTNIPDASKSLKSRTSDQGSTSSAQDFYEYWDSSRQDLYRQLLWLPKTGSQGLVLRSFNGFARSTPARSSFSITKTEPLKTSLEKTSCPSFKYIVADGTVEDATKSNAKPKLMTLKLKLNPTKAQKSMLAEFAGCSRFMYNKAVAARLGVGSTHKSVFRIRDRYVTNRVRGEGKMPNPYFKNRQWLLQCPKSVRQSAIKAALANIKACFSNLKAGNIKQFSAPFRRKKTELERGWAIEMDQKNVSKDGDKLFIFKDILGNMRYFGSKQLHKLMPEVNPTHDPKVHKSRFGEYFLVLSVAARDRRAERKPVHPDKVAIASIDPGVRKTMVTYSPENEESFMLGQGQASDLVKLLLVHDKLQSRLDTEKTLRSKERMKIKMQMIRIRKRIFYLKKEFRDQKTNFLAARYDVLLVPQLETAKMTISAERELTTKVARQMLTLSHSVLFNRLKEKCEEYGTVFLHVLEHYTSQTCPMCGFLNKCGETYTCKNCQFTCDRDIVGAAGIFLKAVRTENPCS

SEQ ID NO: 2022 - protein, 624 aa, Microglena sp.
PRMEHVCDVCIKSSVMYKLCKMATKPPTVAKLKELLKLAEVAYSSKDKKDDIVRLCEDNGLIARPPPEYKTVEKMCVVKCALKKAMSLDDEEFGKFREHVDQLVNVVSRMLRRSSLVLTFHVTRLMEGDLPIPNMYDMKDTYWKDWLRIGVDGVFPDEESRISYESVKDVIGKVLGSDDPDYINSYPIYFDQVLNYAGHTLSTVVSNNAWVPLVPRLTRLTKATLNALGAPKTIRVYDVMRVIQQEIQEMESWPESVQEYVREVRVRLKVPDGSRLYDDYSKDMDFPTMVRFNYWMQTRLEAIGARRIRLMPIFNIQRAHVRLDMKTLVNLFRHVFPKDPNIVELSKWKDVKDPDRFMLPLKPAVKKKKSCGPGEWEAYKLAQQKYDADVNDIKDTDEYRHAKGRYDTLVNARKTVAGSFFKKPPVKTGWVFDCSICTDGVSLSMQYSKTVQVRVSDLKKTSKRSRDDEGMSVSEQYDHKLKTTLPDMGIVVLGVDPGRSNIATVTYLADDKSKTWKLTRGAFYHKSGIKKQKKQQEKRFSDMIPRWESLRENGAALSTSRTDDISAYLKNYATFSDEWWRMALLRRESRDNFQRYIGKRKAMDSFWAGIKRNMKLDHPDLRFA

SEQ ID NO: 2023 - protein, 734 aa, Microglena sp.
NHYGLFRPLMEHVCDVCIKSSVMYKLCKMATKPPTVAKLKELLKLAEVAYSSKDKKDDIVRLCEDNGLIARPPPEYKTVEKMCVVKCALKKAMSLDDEEFGKFREHVDQLVNVVSRMVRRSSLVLTFHITSLLEKGLDIPDLYNMKDTYWKDWLRIGVDGIFPDEESKISYEAVKDSIGNVIGNDDADYIKSYPIYFDQVLNYAGHTLSTVVSNNAWVPLIPRLARLTSTTLNKLNAPKTLDTSKIIRGYDVMQAIQQEVQNMEGWPESVQEYVNEVREMLSVPDGSRVYDNYGKDMDFPTMVRFNYWIQTRLEDMDARRIRLMPIFNVQRVHVRLDLKTLVNLFRHMFPNDQNIVELSKWGHVKNPDSFMLPQRPAQKKKKSCGPGEWEAYKSVMKQYDDDVKDIKATDEYRHAKGFYDTLVNARKTVAGSFFRKPPVKNGWVFDCSICTDGVSLSMQYSKTVQVLVSDLKKTCKKPRKEEGIKIAEKYDGSLKTILPDMGIVVLGVDPGRSNIATVTYLADDKNKTWTLTRGEFYHKSGIKKQTRQKELRFADKIPMWESLRENGAALSTSRSDKISAYLSNYAKFSDEWWRLALRRRESRDNLQRYIGKRKVKDSFWAGIKRCMMKELPDMKVCVAYGSAITKLKPTGPGEVAVPTGAMFASCKRIFKEDVSVTDEFKTTLMSWETGKEKERVYKIPSVCSADVKLRLGGERFGHTKSKTMPKVADCDHLG

SEQ ID NO: 2024 - protein, 345 aa, Microglena sp.
TPEKTVAGSFFKKPPVKTGWVFDCSICTDGVSLSMQYSKTVQVRVSDLKKTSKRSRDDEGMSVSEQYDHKLKTTLPDMGIVVLGVDPGRSNIATVTYLADDKSKTWKLTRGAFYHKSGIKKQKKQQEKRFSDMIPRWESLRENGAALSTSRTDDISAYLKNYDTFSDEWWRMALLRRESRDNFQRYIGKRKAMDSFWAGIKRNMKLDHPDLRVRVAYGSAITTLKATGPGEVAVPTGSMFASCKRLFKEEVHVTDEFKTTLMSWETGAKKECVYKIPSVQITTEGQIRLGYELLGHTPLKETPNVSYRDQLAVRVYCTRKQIQEKHRRGGLAPSLCRQQLDQAVP

SEQ ID NO: 2025 - protein, 269 aa, Microglena sp.
DGDKLFIFKDILGNMRYFGSKQLHKLMPEENPTHDPKVQKSRFGKYFLVLSVAARDRRAERKPVHPDKVATASIDPGVRKTMVTYSPENEEYFMLGQGQASDLVKLLLVHDKLQSRLDTEKTLRSKERMKIKKQMIRIRKRIFYLKKEFRDQTTNFLAARYDVLLVPQLETAKMTISAERELTTKVARQMLTLSHSVLFNRLKEKCEEYGTVFLHVLEHYTSQTCPMCGFLNKCGETYTCKNCQFTCDRDIVEAAGIFLKAVRTENPCS

SEQ ID NO: 2026 - protein, 282 aa, Microglena sp.
SSSLSVKLTFGTSRRLISSVVSFRIETLRVLKQIGAYARFYMGAAPILLAHRASRGYQNLRFRRYCKKQKLIVEIADFVAPREKSAKVLVGFGDWKGLGATPISRRTCGPLQAIRFELRSRENVIMEDIDEFRTSQRCSCCENHLCNMVALTHRKKQDGTGWECTEGRKRIHKILHCKSSQSGAPRQQSGGMLHCGKTWDRDVNASRNILMLTLHQVFGRERPLAFRRDAPRSSSTTPPPDTDMGTQTVERFTKEATRNIFENLFNLLHPPTLPKSNDLQSG

SEQ ID NO: 2027 - protein, 755 aa, Microglena sp.
PRMEHVCDVGIKSSVMYKLCKMATKPPTVAKLKELLKLAEVAYSSKDKKDDIVRLCEDNGLIAKPPPEYKTVEKMCVVKCALKKAMSLDDEEFGKFREHVDQLVNVVSRMLRRSSLVLTFHVTRLMEGDLPIPNMYDMKDTYWKDWLRIGVDGVFPDEESRISYEAVKDVIGKVLGSDDPDYINSYPIYFDQVLNYAGHTLSTVVSNNAWVPLVPRLTRLTKATLNALKAPKTIRVYDVMRVIQQEIQEMESWPESVQEYVREVRVRLKVPDGSRLYDDYGKDMDFPTMVRFNYWMQTRLEAIGARRIRLMPIFNVQRAHVRLDMKTLVNLFRHVFPKDPNIVELSKWKDVKDPDRFMLPLKPAFKKKKSCGPGEWEACKLAQQKYDADVNDIKDTDEYRHAKGRYDTLVNARKTVAGSFFKKPPVKTGWVFDCSICTDGVSLSMQYSKTVQVRVSDLKKTSKRSRDDEGMSVSEQYDHKLKTTLPDMGIVVLGVDPGRSNIATVTYLADDKSKTWKLTRGAFYHKSGIKKQKKQQEKRFSDMIPRWESLRENGAALSTSRTDDISAYLKNYDTFSDEWWRMALLRRESRDNFQRYIGKRKAMDSFWAGIKRNMKLDHPDLRVRVAYGSAITTLKATGPGEVAVPTGSMFASCKRLFKEEVHVTDEFKTTLMSWETGAKKECVYKIPSVQITTEGQIRLGYELLGHTPLKETPKVSYRDQLAVRVYCTRKQIQEKHRRGGLSPLSCRQQLDQAVP

SEQ ID NO: 2028 - protein, 270 aa, Microglena sp.
EDLSYKQVWRILLGNMRYFGSKQLHKLMPEENPTHDPKVQKSRFGEYFLVLSVAARDRRAERKPVNPDKVATASIDPGVRKTMVTYSPENEESFMLGQGQASDLVKLLLVHDKLQSRLDTEKTLRSKERMKIKKLMIRIRKTIFYLKKEFRDQTTNFLAARYDVLLVPQLETAKMTISAERELTTKVARQMLTLSHSVLFNRLKEKCEEYGTVFLHVLEHYTSQTCPMCGFLNKCGETYTCKNCQFTCDRDIVGAAGIFLKAVRTENPCS

SEQ ID NO: 2029 - protein, 329 aa, Microglena sp.
HSATSLIKLLWVVLNTLVNAQKTVAGSFFRKPPVKNGWVFDCSICTDGVSLSMQYSKTVQVLVSDLKKTCKKPRKEEGIKIAEKYDGSLKTILPDMGIVVLGVDPGRSNIATVTYLADDKNKTWTLTRGAFYHKSGIKKQTRQKELRFADMIPMWESLRENGAALSTSRTDKISAYLSNYAKFSDEWWRLALRRRESRDNLQRYIGKRKVKDSFWAGIKRCMMKELPDMKVCVAYGSAITKLKPTGPGEVAVPTGAMFASCKRIFKEDVSVTDEFKTTLMSWETGKEKERVYKIPSVCSADVKLRLGGERFGHTKSKTMPKVADCDHLG

SEQ ID NO: 2030 - protein, 793 aa, Microglena sp.
KMATKPPTVAKLKELLKLAEVPYSSKSNKDDLVRLCEDNGLITSPPPEYKTVEKMCVVKCALKKAMSLDDEEFGKFREHVDQLVNVVSRMLRRSSLVLTFHITSLLEKGLEIPDLYNMKDTYWKDWLRIGVDGIFPDEESKISYEAVKDSIGNVIGNDDADYIKSYPIYFDQVLNYAGHTLSTVVSNNAWVPLIPRLARLTSTTLNKLNAPKTLDTSKIIRGYDVMRAIQQEVQNMEGWPESVQEYVNEVREMLSVPDGSRVYDNYGKDMDFPTMVRFNYWIQKRLEDMDARLIRLMPIFNVQRVHVRLDLKTLVNLFRHMFPTDKNIVELSKWEHVKNPDSFMLPQRPAQKKKKSCGPGEWEAYKSVLKQYDDDVKDIKATDEYRHAKSLYDTLVNARKTVAGSFFRKPPIKNGWVFDCSICTDGVSLSMQYSKTVQVLVSDLKKTCKKSRKEEGIKIAEKYDSSLKTILPDMGIVVLGVDPGRSNIATVTYLADDKNKTWKLTRGAFYHKSGIKKQTRQKELRFADMIPMWESLRENGAALSTSRTDKISAYLSNYAKFSDEWWRLALRRRESRDNLQRYIGKRKVKDSFWAGIKRCMMKELPDMKVCVAYGSAITKLKPTGPGEVAVPTGAMFASCKRIFKEDVSVTDEFKTTLMSWETGKEKERVYKIPSVCSADVKLRLGGERFGHTKSKTMPKVADCDHLGVRLYNKRKGAQEKHRRGGFATSLVDSQKSIERYPEVRGLRFSPETCIYSDRDRSSALTIARLHCMELMGLGRPLPFAHSSSVVVDE

SEQ ID NO: 2031 - protein, 360 aa, Microglena sp.
ACSTARQYRFRVSDLKKTSKRSRDDEGMSVSEQYDHKLKTTLPDMGIVVLGVDPGRSNIATVTYLADDKSKTWKLTRGAFYHKSGIKKQKKQQEKRFSNMIPRWESLRENGAALSTSRTDDISAYLKNYATFSDEWWRMALLRRESRDNFQRYIGKRKAMDSFWAGIKRNMKLDHPDLRVRVAYGSALTTLKATGPGEVAVPTGSMFASCKRLFKEEVHVTDEFKTTLMSWETGAKKECVYKIPSVQITTEGQIRLGYELLGHTPLKETPKVSYRDQLAVRVYCTRKQIQEKHRRGGLAPSLVDNNSIKRYPEVRGLRFSPETSTYSDRDRSSALTIARLHCMELLGQGRPLPFCRDACC

SEQ ID NO: 2032 - protein, 358 aa, Microglena sp.
HVRCLQNAFSTRAHEYVTTDEGGIVSFLDNVVVAAVDPGVTDIVTVTGLNGGTRSYSSAQYYRKGLIFKSQRQTDVWNLETADIVGGIIPDRDSSSSEQIGAYARFYMGAAPILLAHRASRGYRNLRFRRYCKKQKLIVEIADFVAPREKSAKVLVGFGGWKGLGATPISRRTCGPLQAIRFELRSRENVIMEDIDEFRTSQRCSCCENHLCNMVALTHRKKQDGTGWECTEGRKRIHKILHCKSSQSGAPRQQSGGMLHCGKTWDRDVNASRNILMLTLHQVFGRERPLAFRRDAPRSSSTTPPTHPDTDMGTQTVERFTKEATRNIFENLFNLLHPQRCPKATICSLDDYKVSHFI

SEQ ID NO: 2033 - protein, 380 aa, Microglena sp.
QPNPQRRQRVSVQMKHQVGKDIAGEGGGDNAGYPKDASIEDCQDASLRQGALRVGIDPGMTDIVTIASSDGRVESFSSARFSEAAGYNTSNRRTNKWNADTQDLVKSIPSPTMSSMHDMQDHVRGYLSALPTLLQHRANRGYRSMRFFRYVGKQKTIEKVCDLIAPKAQKKTIEEKVCDVIAPKAKKTVVGFGNWSNQGYGISRLCSGPVKEIRKCLSRRQNVLFKNVDERNTSCTCHGCFQKLVNMKADSVVWRRVQNEPSALIDGAPTTTTTTTFEKQKTVVKNVKVHKVLHCRNSVKSASSNVRCGATWNRDVNAAKNLLLLLTTWMDGKERPAAFCVPSSSPTPKTTVSGEANVGAQPTDPPGSVSSLQLLSSGPA

SEQ ID NO: 2034 - protein, 244 aa, Microglena sp.
VDAEENPTHDPKVHKSRFGEYFLILSVAARDRRAERKPVHPDKVATASIDPGVRKTMVTYSPENEESFMLGQGQASDLVKLLLVHDKLQSRLDTEKTLRSKERMKIKMQMIRIRKRIFYLKKEFRDQTTNFLAARYDVLLVPQLETAKMTISAERELTTKVARQMLTLSHSVLFNRLKEKCEEYGTVFLHVIEHYTSQTCPMCGFLNKCGETYTCKNCQFTCNRDIVGAAGIFLKAVRTENPCL

SEQ ID NO: 2035 - protein, 807 aa, Microglena sp.
PRMEHVCDVCIKSSVMYKLCKMATKPPTVAKLKELLKLAEVAYSSKDKKDDIVCLCEDNGLIARPPPVYKTVEKMCVVKCALKKAMSLEEFGKFRGHVDQLVNVVSRMLRRSSLVLTFHVTRLMEGDLPIPNMYDMKDTYWKDWLRIGVDGVFPDEESRISYEAVKDVIGKVLGSDDPDYINSYPIYFDQVLNYAGHTLSTVVSNNAWVPLVPRLTRLTKATLNALGSPKTIRVYDVMRVIQQEIQEMESWPESVQEYAREVRVRLKVPDGSRLYDDYGKDMDFPTMVRFNYWMQTRLEAIGARRIRLMPIFNVQRAHVRLDMKTLVNLFRHVFPKDPNIVELSKWKNVKDPDRFMLPLKPAFKKKKSCGPGEWEAYKLAQQKYDADVNDIKATDEYRHAKGRYDTLVNARKTVAGSFFKKPPVKTGWVFDCSICTDGVSLSMQYSKTVQVRVSDMKKTSKRSRDDEGMSVSEQYDHKLKTTLPDMGIVVLGVDPGRSNIATVTYLADDNSKTWKLTRGAFYHKSGIKKQKKQQEKCFSDMIPRWESFRENGAALSTSRKDDISAYLKNYATFSDEWWRMAHRRRESRDNFLRYIGKRKAMDSFWAGIKRNMKLDHPDLRVRVAYGSASTTLKATGPGEVAVPTGSMFASCKRLFKDEVHVTDEFKTTLMSWETGAKKECVYKIPSVQITTEGQIRLGYELLGHTPLKETPKVSYRDQLAVRVYCTRKQIQEKHRRGGLAPLLSTTTRSSGTLRYEDCDSLQKPALTRTGTAPLLSQSQGCTAWNCWVKGDRFHFAGMRVVDGLQKK

SEQ ID NO: 2036 - protein, 323 aa, Microglena sp.
TQNDIADMGIVVLGVDPGRSNIATVTYLADDKRKTWKLTRGAFYHKSGIKKQKKQEEKRFSDMIPRWESLRENGAALSTSRKDDISAYLKNYATFSDEWWRMALRRSESRDNFQRYIGKRKAMESFWAGIKRNMKLDHPDLRVRVAYGSAITKLKATGPGEVAVPTGSMFASCKRLFKEEVHVTDEFKTTLMSWETGAKKECVYKIPSVQITTEGQIRLGYELLGHTPLKETPKVSYRDQLAVRVYCTRKQIQEKHRRGGLAPSLVDNNSIKRYPEVRGLRFSPETSTYSDRDRSSALTIARLHCMELLGQGRPLPFCRDACC

SEQ ID NO: 2037 - protein, 255 aa, Microglena sp.
EEEEALRVREQETHAGAVLRESGVFKSRGPTKKWLSNIQDCLDDLKDNSPKRTSIVSFDAYVTVMVNHWDSRWGEMSKSRWGEQRLRLYGGKKRVLARFFNEVQADVGERKTIVVAYGSAKFAPGGKGELSVPTTSAFKAFSDRFKGRVAVIDEFRTTKIWHKDSTAVLQSVQSEKKGRTVRGLLWCSSTMENSKLFVNRDLNAAINIHNCFTMYPIRPGILARPKKYCKLEVVVGRKIDYKLTGSLQNAVSSEV

SEQ ID NO: 2038 - protein, 729 aa, Microglena sp.
PRMEHACDVCIKSSVMYKLCKMATKPPTVAKLKELLKLAEVAYSSKDKKDDIVRLCEDNGLIARPPPEYKTVEKMCVVKCALKKAMSLDDEEFGKFRGHVDQLVNVVSRMLRRSSLVLTFHVTRLMEGDLPIPNMYDMKDTYWKDWLRIGVDGVFPYEESRISYEAVKYVIGKVLGSDDPDYINSYPIYFDQVFNYAGHTLSTVVSNNAWVPLVPRLTRLTKATLNALGAPKTIRVYDVMRVIQQEIQEMESWPEFVQEYVREVRVRLKVPDGSRLYDDYGKDMDFPTMVRFNYWMQTRLEAIGARCIRLMPIFNVQRAHVRLDMKTLVNLFRHVFPKDPNIVELSKWKNVKDPDRFMLPLKPAFKKKKSCGPGEWEAYKLAQQKNDGDVKDIKATEEYRHAKGRYDTLVNARKTVAGSFFKKPPVKTGWVFDCSICTDGVSLSMQYSKTVQVRVSDLKKTSKRSRDEEGMSVSEQYDHTLKTTLPDMGIVVLGVDPGRSNIATVTYLADDKSKTWKLTRGAFYHKSGIKKQKKQQEKRFSDMIPRWESLRENGAALSTSRKDDISAYLKNYATFSDEWRRMALRRRESRDNFQRYIGKRKAMDSFWAGIKRNMKLDHPDLRVRVAYGSAITKLKATGPGEVAVPTGSMFASCKRLFKEEVRVTDEFKTTLMSWETGAKKECVYKIPSVQITTEGQIRLGYELLGHTPLKETPKVSYRDQLAVRVYCTC

SEQ ID NO: 2039 - protein, 478 aa, Microglena sp.
CPSLMSNGAHVRLDMKTLVNLFRHVFPKDPNIVELSKWKNVKDPDRFMLPLKPAFKKKKSCGPGEWEAYKLAQQKYDADVKDIKATDEYRHAKGRYDTLVNARKTVAGSFFKKPPVKTGWVFDCTICTDGVSLSMQYSKTVQVRVSDLKKTSKRSRDDEGMSVSKQYDHKLKTTLPDMGIVVLGVDPGRSNIATVMYLADDKSKTWKLTRGAFYHKSGIKKQKKQQEKRLSDMIPRWESLRENGAALSTSRKDDISAYLKNYATFSDEWWRMALRRRESRDNFQRYIGKRKAMDSFWAGIKRNMKLDHPDLRVRVAYGSAITKLKATGPGEVAVPTGSMFASCKRLMSWETGAKKECVYKIPSVQITTEGQIRLGYELLGHTPLKETPKVSYRDQLAVRVYCTRKKIQEKHRRGGLAPSLVDNNSIKRYPEVRGLRFSPETSTYSDRDRSSALTIARLHCMELLGQGRPLPFCRDACC

SEQ ID NO: 2040 - protein, 688 aa, Microglena sp.
GNVGAILYHQKKKNTHPLLMGVVQDKGDDDINISVVKKTLNSLCMDVSRHQISSRIQSMVLLINHAVAEAYLFANFHITRCLDDGDFDVKQLPHLDRNFYYRCLLAVSTSNVQKDTLGQSFNDTMVAFDALRPAGYVKVDVRPWGQVIADVSIQMATMACNSVWANVDMVVIKYLRLKHPSLKKHFKKIVKAVVQYPESKIDTIIPEGLVNAIHIKEVVSHLRALLPLPRGKQFNTRAHLTMRLFHHVLTELGEVGRVDPKDKKTKKSHPRLFSILPRKNGFTILYVPISSMTFMKLLSMGDSPLESVSGDGRYENHTMLWRKYFNVQGLEMKRSRFDNRILSDGKGVSVQMKQKGKEEVVEEGENAGYPKDANIVECKDAVGALRVGVDPGMTDIVTVASSAGRIESFSSARFSEVAGYNTSKRRTYKWNDETQDLVKSIPSPNTSNMVDLQDHVRAYLKALPILLQHRANKGYRSMRFFRYVGKQKTIEKVCDVIAPSAQTTVVGFGNWSNQGYGISRSCSGPIKEFRRCLSRRKNVLFKNVDERNTSCKCHCCFRRLVNMKADSVFWRGVCKESPIDGSITVEKQKMVVNNVKVHKVLHCRDSVKSASSNVRCGATWNRDVNAAKNLLLLLTTWMDGRERPEAFCVPSPPPKTTVSIEASVSAKPTDPPGFVSSLPCYPLGQLKC

SEQ ID NO: 2041 - protein, 661 aa, Microglena sp.
PPVVQDKGDDDINISVVKKTLNSLCMDVSRHQISSRIQSIVLLINHAVAEAYLFANFHITRCLDDGDFEVKQLPHLDRNFYYRCLLAVSTSNVRKDTLGQSFNDTMVAFDALRPAGYVKVDVRPWGQVIADVSIQMATMACNSVWANVDRVVIKYLRLKHPSLKKHFKKIVKAVVQYPESKIDTIIPEGLVHAIHIKEVVSHLRALFPLPRGKQFNTRAHLTMRLFHHVLTELGEVGRVDPKDKKTKKSHPRLFSILPRKNGLTISYVPISSMTFMKLLSMGDSPLESVSGDGRYENHIMLWRKYFNVQGLETKRSRFDNRILSDGKGVSVQMKQKGKEEVVEEGDNAGYPKDANIVECKDAVGALRVGVDPGMTDIVTVASSAGRIESFSSARFSEVAGYNTSKRRTYKWNDETQDLVKSIPSPNTSNMVDLQDHVRAYLKALPILLQHRANKGYRSMRFFRYVGKQKTIEKVCDVIAPSAQTTVVGFGNWSNQGYGISRSCSGPIKEIRRCLSRRKNVLFKNVDERNTSCKCHGCFQRLVNMKADSVVWRGVCKESPIDGSITVEKQKMVVKNVKVHKVLHCRDSVKSASSNVRCGATWNRDVNAAKNLLLLLTTWMDGRERPEAFCVPSPPPKTTVSIEASVSAKPTNPPGFVSSLRC

SEQ ID NO: 2042 - protein, 212 aa, Microglena sp.
RPEGHSPKRTSLESFDAYVTGMVNHWDSRWGEMSKSRWGAQRLRLYGGKKRVLARFFNEVQADVGERKTIVIAYGSSKFAPGGKGELSVPTTSAFNAFSDRFKGRVAVIDEFRTTKIWHKDSTTVLQSVQSEKEGRTVRGLLWCSSTMENSMLFVNRDLNAAINIHNCFTMYPTRPGILARPKKYCKLEVVVGRTIDYKLTGSLQNAVSSEV

SEQ ID NO: 2043 - protein, 716 aa, Microglena sp.
GACGPARQCGEPHVTAVQSGADFPHHESIRESLDIPDLYNMKDTYWKDWLRIGVDGIFPDEESKISYEAVKDSIGDVIGNDDADYIKSYPIYFDQVLNYAGHTLSTVVSNNAWVPLIPRLARLTSTTLNRLNAPKTLDTSKIIRGYDVMQAIQQEVQNMEGWPESVQEYVNEVREMLSVPDGSRVYDNYGKDMDFPTMVRFNYWIQTRLEDMDARRIRLMPIFNVQRVHVRLDLKTLVNLFRHMFPNDQNIVELSKWEHVKNPESFMLPQRPAQKKKKSCGPGEWEAYKSVLKQYDDDVKDIKATDEYRHAKGLYDTLVNARKTVAGSFFRKPPVKNGWVFDCSICTDGVSLSMQYSKTVQVLVSDLKKTCKKPRKEEGIKIAEKYDGSLKTILPDMGIVVLGVDPGRSNIATVTYLADDKNKTWKLTRGAFYHKSGIKKQTRQKELRFADMIPMWESLRENGAALSTSRTDNISAYLSNYAKFSDEWWRLALRRRESRDNLQRYIGKRKVKDSFWRGIKRCMMKELPDMKVCVAYGSAITKLKPTGPGEVAVPTGAMFASCKRIFKEDVSVTDEFKTTLMSWETGKEKERVYKIPSVCSADVKLRLGGERFGHTKSKTMPKVADCDHLGVRLYNKRKGAQEKHRRGGFATSLVDSQKSIERYPEVRGLRFSPETCIYSDRDRSSALTIARLHCMELMGLGRPLPFAHSSSVVVDE

SEQ ID NO: 2044 - protein, 300 aa, Microglena sp.
TIRWEAGTPIKSKTWKLTRGAFYHKSGIKKQKKQQEKRFSDMIPGWESLRENGAALSTSRKDDISAYLKNYATFSDEWWRLALRRRESRDNLQRYIGKRKVMDSFWAGIKRNMKLDHPDLRVRVAYGSAIKTMKATGPGEVAVPTGSMFASCKRLFKEEVRVTDEFKTTLMSWETGAKKECVYKIPSVQITTEGQIRIGYELLGHTPLKETPKVSDRDQLAVRVYCTRKKIQEKHRRGGLAPSLVDNKSIERYPEVRGLRFSPETSTYSDRDRSSALTIARLHCMELLGQGRPLPFCRDA

SEQ ID NO: 2045 - protein, 354 aa, Microglena sp.
RKHFKKIVKAVVQYPESKIDTIIPGGLVHAIHIKEVVSHLRALFPLPRGKQFNTRAHLTMRLFHHVLTELGEVGRVYPKDKKTRKSHPRLFSILPRMNAFTISYVPISSMPFMKLLSMGDSPLESVSGDGRYENHTMLWRKYFNVQGLETKRSRFDNRILSDGKGVSVQMKQKGKEEVVEEGENAGYPKDANIVECKDAVGALRVGVDPGMTDIVTVASSAGRIESFSSARFSEVAGYNTSKRRTYKWNDETQDLVKSIPSPNTSNMSDLQDHVRAYLKALPILLQHRANKGYRSMRFFRYVGKQKTIEKVCDVIAPRAQTTVVGFGNWSNQGYGISRSCSGPIKRDQEVPLTS

SEQ ID NO: 2046 - protein, 448 aa, Microglena sp.
QCDCSITCLQSWERSDEWIRKIKKTRKSHPRLFSILPRKNGFTISYVPISSMTFMKLLSMGDSPLESVSGDDGYENHTMLWRKYFNVQGLETKRSRFDNRILSDGKGVSVQMKQKGKEEVVEEGENAGYPKDANIVECKDAVGALRVGVDPGMTDIVTVASSAGRIESFSSARFSKVAGYNTSKRRTYKWNDETQDLVKSIPSPNTSNMSDLQDHVRAYLKALPILLQHRANKGYRSMRFFRYVGKQKTIEKVCDVIAPRAQTTVVGFGNWSNQGYGISRSCSGPIKEIRRCLSRRKNVLFKNVDERNTSCKCHGCFQRLVNMKADSVVWRGVCKESPIDGSITVEKQKMVVKNVKVHKVLHCRDSVKSASSNVRCGATWNREVTPAKNLLLLLTTWMDGRERPEAFCVPSPPPKTTVSIEASVSAKPTDPPGFVSSLPCYPLGQLKC

SEQ ID NO: 2047 - protein, 397 aa, Microglena sp.
TPEKTVAGSFFRKPPVKNGWVFDCSICTDGVSLSMQYSKTVQVLVSDLKKTCKKPRKEEGIKIAEKYDGSLKTILPDMGIVVLGVDPGRSNIATVTYLADDKNKTWKLTRGAFYHKSGIKKQTRQKELRFADMIPMWESLRENGAALSTSRTDKISAYLSNYAKFSDEWWRLALRRRESRDNLQRYIGKRKVKDSFWAGIKRCMMKELPDMKVCVAYGSAITKLKPTGPGEVAVPTGAMFASCKRIFKEDVSVTDEFKTTLMSWETGKEKERVYKIPSVCSADVKLRLGGERFGHTKSKTMPKVADCDHLGVRLYNKRKGAQEKQRRGGFATSLVDSQKSIERYPEVRGLRFSPETCIYSDRDRSSALTIARLHCMELMGLGRPLPFAHSSSVVVDE

SEQ ID NO: 2048 - protein, 349 aa, Microglena sp.
RRPVRSLVKKKVSRSQKNTTAHLKRYCPIWVSSSWVWTQDGATSLRVTYLADDKNKTWTLTRGEFYHKSGIKKQTRQKELRFADMIPMWESLRENGAALSTSRTDKISAYLSNYAKFSEEWWRLALRRRESRDNLQRYIGKRKVKDSFWAGIKRCMMKELPDMKVCVAYGSAITKLKPTGPGEVAVPTGAMFASCKRIFKEDVSVTDEFKTTLMSWETGKEKERVYKIPSVCSADVKLRLGGERFGHTKSKTMPKVADCDHLGVRLYNKRKGAQDKHRRGGFATSLVDSQKSIERYPEVRGLRFSPETCIYSDRDRSSALTIARLHCMELMGLGRPLPFAHSSSVVVDE

SEQ ID NO: 2049 - protein, 309 aa, Microglena sp.
LVEFLPCFFVYCKWYFFPRVETLGSSVWFLGFHHFHVFLVNNTMTRSGCLIRIPCQRSNIATVTYLADDKNKTWKLTRGAFYHKSGIKKQTRQMELRFADMIPMWESLRENGAALSTSRTDKISAYLSNYAKFSDEWWRLALRRRESRDNFQRYIGKRKVKDSFWAGIKRCMMKELPDMKVCVAYGSAITKLKPSGTGEVAVPTGAMFASCKRIFKEDVSVTDEFKTTLMSWETGKEKERVYKIPSVCSADVKLRLGGELFGHTKSKTMPKVADCDHLGVRLYNKRKGAQEKHRRGGFSTSLVDSQKSI

SEQ ID NO: 2050 - protein, 586 aa, Microglena sp.
IKFPEDAGHIEDHSGYEVMQAIQQEVQNMEGWPESVQEYVNEVREMLSVPDGSRVYDNYGKDMDFPTMVRFNYWIQTRLEDMDARRIRLMPIFNVQRVHVRLDLKTLVNLFRHMFPNDQNIVELSKWEHVKNPESFMLPQRPAQKKKKSCGPGEWDAYKSVLKQYDDDVKDIKATDEYRHAKGLYDTLVNARKTVAGSFFRKPPVKNGWVFDCSICTDGVSLSMQYSKTVQVLVSDLKKTCKKPRKKEGIKIAEKYDGSLKTILPDMGIVVLGVDPGRSNIATVTYLADDKNKTWKLTRGAFYHKSGIKKQTRQKELRFADMIPMWESLRENGASLSTSRTDKISAYLSNYAKFSDEWWRLALRRRESRDNLQRYIGKRKVKDSFWAGIKRCMMKELPDMKVCVAYGSAITKLKPTGPGEVAVPTGAMFASCKRIFKEDVSVTDEFKTTLMSWGTGKEKERVYKIPSVCSADVKLRLGGERFGHTKSKTMPKVADCDHLGVRLYNKRKGAQEKHRRGGFATSLVDSQKSIERYPEVRGLRFSPETCIYSDRDRSSALTIARLHCMELMGLGRPLPFAHSSSVVVDE

SEQ ID NO: 2051 - protein, 204 aa, Microglena sp.
RRPVRSLVKKKVSRSQKNTTAHLKRYCPIWVSSSWGVDPGRSNIATVTYLADDKNKTWKLTRGAFYHKSGIKKQTRQKELRFADMIPMWESLRENGAALSTSRTDKISAYLSNYAKFSDEWWRLALRRRESRDNLQRYIGKRKVKDSFWAGIKRCMMKELPDMKVCVAYGSAITKLKPTGPGEVAVPTGPCSHRVKEFSKRTFL

SEQ ID NO: 2052 - protein, 395 aa, Microglena sp.
TPKKTVAGSFFRKPPVKNGWVFDCSICTDGVSLSMQYSKTVQVLVSDLKKTCKKPRKEEGIKIAEKYDGSLKTILPDMGIVVLGVDPGRSNIATVTYLADDKNKTWKLTRGAFYHKSGIKKQTRQKELRFADMIPMWESLRENGAALSTSRTDKISAYLSNYAKFSDEWWRLALRRRESRDNLQRYIGKRKVKDSFWAGIKRCMMKELPDMKVCVAYGSAITKLKPTGPGEVAVPTGAMFASCKRIFKEDVSVTDEFKTTLMSWETGKEKERVYKIPSVCSADVKLRLGGERFGHTKSKTMPKVADCDHLGLYNKRKGAQEKHRRGGFATSLVDSQKSIERYPEVRGLRFSPETCIYSDRDRSSALTIARLHCMELMGLGRPLPFAHSSSVVVDE

SEQ ID NO: 2053 - protein, 684 aa, Microglena sp.
EWYRCPSVNRNFFYRCLIAVSTNKCKGSTLGEDFESSRLLFDLLREPGQSKVDIRGSVKNQIIADLSILMATMASNHLWTNLERRITTYLKWKYPQIAKRLRSDIVAALIKCPTKNLDVIFKMSPHTTKLPTKLPTSRLRSAKSAVALAKKRVGRKEPEGSPLRVRLTKLQERLEKLSEAWLSSKNLRVDADNAKRFFAREVAFCLRGVLPLPSGNTFASRAHMTLPLYHKILSETIEEKRKTKNEKHRTFSLLPYKSGFTLSHIPISKMAFFYMVNECHFDSCKADVASKNHQGIWERFANLKKVETVSRKFGYRIVTDGFAVSILMNKPTCLTCSMPADAFSTRAHEYVTTDEGGIVSFLDNVVVAAVDPGVTDIVTVTGLNGGTRSYSSAKYYRKGLIFKSQRQTDVWNLETADIVGGIIPDRDSSSSEQIGAYARFYMGAAPILLAHRASRGYRNLRFRRYCKKQKLIVEIADFVAPRKKSAKVLVGFGDWKGLGATPISRRTCGPLQAIRFELRSRENVIMEDIDEFRTSQRCSCCENHLCNMVALTHRKKQDGTGWECTEGRKRIHKILHCKSSQSGAPRQQSGGMLHCGKTWDRDVNASRNILMLTLHQVFGRERPLAFRRDAPRSSSTTPPPPPDTDMGTQTVERFTKEATRNIFENLFNLLHPPTLPKSNDLQSG

SEQ ID NO: 2054 - protein, 456 aa, Microglena sp.
RIPKASCCPRGLHRRRKKSCGPGEWEAYKSVLKQYDDDVKDIKATDEYRHAKGLYDTLVNARKTVACSFFRKPPVKNGWVFDCSICTDGVSLSMQYSKTVQVLVSDLKKTCKKPRKEEGIKIAEKYDGSLKTILPDMGIVVLGVDPGRSNIATVTYLADDKNKTWKLTRGAFYHKSGIKKQTRQKELRFADMIPMWESLRENGAALSTSRTDKISAYLSNYAKFSDEWWRLALRRRESRDNLQRYIGKRKVKDSFWAGIKRCMMKELPDMKVCVAYGSAITKLKPTGPGEVAVPTGAMFASCKRIFKEDVSVTDEFKTTLMSWETGKEKERVYKIPSVCSADVKLRLGGERFGHTKSKTMPKVADCDHLGVRLYNKRKGAQEKHRRGGFATSLVDSQKSIERYPEVRGLRFSPETCIYSDRDRSSALTIARLHCMELMGLGRPLPFAHSSSVVVDE

SEQ ID NO: 2055 - protein, 222 aa, Microglena sp.
RYCKKQKLIVEIADFVAPREKSAKVLVGFGDWKGLGATPISRRTCGPLQAIRFELRSRGNVIMEDVDEFRTSQRCSCCENRLCNMVALTHHKKQDGTGWECTEGRKRIYKILHCKSSQSGAPRQQSGGRLHCGKTWDRDVNASRNILMLTLHQVFGRERPLAFRRDALRSSSKTPPPPDTDMGTQTVERFTKEATRNIFENLFNLLHPPTLPKSNVAQKQSG

SEQ ID NO: 2056 - protein, 803 aa, Microglena sp.
PRMEHVCDVCIKSSVMYKLCKMATKPPTVSKLKELLKLAEVAYSSKDKKDDIVRLCEDNGLVARPPPEYKTVEKMCVVKCALKKAMSLDDEEFGKFRGHVDQLVHVVSRMLRRSSLVLTFHVTRLMEGDLPIPNMYDMKDTYWKDWLRIGVDGVFPDEESRISYEAMKEVIGKVLGSDDPDYINSYPIYFDQVLNYAGHTLSTVVSNDAWVPLVPRLTRLTKATLKALGAPKTICVYDVMRVIQQEIQEMESWPESVQEYVREVRVRLKVPDGSRLYDDYGKDMVFPTMVRFNYWMQTRLEAMGARRIRLMPIFNVQRAHVRLDMKTLVNLFRHVFPKDPNIVELSKWENVKDPDRFMLPLKPAVKKKKSCGPGEWEAYKLAQQKYDADVKDIKATDKYRHAKGRYDTLVNAQKTVAGSFFKKPPVKTWWVFDCSICTDGVSVSMQYSKTVQVRVSDLKKTSKRSRDEEGMSVSEQYDHKLKTTLPDMGIVVLGVDPGRSNIATVTYLADDKSKTWKLTRGAFYPKSGIKKQKKQQEKRFSDMIPRWESLRENGAALSTSRKDDISAYLKTYATFSDEWWRMALRRRESRDNFQRYIGKRKAMDSFWAGIKRNMKLDHPDLRVRVAYGSAITKLKATGPGEVAVPTGSMFASCKRLFKEEVHVTDEFKTTLMSWETGAKKECVYKIPSVQITTEGQIRLGYELLGHTPLKETPKVSYRDQLAVRVYCTRKKFQEKHRRGGLAPSLVDNKSIKRYPEVRGLRFSPETSTYSDRDRSSALTIARLHCMELLGQGRPLPFCRDACC

SEQ ID NO: 2057 - protein, 284 aa, Microglena sp.
EQHRYSHVSGRRQKQDMEAYTRSFLPQVWYQETEKTARKRFSDMIPRWESLRENGAALSTSRKDDISAYLKTYATFSDEWWRMALRRRESRDNFQRYIGKRKAMDSFWAGIKRNMKLDHPDLRVRVAYGSAITKLKATGPGEVAVPTGSMFASWKRLFKEEVHVTDEFKTTLMSWETGAKKECVYKIPSVQITTEGQIRLGYELLGHTPLKETPKVSYRDQLAVRVYCTRKKIQEKRRRGGLAPSLVDNKSIKRYPEVRGLRFSPETSTYSDRDRFHFSIPSNV

SEQ ID NO: 2058 - protein, 238 aa, Microglena sp.
WAFPASPVDFYWLRNMVWSGNCDSSVLISQASESFLGATPISRRTCGPLQAIRFELRSRENVIMEDVDEFRTSQRCSCCETRICNMVALTHRKKQDGTWECTEGRKRIHKILHCKSSQSGTPRQQSGGRLHCGKTWDRDVNASRNILMLTLHQVFGRERPLAFRREVPRKTHQHLILIWGHRRLNGLPQRRLGISSRTSSTCCTPQRCPNATICSLDDYKVCPTLFENNCMYYHGRAQ

SEQ ID NO: 2059 - protein, 248 aa, Microglena sp.
AIEMDQKNVSKDGDKLFIFKTYWATCATSVAKQLHKLMPEENPTHDPKVQNPLRRIFPRLVCRFQGQEGRAEACPSRQGCNCIHRPRLRKTMVTYSPENEESSCLVRDRHPTLSNSCLVHDKLQSRLDTERSYDSHSPQERVRDQKTNFLARSLRCVVGTSIGDGEDDNHERELTTKVARQMLTLSHFMLFNRLMEKCAEYGTVFLHVLEHYTSLTCPMCGFLNKCGETYTCKNCQFTCDRDIVGQSS

SEQ ID NO: 2060 - protein, 612 aa, Microglena sp.
TKEKKEVFEGVPDAQLHTVSVPSVDQNFIRQLMVGSRQAHMETRDATVERLFHNNYWFREKIEGREVIVKKKKQYVGAIAPYDGDRNPYSHASKKYLTNFNNHYRVHLSTWIKKFVYSKENRILAKEIKDEHGIDETVFHRYLLYDIHSWGVKEDLIAIHSLLPERTKMLLKIQHSILGRDEINRQWLKSVSNSVKMIRYNVFINRYLEATEDEGYAKLVNIAPIPTVKHAFITIDTDGLLGVLKDGGLIESLEKTLTNKEHWESVFDVENIRSTGKGVFTCTIDTDGVMACTHFLRAEKKKFSIKDDGTAIKKQTKTLREFSESDPNVVVVANDPGRCNIAFLTWKKHKVEEKDKGGRKRKRHCEFGSKRLTRERYYVESGVFKSRGPTKKWLSNIQDCLDDLKDNSPKRTSLVSFDAYVTVMVNHWDSRWGEMSKSRWGAQRLYGGKKRVLARFFNEVQEDVGERKTFVVAHGSAKFAPGGKGELSVPTTSVFNAFSDRFKGRVAVIDEFRTTKIWHKDSTTVLQSVQSEKEGRTVRGLLWCSSTMENSKLFVNRDLNAAINIHNCFTMYPIRPGILARPKKYCKLEVVVGRKIDYKLTGSLQNAVSSEV

SEQ ID NO: 2061 - protein, 697 aa, Microglena sp.
METIVNKEPPDKRTRPDRAAKIKDRKNGEENVVKCTLSRIIVDKDNKDVIIKVIKERVDSVSKRTYLAGVAVNRILKEVFKGVPDAQLHTVSVPSVDQNFIRQLMVGSRQAHMETRDATVERFFHNNYWFRKKIEGREVIVKKKKQYVGAMARYDGDRNLYSHVSKKYLTNFNNHYRVHLSTWIKKFVYSKENRILAKEIKDEHGIDETVFHRYLLYDIHSWGVKEDLIAIHSLLPERTKMLLKIQHSILGRDEINRQWLKSVSNSAKMIRYNVFINRYLEATEDEGYAKLVNIAPIPTVKLVNIAPIPTVKHAFITIDTDGLLGVLKDVGLIESLEKTLTNKEHWESVFDVENIRSTGKGVFTCTIDTDGVMACTHFLRAEKKNISIKDDGTAIKKQTKTLREFSKSDPNVVVVANDPGRCNIAFLTWKKHKVEEKDKGGKKRKGHCEFGSKRLTRERYYVENGVFKSRGPTKKWLSNIQDCLDDLKDNSPKRTSLVSFDAYVTVMVNHWDSRWGEMSKSRWGAQRLRLYGGKKRVLARFFNEVQEDVGERKTIVVAYGSAKFAPGGKGELSVPTTSAFKAFSDRFKGRVAVIDEFRTTKIWHKDSTTVLQSVQSEKEGRTVRGLLWCSSTMENSKLFVNRDLNAAINIHNCFTMYPIRPGILARPNKYCKLEVVVGRKIDYKLTGSLQNAVSSEV

SEQ ID NO: 2062 - protein, 238 aa, Microglena sp.
RRPVRSLVKKKVSRSQKNTTAHLKTILPDMGIVVLGVDPGRSNIATVTYLADDKNKTWTLTRGAFYHKSGIKKQTRQKELRFADMIPMWESLRENGAALSTSRTDKISAYLSNYAKFSDEWWRLALRRRESRDNLQRYIGKRKVKDSFWAGIKRCMMKELPDMKVCVAYGSAIKKLKPTGPGEVAVPTGAMFASCKRIFKEDVSVTDEFKTTLMSWETGKEKERVYKIPSVLFSRREA

SEQ ID NO: 2063 - protein, 510 aa, Microglena sp.
MYNIAVRKLALRMVADLGVLKTSVFTNIIRSPPEYKTVEKMCVVKCALKKAMSLDDEEFGKFREHVDQLVNVVSRMFRRSSLVLTFHITSLLEKGLDIPDLYNMKDTYWKDWLRIGVDGIFPDEESKISYEAVKDSIGDVIGNDDADYIKSYPIYFDQVLNYAGHTLSTVVSNNAWVPLIPRLARLTSTTLNKLNAPKTLDTSKIIRGYDVMQAIQQEVQNMEGWPESVQEYVNGVREMLSVPDGSRVYDNYGKDMDFPTMVRFNYWIKTRLEDMDARRIRLMPIFNVQRVHVRLDLKTLVNLFRHPGRSNIATVTYLADDKNKTWTLTRGAFYHKSGIKKQTRQKELRFADMIPMWESLRENGAALSTSRTDKISAYLSNYAKFSDEWWRLALRRRESRDNLQRYIGKRKVKNSFWAGIKRCMMKELPDMKVCVAYGSAITKLKPTGPGEVAVPTGAMFASCKIIFKEDVSVTDEFKTTLMSWETGKEKERVYKIPSVCSADVKLKVGW

SEQ ID NO: 2064 - protein, 565 aa, Microglena sp.
YHGCFRRPKTCRIREGGRSSLGQVIADVSIQMATMACNSVWANVDRVVINYLRLKHPSLKKHFKKIVKAVVQYQESKIDTIIPEGLVHAIHIKEVVSHLRALFPLPRGKQFNTRAHLTMRLFHHVLTELGEVGRVDPKDKKTRKSHPRLFSILPRKNGFTISYVPISSMTFMKLLSMGDSPLESVSGDGRYENHTMLWRKYFNVQGLETKRSRFDNRILSDGKGVSVQMKQKGKEEVVEEGENAGYPKDANIVECKDEVGALRVGVDPGMTDIVTVASSAGRIESFSSARFSEVAGYNTSKRRTYKWNDETQDLVKSIPSPNTSNMSDLQDHVRAYLKALPILLQHRANKGYRSMRFFRYIGKQKTIEKVCDVIAPRAQTTVVGFGNWSNQGYGISRSCSGPIKEIRRCLSRRKNVLFKNVDERNTSCKCHGCFQRLVNMKADSVVWRGICKESPIDGSITVEKQKMVVKNVKVHKVLHCRDSVKSASSNVRCGATWNRDVNAAKNLLLLLTTWMDGRERPEAFCVPSPPPKTTVSIEASVSAKPTDPPGFVSSLPCYPLGQLKC

SEQ ID NO: 2065 - protein, 397 aa, Microglena sp.
TPEKTVAGSFFRKPPVKNGWVFDCSICTDGVSLSMQYSKTVQVLVSDLKKTCKKPRKEEGIKIAEKYDGSLKTILPDMGIVVLGVDPGRSNIATVTYLADDKNKTWTLTRGAFYHKSGIKKQTRQKELRFADMIPMWESLRENGAALSTSRTDKISAYLSNYAKFSDEWWRLALRRRESRDNLQRYIGKRKVKGSFWAGIKRCMMKELPDMKVCVAYGSAITKLKPTGPGEVAVPTGAMFASCKRIFKEDVSVTDEFKTTLMSWETGKEKERVYKIPSVCSADVKLRLGGERFGHTKSKTMPKVADCDHLGVRLYNKREGAQEKHRRGGFATSLVDSQKSIERYPEVRGLRFSPESCIYSDRDRSSALTIARLHCMELMGLGRPLPFAHSSSVVVDE

SEQ ID NO: 2066 - protein, 395 aa, Microglena sp.
AKLGSPRRTLGGTQITLNASFAREVAFCLRGVLPLPSGNTFASRAHMTLPLYHKILSKTIEEKRKTKNEKHRTFSLLPSKSGFTLSHIPISKMAFFYMVNECHFDSCKADVASKNHQGIWERFANLKKVETVSRKFGYRIVTDGFAVSILMNKPTCLTCSMPADAFSTRAHEYVTTDEGGIVSFLDNVVVAAVDPGVTDIVTVTGLNGGTRSYSSAQYYRKGLIFKSQRQTDVWNLETADIVGGIIPDRDSSSSEQIGAYARFYMGAAPILLAHRASRGYRNLRFRSNCKKQKLIVEIADFVAPREKSAKVLVGFGDWKGLGATPISRRTCGPLQAIRFELRSRENVIMEDIDEFRTSQRCSCCENHLCNMVALTHRKKQDGTGWECTEGRKRIH

SEQ ID NO: 2067 - protein, 607 aa, Microglena sp.
GNCQLVWYHQNNNHSLSMGVVTNNGDDDDLDIMVVKKTLNSLCMDVSRQQICSRIQSMVLVINHAVAEAYLFAIFHITRCLDDGDFDVKQLPHLDRNFYYRCILAVSISNVRNDTLDQSLKDSMVAFDALRPAGYVKVDVRPWGQVIADVSIQMATMACNSVWANVDRVVIKYLRLKHPSLKKHFKKIVKAVVQYPDSDIDKIIPAGLVHANLIKDVVRRLRDLLPLPRGKQFNTRAHLAMRLFHHVLTELGANLKEKTTKKRPRLFSILPRKSGFTISYVPISSMTLMKLLSMGDSPLESVRGDGRHENHSMLWRKYFNVQGLETKGSRFDNRILSDGKGVYVQMKHQVGKDIAGEGGGDNAGYPKDASIEDCQDASLRQGALRVGIDPGMTDIVTIASSDGRVESFSSARFSEAAGYNTSNRRTNKWNADTQDLVKSIPSPTTSSMHDMQDHVRGYLSALPTLLQHRANRGYRSMRFFRYVGKQKTIEKVCDLIAPKAQKKTIEEKVCDVIAPKAKKTVVGFGNWSNQGYGISRSCSGPVKEIRKCLSRRQNVLFKNVDERNTSCTCHGCFQKLVNMKADSVAWRRVQNEPSALIDGAPTTTTNV

SEQ ID NO: 2068 - protein, 252 aa, Microglena sp.
TDWCVRQILHGCRPILLAHRASRGYRNLRFRRYCKKQKLIVEIADFVAPREKSAKVLVGFGDWKGLGATPISRRTCGPLQAIRFELRSRENVIMEDIDEFKTSQRCSCCENHLCNMVALTHRKKQDGTGWECTEGRKRIHKILHCKSSQSGAPRQQSGGMLHCGKTWDRDVNASRNILMLTLHQVFGRERPLAFRRDAPRSSSTTPPPPPDTDMGTQTVERFTKEATRNIFENLFNLLHPPTLPKSNDLQSG

SEQ ID NO: 2069 - protein, 325 aa, Microglena sp.
NDIADMGIVVLGVDPGRSNIATVTYLADDKNKTWTLTRGAFYHKSGIKKQTRQKELRFADMIPMWESLRKKGAALSTSRTDKISAYLSNYAKFSDEWWRLALRRRESRDNLQRYIGKRKVKDSFWAGIKRCMMKELPDMKVCVAYGSAITKLKPIGPGEVAVPTGAMFASCKRIFKEDVSVTDEFKTTLMSWETGKEKERVYKIPSVCSADVKLRLGGERFGHTKSKTMPKVADCDHLGVRLYNKRKRAQEKHRRGGFATSLVDSQKSIERYPEVRGLRFSPETCIYSDRDRSSALTIARLHCMELMGLGRPLPFAHSSSVVVDE

SEQ ID NO: 2070 - protein, 551 aa, Microglena sp.
RNVGTILYHQKKKNTHPLLMGVVQDKGDDDINISVVKKTLNSLCMDVSRHQISSRIQSMVLLINHAVAVAYLFANFHITRCLDDGDFDVKQLPHLDRNFYYRCLLAVSTSNVRKDTLGQSFNDTMVAFDALRPAGYVKVDVRPWGQVIADVSIQMATMACNSVWANVDRVVIKYLRLKHPSLKKHFKKIVKAVVQYPESKIDTIISEGLVHAIHIKEVVSHLRALFPMPRGKQFNTRAHLTMRLFHHVLTELGEVGRVDPKDKKTRTNHPRLFSILPRKNGFTISYVPISSMTFMKILSMGDSPLESVSGDGRYENHTMLCRKYFNVQGLETKRSRFDNRILSDGKGVSVQMKQTGKEEVVEEGENAGYPKDANIVQCNDAVGALRVGVDPGMTDIVTVASSAGRIESFSSARFSEVAGYNTSKRRTYKWNDETQDLVKSIPSPNTSNMSDLQDHVRAYLKALPILLQHRANKGYRSMRFFRYVGKQKTIEKVCDVIAPRAQTTVVGFGNWSNQGYGISRSCSGPIKEIRRCLSRRKNVFVQKRRRTQHFL

SEQ ID NO: 2071 - protein, 408 aa, Microglena sp.
YLEATEDEGYAKLVNIAPIPTVKHSFITIDTDGLLGVLKDVGLVKSLEKTLTNKEHWESVFDVENTRSTGKGVFTCTIDTDGVMACTHFLRAEKKKISIKDDGTAIKKQTKTLREFSESDPNVVVVANDPGRCNIAFLTWKKNKVEEKDKGGRKRKRHCEFGSKRLTRERYYVESGVFKSRGPTKKWLSNIQDCLDDLKDNSPKRTSLESFDAYVTVMVNHWDSRWGEMSKSRCVAQRLRLYGGKKRVLARFFNEVQADVGERKTIVIAYGSSKFAPGGKGELSVPTTSAFNAFSDRFKGRVAVIDEFRTTKIWHKDSTTVLQSVQSEKEGRTVRGLLWCSSTMENSKLFVNRDLNAAINIHNCFTMYPTRPGNLARPKKYCKLEVVVGRTIDYKLTGSLHNAVSSEV

SEQ ID NO: 2072 - protein, 704 aa, Microglena sp.
TSCLERVYIFANFHIARLFENGIAVPPVNRNFFYRCLIAVSTNKCKGLTLGEDFKSSRLLFDLLREPGQSKVDIRGNVKNQIIADLSILMATMASNHLWTNLERRITTYLKWKYPQIAKRLRSDIVAALIKCPTKNLDVIFKMSPHTTKLPTKLPTSRLRSAKSAVALAKKRVGRKEPEGSPLRVRLTKLQERLEKLSEAWLSSKNLRVDADNAKRFFAREVAFCLRGVLPLPSGNIFATRAHMTLPLYHKILSETIEEKRKTKNEKHRTFSLLPYKSGFTLSHIPISKMAFFYMVNECHFDSCKADVASKNHQGIWERFANLKKVETVSRKFGYRIVTDGFAVSILMNKPTCLTCSMPADAFSTRAHEYVTTYEGGIVSFLDNVVVAAVDPGVTDIVTVTGLNGGTRSYSSAQYYRKGLIFKSQRQTDVWNLETADIVGGIIPDRDSSSSEQIGAYARFYMGAAPILLAHRASRGYRNLRFRRYCKKQKLIVEIADFVAPREKSAKVLVGFGDWKGLGATPISRRTCGPLQAIRFELRSRENVIMEDIDEFRTSQRCSCCENHLCNMVALTHRKKQDGTGWECTEGRKRIHKILHCKSSQSGAPRQQSGGMLHCGKTWDRDVNASRNILMLTLHQVFGRERPLAFRRDAPRSSSTTPPPPPDTDMGTQTVERFTKEATRNIFENLFNLLHPPTLPKSNDLQSG

SEQ ID NO: 2073 - protein, 688 aa, Microglena sp.
GNVGAILYHQKKKNTHPLLMWVVQDKGDDDINISVVKKTLNSLCMDVSRHQISSRIQSMVLLINHAVAEAYLFANFHITRCLDDGDFDVKQLPHLDRNFCYRCLLAVSTSNVRKDTLGQSFNDTMVAFDALRPAGYVKVDVRPWGQVIADVSIQMATMACNSVWANVDRVVIKYLRLKHPSLKKHFKKIVKAVVQYPESKIDTIIPEGLVHAIHIKEVVSHLRALFPLPRGKQFNTRAHLTMRLFHHVLTELGEVGRVDPKDKKQKKSHPRLFSILPRKNGFTISYVPISSMTFMKLLSMGDSPLESVSGDGRYENHTMLWRKYFNVQGLETKRSRFDNRILRDGKGVSVQMKQKGKEEVVEEGENEGYPKDANIVECKDAVGALRVGVDPGMTDIVTVASSAGRIESFSSARFSEVAGYNTSKRRTYKWNDETQDLVKSIPSPNTSNMVDLQDHVRAYLKALPILLQHRANKGYRSMRFFRYVGKQKTIEKVCDVIAPRAQTTVVGFGNWPNQGYGISRSCSGPIKEIRRCLSRRKNVLFKNVDERNTSCKCHGCFQRLVNMKADSVVWRGVCKESPIDGSITVEKQKMVVKNVKVHKVLHCRDSVKSASSNVRCGATWNRDVNAAKNLLLLLTTWMDGRERPEAFCVPSPPPKTTVSIEASVSAKPTDPPGFVSSLPCYPLGQLKC

SEQ ID NO: 2074 - protein, 702 aa, Microglena sp.
NNNHSLSMGVVTNNGDDDDDLDIMVVKKTLNSLCMDVSRQQICSRIQSMVLVINHAVAEAYLFANFHITRCLDDVAFDVKQLPHLDRNFYYRCILAVSTSNVRKDTLGQSLKDSMVAFDALRPAGYLKVDVCQWGQVIADVSIQMATMACNSVWANVDRVVIKYLRLKHPSLKKHFNKIVKAVVQYPDSDIDKIIPAGLVHANLIKDVVRRLRDLLPLPRGKQFNTRAHLTMRLFHHVLTELGADLKEKTTKKRPRLFSILPRKSGFTISYVPISSMTLMKLLSMGDSPLESVRGDGRHDNHSMLWRKYFNVQGLETKGSRFDNRILSDGKGVSVQMKHQVGKDIAGEGGGDNAGYPKDASIEDCQDAYLRQGALRVGIDPGMTDIVTIASSDGRVESFSSARFSEAAGYNTSNRRTNKWNADTQDLVKSIPSSTTSSMHDMQDHVRGYHSALPTLLQHRANRGYRSMRFFRYVGKQKTIEKVCDLIAPKAQKKTIEEKVCDVIAPKAKKTVVGFGNWSNQGYGISRSCSGPVKAIRKCLSRRQNVLFKNVDERNTSCTCHGCFQKLVNMKADSVVWRRIQNEPPSLINGAPTTTTTTFEKQKTVVKNVKVHKVLHCRNTVKSASSNVRCGATWNRDVNAAKNLLLLLTTWMDGKERPEAFCVPSSSPTPKTTVSGEANVGAQPTDPHGSVSSLQLLSSGPA

SEQ ID NO: 2075 - protein, 332 aa, Microglena sp.
ASQNSMTINSKRHCPIWVSSFWVWILVGATSLQSRIWQTTKARHGSLHAELFTTSLVSRNRKNSKKKRFSDMIPRWESLRENGAALSTSRKDDISAYLKNYATFSDEWWRMALRRRESRDNFQRYIGKRKAMDSFWAGIKRNMKLDHPDLRVRVAYGSAITTLKATGPGEVAVPTGSMFASCKRLFKEEVHVTDEFKTTLMSWETGAKKECVYKIPSVQITTEGRIRLGYELLGHTPLKETPRVSYCDQLAVRVYCTRKQIQEKHRRGGLAPSLVDNNSIKRYPEVRGLRFSPETSTYSDRDRSSALTIARLHCMELLGQGRPLPFCRDACC

SEQ ID NO: 2076 - protein, 711 aa, Microglena sp.
GNCPLVWYHQNNNHSLSMGVVTNNGDDDDLDIMVVKKTLNSLCMDVSRQQICSRIQSMVLVINHAVAEAYLFANFHITRCLDDGDFDVKQLPHLDRNFYYRCILAVSISNVRNDTLDQSLKDSMVAFDALRPAGYVKVDVRPWGQVIADVSIQMATMACNSVWANVDRVVIKYLRLKHPSLKKHFKKIVKAVVQYPDSDIDKIIPAGLVHANLIKDVVRRLRDLLPLPRGKQFNTRAHLTMRLFHHVLTELGADLKEKTTKKRPRLFSILPRKSGFTISYVPISSMTLMKLLSMGDSPLESVRGDGRHENHSMLWRKYFNVQGLETKGSRFDNRILSDGKGVSVQMKHQVGKDIAGEGGGDNAGYPKDASIEDCQDAYLRQGALRVGIDPGMTDIVTIASSDGRVESFSSARFSEAAGYNTSNRRTNKWNADTQDLVKSIPSPTTSSMHDMQDHVRGYLSALPTLLQHQANRGYRSMRFFRYVGKQKTIEKVCDLIAPKAQKKTIEEKVCDVIAPKAKKTVVGFGNWSNQGYGISRSCSGPVKEIRKCLSRRQNVLFKNVDERNTSCTCHGCFQKLVNMKADSVVWRRIQNEPSALIVGAPTTTTTTFEKQKTVVKNVKVHKVLHCRNSVKSASSNVLCGATWNRDVNAAKNLLLLLTTWMDGKERPAAFCVPSSSPTPKTTVSGEANVGAQPTDPPGSVSSLQWLSSGPA

SEQ ID NO: 2077 - protein, 206 aa, Microglena sp.
YVGKQKTIEKVCDVIAPRAQTTVVGFGNWSNQGYGISRSCSGPIKEIRRCLSRRKNVLFKNVDERNTSCKCHGCFQRLVNMKADSVVWRGIFKESPIDGSITVEKQKMVVKNVKVHKVLHCRDSVKSASSNVRCGATWNRDVNAAKNLLLLLTTWMDGRERPEAFCVPSPPPKTTVSIEASVSAKPTDPPGFVSSLPCYPLGQLKC

SEQ ID NO: 2078 - protein, 803 aa, Microglena sp.
PRMEHVCDVCIKSSVMYKLCKMATKPPTVAKLKELLKLAEVAYSSKDKKDDIVRLCEDNGLIARPPPEYKTVEKMCVVKCALKKAMSLDDEEFGKFRGHVDQLVNVVSRMLRRSSLVLTFHVTRLMEGDLPIPNMYDMKDTYWKDWLRIGVDGVFPDEESRISYEAVKDVIGKVLGSDDPDYINSYPIYFDQVLNYAGHTLSTVVSNNAWVPLVPRLTRLTKATLNALGAPKTIRVYDVMRVIQQEIQEMASWPESVQEYVREVRVRLKVPDGSRLYDDYGKDMDFPTMVRFNYWMQTRLEAIGARRIRLMPIFNVQRAHVRLDMKTLVNLFRHVFPKDPNIVELSKWENVKDPDRFMLPLKPSVKKKKSCGLGEWEAYKLAQQKYDADVKDIKATDEYRHAKGRYDTLVNARKTVAGSFFKKPPVKTGWVFDCSICTDGVSFSMQYSKTVQVRVSDLKNESKRSRDEEGMSVSEQYDHKLKTTLPDMGIVVLGVDPGRSNIATVTYLADDKSKTWKLTRGAFYHKSGIKKQKKQQEKRFSDMIPRWESLRENGAALSTSRKDDISAYLKNYATFSDECRRMALRRRESRDNFQRYIGKRKAMDSFWAGIKRNMKLDHPDLRVRVAYGSAITKLKATGPGEVAVPTGSMFASCKRLFKEEVHVTDEFKTTLMSWETGAKKEFVYKIPSVQITTEGQIRLGYELLGHTPLKETPKVSYRDQLAVRVYCTRKKIQEKHRRGGLAPSLVDNNSIKRYPEVRGLRFSPETSTYSDRDRSSALTIARLHCMELLGQGRPLPFCRDACC

SEQ ID NO: 2079 - protein, 618 aa, Microglena sp.
QCIRNLHVLNIRMPCMATNVSVKLARPPMPLVSPGPSSVDGRIMARSGLQATNVSLTQAASKATSSSRKKNPAVVKSFSTHVCPHTNNNPTCSDSNCSCKPIFLTNIPDASKSLKSRTSDQGSTSSAQDFYEYWDSSRQDLYRQLLWLPKTGSQGLVLSSFNGFARSTPARSSFSITKTEPLKTSLEKTSCPSFKYIVADGTVEDATKSNAKFKLRTLKLKLNPTKAQKSMLAEFAGCSRFMYNKAVAARLGVGSTHKSVLRIRDRYVTNKVRGEGKMRNPYFKNRQWLLQCPKSVRQSAIKAALANIKACFSNLKAGNIKQFSAPSRRKKTELERGWVIEMDQKNVSKDGDKLFIFKDILGNMRYFGSKQLHKLMPEVNPIHDPKVHKSRFGEYFLVLSVAARDRRAERKPVHPDKVATASIDPGVRKTMVTYSPENEESFMLGQGQASDLVKLLLVHDKLQSRLDTEKTLRTKERMKIKMQMIRIRKRIFYLKKEFRDQTTNFLAARYDVLLVPQLETAKMTISAERELTTKVARQMLTLSHSVLFNRLKEKCKEYGTVFLHVLEHYTSQTCPMCGFLNKCGETYTCKNCQFTCDRDIVWAAGIFLKAVRTENPCS

SEQ ID NO: 2080 - protein, 664 aa, Microglena sp.
YYITKRKIVLTPLLMGVVQYKGDDDINISVVKKTLNSLCMDVSRHQISSRIQSMVLLINHAVTEAYLFANFHITRCLDDGDFDVKQLPHLDRNFYYRCLLAVSTSNVRKDTLGQSFNDTMVAFDALRPAEYVKVDGQSVWANVDRVVIKYLRLKHPSLKKHFKKIVKAVVQYPESKIDTIIPEGLVHAIHIKEVVSHLRAVFPLPRGKQFNTRAHLTMRLLHHVLTELGEVGRVDPKDKKTRKSHPRLFSILPRKNGFTISYVPISSMTFMKLLSMGDSPLESVSGDGRYENHTMLWRKYFNVQGLETKRSRFDNRILSDGKGVSVQMKQKGKEEVVEEGENAGYPKDANIVECKDAVGALRVGVDPGMTDIVTVASSAGRIESFSSARFSEVAGYNTSKRRTYKWNDETQDLVKSIPSPNTSNMSDLQDHVRAYLKALPILLQHRANKGYRSMRFFRYVGKQKTIEKVCDVIAPRAQTTVVGFGNWSNQGYGISRSCSGPIKEIRRCLSRRKNVLFKNVDERNTSCKCHGCFQRLVNMKADSVVWRGICKESPIDGSITVEKQKMVVKNVKVHKVLHCRDSVKSASSNVRCGATWNRDVNAAKNLLLLLTTWMDGRERHEAFCVPSPPPKTTVSIEASVSTKPTDPPGFVSSLPCYPLGQLKC

SEQ ID NO: 2081 - protein, 348 aa, Microglena sp.
KTYKNPRKEEGIKIAEKYDGSLKTILPDMGIVVLGVDPGRSNIATVTYLADDKNKTWTLTRGAFYHKSGIKKQTRQKELRFADMIPMWESLRENGAALSTSRTDKISAYLSNYAKFSEEWWRLALRRRKSRDNLQRYIGKRKVKDSFWAGIKRCMMKELPDMKVCVAYGSAITKLKPTGPGEVAVPTGAMFASCKRIFKEDVSVTDEFKTTLMSWETGKKKERVYKIPSVCSADVKLRLGGERFGHTKSKTMPKVADCDHLGVRLYNKRKGAQEKHRRGGFATSLVDSQKLIERYPEVRGLRFSPETCIYSDRDRSSALTIARLHCMELMGLGRPLPFAHSSSVVVDE

SEQ ID NO: 2082 - protein, 322 aa, Microglena sp.
NAGYPKDANIVECKDAVGALRVGVDPGMTDIVTVASSAGRIESFSSARFSEVAGYNTSKRRTYKWNDETQDLVKSIPSPNTSNMVDLQDHVRAYLKALPILLQHRADKGYRSMRFFRYVGKQKTIEKVCDVIAPRAQTTVVGFGNWSNQGSGISRSCSGPIKEIRRCLSRRKNVLFKNVDERNTSCKCHGCFQRLVNMKADSIVWRGVCKESPIDGSITVEKQKMVVKNVKVHKVLHCRDSVKSASSNVRCGATWNRDVNAAKNLLLLLTTWMDGRERPEAFCVPSPPKTTVSIEASVSAKPTDPPGFVSSLPCYPLDQLKC

SEQ ID NO: 2083 - protein, 251 aa, Microglena sp.
SPFHRLIRATCPTCRTMSELISKRSRSYLQHRANKGYRSMRLFRYVGKQKTIEKVCDCDCTKAQTTVVGFGQLGPTKGMVSVVHVLGPSKRSGGASHVVKNVLFKNVDERNTSCKCHGCFQRLVNMKADSVVWRGVCKESPIDGSITVEKQKMVVKNVKVHKVLHCRDSVKSASSNVRCGATWNRDVNAAKNLLLLLTTWMDGRERPEAFCVPSPPPKTTVSIEASVSAKPTDPPGFVSSLPCYPLGQLKC

SEQ ID NO: 2084 - protein, 467 aa, Microglena sp.
PCLCTTRYCRRPSKKNEKLKTKNIAHSRCCLTNLDSSLCRTFRFRKWPFSIWSTSATSIHARQTLLPKTIKEYGSASQTSRKWRQFLGSSVYRILTDGFAVSILMNKPTCLTCSMPADAFSTRAHEYVTTDEGGIVSFLDNVVVAAVDPGVTDIVTVTGLNGGTRSYSSAQYYRKGLIFKSQRQTDVWNLETADIVGGIIPDRDSSSSEQIGAYARFYMGAAPILLAHRASRGYRNLRFRRCCKKQKLIVEIADFVAPREKSAKVLVGFGDWKGLGATPISRRTCGPLQAIRFELRSEKTSSWRTSMSSEHLNDAAAVRTTFATWWHSLIVRSKTVQVGNVQKDPSGFIRFSTAKAVKAERHANRAVVCFTAEDLDRCERFQEHPDAYTSPSLWRERPLAFRRTRREVPRQPHPHPLILIWGHRRLNGLPKRLLGISSRTSSTCCTPQRCPKATICSLDDYKVSHFI

SEQ ID NO: 2085 - protein, 360 aa, Microglena sp.
RIWVTWWQANHHLQYRCGDIPPFVCWARDIVNGGIRSYSSAQYYRKGLIFKSQRQTDVWNLETADIVGGIIPDRDSSSSEQIGAYARFYMGAAPILLAHRASRGYRNLRFRRYCKKQKLIVEIADFVAPREKSAKVLVGFGDWKGLGATPISRRTYGPLQAIRFELRSLENVIMEDIDEFRTSQRCSCCENHLCNMVALTHRKKQDGTGWECTEGRKRIHKILHCKSSQSGAPRQHSGGMLHCGKTWDRDVNASRNILMLTLHQVFGRERPLAFCRDAPRSSSTTPPPPLILIWGHRRLNGLPKRLLGISSRTSSTCCTPQRCPKATICSLDEYKVCPTLFENNCKSGRLLFMQVLGEFN

SEQ ID NO: 2086 - protein, 552 aa, Microglena sp.
GARGNCEKIRKQYVGAIARYDGDRNLYSHASKKYLTNFNNHYRVHLSTWIKKFVYSKENRILAKEFKDEHGIDETVFHRYLLYDIHSWGVKEDLIAIHSLLPERTKMLLKIQHSIIGRDEINRQWLKSVSNSAKMIRYNVFINRYLEATEDEGYAKLVNIAPIPTVKHAFIMIDTDGLLGVLKDVGLVESLEKTLTNKEHWESVFDVENIRSTGKGVFTCTIDTDGVMACTHFLRAEKKKISIKDDGTAIKKQTKTLREFSESDPNVVVVANDPGRCNIAFLTWKKNKVEEKDKGGRKRKRHCEFGSKRLTRERYYVESGVFKSRGPTKKWLSNIQDCLDDLKDNSPKRTSLESFDAYVTVIVNHWDSRWGEMSKSRWGAQRLRLYGGKKRVLARFFNEVQADVGERKTIVIAYGSSKFAPGGKGELSVPTTSAFNAFSDRFKGRVAVIDEFRTTKIWHKDSTTVLQSVQSEKEGRTVRGLLWCSSTMENSKLFVNRDLNAAINIHNCFTMYPIRPGILARPKKYCKLEVVVGRKIDYKLTGSLQNAVSSEV

SEQ ID NO: 2087 - protein, 630 aa, Microglena sp.
MMETLMSISLPHLDRNFYYRCILAVSTSNVRKDTLGQSLKDSMVAFDALRPAGYLKVDVRQWGQVIADVSIQMATMACNSVWANVDRVVIKYLRLKHPSLKKHFNKIVKAVVQYPDSDIDKIIPAGLVHANLIKDVVRRLRDLLPLPRGKQFNTRAHLTMRLFHHVLTELGADLKEKTTKKRPRLFSILPRKSGFTISYVPISSMTLMKLLSMGDSPLESVRGDGRHENHSMLWRKYFNVQGLETKGSRFDNRILSDGKGVSIQMKHQVGKDIAGEGEGGGDNAGYPKDASIEDCQDASLRQGALRVGIDPGMTDIVTIASSDGRVESFSSARFSEAAGYNTSNRRTNKWNADTQDLVKSIPSPTTSSMQDHVRGYLSALPTLLQHRANRGYRSMRFFRYVGKQKTIEKVCDLIAPKAQKKTIEEKGCDVIAPKAKKTVVGFGNWSNQGYGISRSCSGPVKEIRKCLSRRQNVLFKNVDERNTSCTCHGCFQKLVNMKADSVVWRRVQNEPSTLIDGAPTTTTTTTFEKQKTVVKNVKVHKKLHCRNSVKSASSNVRCGATWNRDVNAAKNLLLLLTTWMDGKERPAAFCVPSSSPTPKTTVSGEANVGAQPTDPPGSVSSLQLLSSGPA

SEQ ID NO: 2088 - protein, 401 aa, Microglena sp.
HACERPKKQSQVPSSENHLSRMGGFFDCSICTDGVSLSMQYSKTVQVLVSDLKKTCKKPRKEEGIKIAEKYDGSLKTILPDMGIVVLGVDPGRSNIATVTYLADDKNKTWKLTRGAFYHKSGIKKQTRQKELRFADMIPMWESLRENGAALSTSRTDKISAYLSNYAKFSDEWWRLALRRRESRDNLQRYIGKRKVKDSFWAGIKRCMMKELPDMKVCVAYGSAITKLKPTGPGEVAVPTGAMFASCKRIFKEDVSVTDEFKTTLMSWETGKEKERVYKIPSVCSADVKLRLGGERFGHTKSKTMPKVADCDHLGVRLYNKRKGAQEKHRRGGFATSLVDSQKSIERYPEVRGLRFSPETCIYSDRDRSSALTIARLHCMELMGLGRPLPFAHSSSVVVDE

SEQ ID NO: 2089 - protein, 234 aa, Microglena sp.
ERGLQIERPTKKWLSNIQDCLDDLKDNSPKRTSLVSFDAYVTVMVNHWDSRWGEMSKSRWGAQRLRLYGGKKRVLARFFNEVQEDVGERKTIVVAYGSANFAPGGKGELSVPTTSAFKAFSDRFKGRVAVIDEFRTTKIWHKDSTTVLQSVQSEKEGRTVRGLLWCSSTMENSKLFVNRDLNAAINIHNCFTMYPIRPGILARPKKYCKLEVVVGRKIDYKLTGSLQNAVSSEV

SEQ ID NO: 2090 - protein, 622 aa, Microglena sp.
QCIRNLHVLDIRTPCMATNASVKMARPPMPLVSPPPSSVDGRIMARSERSGLQATNVSLTQAASKATSSSRKKNPAVVKSFSTHVCPHTNNNPTCSDSNCSCKPIFLRNIPDASKSLKSRTSDQGSTSSAQDFYEHWDSSRQDLYRQLLWLPKTGSQSLVSRSLNGFARSTPTRSSFSITKTEPLKTSLEKTSCPSFKYIVADGTVEDATKSNAKPKLRTLKLKLNPTKAQKSMLAEFAGCSRFMYNKAVAARLGVGSTHKSVFRIRDRYLTNKVRGEGKMPNPYFKNRQWLLQCPKSVRQSAIKSALANVKACFSNLKAGNIKQFSAPFRRKKTELERGWAIEMDQHNISKDGDKLFIFKDTLGNMRYFGSKQLHKLMPEENPTHDPKVQKSRFGAYFLVLSVAARDRRAERKPVHPDKVATASIDPGVRKTMVTYSPENEESFMLGQGQASDLVKLLLVHDKLQSRLDTEKTLRSKERMKIKKHMIRIRKRFFYLKKEFRDQTTNFLAARYDVLLVPQLETAKMTISAERELTTKVARQMLTLSHSVQFNRLKEKCAEYGTVFLHVLEHYTSQTCPMCGFLNKCGGETYTCKNCQFTCDRDIVGAAGIFLKAVRTENPCS

SEQ ID NO: 2091 - protein, 273 aa, Microglena sp.
DMEADTWCILPQVGYQEADKQKELRFADMIPVWESLRENGAALSTSRTDKISAYLSNYAKFSDEWWRLALRRRESRDNLQRYIGKRKIKDSFWAGIKRCMMKELPDMKVCVAYGSAITKLKPTGPGEVAVPTGAMFASCKRIFKEDVSVTDEFKTTLMSWETGKEKERVYKIPSVCSADVKLRLGGERFGHTKSKTMPKVADCDHLGVRLYNKRKGAQEKHRRGGFATSLVDSQKSIERYPEVRGLRFSPETAFTRTGIALLLSQSQGCTAWN

SEQ ID NO: 2092 - protein, 397 aa, Microglena sp.
TPEKQSQVPSSEKPPVKNGWVFDCSICTDGVSLSMQYSKTVQVLVSDLKKTCKKPRKEEGIKIAEKYDGSLKTILPDMGIVVLGVDPGRSNIATVTYLADDKNKTWKLTRGAFYHKSGIKKQTRQKELRFADMIPMWESLRENGAALSTSRTDKISAYLSNYAKFSDEWWRLALRRRESRDNFQRYIGKQKVKDSFWAGIKRCMMKELPDMKVCVAYRSAITKLKPTGPGEVAVPTGAMFASCKRIFKEDVSVTDEFKTTLMSWETGKEKERVYKIPSVCSADVKLRLGGERFGHTKSKTMPKVADCDHLGVRLYNKRKGAQEKHRRGGFATSLVDSQKSIERYPEVRGLRFSPETCIYSDRDRSSALTIARLHCMELMGLGRPLPFAHSSSVVVDE

SEQ ID NO: 2093 - protein, 252 aa, Microglena sp.
TDWCVRQILHGCRPNPSCPSCFQGYRNLRFRRYCKKQKLIVEIADFVAPRKKSAKVLVGFGDWKGLGATPISRRTCGPLQAIRFELRSRENVIMEDIDEFRTSQRCSCCENHLCNMVALTHRKKQDGTGWECTEGRKRIHKILHCKSSQSGAPRQQSGGMLHCGKTWDRDVNASRNILMLTLHQVFGRERPLAFRQDAPRSSSTTPPPPPDTDMGTQTVERFTKEDTRNIFENLFNLLHPPTLPKSNDLQSG

SEQ ID NO: 2094 - protein, 371 aa, Microglena sp.
TRYRSVVHYKYFLRSLRKVCNIYNVSKSHMSTRAHEYVTTDEGGIVSFLDNVVVAAVDPGVTDIVTVTGLNGGTRSYSSAQYYRKGLIFKSQRQTDVWNLETADIVGGIIPDRDSSSSEQIGAYARFYMGAAPILLAHRASRGYRNLRFRRYCKKQKLIVEIADFVAPREKSAKVLVGFGDWKGLGATPISRRTCGPLQAIRFELRSRENVIMEDIDEFRTSQQCSCCENHLCNMVALTHRKKQDGTGWECTEGRKRIHKILHCKSSQSGAPRQQSGGMLHCGKTWDRDVNASRNILMLTLHQVFGRERPLAFRRDAPRSSSTTPPPPPDTDMGTQTVERFTKEATRNIFENLFNLLHPPTLPKSNDLQSG

SEQ ID NO: 2095 - protein, 386 aa, Microglena sp.
KLKLNPTKAQKSMLAEFAGCSRFMYNKAVAARLGVASTHKSVFRIRDRYVTNKVRGEGKMPNPYFKNRQWLLQCPKSVRQSAIKAALANIKACFSNLKAGNIKQFSAPFRRKKTELERGWVIEMDQKNVSKDGDKLFIFKDILGNMRYFGSKQLHKLMPEVNPTHDPKVHKSRFGEYFLVLSVAARDRRAERKPVHPNKVATASIDPGVRKTMVTYSPENEESFMLGRGQASDLVKLLLVQQSRLDTEKTLRTKERMKIKMQMIRIRKRIFYLKKEFRDQTTNFLAARYDVLLVPQLETAKMTISAWELTTKVARQMLTLSHSVLFNRLKEKCEGYGTEFLHVLKHYTSQTCPMCGFLNKCGETYTCKNCQFTCDRDIVGAAGIFL

SEQ ID NO: 2096 - protein, 325 aa, Microglena sp.
NDIARYGYRRPGVDPGRSNIATVTYLADDKNKTWTLTRGAFYHKSGIKKQTRQKELRFADMIPMWESLRENGAALSTSKTDKISAYLSNYAKFSDEWWRLALRRRESRDNLQRYIGKRKVKDSFWGGIKRCMMKELPDMKVCVAYGSAITKLKPTRPGEVAVPTGAMFASCKRIFKEDVSVTDEFKTTLMSWETGKEKEHVYKIPSVCSADVKLRLGGERFGHTKSKTMPKVADCDHLGVRLYNKRKGAQEKHRRGGFATSLVDSQKSIERYPEVRGLRFSPETCIYSDRDRSSALTIARLHCMELMGLGRPLPFAPSSSVVVDE

SEQ ID NO: 2097 - protein, 651 aa, Microglena sp.
YINKVTVTNILLQCQMSGKKKQFTFQLERLLSLQGSTPKQFGKWLTRRKFFATEHLPGKEELICKIFKKCVVIIFMIKRSKLFKKKISSMLEYPLKSNWTIFLDKLNSSEDQNMIAIYLFKIYVQESISREKALQPFWTPAYKTISETLLLPIETDCVDSGLSSSNHWSQKQEEKLQFLTVQTKKLVNKSSQKIYCQSSMSSLVGKWANEAILEEKIKPLKTIQMKLFPTKKQKQILDEFINTSRYVSNKAIEYVDKGHKPHFQTLRDLLVTSNTKKNSNTYKKLSKEIEDLHTLKQDTVDQSDKQKIIEEIKTKNKIMRDEMKEIDYEKNHNLQGFETFTPKEIRANAVKSVCDAYKSAFTNLKNGNIKFFKMKYNTKKNSRQTVELAPSSISLNNGILRILPNTFKDDCVLKISNKNRKKHKNLTIKNNVDIVRHKGQYVIHILDTILNNIDNETNEYTMCGVDPGVRCFATTYSCSIKNNGEVSSYNTRDYTHRIDLLKKLNKKRRDIMERKAVRKKQYNKIEKKKKNIVDCLHWETINHVLKHNDFVFYGDIKSQDITKGNKNNTLNQDFNDLKFYIFKTRLEYKASVLKRKVVIMNECYTTKTCSNCGTLNNDVGSKKVFTCPICNLVAGRDANASKNILMKGLLS

SEQ ID NO: 2098 - protein, 530 aa, Microglena sp.
IYVQESISREKALQPFWTPAYKTISETLLLPIETDCVDSGLSSSNHWSQKQEEKLQFLTVQTKKLVNKSSQKIYCQSSMSSLVGKWANEAILEEKIKPLKTIQMKLFPTKKQKQILDEFINTSRYVSNKAIEYVDKGHKPYFQTLRDLLVTSNTKKNSNTYKKLSKEIEDLHTLKQGTVDQSDKQKIIEEIKTKNKIMRDEMKEIAYEKNHNLQGFETFTPKEIRANAVKSVCDAYKSAFTNLKNGNIKFFKMKYKTKKNSRQTVELAPSSISFNNGILRILPNTFQDDCVLKISNKNRKKHKNLTIKNNVDIVRHKGQYVIHILDTILNNIDNETNEYTMCGVDPGVRCFATTYSCSIKNNGEVSSYNTRDYTHRIDLLKKLNKKRRDIMERKAVRKKQYNKIEKKKKNIVDSLHWETIHHVLKHNDFVFYGDIKSQDITKGNKNSTLNQDFNDLKFYIFKTRLEYKASVLKRKVVIMNECYTTKTCSNCGTLNNDVGSKKVFTCPICNLVAGRDANASKNILMKGLLS

SEQ ID NO: 2099 - protein, 716 aa, Microglena sp.
PRMEHVCDVCIKSSVMYKLCKMATKPPTVAKLKELLKLAEVAYSSKDMKDDIVRLCEDNGLIARPPPEYKMVEKMCVVKCALKKAMSLDDEEFGKFRGHVDQLVNVVSRMLRRSSLVLTFHVTRLMEGDLPIPNMYDMKDTYWKDWLRIGVDGVFPDEESRISYEAVKDVIGKVLGSDDPDYIISYPIYFDQVLNYAGHTLSTVVSNNAWVPLVPRLTRLTKATLNALGAPKTIRVYDVMRVIRQEIQEMESWPESVQEYVREVRVRLKFPDGSRLYDDYGKDMDFPTMVRFNYWMQTRLEAMGARRIRLMPIFNVQRAHVRLDMKTLVNLFRHVFPKDPNIVELSKWENVKDPDRFMLPLKPAVKKKKSCGPGEWESYKLAQQKYDADVKDIKDTDEYRHAKGRYDTLVNAQKTVAGSFFKKPPVKTGWVFDCSICTDGVSLSMQYSKTVQVRVSDLKKTSKRSRDEEGMSVAKQYDHKLKTTLPDMGIVVLGVDPGRSNIATFTYLADDKSKTWKLTRGAFYHKSGIKKQKKQQEKRFSDMIPRWESLRENGAALSTSRKDDITAYLKKYATFSDEWWRMALRRRESRDNFQRYIGKRKAMDSFWAGIKRNMKLDHPDLRVRVAYGYAITKLKATGPGEVAVPTGSMFASCKRLFKEEVHVTYEFKTTLMSWETGAKKECVYKIPSVQITTDGQIRLGYELLGHTPLKETPKVS

SEQ ID NO: 2100 - protein, 640 aa, Microglena sp.
YESVKDVIGKVLGSDDPDYINSYPIYFDQVLNYAGHTLSTVVSNNAWVPLVPRLTRLTKATLNALGAPKTIRVYDMMRVIQQEIQEMESWPESVQEYVREVRVRLKVPDGSRLYDDYGKDMDFPTMVRFNYWMQTRLEAIGARRIRLMPIFNVQRAHVRLDMKTLVNLFRHVFPKYPNIVELSKWKNVKDPDRFMLPLKPAFKKKKSCGPGEWEAYKLSQQKYDTDVNDIKATDEYRHAKGRYDTLVNARKTVAGSFFKKPPVKTGWVFDCSICTDGVSLSMQYSKTVQVRVSDLKKTSKRSRDDEGMSVSEQYDHKLKTTLPDMGIVVLGVDPGRSNIATVTYLADDKSKTWKLTRGAFYHKSGIKKQKKQQEKRFLDMIPRWESLRENGAALSTTRKDDISAYLKKYATFSDEWWRMALRRRESRDNFQRYIGKRKAMDSFWAGIKRNMKLDHPDLRVRVAYGSAITTLKATGPGEVAVPTGSMFASCKRLFKDEVHVTDEFKTTLMSWETGAKKECVYKIPSVQITTEGQIRLGYELLGHTPLKETPKVSYRDQLAVRVYCTRKQIQEKHRRGGLAPSLVDNNSIKRYPEVRGLRFSPETSTYSDRDRSSALTIARLHCMELLGQGRPLPFCRDACC

SEQ ID NO: 2101 - protein, 670 aa, Microglena sp.
CKTKEMTILTSASSRRRLILCAWMYRGIRFSSRIQSMVLLINHAVAEAYLFANFHITRCLDDGDFDVKQLPHLDRNFYYRCLLAVSTSNVRKDTLGQSFNDTMVAFDALRPAGYVKVDVRPWGQVIADVSIQMATMACNSVWANVDRVVIKYLRLKHPSLKKNFKKIVKAVVQYPESKIDTIIPEGLVHAIHIKEVVSHLRALFPLPRGKQFNTRAHLTMRLFHHVLTELGEVGRVDPKDKKTRKSHPRLFSILPRKNGFTISYVPISSMTFMKLLSMGDLPLESVSGDGRYENHTMLWRKYFNVQGLETKRSRFDNRILSDGKGVSVQMKQKGKEEVVEEGENAGYPKDANILECKDAVGALRVGVDPGMTDIVAVASSAGRIESFSSARFSEVAGYNTSKRRTYKWNDETQDLVKSIPSPNTSNMSDLQDHVRAYLKALPILLQHRANKGYRSMRFFRYVGKQKTIEKVCDVIAPRAQTTVVGFGNWSNQGYGISRSCSGPIKEIRRCLSRRKNVLFKNVDERNTSCKCHGCFQRLVNMKADSVVWRGVCKESPIDGSITVEKQKMVVKNVKVHKVLHCRDSVKSASSNVRCGATWNRDVNAAKNLLLLLTTWMDGRERPEAFCVPSPPPKTTVSIEASVSAKPTDPPGLSAACLVILWASLNAEIQR

SEQ ID NO: 2102 - protein, 303 aa, Microglena sp.
KQVTSSSFQLRSEGRRQSLRGVGPLRWIRRTFPRMATNSSSSKTYWATCATSVAKQLHKLMPEENPTHDLKVQKSRFGKYFLVLSVAARDRRADRKPVHPDKVATASIDPGVRKKMVTYSPENEESFMLGQGQASDLVNLLLVHDKLQSRLDTEKTLRSKERMKIKMQMIRIRKRIFYLKKEFRDQTTNFLAARYDVLLVPQLETAKMTISAERELTTKVARQMLTLSHSVLFNRLKEKCEEYGTVFLHVLEHYTSQTCPMCGFLNKCGETYTCKNCQFTCDRDIVGAAGIFLKAVRTENPCW

SEQ ID NO: 2103 - protein, 272 aa, Microglena sp.
VAGYNTSKRRTYKWNDETQDLVKSIPSPNMSNMVDLQDHVRAYLEALPILLQHRANKGCRSMRFFRYVGKQKTIEKVCDVIAPRAQTTVVGFGNWSNQGYGISRSCSGPIKEIRRCLSRRKNVLFKNVDERNTSCKCHGCFQRLVNMKAVSVVWCGVCKESPIDGSITVEKQKMVVKNVKVHKVLHCRDSVKSASSNVRCGATWNRDVNAAKNLLLLLTTWMDGRERPEAFFVPSPPPKTAVSIEASVSAKPTDPPGFVSSLPCYPLGQLKC

SEQ ID NO: 2104 - protein, 479 aa, Microglena sp.
RDRIPPIPPLRYPLLGVKEDLIAIHSLLPERTKMLLKIQHSIIGRDEINRQWLKSVSNSAKMIRYNVFINRYLEATEDEGYAKLVNIAPIPTVKHSFITIDTDGLLGVLKDVGLVESLEKTLTNKEHWESVFDVENIRSTGKGVFTCTIDTDGVMACTHFLRAEKKKISIKDDGTAIKKQTKTLREFSESDPNVVVVANDPGRCNIAFLTWKKNKVEEKDNGGRKRKRHCEFGSKRLTRERYYVESGVFKSRGPTKKWLSNIQDCLDDLKDNSPKRTSLESFDAYVTVMVNHWDSRWGEMSKSRWGAQRLRLYGGKKRVLARFFNEVQADVGERKTIVIAYGSSKFAPGGKGELSVPTTSAFNAFRDRFKGRVAVIDEFRTTKIWHKDNTTVLQSVQSEKKGRTVRGLLWCSSTMENSKLFVNRDLNAAINIHNCFTMYPTRPGILARPKKYCKLEVVVGRTIDYKLTGSLQNAVSSEV

SEQ ID NO: 2105 - protein, 244 aa, Microglena sp.
TDWCLRQILHGCRPILLAHRASRGYRNLRFRRYCKKQKLIVEIADFVAPREKSAKVLVGFGDWKGLGATPISRRTCGPLQAIRFELRSRENVIMEDIDEFRTSQRCSCCENHLCNMVALTHRKKQDGTGWECTEGRKRIHKILHCKSSQSGAPRQQSGGMLHCGKTWDRDVNASRNILMLTLHQVFGRERPLAFRRDAPRSSSTTPPPDTDMGTQTVERFTKEATRNIFENLFNLSHAIACLPT

SEQ ID NO: 2106 - protein, 474 aa, Microglena sp.
GNCLTMRLFHHVLTELGADLKEKTTKKRPRLFSILPRKGGFTISYVPISSMTLMKLLSMGDSPLESVRGDGRHENHSMLWRKYFNVQGLETKGSRFDNRILSDGKGVSVQMKHQVGKDIAGEGGGDNAGYSKDASIEDCQDASLRQGALRVGIDPGMTDIVTIASSDGRVESFSSARFSEAAGYNTSNRRTNKWNADTQDLVKSIPSPTTSSMHDMQDHVRGYLSALPTLQHRANRGYRSMRFFRYVGKQKTIEKVCYLIAPKAQKKTIEEKVCDVIAPKAKKTVVGFGNWSNQGYGISRSCSGPVKEIRKCLSRRQNVLFKNVDERNTSCTCHGCFQKLVNMKADSVVWRRVQNEPSALIDGAPTTTTTFEKQKTVVKNVKVHKVLHCRNSVKSASSNVRCGATWNRDVNAAKNLLLLLTTWMDGKERPAAFCVPSSSPTPKTTVSGEANVGAQPTDPPGSVSSLQLLSSGPA

SEQ ID NO: 2107 - protein, 453 aa, Microglena sp.
PIFNNHYRVHLSTWIKKFVYSKENRILAKEFKDEHGIDETVFHRYLLYDIHSWGVKEDLIAIHSLLPERTKMLLKIQHSIIGRDEINRQWLKSVSNSAKMIRYNVFINRYLEATEDEGYAKLVNIAPIPTVKHSFITIDTDGLLGVLKDVGLVESLEKTLTNKEHWESVFDVENIRSTGKGVFTCTIDTDGVMACTHFLRAEKKKISIKDDGTAIKKQTKNLREFSESDPNVVVVANDPGRCNIAFLTWKKNKVEEKDNGGRKRKRHCEFGSKRLTRERYYVESGVFKSRGPTKKWLSNIQDCLDDLKDNSPKRTSLESFDAYVTVMVNHWDSRWGEMSKSRWGAQRLRLYGGKKRVLARFFNEVQADVGERKTIVIAYGSSKFAPGGKGELSVPTTSAFNAFRDRFKGRVAVIDEFRTTKIWHKDSTTVLQSVQSEKKGARFEACYGAVPPW

SEQ ID NO: 2108 - protein, 270 aa, Microglena sp.
LGRKIRSKKKIMGVGRGRGTASSGARDSRGSGTTLRAGSSNLEVRPRSGCLNIQDCLDDLKDNSPKRTSLESFDAYVTVMVNHWDSRWGEMSKSRWGAQRLRLYGGKKRVLARFFNEVQADVGERKTIVIAYGSSKFAPGGKGELSVPTTSAFNAFRDRFKGRVAVIDEFRTTKIWHKDSTTVLQSLKSEKKGRTVRGLLWCSSTMENSKLFVNRDLNAAINIHNCFTMYPTRPGILARPKKYCKLEVVVGRTIDYKLTGSLQNAVSSEV

SEQ ID NO: 2109 - protein, 686 aa, Microglena sp.
METIVNKEPPDKRTRPDRAAKIKDRKNGEENVVKCTLSRIIADKDNKDVITKVIKERVDSVSKRTYLAGVAVNRILKEVFEGVPDAQLHTVSVPSVDQNFIRQLMVGSRQAHMETRDATVERFFHNNYWFREKIEGREVIVKKKKQYVGAIARYDGDRNLYSHASKKYLTNFNNHYRVHLSTWIKKFVYSKENRILAKEFKDEHGIDETVFHRYLLYDIHSWGVKEDLIAIHSLLPERTKMLLKIQHSIIGQDEINQQWLKSVSNSAKMIRYNVFINRYLEATEDEGYAKLVNIAPIPTVKHSFITIDTDGLLGVLKDVGLVESLEKTLTNKEHWESVFDVENIRSTGKGVFTCTIDTDGVMACTHFLRAEKKNISIKDDGTAIKKQTKTLREFSESDPNVVVVANDPGRCNIAFLTWKKNKVEEKDNGGRKRKRHCEFGSKRLTRERYYVESGVFKSRGPTKKWLSNIQDCLDDLKDNSPKRTSLESFDAYVTVMVNHWDSRWGEMSKLRWGAQRLRLYGGKKRVLARFFNEVQADVGERKTIVIAYGSSRFAPGGKGELSVPTTSAFNAFRDRFKGRVAVIDEFRTTKIWHKDSTTVLQSVQSEKKGRTVRGLLWCSSTMENSKLFVNRDLNAAINIHNCFTMYPTRPGILARPKKYCKLEVVVGRTIDYKLTGSLQNAVSSEV

SEQ ID NO: 2110 - protein, 393 aa, Microglena sp.
TPEKTVAGSFFKKPHVKTGWVFDCSICTDGVSLSMQYSKTVQVRVSDLKKTSKRSRDDEGMSVSEQYDHKLKTTLPDMGIVVLGVDPGRSNIATVTYLADDKSKTWKLTRGAFYHKSGIKKQKKQQEKRFSDMIPRWESLRENGAALSTSRKDDISAYLKNYATFSDEWWRMALRRRESRDNFQRNIVKRKAMDSFWAGIKRNMKLDHPDLRVRVAYGSAITTLKATGPGEVAVPTGSMFASCKRLFKEEVHVTDEFKTTLMSWETGAKKECVYKIPSVQITTEGQIRLGYELLGHTPLKETPKVSYRDQLAVRVYCTRKQIQEKHRRGGLAPSLVDNNSIKRYPEVRGLRFSPETSTYSDRDRSSALTIARLHCMELLGQGRPLPFCRDACC

SEQ ID NO: 2111 - protein, 258 aa, Microglena sp.
WGRKRKRHCEFGSKRLTRERYYVESGVFKSRGPTKKWLSNIQDCLDDLKDNSPKRTSLESFDAYVTVMVNHWDSRWGEMSKSRWGAQRLRLYGGKKRVLARFFNEVQADVGERKTIVIAYGSSKFAPGGKGELSVPTTSAFNAFRDRFKGRVAVIDEFRTTKIWHKDSTTVLQSVQSEKKGRTVRGLLWCSSTMENSKLFVNRDLNAAINIHNCFTMYPTRPGILARPKKYCKLEVVVGRTIDYKLTGSLQNAVSSEV

SEQ ID NO: 2112 - protein, 577 aa, Microglena sp.
YHGCFRRPKTCRIREGGRSSLGTSNRRRLNTNGDDGVQQRLGKRGQGRYQVPALETSLSEETFQEDCQSGGPVPRIENRHNHPRGPRACDPHQRGCQSLEALFPLPRGKQFNTRAHLTMRLFHHVLTELGEVGRVDPKDKKTRKSHPRLFSILPRKNGFTISYVPISSMTFMKLLSMGDSPLESVSGDGRYENHTMLWRKYFNVQGLETKRSRFDNRILSDGKGVSVQMKQKGKEEVVEEGENAGYPKDAGYPKDAGYPKDANIVECKDAVGAPRVGVDPGMTDIVTVASSAGRIESFSSARFSEVAGYNTSKRRTYKWNDETQDLVKSIPSPNTSNMSDLQDHVRAYLKALPILLQHRANKGYRSMRFFRYVGKQKTIEKVCDVIAPRAQTTIVGFGNWSNQGYGISRSCSGPIKEIRRCLSRRKNVLFKNVDERNTSCKCHGCFLRLVNMKADSVVWRGICKESPIDGSITVEKQKMVVKNVKVHKVLHCRDSVKSASSNVRCGATWNRDVNAAKNLLLLLTTWMDGRERPEAFCVPSPPPKTTVSIEASVSAKPTDTPGFVSSLPCYPLGQLKC

SEQ ID NO: 2113 - protein, 299 aa, Microglena sp.
HQAVLAPFRRKKTELERGWVIEMDQKNVSKDGDKLFIFKDILGNMRYFGSKQLHKLMPEVNPTHDPKVHKSRFGEYFLVLSVAARDRRAERKPVHPDKVATASIDPGVRKTMVTYSPENEESFMLGQGQASDLVKLLLVHDKLQSRLDTEKTLRTKERMKIKMQMIRIRKRIFYLKKEFRDQTTNFLAARYDVLLVPQLEMAKMTISAERELTTKVARQMLTLSHSVLFNRLKEKCEEYGTVLLHVLEHYTSQTCPMCGFLNKCGETYTCKNCQFTCDRDIVGAAGIFLKAVRTENPCS

SEQ ID NO: 2114 - protein, 219 aa, Microglena sp.
TNLPFRGYLDTWNFVNTFLLGTGFLRHESRLELICHMNLLFEEALAGSEHRSRRHSYLSWSGSLQSRKNVLFKNVDERNTSCKCHGCFQRLVNMKADSVVWRGVCKESPIDGSITVEKQKMVVKNVKVHKVLHCRDSVKSASSDVRCGATWNRDVNAAKNLLLLLTTWMDGRERPEAFCVPSPPPKTTVSIEASVSAKPTDPPGFVSSLPCYPLGQLKC

SEQ ID NO: 2115 - protein, 236 aa, Microglena sp.
MISPETRYRSVVHYKYFLRSLRKVCNIYNVSKSSLHRWVNADQVGKSKRLKRKRKELSMLLRSTISNNIELRSRGNVIMEDVDEFRTSQRCSCCENRLCNMVALTHRKKQDGTGWECTEGRKRIHKILHCKSSQSGAPRQQNSGRLHCGKTWDRDVNASRNILMLTLHQVFGRERPLAFRRDVPRSSSRTPPPPDTDMGTQTVERFTKEATRNIFENLFNLLHPPTLPKSNDLQSG

SEQ ID NO: 2116 - protein, 364 aa, Microglena sp.
SGTTSFINRYLEATEDEGYAKLVNIAPIPTVKHAFITIDTDGLLGVLKDVGLIESLEKTLKNKEHWESVFDVENIRSTGKGVFTCTIDTDGVMACTHFLRAEKKNISIKDDGTAIKKQTKTLREFSESDPNVVVVANDPGRRNIAFLTWKKHKVEEKDKGGRKRKRKRHCEFGSKRLTRERYYVESGVFKSRGPTKKWLSNIQDCLDDLKDNSPKRTSLVSFDAYVTVMVNHWDSRWGEMSKSRWGAQRLRLYGGKKRVLARFFNEVQEDVGERKTIVVAYGSANFAPGGKGELSVPTTSAFKAFSDRFKGRVAVIDEFRTTKIWHKDSTTVLQSVQSEKRRAHGSRLAMVQFHHGEQQVVCKP

SEQ ID NO: 2117 - protein, 332 aa, Microglena sp.
ASQNSMTINSKRHCPIWVSSFWVWILVGATSLQSRIWQTTKARHGSIHAELFTTSLVSRNRKNSKKNVFSDMIPRWESLRENGAALSTSRKDDISAYLKNYATFSDEWWRMALRRRESGDNFQRYIGKRKAMDSFWAGIKRNMKLDHPDLRVRVAYGSAITKLKATGPGEVAVPTGSMFASCKRLFKEEVHVTDEFKTTLMSWETGAKKECVYKIPSVQITTEGQIRLGYELLGHTPLKETPKVSYRDQLAVREYCTRKKIQEKHRRGGLAPSLVDNKSIKRYPEVRGLRFSPETSTYSDRDRSSALTIARLHCMELLGQGRPLPFCRDACC

SEQ ID NO: 2118 - protein, 676 aa, Microglena sp.
VTYLLWKMETKPQTIAHLKDLLKLADVPYTSKSKKDDLVRLCEDNGLIPTEYKAVEKMCVVKCALKKAMNLDEEEFGGFRGHVDQLVNVVSRMFRRSSLVLAFHVTRLMEGDLPIPDMYEMKDTYWKNWLRIGVDGVFPDEESRISYESVKDVIGKVLDNDDSEYIKSYPLYFDQVLNYAGHTLSTVVSNNAWVPLVPRLIRLTKATLKALEAPNTIRVYDVMRVIRQEVQEMESWPDSVQKYVREVRARLKVPDGDRLYDDYGKCVDFQTMVRFNYWMQTRLETMGERRIRLMPIFSVHRVHVRLDLKTLVKLFKHNFPKDPNIVELSKWEHVKNPGDFMLPQRPAQKKKRSCGPGEWEAYKSALKQYDDDVKDIKATDEYRHAKGLYDTLVNARKTVAGSFFRKPPVKNGWVFDCSICTDGVSLSMQYSKKVQVRVSDLKKTSMRSRDNEGLSVAEQYDRKLETTLTEMGIVVLGVDPGRSNIATVTYLAKGKSKTWKLTRGAFYHKSGIKKQKKQQGKRFSDKIPRWESLRENGAALSTSRKDDISAYLKNYATFSDAWWRMALRRRESRDNFQRYIGKRKAMDSFWAEIKRNMKLDHPDLRVRIAYGSAIKTMKATGPGEVAVPTGSMFASCKRLFKEEVHVTDEFKTTLMSWETGAKKECVYKIPSVQITT

SEQ ID NO: 2119 - protein, 518 aa, Microglena sp.
PIFLTNIPDASKSLKSRTSDQGSTSSAQDFYEYWDSSRQDLYRQLLWLPKTGTQGLVSSSFNGFAHSTPTRSSFSITKTEPLKTSLEKTSCPSFKYIVTDGTVEDATKSNAKPKLRTLKLKLNPTKAQKSMLAEFAGCSRFMYNKAVAARLGVGSTHKSVFQIRDRYVTNKVRGEGKMPNPSFKNRQWLLQCPKSVRQSAIKAALANIKACFSNLKAGNIKQFSAPFRRKKTELERGWAIEMDQKNVSKDGDKLFIFKDILGNMRYFGSKQLHKLMPEENLTHDPKVKKSRFGEYFLVLSVAARDRRAEQKPVHPDEVATASIDPGVRKTMVTYSPENEESFMLGQGQASDLVKLLLVHDKLQSSLDTEKTLRSKERMKIKKHMIRIRKRIFYLKKEFRDQTTNFLAARYDVLLVPQLETAKMTISAERELTTKVARQMLTLSHSVLFNRLKEKCAEYGTVFLHVLEHYTSQTCPMCGFLNKCGEIYTCKNCQFTCNRDIVGAAGIYLKAVRTENPCS

SEQ ID NO: 2120 - protein, 565 aa, Microglena sp.
YHGCFRRPKTCRLREGGRSSLGQVIADVSIQMATMACNSVWANVDRVVIKYLRLKHPSLKKHFKKIVKAVVQYPESKIDTIIPEGLVHAIHIKEVVSHLRALFPLPRGKQFNTRAHLTMRLFHHVLTELGEVGRVDPKDKKTKKSHPCLFSILPRKNGFTISYVPISSMTFMKLLSMGDSPLESVSGDGRYENHTMLWRKYFNVQGLETKRSRFDNRILSDGKGVSVQMKQKGKEEVVEEGENAGYPKDANIVECKDAVGALRVGVDPGMTDIVTVASSAGRIESFSSARFSEVAGYNTSKRCTYKWNDETQDLVKSIPWPNTSNMVDLQDHVRAYLKALPILLQHRANKGYRSMRFFRYVGKQKTIEKVCDVIAPRAQTTVVGFGNWSNQGYGISRSCSGPIKEIRRCLSRRKNVLFKNVDKRNTSCKCHGCFQRLVNMKADSVVWRGVCKESPIDGSITVEKQKMVVKNVKVHKVLHCRDSVKSASSNVRCGATWNRDVNAAKNLLLLLTTWMDGREQPEAFCVPSPPPKTTVSILASVSAKPTDPPGFVSSLHCYPLGQLKR

SEQ ID NO: 2121 - protein, 506 aa, Microglena sp.
RNISRRLSKRWSSTQNRKIDTIIPEGLVHAIHIKEVVSHLTALFPLPRGKQFNTRAHLTMRLFHHVLTELGEVGRVDPKDKKTKKSHPCLFSILPRKNGFTISYVPISSMTFMKLLSMGDSPLESVSGDGRYENHTMLWRKYFNVQGLETKRSRFDNRILSDGKGVSVQMKQKGKEEVVEEGENAGYPKDANIVECKDAVGALRVGVDPGMTDIVTVASSAGRVESFSSARFSEVAGYNTSKRRTYKWNDETQDLVKSIPSPNTSNMVDLQDHVRAYLKALPILLQHRANKGYRSMRLFRYVGKQKTIEKVCDVIAPRAQTTVVGFGNWSNQGYGISRSCSGPIKEIRRCLSRRKNVLFKNVDERNTSCKCHGCFQRLVNMKADSVVWRGVCKESPIDGSITVEKQKMVVKNVKVHKVLHCRDSVKSASSNVRCGATWNRDVNAAKNLLLLLTTWMDGRERPEAFCVPSPPPKTTVSIEASVSAKPTDPPGFVSSLPCYPLGQLKC

SEQ ID NO: 2122 - protein, 231 aa, Microglena sp.
KKHKNLTIKNNVDIVRHKGQYVIHILDTILNNIDNETNEYTMCGVDPGVRCFATTYSCSIKNNGEVSSYNNRDYTHRIDLLKKLNKKRRDIMERKAVRKKQYNKIEKKKKNIVDCLHWETIHHVLKHNDFVFYGDIKSQYITKGNKNNTLNQDFNDLKFYIFKTRLEYKASVLKRKVVIMNECYTTKTCSNCGTLNNDVGSKKVFTCPICNLVAGRDANASKNILMKGLLS

SEQ ID NO: 2123 - protein, 488 aa, Microglena sp.
HGCFRRSQACRLLKGGRSSMGTGNRRRLNTNATMACNSVWANVDRVVIKYLRLKHPSLKKHFNKIVKAVVQYPESDIDKIIPASLVHANLIKDVVRRLRDLLPLPRGKQFNTRAHLTMRLFHHVLTELGADLKRKQQKKRPRLFSILPRKSGFTISYVPISSMTLMKLLSMGDSPLESFRGDGRHENHSMLWRKYFNVQGLETKGSRFDNRILSDGKGVSVQMKHQASEDVAVDNAGYPKDAILEDCQDASLRVGVDPGMTDIVTVASSAGRVESFSSARFSEAAGYNTSNRRTNKWNVDTQDLVKSIPSPTTSSMHDMQDHVRGYLSALPTLLQHRANRGYRSMRFFRYVGKQKTIEKVCDLIAPKAQKKTIEEKVCDVIAPKAKTTVVGFGNWSNQGYGISRSCSGPVKEIRKCLSRCQNVLFKNVDERNTSCTCHGCFQKLVNMKADSVVWRRVQNEPSALIDGLLQQQQTTTTFEKQKDGGEER

SEQ ID NO: 2124 - protein, 626 aa, Microglena sp.
STTQLQRHTYSQTFISQDASMMETLTSKQLPHLDRNFYYRCLLAVLTSNVRKDTLGQSFNDTMVAFDALRPAGYVKVDVRPWGQVIADVSIQMATMACNSVWANVDRVVIKYLRLKHPSLKKHFKKIVKAVVQYPESKIDTIIPEGLVHAIHIKEVVSHLRALFPLPRGKQFNTRAHLTMRLFHHVLTELGEVGRVDPKDKKNKKSHPRLFSILPRKNGFTISYVPISSMTFMKLLSMGDSPLESVSGDGRYENHTMLWRKYFNVQGLETKRSRFDNRILSDGKGVSVQMKQKGKEEVVEEGENAGYPKDANIVECKDAVGALRVGVDPGMTDIVTVASSAGRITSFSSARFSKVAGYNTSKRRTYKWNDETQDLVKSIPSPNTSNMVDLQDHVRAYLKALPILLQHRANKGYRSMRFFRYVGKQKTIEKVCDVIAPRAQTTVVGFGNWSNQGYGISRSCSGPIKEIRRCLSRRKNVLFKNVDERNTSCKCHGCFQRLVNMKADSVVWRGVCKESPIDGSITFEKQKMVVKNVKVHKVLHRRDSVKSASSNVRCGATWNRDVNAAKNLLLLLTTWMDGRERPEAFCVPSPPPKTTVSIEASVSAKPTDPPGFVSSLPCYPLGQLKC

SEQ ID NO: 2125 - protein, 311 aa, Microglena sp.
LGEVGRVDPKNKKTKKSHPRLFSILPRKNGFTILYVPISSMTFMKLLSMGDSPLESVSGDGRYENHTMLWRKYFNVQGLVTKRSRFDNRILSDGKGVSVQMKQKGKEEVVEEGENAGYPKDANIVECKDAVGALRVGVDPGMTDIVTVASSAGRIESFSSARFSEVAGYNTSKRRTYKWNDETQDLVKSIPSPNTSNMVDLQDHVSAYLKALPILLQHRANKGYRSMRFFRYVGKQKTIEKVCDVIAPRAQTTVVGFGNWSNQGYGISRSCPGPIKEIRRCLSRRKNVLFKNVDERNTSCKCHGCFQSLST

SEQ ID NO: 2126 - protein, 304 aa, Microglena sp.
QDSTEGTRSYSSAKYYRKGLIFKSQRQTDVWNLETADIVGGIIPDRDSSSSEQIGAYARFYMGAAPILLAHRASRGYRNLRFRRYCKKQKLIVEIADFVAPRKKSAKVLVGFGDWKGLGATPISRRTCGPLQAIRFELRSRENVIMEDIDEFRTSQRCSCCENHLCNMVALTHRKKQDGTGWECTEGRKRIHKILHCKSSQSGAPRQQSGGMLHCGKTWDRDVNASRNILMLTLHQVFGRERPLAFRRDAPRSSSTTPPPPPDTDMGTQTVERFTKEDTRNIFENLFNLLHPPTLPKSNDLQSG

SEQ ID NO: 2127 - protein, 345 aa, Microglena sp.
GKGKMPNPYFKNRQWLLQCPKSVRQSAIKSALANIKACFSNLKAVTSSSFHLRSDGRRQSLRGVGSLRWIRRTFPRMATNSSSSKKYWATCATSVANNSISLMPEENPTHDPKVQKSRFGEYFLVFSVAARDRRAERKPVNPDKVATASIDPGVRKTMVTYSPENEESFMLGQGQASDLVKLLLVHDKLQSRLDTEKTLRSKERMKIKKLMIRIRKTIFYLKKEFRDQTTNFLAARYDVLLVPQLETAKMTISAERELTTKVARQMLTLSHSVLFNRLKEKCEEYGTVFLHVLEHYTSQTCPMCGFLNKCGETYTCKNCQFTCDRDIVGAAGIFLKAVRTENPCS

SEQ ID NO: 2128 - protein, 335 aa, Microglena sp.
KRKQQKKRPRLFSILPRKSGFTISYVPISSMTLMKLLSMGDSPLESVRGDGRHENHSMLWRKYFNVQGLETKGSRFDNRILSDGKGVSVQMKHQVGKDIAGEGGGDNAGYPKDASIEDCQDASLRQGALRVGIDPGMTDIVTIASSDGRVESFSSARFSEAAGYNTSNRRTNKWNADTQDLVKSIPSPTTSSMHDMQDHVRGYLSALPTLLQHRANRGYRSMRFFRYVGKQKTIEKVCDVIAPKAKKTVVGFGNWSNQGYGISRSCSGPVKEIRKCLSRRQNVLFKKRRRTQHFLYLPRLLPEARQHEGRQRRLAQSSKRALRPHRRGSYNNNNV

SEQ ID NO: 2129 - protein, 400 aa, Microglena sp.
HARERRKTVAGSFFKKPPVKTGWVFDCSICTDGVSLSMQYSKTVQVRVSDLKKTSKRSRDEEGMSVAEQYDHKLKTTLPDMGISFWVWILVGATSLQSRIWQTTKSKTWKLTRGAFYHKSGIKKQKRQQEKRFTDMIPMWASLRENGAALSTSRMDDISVYLSNYATFSDEWWRLALRCRESRDNLQRYIGKRKAMDSFWAGIKRNMMMDHPDLRVRVAYGSAITKLKATGPGEVAVLTGSMFASCKRIFKEEVRVTDEFKTTLMSWETGAKKECVYNIPSVTLNAEGQISIGDEWLLCHTLLKKPPKVAERDQSAVRVYCTRKKIQEKHRRGGLATSLFDVNKSIKRYPEVRGLRFSPETSTYSDRDRSSALTIARLHCMELLGLGRPLPFSRCKAACC

SEQ ID NO: 2130 - protein, 219 aa, Microglena sp.
EVRLPHCDRRLCSQYILMNKPTCLTCSMPGDAFSTRAHEYMTTDEGGILSFRDNVVVAAVDPGVTDIVTVTGLDGSPNLYSSAQYYRKGLIFKSQRQTDVWNLETADIFGDVIPDRDSPMSRQIGAYARFYMGAAPILLAHRASRGYRNLRFRRYCKKQKLIVEIADFVAPREKSTKVLVGFGDWKGLGATPISRRTCGPLQAIRFELRSRENVIMEGR

SEQ ID NO: 2131 - protein, 260 aa, Microglena sp.
TDWCVRQILHGCRPNPSCPSCFQGYRNLRFRRYCKKQKLIVEIADFVAPREKSAKVLVGFGDWKGLGATPISRRTCGPLQAIRFELRSRENVIMEDIDEFRTSQRCSCCENHLCNMVALTHRKKQDGTGWECTEGRKRIHKILHCKSSQSGAPRQQSGGMLHCGKTWDRDVNASRNILMLTLHQVFGRERPLAFRRDAPRSSSTTPPPPLILIWGHRRLNGLPKRLLGISSRISSTCCTPQRCPKATICSLDDYKVSHFI

SEQ ID NO: 2132 - protein, 418 aa, Microglena sp.
HARERPKNSRRFLLQETTCQDGWVFDCSICTDGVSLSMQYSKTVQVRVSDLKKTSKRSRDEEGMSVSEQYDHKLKTTLSDMGIVVLGVDPGRSNIATVTYLAEDKSKTWKLTRGAFYHKSGIKKQKKQQEKRFSDMIPRWESLRENGAALSTSRKDDISAYLKNYATFSDEWWRMALRRRESRDNFQRYIGKRKAMDSFWAGIKRNMKLDHPDLRVHVAYGSAITKLKATGPGEVAVPTGSMFASCKRLFKEEVHVTDEFKTTLMSWETGAKKECVYKIPSVQITTEGRIRLGYELLGYTPLKETPKVSYRDQLAVRVYCTRKKIQEKHRTGGLAPSLVDNNSIKRYPEVRGLRFSPETSTYSDRDRSSALTIARLHCMELLGQGRPLPFCRDACCWATKKHDGVPLQCGLLHHKVTP

SEQ ID NO: 2133 - protein, 274 aa, Microglena sp.
SSSLSVKLTFGTSRRLTSRHITEQIGAYARFYMGAAPILLAHRASRGYRNLCFRRYCKKQKLIVEIADFVAPREKSAKVLVGFGDWKGLGATPISRRTCGPLQAIRFELRSRGNVIMEDVDEFRTSQRCSCCENRLCNMVSLTHRKKQDGTGWECTEGRKRIHKILHCKSSLSGAPRQQSGGRLHCGKTWDRDVNASRNILMLTLHQVFVRERPLAFRRDAPRRSSKTPPPPDTDMGTQTVERFTKEATRNIFENLFNLLHPPTLPKSNDLQSG

SEQ ID NO: 2134 - protein, 234 aa, Microglena sp.
LMPEENPTHDPKVQKSRFGEYFLVLSVAARDRRAERKPVHPDKVATASIDPGVRKTMVTYSPENEESFMLGQGHASALVKLLLVHDKLQSRLDTEKTLRSKERMKIKKQMIRIQKIIFYLKKEFRDQTTNFLAARYDVLLVPQLETAKMTISAERELTTKVARQMLTLSHSVLFNWLKEKCEEYGTVFLHVLEHYSSQTCPMCGFLNKCGGETYTCKNCQFTCDRDIVGAAGSS

SEQ ID NO: 2135 - protein, 755 aa, Microglena sp.
PRMEHVCDVCIKSSVMYKLCKMATKPPTVAKLKELLKLAEVAYSSKDKKDDIVRLCEDNGLIARPPPEYKTVEKMCVVKCALKKAMSLDDEEFGKFREHVDQLVNVVSRMLRRSSLVLTFHVTRLMEGDLPIPNMYDMKDTYWKDWLRIGVDGVFPDEESRISYEAVKDVIGKVIGSDDPDYINSYPIYFDQVLNYAGHTLSTVVSNNAWVPLVPRLTRLTKATLNALKAPKTIRVYDVMRVIQQEIQEMESWPESVQEYVREVRVRLKVPDGSRLYDDYGKDMDFPTMVRFNYWMQTRLESIGARRIRLMPIFNVQRAHVRLDMKTLVNLFRHVFPKDPNIVELSKWKDVKDPDRFMLPLKPAVKKKKSCGPGEWEAYKLAQQKYDADVNDIKDTDEYRHAKGRYDTLVNARKTVAGSFFKKPPVKTGWVFDCSICTDGVSLSMQYSKTVQVRVSDLKKKSKRSRDDEGMSVSEQYDHKLKTTLPDMGIVVLGVDPGRSNIATVTYLADDKSKTWKLTRGAFYHKSGIKKQKKQQEKRFSDMIPRWESLRENGAALSTSRTDDISAYLKNYDTFSDEWWRMALLRRESRDNFQRYIGKRKAMDSFWAGIKRNMKLDHPDLRVRVAYGSAITTLKATGPGEVAVPTGSMFASCKRLFKEEVHVTDEFKTTLMSWETGDKKECVYKIPSVQITTEGQIRLGYELLGHTPLKETPKVSYRDQLAVRVYCTRKQIQEKTQGGWLSPLSCRQQLDQSVP

SEQ ID NO: 2136 - protein, 356 aa, Microglena sp.
ISLRVLTCSMPADAFSTRAHEYVTTDEGGIVSFLDNVVVAAVDPGVTDIVTVTGLNGGTRSYSSAKYYRKGLIFKSQRQTDVWNLETADIVGGIIPDRDSSSSEQIGAYARFYMGAAPILLAHRASRGYRNLRFRRYCKKQKLIVEIADFVAPRKKSAKVLVGFGDWKGLGATPISRRTCGPLQAIRFELRSRENVIMEDIDEFRTSQRCSCCENHLCNMVALTHRKKQDGTGWECTEGRKRIHKILHCKSSQSGAPRQQSGGMLHCGKTWDRDVNASRNILMLTLHQVFGRERPLAFRRDAPRSSSTTPPPPPDTDMGTQTVERFTKEATRNIFENLFNLLHPPTLPKSNDLQSG

SEQ ID NO: 2137 - protein, 340 aa, Microglena sp.
RRRYQDRRKYDGSLKTILPDMGIVVLGVDPGRSNIATVTYLADDKNKTWTLTRGAFYHKSGIKKQTRQKELRFADMISMWESLRENGAALSTSRTDKISAYLSNYAKFSDEWWRLALRRRESRDNLQRYIGKRKVKDSFWAGIKRCMMKELPDMKVCVAYGSAITKLKPTGPGEVAVPTGAMFASCKRIFKEDVSVTDEFKTTLMSWETGKEKERVYKIPSVCSADVKLRLGGERFGHTKSKTMPKVADCDHLGVRLYNKRKGAQEKHRRGGFATSLVDSQKSIERYPEVRGLQFSPETCIYSDRDRSSALTIARLHCMELMGLGRPLPFAHSSSVVVDE

SEQ ID NO: 2138 - protein, 568 aa, Microglena sp.
SIKSLRTSVRDRTGRPKLRTGKRRQENVVKCTLSRIIADKDNKDVITKVIKDRVDSVSKRTYLAGVAVNRILKEVFEGVPDAQLHTVSVPSVDQNFIRQLMVGSRQAHMETRDATVERFFHNNYWFREKIEGREVIVKKKKQYVGAIARYDGDRNLYSHASKKYLTNFNNHYRVHLSTWIKKFVYSKENRILAKEFKDEHGIDDIVFHRYLLYDIHSWGVKEDLIAIHSLLPERTKMLLKIQHSIIGRDEINRQWLKSVSNSAKMIRYNVFINRYLEATEDEGYAKLVNIAPIPTVKHSFITIDTDGLLGVLKDVGLVESLEKTLTNKEHWESVFDVENIRSTGKGVFTCTIDTDGVMACTHFLRAEKKKISIKDDGTAIKKQTKTLREFSESDPNVVVVANDPGRCNIAFLTWKKNKVEEKDKGGRKRKRHCEFGSKRLTRERYYVESGVFKSRGPTKKWLSNIQDCLDDLKDNSPKRTSLESFDAYVTVMVNHWDSRWGEMSKSRWGAQRLRLYGGKKRVLARFFNEVQADVGEWKTIVIAYGSSKFAPGGKGELSVPTTSAFQCV

SEQ ID NO: 2139 - protein, 265 aa, Microglena sp.
ACSTARQYRFRVSDLKKTSKRSRDDEGMSVSEQYDHKLKTTLPDMGIVVLGVDPGRSNIATVTYLADDKSKTWKLTRGAFYHKSGIKKQKKQQEKRFSDMIPRWESLRENGAALSTSRTDDISAYLKNYDTFSDEWWRMALLRRESRDNFQRYIGKRKAMDSFWAGIKRNMKLDHPDLRVRVAYGSAITTLKATGPGEVAVPTGSMFASCKRLFKEEVHVTDEFKTTLMSWETGAKKECVYKIPSVQITTEGQIRLGYELLGHTH

SEQ ID NO: 2140 - protein, 389 aa, Begonia darthvaderiana
AVDIRQLIHYNACINFAKIICMKTLKLRIRDKHTDQLNRLSGSVNFVWNYVNDLSYRHLQKTGKFFSAYDLNEYTKGSGELLGLHSQTIQAINETHAKARKQFKKAKLSWRTNNPNSKRKSLGWLPFKQSAIKHIATHQTSKKGLKSTLQLSLAKGQKLVIDLWDSYNLSLYQINTLEIVQDSRNRWYACITVKDYPKQSCGTGSIGVDLGLKDSATASNGDKLQIKQTLKYAKQLAIAQRSNNKKRIKAIHAKIKNTRQDLIHKFTTQLVKANALIVVGDVRTSQFNSKKGKLAKSVYDAGWFELKRQLTYKCENAGCRFEIVNEKYTTQTCSCCGQIDRNSPKGRAGLRIREWTCAMCGTWHDRDINASRNILAVGLDRLGAGIPER

SEQ ID NO: 2141 - protein, 357 aa, Begonia darthvaderiana
NTTMKTLKIRIKDSNQTKLLCQLASEVNLVWNYCNELGFKYLQRTGKFLSAYDIDKYTAGASKECGLHSQTIQAISNEYVTRRKQFKKSKLSWRVSNPKSAKRSLGWIPFKKSAIKYGKGFIQYGKNIFKLWDSYNLSQFDIHTGSFVQDSRGRWYVCVTVDTPKQLPNQATKAIGIDLGLKDLATCSDGTKISNPKYHSHYQAKLGKSQRANKKRLVRTLHAKIKNSRKDYLQKQSTQLVKDNGLIVVGSLSANKLTKTKMAKSVNDTGFSAFKTMLKYKCENAGVWFVEVSENYTTQICSCCGQIDSNSPKGRTNLGIREWTCAKCGTWHDRDINASKNILRLGHQTLAGGIPSL

SEQ ID NO: 2142 - protein, 413 aa, Triops longicaudatus
KINKSTMANTAYKYRLIPTTDQEKQLSQLAGATRWLWNYMLDLNTKQYAIDKKFIFKYELNRLIPELKKTHEWLKLPPSQSLQAVGFDLDRALQSVWKSKFGFPKFKSKHKSKDSFRIPQTNGHIGITERHIKIPKIGLVKWHYHRPVEGIVKSITVSKDIDQWYVSVLVETPDVIKTPIDPTNCNAIGIDLGISSFLIDNNGNKVDSPHFLKKKATRLKRYQRQVSRKCKGSANRNRARIKLAKWHRDIRNARADWLHKLSNKIVNEHDLICVEDLKTKSLMKHRKQKSLNRAISDQGWGMFLTMLKYKSQQRGKTLTQINQYAPSSKACSCCGHVMDKMALDIREWECPACGAHHDRDTNAANNILFWGIMATKNTLGTGEINACGDTSADVSNQCRVSTKQEAVGPLGPQ

SEQ ID NO: 2143 - protein, 243 aa, Chloropicon primus
AEPQQSPTEIERPRHFSEAHKCRSPQGGDWDSAHLPLQRHRFFGQRRWRRKGLETFGRKQRTMEFIASKLFPTASHIVFYGAANFPSGIRGRPPGPCIGLKRFLVTKTTPGRFFFVDEYNTSKMCAACSQKNISTELRRVHKSDRSRGDGPPSKKRRPQYGVLSCPKCSMEVPRDDNGSDNILAIASAFLQGLSHARFGRQRCDALCSGKGYGSRLKPSRTLDKIFLEIEEDVGEASGEEGFN

SEQ ID NO: 2144 - protein, 260 aa, Idotea baltica
ISINAENFRGGREFEGKIKRITVRQLASGVYMAIALIEDGAELPAQPEKNLQPIGIDVGCKTEGTQHQFAALSNGDIVYSPALIKQQRKKLARLQRQFAKKQKGSNNRAKLKQKIAKLHWKMGNARNDFLHKLTHTLTRENQSIAVETLNIKGMMAKPKPKQDTNGNYIANGAARKAGLNKSLSDVALGEFYRQLEYKCAWRGVALIKIDRWAPSSKTCSACGEVNQELTLSMRKWQCQCGALHHRDINAAINIANMAVA

SEQ ID NO: 2145 - protein, 252 aa, Amoeboaphelidium protococcarum
QVSDLYGIDLGVVIFAVAVHTRPTEENTALQAMCTTKPRDSTSVFYSTGNFCIRIEFIVLQVTYAIYIEDVWSEPRRACTLNQCLRKAASSATMTNQRMDWYLTLEYQRVKFRYHVERSRLLKDICCQLLQLDRYSDARKNQIVVYIGKGAGGSRFSPYVLRNNIQPPTLLLQNYISQVSRMIRTQEKGSSNHCLFCEQAITRNRRGRNDALFCRGCAQWFNGDWLGGANICKIGLTMSSNQGHFPLALTRR

SEQ ID NO: 2146 - protein, 252 aa, Amoeboaphelidium occidentale
VVWEKPDHFYVCFPYNKTNQEKTTQNHPTAAALDPGVRTFQTVYESSGNFFEAGKGDIRRVERLCLNLDRLISKATGVKTGRKNRYKRRRMNAAIQRARQRIKNLISDFHGKLAHDLTSRYNVILIPTFDVSKMVIKNNRKINLKTARNMLNWSHYKFKQKLLQKAEDTPNCAVHVVTEEYTSKACGVCGRLNHKLGGNKKFNCTHCGFKFDRDMNAARNIMIKNLESSGYKLVSLRACRLLPVARPQNRYS

SEQ ID NO: 2147 - protein, 311 aa, Amoeboaphelidium occidentale
EYLFVVPRDKVVFRLNAMEWWRRAFNVDKLTTATKRFGFSISTNGFEYHQHNMKQFERSEINDWGYNYEGEFIPLEINGQTRVAALDPGRNSLYVAVSGDTAADVLECSNSRWQEISGTRYFTKKANTWITADRDRRMAITLTPTPCCYNTDDYITHLLHVLEYRDEFLGFYRAMRWRRLRWKTRIKRQKAYDNLYKELAAGAEDVVIAYGGGGFSHNSRGHPPTPNKHLFLELKRRTRCRLVPEFRTSKLCSLCDNELVQSEVWSIKSCNNNNCWTRWNRDVNGARNIRRVFLHMNANGGEKPEAFRRGN

SEQ ID NO: 2148 - protein, 246 aa, Ustilago bromivora
YFFLCYSVLKSVVPQEQSLKQAIVVKSVNPGVRTPSAVYSSDGCLLNVGSQDNSIHLEQLCRCNNKIQSSRHQRHQPHHQQPLPPLQTTSDPQSSQQAQSQLQEACQHCPALPFALSSVQHHKLQKCSKKVHKKLQQLIDDLHCWMANYLATSSDIVVMPRMEVCKMIQRKNGNLHQNTHQRLLGWGHCNFINHLLVKCHDIAHNPHYLHKHVWPMVLLIQPEAYTSKTCSQCGNLNQRLGASKQF

SEQ ID NO: 2149 - protein, 213 aa, Ustilago bromivora
QDPKQSSSETSTKSSTAAATATNDFQSSIISASPSSAAASLPMLSSLPFAFSSVQCHKLQKRSKKVCKKLQQLIDDLHCWMANYLATSSNIVVMPRMEVCKMIQRKNGNLHQNTCWRLLGWGHCNFINHLLVKCHDIAHDPCYLHKCWQPTVLLIQPEAYTSKTCSQCGNLNQRLGASKQFQCPTCLYLADHDHNSAFNMLIKAICRTPLSLM

SEQ ID NO: 2150 - protein, 245 aa, Ustilago bromivora
FLLHYNVLTYVVPQEQSLKQAIVVKSVNPGVRTPFAVYSSDGCMLDVGSQDNGICLEQLCQCNNKIQSSCCWRRQLHHQQLLPPPQTTSNLQSSQQVQAQPQEACQHCPALRFALSSVQHHKLQKRPKKVCKKLQQLINDLHCWMANYLATSSDIVVMPRMEVHKMIQRKNGNLHQNTHQRLLGWGHCNFINHLLVACHDIAHDPCYPHKHWWPTVLLVQPEAYTSKTCSQYGNLNQRLGASKCF

SEQ ID NO: 2151 - protein, 365 aa, Synstelium polycarpum
KQSIGRTSNDFRSLKLQKIIAIGIDPNSASNTIVSSRRAIKMIIRVRKRTKLKPGVYPYSGPTPATAPAATCTASNAPTTSTTTTTPATAPVTAPNAPTTSTTTTTSATGTAPKATRPPKSDFKTYDLDARSKYDFNLADYRARGGFQESIDVYAARIEANNLSNFEKGLPTLKPSTAATNADRLEIATKRLTYLLANRADYLKYIELRNGEEMRHDKVAQWFRKTRARDSLLDPAIMFIRQTYLSTPMGKDSLRKDGNYTQEQINDIDKKMKSVVVICKWLYVDKMISITSLTNYLFLYTVSTIVFGGASFKHNMKGSPTNFAGKTYRKAFIDAGFSVIKVNEFCTSRVGSSLSFCHYSKNHND

SEQ ID NO: 2152 - protein, 241 aa, Tetradesmus obliquus
LGKGKEFCSSSDTCPTEKPKTDLLTRRQYYHEIKHRTRMLWEAQRSNVPAVRNAISTLSNENKVVNTLGYIQAVDEQSRVLQSEYLELKERAIWKMRLFRLKKKSMDKAVQKVFDRGKKRTYCLGIGDAKFASTGKGEKAMPTTQIVKAFLKAKHRRSAATKIMVINEFRMTMCCCACGNTTEAKMKQSGQRSSRLRLCTQCNETTDKLRDRDVQAARNILWLCQYEYYGLERPGYLCRNQ

SEQ ID NO: 2153 - protein, 260 aa, Rhizomucor pusillus
DQGVDKSLAFKGTINTNGYGVSSCKQNFASGFGRKPKKVKDKKGDFKYIQDLDANTSRVYIRTPFLSIRDEGIYFTACIKTATQKSQTHTDMQGIKRCKTRKPRSSANLQNTSNQTMSKICKSALSKHCSKTVDLEKFKAYLKARSDVAPTLSSHYQMLIFRKLRFRRYLHRQRADDRLAKYLRSKFGQDLVLVIGDWSMMAKFHVIGLLRLLKKKGFEVYLLDEFKTSSICRNCNHALEKFKEVRNPRTYRREKMSRVA

SEQ ID NO: 2154 - protein, 219 aa, Rhizomucor pusillus
SFRRHQTLFFRESSSFPAKLMTRRKKCSQTVLLRADKSNKSIISREKQLQTFIQLKKTVADYDKFKQNEEKETKNKLMKSKRVPRGTWEIADVAAQVETASGVDRFRERRDTLQYFYNSPPERAYVKEACGTGKTSIPVMFIGDQGLGTNARIKGHVKRVATKIRKEHHLHTVVVKTSEYRTSQTCGWCLGPVVRPRATILKDGKKKKTVRSWCLFMHE

SEQ ID NO: 2155 - protein, 266 aa, Rhizomucor pusillus
PKADDNGLRVWNYYDNRSVRRRTWHNSVSQRSCVDEACYLIINQANSTFAMSQQIHLERIIQRIDRPFIYGFDLDGMSRESRKGALAPMDHKLANTLYRKIEQRSRGRDSTEADIAKRVDEYLYSRMCYYYTKQGREQRVDFLQRTPVVSLPDTTRLDDGLEKVFQVVRCPSCNHLFHRDSNAADDLASSIIRYELRFQQRPHWFIQPSRRQRPSREMEPFQSPERTSSGRTRGTQERPESSRAPALRRSERLRSKKQKGIYESSG

SEQ ID NO: 2156 - protein, 201 aa, Rhizomucor pusillus
RTEASSGRAEKRKAPASVAEEGSRMRTTYWLLLAKIVFHQHRKGAVSLMDTRLASALIKHCKAEGHTITAVDEYNTSKVCPRCITDRRTSYLQYLRRPPVSSRHIGRASLGKDGNEEIKHVTVCDVCNMHFHRDDVAAHSQAFISASMLEHGQRPKSFIRPSRQLKLNTHPRKMGRAQRPCASEMVSMSILNLSLIFESRL

SEQ ID NO: 2157 - protein, 375 aa, Ectocarpus sp.
TLLFFRRERLAQKHSSPSSATRHERVRRVRRATSEHGYLSSLLGSGPDKCPWMIGQSFLTDGVQIKLLLVTLEHGRKAFSGSSELNEEGYNKLPRANAQLESLLKEGRGVYNISSLLESTSIREDVVVMSADPGQAKVINVSSATASTWAKQDPDVILKTSTCVFGDNYRRDTLASRSDKYETFRRKDQPYGVAIDRLSNEKKRTSCLATFIQYCKSWCANGPALFLETLQTGRKFMRFDRFRATQKTLAKIADRYMGHVEDTCRIMLFGKASFRAQKGRASAPRKALIREMASRGVVLMVNEYNTSKKCPGCGEDTVEDKERRIRSCKNFKIGSPEESCRLHRLTPEFEMDRDNVGSTNIGMRGFGQLLGQVWF

SEQ ID NO: 2158 - protein, 665 aa, Ectocarpus sp.
CSQTNMSQHQMRPESSGSIQILYANGIEPTQSSVSESTAEIGCSISPNSNEINPAMQNSKTKKKRREITQSTAGSLLPSKQKTSEDKSNILRHPTLGFKYFLTRDQGSTSSGKGSKGFFVKSCADISQRLWYPTETDCAELLSTFSNGYVTSTKLNSWFTTKIRKDPTRRNSWRTSWPLSTFSVPGSMEKDQISRGNAIQKSAKNMLVMKLLVVQLRILSIRREQNEHLVNMVIQSVNDRIETIKEYRQSLGRLSKTQEKQLETLTTSLDQFTRDAFHGDDAIDELLEVQDSLINQLAERLLTIDPHVKRAKQVRIVNIDPSHKSQLRRYMKSSRKIFNTAVDLHNKGFRGEELRRQCVRSKFINKDLRKTPEHIRQKAFDKFSSSRASCDSLNGHLAFISRKKDDQWVGLQKADCVFSGTKLVVFGKLEIELAESALEGRPRCDVEITESHGIFHATIMDIRNYNTPISPDISSVRICALDMGERTFGTMYDPDGTIAFLGTDANKRVKQRLRVIWKLRNGLKTKLSASKKRRVKKAVRRASAKLKNLIKDMHHRLANWLVQNYDVVLIGRLGIGVMKAKRKGKRVLQALSHYSFRSTLLQKASVNRTSVRVVSEAYTTKQCNQCGYMNWTIGSSEVFSCKNCKVVCHRDVHSGRGIFIRSMSE

SEQ ID NO: 2159 - protein, 370 aa, Tetradesmus acuminatus
AALPCKAEGEAAVVGLLVNRWRRSQLCVRRHKASLKKGHQNYSSSSSSSSHQQQQKQRDHRRYHPSTASSPRLGCCGHRPWQVHDHARRDPGAEHPHAGVDAAPQALPPKVRAGTGEAKERRWDTAMIGGAWKQMNQQSGALRSSSLQQLTQHIAAYNSVAEECWTSAMQRAKLRCRTYGGRKRCLDRFFSGLERDVSAAEPNKRLAIAYGAATFSPSGTGKPATPTTAAYRAALRLWSSGAIVEKQNECRTSKQCCHCHGDVEACWQSVRLQLGPAPDTDASGAGPCPSQLSARIQVETCHGPTVPKAGAYLRGLLFCPQCSKFLNRDRSAALNIRFLFTQTQLLGCSMPTQFVARRKQKKQKKRNQAS

SEQ ID NO: 2160 - protein, 299 aa, Tetradesmus acuminatus
NFGNIWNLLETSRNFRFLQPYTRTLEWTLPRKRYRLESGLAQAQAKERRWDTAMIGGAWKQMNQQGRALRSSSLQQLTQHIAAYNSVAEEWWTSAMQRKRAKLRFRTYGGRKRCLDRFFSGLERDVSAAEPNKRLAIAYGAATLSPSGTSKPATPTTAAYRAALRLRSSGAIVEKQNECRTSKQCCHCHGDVEACWQSARLQLGPAPDTDAAGAGPCPSQLSARIQVETCHGPTVPKAGAYLKGLLFCPECSKFLNRDRSAALNIRFLFTQTQLLGCSMPTQFVARRKQKKQKKRNQAS

SEQ ID NO: 2161 - protein, 245 aa, Tetradesmus acuminatus
AEGEAAVVGLLVNRWRRSQLCVRRHKASLKEGHQNCNSSSSHQQQQKQRDHGRYHPSTASSPRLGCCGHRPWQVHDRACRDPGAGHPHAGVDAAPQALPPKVQAGTGEAKERRWDTAMIGGAWKQMNQQGGALRSSSLQQLTQHIAAYDSVAEEWWTSAMQRKRAKLRFRTYGGRKRCLDRFFSGLERDVSAAEPNKRLAIAYGAATFSPSGTGKPATPTTAAYRAALRLRSSGAIVEKQNECRT

SEQ ID NO: 2162 - protein, 363 aa, Tetradesmus acuminatus
AEGEAAVVGLLVNRWRRSQLCVRRHKASLKEGHQNCNSSSSHQQQQKQRDHGRYHPSTASSPRLGCCGHRPWQVHDRARRDPGAGHPHAGVDAAPQALPPKVRAGTGEAKERRWDTAMIGGAWKQMKQQGGALCSSSLQQLTQHIAAYNSVAEEWWTSAMQRKRAKLRFRTYGGRKRCLDRFFSGLERDVSAAEPNKRLAIAYGAATFSPSGTSKPATPTTAAYRAALRLRSSGAIVEKQNECRTSKQCCRCHGDVEACWQSVRLQLGPAPDMDTAGAGPCPSQLSARIQVETCHGPTGPKAGAYLRGLLFCPQCSKLLNRDRSAALNIRFLFTQTQLLGCSMPTQFVARRKQKKQKKRNQAS

SEQ ID NO: 2163 - protein, 363 aa, Tetradesmus acuminatus
AEGEAAVVGLLVNRWRRSQLCVRRHKASLKEGHQNCNSSSSHQQQQKQRDHGRYHPSTASSPRLGCCGHRPWQVHDRARRDPGAGHPHAGVDAAPQALPPKVRAGTGEAKERRWDTAMIGGSWKQMNQQGGALRSSSLQQLTQHIAAYNSVAEEWWTSAMQRKRAKLRFRTYGGRKRCLDRFFSGLERDVSAAEPNKRLAIAYGAATFSPSVTGKPATPTTAAYRAALRLRSSGAIVEKQNECRTSKQCCHCHGDVEACWQSVRLQLGPAPDTDAAGAGPCPSQLSARIQVETCHGPTVPKAGAYLRGLLFCPQCSKFLDRDRSAALNIRFLFTQTQLLGCSMPTQFVARRKQKKQKKRNQAS

SEQ ID NO: 2164 - protein, 386 aa, Tetradesmus acuminatus
PTDTLQAHRAEISGRVVTSGQTVSVIHKNSDRGDSSRAATRHTRQGNTHSQGRSIGINDRHFDLPVPLEPQKHDKMHIHACTSCRIGTAGANRTKPLNGYVSAGHPHAGVDAAPQALPPGVRVYTGPAQAQAKERRWDTVMIGGAWKQMNQQGGALRSSSLQQLTQHIAAYNSVAEEWWTSAMQRKRAKLRFRTYGGRKRCLDRFFSGLERDVSAAEPNKRLAIAYGAATFSPSGTGKPATPTTAAYRAALRLRSSGAIVEKQNECRTSKQCCHCHGDVEACWQSVRLQLGPAPDTDAAGAGPCPSQLSARIQVETCHGPTVPKAGAYLRGLLFCPECSKFLNHDRSAALNIRFLFTQTQLLGCSMPTQFVARHKQKKQKKRNQAS

SEQ ID NO: 2165 - protein, 410 aa, Tetradesmus acuminatus
AEGEAAVVGLLVNRWRRSQLCVRRHKASLKEGHQNCNSSSSHQQQQKQRDHGRYHPSTASSPRLGCCGHQPWQVHDRARRDPGAGHPHAGVDAAPQALPPKVRAGTGEAKERRWDTAMIGGAWKQMNQQGGALRSSSLQQLTQHIAAYDSVAEEWWTSAMQRKRAKLRFRTYGGRKRCLGRFFSGLERDVSAAEPNKRLAIAYGAATFSPSGTGKPATPTTAAYRAALRLRSSGAIVEKQNECRTSKQCCHCHGDVEACWQSVRLQLGPAPDTDVAGAGPCPSQLSARIQVETCHGPTVPKAGACLRGLLFCPECSKFLNRERSAALNIRFLFTQTQLLGCSMPTQFVARRKQKKQKKRNQASRNKLVYRGPCPLLIRPCCRCVCNNNNHSDKPYLSASAPRLTLWGGGN

SEQ ID NO: 2166 - protein, 363 aa, Tetradesmus acuminatus
AEGEAAVVGLLVNRWRRSQLCVRRHKASLKEGHQNCNSSSSHQQQQKQRDHGRYHPSTASSPRLGCCGHRPWQVHDRARRDPGAGHPHAGVDAAPQALPPKVRAGTGEAKERRWDTAMIGGAWKQMNQQGGALRSSSLQQLTQHIAAYNSVAEEWWASAMQRKRAKLRFRTYGGRKRCLDRFFSGLERDVSAAEPNKRLAIAYGAATFSPSGTGKPATPTTAAYRAALRLRSSGAIVEKQNECRTSKQCCHCHGDVEACWQSVRLQLGPAPDTDAAGAGPCPSQLSARIQVETSHGPTVPKAGAYLRGLLFCPQCSKFLNRDRSAALNIRFLFTQTQLLGCSMPTQFVARRKQKKQKKRNQAS

SEQ ID NO: 2167 - protein, 539 aa, Tilletia controversa
KTNHVTSRVQTRDQHRSFFHSFLFFSFLFIFFFFHFSFFLGHHRKIKRLTSTAPIFSLICYIQITMADPPPAPWIGSVAPESVLWPGVEGTQQAAEWHNAPINTWFLPKYAFLPHPVVPDEDIGGMLTQLSATLRQRLDAVPPPPPSRKTRPGERQDNSRLKTYRTRLRPNTQQKEALRKTAGIFRWTYNRAVAYLKAHPNASLKDVREHSVTEDGLPLMNLSWVTPVPYSIREQACFDAHTALQNGLADVRDGKIPHFELKFRKKRALFSSFRIRKRDWVGGCLKIPNFGLGPGQRQTKIQTGIDVPSLEHDGACIKQENGSWFLLWQKDMGEEKMRVPAARGPEMCAIDPGVRTFATIYDPLRGMAAKFGDGDHKRLFRLGTHLDELISRSTQATAKKRYRMRRAANRLRARIRHLVDELHWKLRGYLKQNYDTVLLPTFNAHQMSRRGQRRIGRKTVRAMMSWAHGRFRSRLNEAMEVVEVVEDWTSKVCSTCGTVNHRLGGSEIHRCPGCLTVSDRDVNGAKNIFLHWKYDFLNQ

SEQ ID NO: 2168 - protein, 494 aa, Tilletia controversa
IKRLTSTAPIFSLICYIQITMADPPPPPWIGSVAPESVLWPGVEGTQQAAEWHNAPINTWFLPKYAFLPHPVVPDEDIGGMLTELSATLRQRLDAVPPPPPPRRTRPGERQNNSRLKTYRTRLRPNTQQKEALRKTAGIFRWTYNRAVAYLKAHPNASLTDVREHSVTEDGLPLMNLSWVTPVPYSIREQACLEAHTALQNGLADVRDGKIPHFELKFRKKRALFSSFRIRTRDWVGGCLKISNFGLGPGQHQTKIQTGIDVPSLEHDGACLKQENGSWFLLWQKGMGEEKMRVPAARGPEMCAIDPGVRTFATLYDPLRGMAAKFGDGDHKRLFRLGTHLDQLISRSTQASAKKRYRMRRAANRLRARIRHLVDELHWKLRGYLKQNFDTVLLPTFNAHQMSRRGQRRIGSKTVRAMMTWAHGHFRSRLNEAMEVVEVVEDWTSKVCSTCGTVNYRLGGSEIHRCPGCLTVSDRDVNGAKNIFLHWKYDFLNQ

SEQ ID NO: 2169 - protein, 537 aa, Tilletia controversa
QTESKHVTSTDRFFILFFSFLFFSFLFIFFLFSFFFFLGHHRKIKRLTSTAPIFSLICFIQITMADPPPAPWIGSVAPESVLWPGVEGTQQAAEWHNAPINTWFLPKYAFLPHPVVPDEDIGGMLTELSATLRQRLDAVPPPPPPRRTRPGEHQNNSRLKTYRTRLRPNTQQKEALRKTAGIFRWTYNRAVAYLKAHPNASLTNVREHSVTEDGLPLMNLSWVTPVPYSIREQACLEAHTALQNGLEAVRDGDIPNFELKFRKKRALFSSFRIRKRDWDGGCLKISNFGLGPGQHQTRIQTGIDVPSLEHDGACIKQENGSWFLLWQKDMGEQKMRVPAARGPEMCAIDPGVRTFATLYDPLRGMTAKFGDGDHKRLFRLGTHLDQLISRSTQASAKKRYRMRRAANRLRARIRHLVDELHWKLRGYLKQNFDTVLLPTFNAHQMSRRGQRRIGRKTVRAMMSWAHGRFRSRLNEAMEVVEVVEDWTSKVCSTCGTVNYRLGGSEIHRCPGCLTASDRDVNGAKNIFLHWKYDFLNQ

SEQ ID NO: 2170 - protein, 448 aa, Tilletia controversa
LSISLRSLEGTSITMADPPPAPWIGLVAPESVLWPGVRGTQQAAEWHNAPIDSWFLPKYAHLPHPVVPDENVGGMLTQLSATLRQRLDAVPPPPPPRRTRPGERQDNSRLKTYRTRLRPNTQQKEALRKTAGIVGWIYNRAVEYLKAHPNASFHDVREHSVTEDGLPLMDLSWVTPVPYSIREQACFDAHTALRNGLADVRAGKIPNFELQFRKKRALFSSFRIWTRDWDGGCLQILNFGLGPGQHQTKIQTGIDVPSLEHDGACIKQENGSWFLLWQKDMGEEKMRVPAARGPEMCVIDSGVRKFATIYDPLRGTAAKFGDGDHKRLFRLGTHLDELISRSTQASAKKRYRMRRAANRLRARIRHLVDELHWKLRSYLKRSFDTVLLPKYNAHQMSWRGQRRIGRKTVRAMMTWAHGRFRSRLNEAMDKARQATRVTTFLRNSTVKL

SEQ ID NO: 2171 - protein, 493 aa, Tilletia controversa
IKRLTSTAPIFSLIYYIQITMADPPPAPWIGSVAPESVLWPGVEGTQQAAEWHNAPINTWFLPKYAFLPHPVVPDEDIGGMLTELSATLRQRLDAVPPPPPSRRTRPGERQNNWRLKTYRTRLRPNTQQKEALRKTAGIFRWTYNRAVAYLKAHPNASLNNVREHSVTEDGLPLMNLSWVTPVPYSIREQACLEAHTALQNGLADVRDGKIPNFELKFRKKRALFSSFRIRKRDWDGGCLKIPNFGLGPGQHQTKIQTGIDVPSLEHDGACIKQENGSWFLLWQKDMGEEKMRVPAARGPQMCAIDPGVRTFATIYDPLRGMAATFGDGDHKRLFRLGTHLDQLISRSTQATAKKRYRMRRAANRLRARIRHLVDELHWKLRGYLKRNFDTVLLPTFNAHQMSRRGQRRIGRKTVRAMMTWAHGRFRSRLNEAMEVVEVVEDWTSKVCSTCGTVNHRLGGSEIHRCPGCLTVSDRDVNGAKNIFLHWKYDFLN

SEQ ID NO: 2172 - protein, 326 aa, Tilletia controversa
VYLLLSHDAWTGPYTEEGKRQGLDKGWNSRNKAVFEPTKRAGNCIALDPGARDLLTGYDAQRQQFYTYLTGFNEHIERAHASIASAQSKLEKLKNETGPTVDTDTGRRRRRARRRVNKQRGGKKKKGRSSSAEQRAARKAAKKSHPHFVRPNERSILRAHERLRVHITQAQNCTVNALVSNYDLVVLPEFMTARMIKRRRRRQGMPYSNVPQREAAVQGDEANEEPAAKFVLAKRSRATLARFGHRQFRERLVAKAQADPNHQKDVLVTSEEYTTKQHPFQRGLHSKIGGNKTWHYCHLRGKRDNVGAFNILLRALTKDEVRLSSQ

SEQ ID NO: 2173 - protein, 376 aa, Tilletia controversa
AMASTLTLATRSSRPIASVSSSSSLRLTMSRPMSSSASWSCAMSCSCGLAISTSTAGAGPITWCQRPTPSLESEFEFRIRIDAHTALRNGLADVRAGKIPNFELKFRKKRALFSSFRIRTRDWDGGCLKIPNFGLGPGQHQTKIQTGIDVPSLEQDGACIKQENGSWFLLWQKDMGKEKMRVLAARGPEMCAIDPGVRTFATIYDPLRGTAAKFGDGDHKRLFRLSTHLDELISRSTQASAKKRYRMRRAANRLRARIRHLVDELHWKLRSYLKRSFDTVLLPKFNAHQMSRRGQRRIGRKTVRAMMTWAHGRFRSRLNEAMEVVEVVEDWTSKVCSTCGTVNYRLRQRNPPLPRMSHSLGSRRQCGEKHFPPLEI

SEQ ID NO: 2174 - protein, 502 aa, Tilletia controversa
KFPLFFLCKTCLAEKWTTFFSFFFLDLIYYIQITMADPPPAPWIGSVAPESVLWPGVRATQQAAEWHNAPIDSWFLPKYAHLPHPVVPDENIGGMLTQLSATLRQRLDAVPPPPPPRRTRPGERQDNSRLKTFRTRLRPNTQQKEALRKTAGIVRWTYNRAVEYLKTHPNASFHDVREHSVTEDGLPLMNLSWVTPVPYSIREQACFDAHTALRNGLADVRAGKIPNFELKFRKKRALFSSFRIRTRDWDGGCLKIPNFGLGPGQHQTKIQTGIDVPSLEQDGACIKQENGSWFLLWQKDMGKEKMRVLAARGPEMCAIDPGVRTFATIYDPLRGTAAKFGDGDHKRLFRLSTHLDELISRSTQASAKKRYRMRRAANRLRARIRHLVDELHWKLRSYLKRSFDTVLLPKFNAHQMSRRGQRRIGRKTVRAMMTWAHGRFRSRLNEAMEVVEVVEDWTSKVCSTCGTVNYRLRQRNPPLPRMSHSLGSRRQCGEKHFPPLEI

SEQ ID NO: 2175 - protein, 404 aa, Tilletia controversa
PLRGGDERSGTGPYAKELRDRFVNTERFETESTWALDTPYHIRNDAMRKARNAFKTNFAKRRKNPSLTFTIKYKKKRAGLGTIPIGKEAWVKGILYPRAFKFSRIRAEEPIDDTLAADTHIMVENGEWYIYVPKKGSSRKPRDESSAGKICSIDPGARCFAAVYDPFRAEVVKWGEGYKCRLFRLGIFFDDLLSRMTKIRAKKRYRMWRAANRMRKKIKNLVDDLHKKFAAWLAQRYESILCPEFNAHQMARRGKRRITQKTVQAMMTWPHGRFRDRLQFATEYVPCTEEYTSKACLACGRFNHNLGGAKFRSCQGCRAFADRDCGGARNIILYSRQGFNRDVRRSLIGLIVLRGNDLVSYFRQPLRIRDDHQHKHLPPPCSCSSDISPGPYIRVFRTMSKSFL

SEQ ID NO: 2176 - protein, 360 aa, Tilletia controversa
PLRGGDERSGTGPYAKELRDRFVNTERFETESTWALDTPYHIRNDAMRKARNAFKTNFAKRRTNPSLTFTIKYKKKRAGLGTIPIGKEAWVKGILYPRAFKFSRIRAEEPIDDTLAADTHIMVENGEWYIYVPKKGSSRKPRDESSAGKICSIDPGARCFAAVYDPFRAEVVKWGEGYKCRLFRLGIFFDDLLSRMTKIRAKKRYRMWRAANRMRKKMKNLVDDLHKKFAAWLAQRYESILCPEFNAHQMARRGKRRITQKTVQAMMTWPHGRFRARLQFATEYVPCTEEYTSKACLACGRFKHNLGGAKFRSCQGCRAFADRDCGGARNIILYSRQGFNRDVRRSLIGLIVLRGNDLVS

SEQ ID NO: 2177 - protein, 524 aa, Tilletia controversa
PAPIFFSFFSFLFFSFFFFFHFSFFLGHHRKIKRLTSTAPIFSLICYIQITMADPPPAPWIGSVAPESVLWPGVEGTQQAAEWHNAPINTWFLPKYAFLPHPVVSDEDIGGMLTELSATLRQRLDAVPPPPPPRRTRPGERQNNSRLKTYRTRLRPNTQQKEALRKTAGIFRWTYNRAVAYLKAHPNASLTDVREHSVTEDGLPLMNLSWVTPVPYSIREQACLEAHTALQNGLADVRDGKIPNFELKFRKKRALFSSFRIRTRDWVGGCLKIPNFGLGPGQHQTKIQTGIDVPSLEHDGACIKQENGSWFLLWQKDMGEEKMRVPAARGPEMCAIDPGVRTFATIYDPLRGMAAKFGDGDHKRLFRLGTHLDQLISRSTQPSAKKRYRMRRAANRLLARIRHLVDELHWKLRGYLKQNFDAVLLPTFNAHQMSRRGQRRIGSKTVRAMMSWAHGRFRSRLNEAMEVVEVVEDWTSKVCSTCGTVNHRLGGSEIHRCPGCLTVSDRDVNGAKNIFLHWKYDFLN

SEQ ID NO: 2178 - protein, 493 aa, Tilletia controversa
IKRLTSTAPIFSLICYIQITMADPPPPPWIGSVAPESVLWPGVEGTQQAAEWHNAPIDTWFLPKYAFLPHPVVPDEDIGGMLTELSATLRQRLDAVPPPPPSRRTRPGERQNNSRLKTYRTRLRPNTQQKEALRKTAGIFRWTYNRAVAYLKAHPNASLNDVREHSVTEDGLPLMNLSWVTPVPYSIREQACLEARTALQNGLADVRDGKIPNFELKFRKKRALFSSFRIRTRDWVGGCLKISNFGLGPGQHQTKIQTGIDVPSLEHDGACIKQENRSWFLLWQKDMGEEKMRVPAARGPQMCVIDPGVRTFATIYDPLRGMAAKFGDGDHKRLFRLGTHLDQLISRSTQATAKKRYRMRRAANRLRARIRHLVDELHWKLRGYLKQNFDTVLLPTFNAHQMSRRGQRRIGSKTVRAMMTWAHGRFRSRLNEAMEVVEVVEDWTSKVCSTCGTVNYRLGGSEIHRCPGCLTVSDRDVNGAKNIFLHWKYDFLN

SEQ ID NO: 2179 - protein, 494 aa, Tilletia controversa
IKRLTSTAPVFSLIYYIQITMANPPPEPWIGSVAPESVLWPGVEGTQQAAEWHNAPIDTWFLPKYAHLPHPVVPDEDIGGMLTQLSATLRQRLDAVPPPPPSRRTRPGERPDNSRLKTYRTRLRPNTQQKEALRKTAGIFRWTYNRAVAYLKAHPNASLTDVREHSVTEDGLPLMNLSWVTPVPYSIREQACLEAHTALRNGLADVRDGKIPNFELKFRKKRALFSSFRIRKRDWDGGCLKIPNFGLGPGQRQTKIQTGIDVPSLEHDGACIKQENGSWFLLGQKDMGEEKMRVPAARGPEMCAIDPGVRTFATIYDPLRGMAAKFGDGEHKRLFRLGTHLDDLISRSTQATAKKRYRMRRAANRLRARIRHLVDELHWKLRGYLKQNFDTVLLPTFNAHQMSRRGQRRIGRKTVRAMMTWAHGRFRSRLNEAMEVVEVVEDWTSKVCSTCGTVNHRLGGSEIHRCPGCLTVSDRDVNGAKNIFLHWKYDFLNQ

SEQ ID NO: 2180 - protein, 840 aa, Tilletia controversa
DARHPNPAPPPRPPWLDPDLPPRLGPADYEHYQSNPAPPSPPPPTPQDLAPPPLPWLDPTLAERDRPPPPPGFELQPSQPPQPPQPPTSSWESIARLPAKDKQDALIQALRSSQKDDWKAKVNNLLDFATSSLVAEVRVAILLAAAPIFAPWFTDESSRLSRRLWGITGESWTQESARLSDAFSAGKDWEWATTVHQPRANREQGIISASSLRFSRQQLISRNDMGQNVSDAREGASFWECRTWATQRLWDAFVARGLYTSSLTKPKGSKRDTGKRKMEDGEGSRDSKKVRKLSYDADSKAAFERRAAKDKKRAPPKRNEPECLRALRLRLYPSAELGAKLREWESLAASLRQMVRARLQKAKDVGEKTDAFVLADQTCLSQTKWNKMTAEERASVDQNRQRLIELPHNFQREQVLKVAANARAAQTNLERGWTKSYRLDSADEDDKSVLFFTSDAIDKRGALFPRILNHIDSNLYVRDRMLAGPGERRRKRSDWVKLLTGASRSFSIHRTGRKWYLLLSHDAWTGPYTEEGKRQGLDKGWNSRNKAVFEPTKRAGNCIALDPGARDLLTGYDAQRQQFYTYLTGFNEHIERAHASIASAQSKLEKLKNETGPTVDTDTGRRRRRARRRVNKQRGGKKKKGRSSSAEQPAARKAAKKSHPHFVRPNERSILRAHKRLRVHITQAQNCTVNALVSNYDLVVLPEFMTARMIKRRRRRQGMPYSNVPQREAAVQGDEANEEPAAKFVLAKRSRATLARFGHRQFRERLVAKAQADPNHQKDVLVTSEEYTTKQHPFQRGLHSKIGGNKTWHYCHLRGKRDNVGAFSILLRALTKDEVRLSSQ

SEQ ID NO: 2181 - protein, 575 aa, Hypena proboscidalis
NETVTIMPCSSCGKDDHLRSSSSKCLKRKKRVRETDLTEDQEISIYCVKKGINSFICSLYENRLELLKLIRDDVKQLSRLSIELSYLINYFFKSYHAHEDFHKLWPKFDPLQFTYVLKGKKHKLPDPFNIIERYKNLNNNVTFNGTLKSFNIISIANQYKTILETNVNLHAFKRLKRYMYHKFSENLTKAIIHKSTFEAFYKNTYIDNEIGNWFKIHKISEKELKLNFWKFIPLFLDIQHELYENDKKSFNIFPIYTHGLKYITYDSRCLHELLRRIDAKNLPSTWVQFAEHDPKVYWRRYFNVPKNFGWSFSTDGVCVSLSMNRLIPKKDKFKAKRLKKEEASSENDNQLYKKYKKIIAVDPGAKTPIVTCSRRKEDDTFEYKVLKNTKVIYETKEHTREKKRLKFIKDVDLKIRKDRESLEIDISRKSANVEDYTKFQLKWFDEKQKFYEQRRLQRLKFDKYINDQKTNHKIVDEYFGRETDTLVVYGAGFDFMNKGTFKGHRKFRHNNILKIIKQRKNLSLYIINEAFTTKNCSKCYENEERQNILHVSKSPHRYVYCSVCRKGIHRDKNGA

SEQ ID NO: 2182 - protein, 199 aa, Hypena proboscidalis
NPPPPPFPDLRSPVNYYFYSILTPKSCNVKAYTRFQLKWFEEKQRVYEQRRLQRLKFDKYINEQKTLNKFVDEYFGEAPDTLVVYGAGFNFMNKGTFKGHRKFRHNEVLKIAKQRKNLTVFVINEAFTTKNCSYCYESGAKNTLLVSKSPHRYVYCSVCRKGIHRDKNGAKNILLKYEYTKSPVGLSSSGTDMNRMDGH

SEQ ID NO: 2183 - protein, 225 aa, Apotomis turbidana
GFKRVTKKWVRSHTLEWKRERVRNKLLYDSETAERLDRERVERELEICVTNKRSLYVNWYAYYRLKWFELRQKPFETHSKLTRLKFDKHINIARTNERIVREIFLADARSDGVLVLYGASSKFMNRATFSGRKFRHDDLLKRLRARRNITVETVDEHYTSKACLACNARDGSYHRLKIDPKLRRGVCPDCNDASLDRDYNAARNILINHTRSTVCRPCSVPNAGA

SEQ ID NO: 2184 - protein, 204 aa, Xestia xanthographa
KRERIRNKLCRVSEEAEEKAREKLAFPVSSKNTSHVVEYTVFRMTWFNVRQEPYEKHAKLTRLRLNKYIRTAKCEEKIVKEVFDGGGGGVESTLVLYGAGSKFMNTASFSGRKFKHDSLIKRLRSKRHIDVEFVDEQYASQASASCNAKTGEFRKIVMNHKLRWGVCQNCNSEFDRDVNAAKNILINYTRSALCRPGCSASEAS

SEQ ID NO: 2185 - protein, 199 aa, Mamestra brassicae
QFRRITKKYVRSHTLEWKRERIRNKLCRVSEEAEQKAREKLTFPVSSKNTIHVVKYTVFRMTWFDVRQEPYEKHAKLTRLGLDKYLRTAKCEEKIIKEVFDGGGVESTLVLYGAGSKFMNTASFSGRKFKHDSLIKRLRSKRNIDVEVVDEKYTSQACSSCNAKTGEFQKIVMNHRLRWEFAETATASLIETLTLQKTY

SEQ ID NO: 2186 - protein, 216 aa, Craniophora ligustri
YTNQKCHRVRKRLRFIKDIEERIRVDRESFEKETGIELTRKSKNVEIYTRFQLKWFDGKQKLYEQRRFQRLKFGKYINDKKMLHKIVDEYFGKEPDTLVVYGAGFDFMNKGTFKGHRKFRHNDILKIIKQRKKLSLYIINEAFTTKNCSKCYEKKIQQKLHVSKSPHRYVYCSVCRKGIHRDKNGAKNILLKFEYKLSSIPSFADTDMNSMGGGSS

SEQ ID NO: 2187 - protein, 271 aa, Lysandra bellargus
TCKERGDFERKRKSNVHPGAKTPIVTCSRRSGDDGGDGFEYKTLKKQRVVYETREHHRERKRSKFIKDVDSKIRNDWESTEKELGFGISCKNSKVQEYTEFQLKWFDEKQKVYEQRRLQRLRFDKYINDQKTNHKIVDDYFGKEPDTLVVYGAGFDFMNKGTFKGHRKFRHNDILKIIKRRPNLSLYIINEAFTTKNCSKCYESGVQQKLQVSKSPHRYVYCSVCRKGIHRDKNGAKNVLLKFEFKKNTIKSPVILSFAGTDMNVAGGGSS

SEQ ID NO: 2188 - protein, 254 aa, Atethmia centrago
TLNDYSFGASLKSRYVRSHTLEWKRQRIRNKLCRVSEEAEQKAREKLTFPVSSKNTSHVVEYTVFHMMWFDVRQEPYEKHAKLTRLGLDKYLRTAKCEEKIIKEVFDGGGVESTLVLYGAGSKFMNTASFSGRKFKHDSLIKRLRSKRNIDVEVVDEKYTSQACSSCNAKTGEFHKIVMNHRLLVLPKCKNKTRLSQSWSWSCANTPGLGLGLGLALPVLVLVLVLQQESCKSCNYLLVYYYLLKFTLNLRKTY

SEQ ID NO: 2189 - protein, 257 aa, Atethmia centrago
NKKYSNPKKRPKKTYDRIIAVDPGSRIPVAALDSKRLQFRRITKKYVRSHTLEWKRQRIRNKLCRVSEEAEQKAREKLTFPVSSKNTSHVVEYTVFRMMWFDVRQEPYEKHAKLTRLGLDKYLRTAKCEEKIIKEVFDGGGVESTLVLYGAGSKFMNTASFSGRKFKHDSLIKRLRSKRNIDVEVVDEKYTSQACSSCNAKTGEFHKIVMNSHRLRWGVCRNCNSEFHRDANAAKNILINYTRSTICRPGCSTSGAS

SEQ ID NO: 2190 - protein, 246 aa, Autographa pulchrina
TPIVTCTRFNDGGFEYKVLKKERIVYDSKEHHREKKRSRFIEDIEDRFRTDREDTERETGVVITPKSTNVCEYTRFQLKFDEKQRVYEQRRLQRLKFDKYINDQKMLRKLVDEFFGKEPDTLVVYGAGFDFMNTATFKGHRKFRHNDVLKIIRQRKNLSVFIINEAFTTKNCSKCYESGLKNHLHVSKSPHRYVYCSVCHKGIHRDKNGAKNILLKYEYTKSPNSLSSVGTDMGRAEGGSSQGSLS

SEQ ID NO: 2191 - protein, 250 aa, Hemaris fuciformis
SFLRQDDSRRSGQQSAYSRVRRSVRIQAHHQEVDTFAHSRMEARSSSEEIVGVYRNGRTTGQRTHRKGARRSVDTERRHERGTLRSFRLKWFESRQKPFETHSKLTRLKFDKYVNAARTNEKIVREVFLSDAPSDRVLVLYGAGYKFMNRATFSGRKFRHDDLLKRLRARRNITVETVDEAYTSKACSACNARDGSFHRLKIDHRLRRGVCPDCNGAPLDRDYNAARNILVNHTRSTVCRPSCTVANGAA

SEQ ID NO: 2192 - protein, 308 aa, Tenebrio molitor
MEKVPIMRQSVKHITYTTMGLLELLSSIGEKVPSAKEFRENARIYWERYFNVSSNKMFGCCFSTDGLAVSKSMNRLEKNDIRLLPQKKEKLTYDRVVAVDPGAKTPIVTCDEAFNYQMLSNKRVKFELKEYVRRDKLRMWTGSVENEIQKELMDNTEQLSFKNENYLEMAKFKLKYFDVKQKCYERRNVIRLRFDAYIQKQKVIHKIIKEFFVMKSSGASKRTLILYGNGVQFMNTATFYGHGKFFHNEIIKTIKINYKQLQLEMVDESYTTKTCSNCQRMNGLKISTGGHRYVYCSICHKGTHRDKN

SEQ ID NO: 2193 - protein, 584 aa, Tenebrio molitor
NLVYRVDEAVWMPCAACHGTDHSRSSSTKCKNYKPKIRKRNLDNTKSYQVYTVKSGLNRFFCSLLNGTIKAKLKQRICDDVKIVSRLMIETSYFIAAFYKYYHDHMPEKIFDKLNVLHFTYALKGSYNCKIDDPLNFISKYINSVRNGGYYDCKLRTYVIQEACKQYTTNFNNNIISHMFNRIKKFIKLLKIEENSTKIHDVCYNFYYNNDTSTNNEITKMLDIYKLRVKLVERNPVHYLPFMYELQTLQHTKGTRTCRVVPIMRQSVKHITYTTMGLLELLSSIGEKVPSAKEFRENARIYWERYFNVSSNKMFGCCFSTDGLAVSKSMNRPEKNDIRLLPQKKEKLTYDRVVAVDPGAKTPIVTCDEAFNYQMLSNKRVKFELKEYVRRDKLRMWTGAVENEIQKELMDNTEQLSFKNENYLEMAKFKLKYFDVKQKCYERRNVIRLRFDAYIQKQKVIHKIIKEFFVMKSSGASKRTLILYGNGVQFMNTATFYGHGKFFHNEIIKTIKINYKQLQLEMVDESYTTKTCSNCQRMNGLKISTGGHRYVYCSICHKGTHRDKNAAKNILLKNWFGFPSLAKQ

SEQ ID NO: 2194 - protein, 252 aa, Tenebrio molitor
IECFTLYLRIKRILQLTYDRVVAVDPGAKTPIVTCDEAFNYQMLSNKRVKFELKEYVRRDKLRMWTGAVENEIQKELMDNTEQLSFKNENYLEMAKFKLKYFDVKQKCYERRNVIRLRFDAYIQKQKVIHKIIKEFFVMKSSGASKRTLILYGNGVQFMNTATFYGHVKFFHNEIIKTIKINYKQLQLEMVDESYTTKTCSNCQRMNGLKISTGRHRYVYCSICHKGTHRDKNAAKNILLKNWFGFPSLAKQ

SEQ ID NO: 2195 - protein, 261 aa, Cydia splendana
VFRCAKPQMTEKKKKRCVEYDRVIAVDPGSRVPLATVESKRYSFKRVTRKYVRSHTLEWKRDRVRNKLIAPILAEMQKGRESPNFSVSSKNTDHVIEYTVFRMKWFAAMQVPYETHSKLTRLGLDKYIRIAKCEERIVREVFDGGGVSDVLVLYGAGSKFMNTASFSGRKFRHDSLLKRLRSKSNIRVEIVDESYTSQACSACNQRTGAFQKIGMTHRLRWGVCPTCHSEFDRDKNAAKNILINHIRSTICRPRCLPERAS

SEQ ID NO: 2196 - protein, 224 aa, Peribatodes rhomboidaria
SQKIHHFLGLHFQKMTLKQYWRRYFSISKNFGWNFYTDGVCISLSMNRLITKKDKYKAKRVRKRKLQTKMRTKWIKSTKKIIAADSGAKTPIVTCVRISDDTLEYKTLKKGKVVYETKEHREKKRLKFIKDVDSKFRNYRESLEKELGFVISCKNLNVEECTKFQLKWFYEKQKVYEQRKSQRLKFDKYINVQKTNHKIVDEYFGKEPALVVYGAGYDFMNKGT

SEQ ID NO: 2197 - protein, 217 aa, Pammene fasciana
VKFPFDCDGARLSLRGEKGVLVSNARPVFEYTVFRIKWFEAMQVPYESHSKLTRLGLDKYISIAKCEERIVRQVFDGGGASDVLVLYGAGCKFMNTASFSGRKFRHDSLLRRLRNKSNIQVEIVDESYTSQACSACNQRTGEFQKIGMNHRLRWGVCPTCHSDFDRDANAAKNILINHTRSTICRPRCLTVHLHGSFFGNFCVFSRLRNFIAPKKMH

SEQ ID NO: 2198 - protein, 271 aa, Dunaliella primolecta
HTHTHTHTHTHTHTHTHTHTHTHTHTQGSDPKRPVVVGVGASKMPPAAHGVQKFSAPTQLKKALLRAMLRGVGHSKLHPRMLMSLNEYKTTVSCSRCGARTVEPMVRDFVTHLQRKSRRLRECPVCKEEYFKQQQQQVEGMAEGGGEQQQVEGMAEGGGERQPVEGVSETDEEEEQEEGMSRQGSTDWAGMDLDEEEEEVGGVGEGGMGANEAEGEVHAAVPGRRRERVKKPQRSYQMHRDVNAAWNLWEVCVAQYFGHPRPRYLRADTAA

SEQ ID NO: 2199 - protein, 282 aa, Dunaliella primolecta
SICKHTNVAAHTTTADVTHTHRQGSDPKRPVVVGGGASKMLPAAHGVQKFSAPTQLKKALLRAMLRGVSHSKLHPRMLTWLNEYKTTVSCSRCGARTVEPMVRDFVSHLQRKSRRLRECPVCKEEYLKQQQQQQQIEGVAEGGGEQQQIEGMAEGGGEQEQVEGMAEGGGEQQPVEGVSETDEEEEQEEGMSRQGSTDWAGMDLDEEEEEVGGVEEGGMGANEAEGGVHAAVPGRRRERVKKPQLSYQMHRDVNAAWNLWEVCVAHYFGHPRPRYLRADTAA

SEQ ID NO: 2200 - protein, 274 aa, Dunaliella primolecta
SMCKHKNVAVHTQSCEAHTTTADVTHTQGSDPKRPVVVGGGASKMPPAAHGMQKFTAPTQLKKALLRAMLRRVGHAKLHPRMLTWLNEYKTTVSCSRCGARTVEPMVRDFVSQLPRKSRRLRECPVCKEEYLKQQQQQQQVEGVAEGGGGQQQVEGTAEGGGEQQPVEGVSETVEEEEQEEAMSRQGSTNWAGMDLDDEEEEVGGVEEGGMGGGEAEGGVHAAVPGRRRELVKKPQLSYQMHRDVNAAWNLWEVCVAQYFGHPRPRYLRADTGA

SEQ ID NO: 2201 - protein, 316 aa, Dunaliella primolecta
CILPFGHSFIAWRSWLLLMPQAASAFGVILACARLPDFHARIISEPFRSVQTLQLTSKCAWQECKGRKRGFPATFLSFSQEGTGNKRAHRAASARYLAVGASKMPPAHKGVHKFSAPTMVHSTLTRNVLRGAGGSRGHPFIIAPANEYKTTKSCSRCGGVTVEPYVRDRRNGESRKSRRLRECPDCKARHEAQHQQQGWAGGDRPNMERGQGRDAPTGMGVGDQHQQAGPGEASTSRSGGQGGGGGSVGVRSDHAVKSRARRASVEFTPQLAYQLHRDVNAAWNLWEVGVAMYAGVARPAYLMPHAHAAQPQGTQR

SEQ ID NO: 2202 - protein, 305 aa, Dunaliella primolecta
NTHTWLEYVQAPKCSCTHTELRSTHHNCRCNTHTHTWLKYVQAHKCSCTHTELRSTHHNCRCNTHTHTHTHTHTQGSDPKRPVVVGVGASKMPPAAHGVQKFSAPTQLKKALLCAMLRAVGHSKLHLRMLMALNEYKTTVSCSRCGARTVEPMVRDFVSHLQRKSRQLRECPVCKEEYFKQQQQIEGMAEGGGEQQPVEGVSETDEEVEKEEGMSRHGSTDWAGMDLDEEEEEVGGVEEGGMGANEAEGEVHAAVPGRRRERVKKPQRSYQMHRDVNAAWNLWEVCVAQYFGHPRPGFLRADTAA

SEQ ID NO: 2203 - protein, 253 aa, Dunaliella primolecta
SMCKHTNVAVHTQSCEAHTTTADVTHTHTHTHTQGSDPKRPVVVGVGASKMPPAAHGVQKFSAPTQLKKALLRAMLRGVGHSKLHPRMLMSLNEYKTTVSCSRCGARTVEPMVRDFVSHLQRKSRRLRECPVCKEEYLKQQQRQQVEGMAEGGGEQQQVEGMAEGGGEQQPVEGVSETDEEVEKEEGMSRHGSTDWAGMDLDEEEEEVGGVEEGGMGGNEAEGEVHAAVPGRRRERVKKPQRSYQMHRDVNAA

SEQ ID NO: 2204 - protein, 303 aa, Dunaliella primolecta
SMCKHTNVAVHTQSCEAHTTTADVTHTHTHTQGSDPKRPVVVGVGASKMPPAAHGVQKFSAPTQLKKALLRAMLRGVGHSKLHPRMLMSLNEYKTTVSCSRCGARTVEPMVRDFVSHLQRKSRRLHECPVCKEEYVKQQQRQQIEGMAEGGGEQQQIEGMAEGGGEQQQVEGMAEGGGEQQQVEGMAEGGGEQQPVEGVSETDEEVEKEEGMSRHGSTDWAGMDLDEEEEEVGGVEEGGMGANEAEGEVHAAVPGRRCERVKKPQRSYQMHRDVNAAWNLWEVCVAQYFGHPRPGYLRADTAA

SEQ ID NO: 2205 - protein, 250 aa, Dunaliella primolecta
HTHTHTQGSDPKRPVVVGVGASKMPPAAHGVQKFSAPTQLKKALLRAMLRGVGHSKLHPRMLMSLNEYKTTVSCSRCGARTVEPMVRDFVTHLQRKSRRLCECPVCKEEYFKQQQQIEGMAEGGGEQQQVEGMAEGGGEQQPVEGVSETDEEEEQEEGMSRQGSTGWAGMDLDEEEEEVGGVGEGGMGANEAEGEVHAAVPGRRRERVKKPQRSYQMHRDVNAAWNLWEVCVAQYFGHPRPRYLRADTAA

SEQ ID NO: 2206 - protein, 301 aa, Dunaliella primolecta
CRFAHAHTGFLLSSKGFKPINSLGPGSGFSLTCTNMNFRILCALPNTKPKSDVGLHTHTHTHTHTHTHTHTQGTDTRRVKYLAVGASKMPPAHKGVHKFSAPTMVHSTLTRNVLRGAGGSRGHPFIIAPANEYKTTKSCSRCGGVTVEPYVRDRRNGELRKSRRLRECPDCKARHEAQHQQQGWAGGDRPNMERGQGRDAPTGMGVGDQHQQAGPGEASTSRSGGQGGGGGSVGVRSDHAVKSRARRASVEFTPQLAYQLHRDVNAAWNLWEVGVAMYAGVTRPAYLMPHAHAAQPPGTQR

SEQ ID NO: 2207 - protein, 251 aa, Dunaliella primolecta
VCTHTHTHTHTHTHTHTHTHTQGKDTRRVKYLAVGASKMPPAHKGVHKFSAPTMVHSTLTRNVLRGAGGSRGHPFIIAPANEYKTTKSCSRCGGVTVEPYVRDRRNGELRKSRRLRECPDCKARHEAQHQQQGWAGGDRPNMERGQGRDAPTGRGVGDQHQQAGPGEASTSRSGGQGGGGGSVGVRSDHAVKSRARRASVEFTPQLAYQLHRDVNAAWNLWEVGVAMYAGVARPAYLMPHAHAAQPPGTQR

SEQ ID NO: 2208 - protein, 214 aa, Bellardia pandia
HFGINNAEIYKTLYSLCIKLKNSQYQTMNGHHSRKMQLAKFTSWFSEKSQDSPHQLNYELYSKHRLSIFLLKQSAFAQRKATRLKMQKYICVEKTVNQIAKFLVPDKKRKTLICIGSTEIAGNSPMKGYIRTPNRKIITALRNRAAEILFVNEIRTTKLCENCHCENITSKSPHRYQYCPNCRTCWNRDVNAGINILYLGECHINEIKKHVNFI

SEQ ID NO: 2209 - protein, 347 aa, Bellardia pandia
DGEKLNALKLKTKYWSSIKLFYNLQRYNEIHNLKNFSLIPIFKHGMHHIRYDSFALEYLLSSVGLRKLNRTTFDRDEEWRKYFTFPETSTKKFHYSLQTDGLSVSFSMAKPKAHFIGPMKKRKKHQRDETDCVGNLKKIRNTKYDDKIGLYPGLRLIYGGVKNGQPIKIKNSQYQTMNGHHSRKMQLAKFTSWFSEKSQESPHQLNYELYTKHRLSIFLLKQSVFAQRKVTRLKMQKYICVEKTTNQIAKFLVPDKKRKTLICIGSTEIAGNTPMMGYIRTPNRKIITALRNRAAEILFVNEFRTTKLCGNCHCENITSRSPHRYQYCPNCRTCWNRDVYAGINILT

SEQ ID NO: 2210 - protein, 215 aa, Bellardia pandia
KHHRDKTDCAGNLEKIRNTKYDDKIGLDPGVRLIYSGVKNGQPIKLKTSQYQTMNRHHSRKMQLAKFTSWFSEKSQESPHQSNYESYTKHRLSIFLLKQSAFAQRKVTRLKMQEYICVEKTVNQIAKSLVPDKKRKTLIFIGLTEIAGNSPMKGYIRTPNRKLITVLRNRAAEILFVNEFRKTKLCGNCHVKILHQNHHIGTSTTQTAVLVGIEM

SEQ ID NO: 2211 - protein, 321 aa, Bellardia pandia
SKKLFIDSYIQKWYAYLLSSVGLRKLNRTTFDRDEEWRKYFTFPETSTKKFHYSLQTDGLSVSFSMAKPKAHFIGPMKKRKKHQRDETDCVGNLKKIRNTKYDDKIGLDPGLRLIYGGVKNGQPIKIKNSQYQTMNGHHSRKMQLAKFTSWFSEKSQESPHQLNYELYAKHRLSIFLLKQLAFEQRKVTRLKMQKYICVEKTAYQIAKFLVPDKKRKTLICIGSTEIAGNSPMKEYIRTPNRKIITALRNRAAEILFVNEFRTIKLCGNCHCENITSRSPHRYQYCPNCRTCWNRDVNAGINILYLGECHINEIKKHVNFI

SEQ ID NO: 2212 - protein, 542 aa, Bellardia pandia
ITKRKSESPELEQTEIIVVKRCLRSTCHNDIIFEKIQKDAREISSLIVEASVYIHYSLMKRWKDGNFEQEKFLYYYYPLMKAKRSKYILDPVYSILRESMPLYDSSFRSNMFVHSANQYTTIFHNNIWMHAYNRTRRFFKNFGINNSEIYKTLSYLFEKESNKSPNELLLEKLRTELQWDGEKLNALKLKTKYWSSIKLFYNLQKYNEIHNLKNFSLIPIFKHGVHHIRYDSFAFEYLLSSVGLRKLNRTTFDRDEKWRKYFTFPETSTKKFHYSLQTDGLSVSFSMAKPKAHFIGPMKKRKKHQRDETDCVGNLKKIRNTKYDDKIGLDPGLRLIYGGVKNGQPIKIKYSQYQTMNGHHSRKMQLAKFTSWFSEKSQESPHQLNYELYTKHRLSIFLLKQSAFAQRKVTRLKMQKYICVEKTANQIAKFLVSDKKRKTLICIGSTEIAGNSPMKGYIRTPNRKVITALRNRAAEILFVNEFRTTKLCGNCHCENITSRSPHRYQYCPNCRTCWNRDVNAGINILYLGECHINEIKKHVNFI

SEQ ID NO: 2213 - protein, 382 aa, Bellardia pandia
STKSPNELLLEKLRTELQWDGEKLNALKLKTKYWSSIKLFYNLQRYNEIHNLKNFSLIPIFKHGMHHIRYDSFALEYLLSSVGLRKLNRTTFDRDEEWRKYFTFLETSTKKFHYSLQTDGLSVSFSMAKPKAHFIGPMKKRKKHQRDETDCVGNFKKIRNTKYDDKIGLDPGLRLIYGGVKNGQPIKIKNSQYQTMNGHHSRKMQLAKFTSWFSEKSQESPHQLNYELYTKHRLSIFLLKQSAFAQRKVTHLKMQKYICVEKTANQIAKFLVPDKKRKTLICIGSTEIAGNSPMKGYIRTPNRKIITALRNRAAEILFVNEFRTTKLCGNCHCENITSRSPHRYQYCPNCRTCWNRDVNAGINILYLRECHINEIKKHVNFI

SEQ ID NO: 2214 - protein, 750 aa, Platycheirus albimanus
VYTMTSNNTVKFCKTCNGTDHCRSSSKLCKNRTLPQKERFLQSSTEETIETYTVKMGFNAFCRDGVLKKRIVEDVLEISDLCIEASLYVHFHYMKILHEDGDNFPKMFTYNHLLDFYYHLQNKNQKKERVEKDEEYFKLRENRRIYDGSHRSFLIQAIAKQHETAMKNCISVHLIKRIARYLYEKTEKKTKKLYQWIDIVEAQLFEKDYTEKPCMEVEAFLEEFKFDPKKKFINLDNDWWSLIPFLFKLGQWFTGRNLKSFNIFPIFKPGRKHVRYGGEALRELLRATGLLKNTNAAEFSASTPKYWWKYFDVDHAVYGDLDASTLKIEPKNGKSFGMTFTTNGIDCSVGMNRYVRISVDNTGPNKTEKRKATAQTSEPIPKKKKTATKKKTTSTAATTSTAATSTAATTSTAATSTASTTSKAATSTSTAATTSTARTTAARGTTATPGTTAATSKEDFSNYKYLLGIDPGVVNYVGACFLDRETNSETNFVLKSATYKQQMGKERARRRKKIKISGKLEKELLEYRKLNPNISSKCSINLNSNLDFIKYRLNFFISSQKLYSQKNYCRLKWDSYMCSRRAVDILVNKLLDLNKSKEKTLVCFGDGSLEQGKSYGRNLIPAFNNLKKAFIRRKDKCRVIDVDEYLTTQSCSKCFSKLIDPPRHARVDRLVQQRRRHDHRFKTCKQCKTVWDRDVNAARNMINVALGIYDFRRKSSGGSIDLTRPSDWRAYKMKFSFPNSLKVAPVVTLR

SEQ ID NO: 2215 - protein, 747 aa, Platycheirus albimanus
SLEYFNQSTMTSKNVVKLCKKCNGTDHSRSSSKLCKNRTLPQKERFLQSTKEERIETYTVKMGFNAFCRDDVLKKRIVEDVLEISDLCIEASLYVHFHYMKILHEDGDNFPKMFTYNHLLDFYYHLQNKKQPKERVEKDEEYFTLRENRRIYNGSHRSYLIQAIAKQHETAMKNCISVHLIKRIARYLYEKTEKKTKKLYQWIDIVEAQLFEKDYTEKPCMEVEAFLEEFKFDPKKKFINLDNDWWSLIPFLFKLGQWFTGRNLKSFNIFPIFKPGRKHVRYGGEALRELLSATGLLKKVSAADFSASTPKYWWKYFDVDHAVYGDLDASTLKIEPKNGKSFGMTFTTNGIDCSVGMNRYVRISVDNTGPNKTEKRKATSQTSEPIPKKKKTATKKKTTSTAATAATTSTGATSTSTAATTSTSTSTAATTSTARTTAARGTTATPGTTAATSREDFSNYKYLLGIDPGVVNYVGACFLDRETNSETNFVLKSATYKQQMGKERARRRKKIKISGKLEKELLEYRKLNPNISSKCSINLNSNLDFIKYRLNFFISSQKLYSKKNYCRLNWDSYICSRRAIDILVNKLLDLNKSKEKTLVCFGDGSLEQGKSYGRNLIPAFNNLKKAFIRRKDKCRVIDVDEYLTTQSCSKCFSKLVDPPRHARVDRLVQQRRRHDHRFKTCKRCKTVWDRDVNAARNMINVALGIYDFRRKSSGGCIDLVRPSDWRAYKMKFSFPNSLKVAPVVTLR

SEQ ID NO: 2216 - protein, 424 aa, Platycheirus albimanus
KLNCLKRIIRKSCMEVEAFLEEFKFDPKKKFINLDNDWWSLIPFLFKLGQWFTGRNLKSFNIFPIFKPGRKHVRYGGEALRELLRATGLLKNANAADFSASTPKYWWKYFDVDHAVYGDLDASTLKIEPKNGKSFGMTFTTNGIDCSVGMNRYVRISVDNTGPNKTEKRKATAQTSEPIPKKKKTATKKKTTSTAATTSTGATSTSTAATSTSTAATTSTARGTTATPGTTAGTSREDFSNYKYLLGIDPGVVNYVGACFLDRETNSETNFVLKSATYKQKMGKERARRRKKIKISGKLEKELLEYRKLNPNISSKCSINLNSNLDFIKYRLNFFISSQKLYSKKNYCRLNWDSYICSRRAIDILVNKLLDLNKSKEKTLVCFGDGSLEQGKSYGRNLIPAFNNLKKATNVLRIFFQLQSNKCI

SEQ ID NO: 2217 - protein, 734 aa, Platycheirus albimanus
VYTMTSNNTVKFCKTCNGTDHSRSSSKLCKNRTLPQKERFLQSTKEERIETYTVKMGFNAFCRDDVLKKRIVEDVLEISDLCIEASLYVHFHYMKILHEDGDNFPKMFTYNHLLDFYYHLQNKNQKKERVEKDEEYFKLRENRRIYDGSHRSFLIQAIAKQHETAMKNCILVHLIKRIARYLYEKSETKTIYQWMVIVEDQLFEKDYTEKPCMEVEAFLEEFKFDPKKKFINLDNDWWSLIPFLFKLGQWFTGRNLKSFNIFPIFKPGRKHVRYGGEALRELLSATGLLKKVSVADFSASTPKYWWKYFDVDHAVYGDLDASTLKIEPKNGKSFGMTFTTNGIDCSVGMNRYVRISVDNTGPNKTEKRKATAQTSEPIPKKKKTATKKKTTSTAATTSTAATTSTGATSTSTAATSTSTAATTSTARGTTATPGTTAGTSREDFSNYKYLLGIDPGVVNYVGACFLDRETNSETNFVLKSATYKQQMGKERARRRKKIKISGKLEKELLEYRKLNPNISSKCSINLNSNLDFIKYRLNFFISSQKLYSKKNYCRLNWDSYICSRRAIDILVNKLLNLNKSKEKTLVCFGDGSLEQGKSYGRNLIPAFNNLKKAFIRRKDKCRVIDVDEYLTTQSCSKCFSKLVDPPRHARVDRLVQQRRRHDHRFKTCKRCKTVWDRDVNAARNMINVALGIYDFRTKSSGGSIDLARPSDWRAYKMKFSFPNSLKVAPVVTLR

SEQ ID NO: 2218 - protein, 248 aa, Platycheirus albimanus
LSLTDLVFQEALFICLDNKGQEIYIVGNNSIIKNNSLLTLSLNFCIEDIFKFFFTFFRKLYSKKNYCRLNWDSYICSRRAIDILVNKLLDLNKSKEKTLVCFGDGSLEQGKSYGRNLIPAFNNLKKAFIRRKDKCRVIDVDEYLTTQSCSKCFSKLVDPPRHARVDRLVQQRRRHDHRFKTCKQCKTVWDRDVNAARNMINVALGIYNFRTKSSGGSIDLARPSDWRAYKMKFSFPNSLKVAPVVTLR

SEQ ID NO: 2219 - protein, 251 aa, Platycheirus albimanus
KQQMGKERARRRKKIQISGKLEKELLEYRKLNPNISSKCSININSNSDYIKYRLKFFIASQKLHSKKNYCRLNWDSYISSRRAIDILVNKLLDLNKSKEKTLVCFGDGSLEEGKSYGRNLIPSFKNLKKAFLRRKDKCRVIDVDEYLTTQSCSKCFSKLVDPPRHARVDRLVQQRRRHDHRFKTCKQCKTVWDGDVNAARNMINVALGIYNFRTKTSGGSIDLARPSNWRANKMKFSFPNSLKVAPVVTLR

SEQ ID NO: 2220 - protein, 744 aa, Platycheirus albimanus
ILFRVDIYIYTMTSNKIVMLCKKCNGTDHSRSSSKLCKNRTLPQKERFLQSTKEERIETYTVKMGFNAFCRDDVLKKRIVEDVLEISDLCIEASLYVHFHYMKILHEDGDNFPKMFTYNHLLDFYYHLQNKKQPKERVEKDEEYFKLRENRRIYDGSHRSFLIQAIAKQHETAMKNCISVHLIKRIARYLYEKTEKKTKKLYQWIDIVEAQLFEKDYTEKPCMEVEAFLEEFKFDPKKKFINLDNDWWSLIPFLFKLGQWFAGRNLKSFNIFPIFKPGRKHVRYGGEALRELLSATGLLKKVSVADFSASTPKYWWKYFDVDHAVYGDLDASTLKIEPKNGKSFGMTFTTNGIDCSVGMNRYVRISVDNTGPNKTEKRKATAQTSEPIPKKKKTATKKKTTSTAATTSTAATTSTGATSTSTAATSTSTAATTSTARGTTATPGTTAGTSREDFSNYKYLLGIDPGVVNYVGACFLDRETNSETNFVLKSATYKQQMGKERARRRKKIKISGKLEKELLEYRKLNPNISSKCSINLNSNLDFIKYRLNFFISSQKLYSKKNYCRLNWDSYICSRRAIDILVNKLLDLNKSKEKTLVCFGDGSLEQGKSYGRNLIPAFNNLKKAFIRRKDKCRVIDVDEYLTTQSCSKCFSKLVDPPRHARVDRLVQQRRRHDHRFKTCKRCKTVWDRDVNAARNMINVALGIYDFRRKSSGGSIDLARPSDWRAYKMKFSFPNSLKVAPVVTLR

SEQ ID NO: 2221 - protein, 751 aa, Platycheirus albimanus
SLEYFNQSTMTSKNVVKLCKKCNGTDHSRSSSKLCKNRTLPQKERFLQSSTEETIETYTVKMGFNAFCRDGVLKKRIVEDVLEISDLCIEASLYVHFHYTKILHEDGDNFPKMFTYNHLLDFYYHLQNKNQKKERVAKDEEYFTLRENRRIYDGSHRSYLIQAIAKQHETAMKNCILVHLIKRIARYLYEKSETKTIYQWMVIVEDQLFQKDNTEKPCKEIEAFLEEFKFDPKKKFINLDNDWWSLIPFLFKLGQWFAGRNLKSFNIFPIFKPGRKHVRYGGEALRELLSATGLLKNKNQADFSASTPKYWWKYFDLEHAVYGDLDASTLKIEPKNGKSFGMTFTTNGIDCSVGMNRYVRISVDNTGPNKTEKRKATAQTSEPIPKKKKTATKKKTTSTAATTSTAATTSTGATSTSTAATTSTGATSTSTGATSTSTAATTSTARGTTETPGTTAATSREDFSNYKYLLGIDPGVVNYVGACFLDRETNSETNFVLKSATYKQQMGKERARRRKKIKISGKLEKEFLEYRKLNPNISPKCLITYSSDYIKYRLKFFNCSQKLYSQKNYCRLKWDSFICSRRAVDILVNKLLDLNKSKEKTLVCFGDGSLEQGKSYGRNLIPAFNNLKKAFIRRKDKCRVIDVDEYLTTQSCSKCFSKLVDPPRHARVDRLVQQRRRHDHRFKTCKRCKTVWDRDVNAARNMINVALGIYDFRRKSSGGSIDLARPSDWRAYKMKFSFPNSLKVAPVVTLR

SEQ ID NO: 2222 - protein, 744 aa, Platycheirus albimanus
ILFRVDIYIYTMTSNKIVMLCKKCNGTDHSRSSSKLCKNRTLPQKERFLQSTKEERIETYTVKMGFNAFCRDDVLKKRIVEDVLEISDLCIEASLYVHFHYMKILHEDGDNFPKMFTYNHLLDFYYHLQNKKQPKERVEKDEEYFKLRENRRIYDGSHRSFLIQAIAKQHETAMKNCISVHLIKRIARYLYEKTEKKTKKLYQWIDIVEAQLFEKDYTEKPCMEVEAFLEEFKFDPKKKFINLDNDWWSLIPFLFKLGQWFTGRNLKSFNIFPIFKPGRKHVRYGGEALRELLSATGLLKKVSVADFSASTPKYWWKYFDVDHAVYGDLDASTLKIEPKNGKSFGMTFTTNGIDCSVGMNRYVRISVDNTGPNKTEKRKATAQTSEPIPKKKKTATKKKTTSTAATTSTAATTSTGATSTSTAATSTSTAATTSTARGTTATPGTTAGTSREDFSNYKYLLGIDPGVVNYVGACFLDRETNSETNFVLKSATYKQQMGKERARRRKKIKISGKLEKELLEYRKLNPNISSKCSINLNSNLDFIKYRLNFFISSQKLYSKKNYCRLNWDSYICSRRAIDILVNKLLDLNKSKEKTLVCFGDGSLEQGKSYGRNLIPAFNNLKKAFIRRKDKCRVIDVDEYLTTQSCSKCFSKLVDPPRHARVDRLVQQRRRHDHRFKTCKRCKTVWDRDVNAARNMINVALGIYDFRRKSSGGSIDLARPSDWRAYKMKFSFPNSLKVAPVVTLR

SEQ ID NO: 2223 - protein, 735 aa, Platycheirus albimanus
VYTMTSNKIVMLCKKCNGTDHSRSSSKLCKNRTLPQKDRFLQSTKEERIETYTVKMGFNAFCRDDVLKKRIVEDVLEISDLCIEASLYVHFHYMKILHEDGDNFPKMFTYNHLLDFYYHLQNKKQPKERVEKDEEYFKLRENRRIYNGSHRSYLIQAIAKQHETAMKNCISVHLIKRIARYLYEKTEKKTKKLYQWIDIVEAQLFEKDYTEKPCMEVEAFLEEFKFDPKKKFINLDNDWWSLIPFLFKLGQWFAGRNLKSFNIFPIFKPGRKHVRYGGEALRELLRVTGLLKNTSAADFSASTPKYWWKYFDVDHAVYGDLDASTLKIEPKNGKSFGMTFTTNGIDCSVGMNRYVRISVDNTGPNKTEKRKATAQTSEPIPKKEKTATKKKTTSTAATTSTAATTSTGATSTTSTGATSTSTAATTSTARGTTETPGTTAATSREDFSNYKYLLGIDPGVVNYVGACFLDRETNSETNFVLKSATYKQQMGKERARRRKKIKISGKLEKEFLEYRKLNPNISPKCLITYSSDYIKYRLKFFNCSQKLYSQKNYCRLKWDSFICSRRAVDILVNKLLDLNKSKEKTLVCFGDGSLEQGKSYGRNLIPAFNNLKKAFIRRKDKCRVIDVDEYLTTQSCSKCFSKLVDPPRHARVDRLVQQRRRHDHRFKTCKQCKTVWDRDVNAARNMINVALGIYNFRTKSSGGSIDLARPSDWRAYKMKFSFPNSLKVAPVVTLR

SEQ ID NO: 2224 - protein, 445 aa, Platycheirus albimanus
NICIFEIYTPEFNDLDASTLKIEPKNGKSFGMTFTTNGIDCSVGMNRYVRISVDNAGPRKAIKRKATAQTSEPIPKKKKTATKKNTTSTAATTSTSETSTSTAATTSTGATSTSTAATSTSTAATTSTARTTAARGTTATPGTTAATSREDSEDFSNYKYLLGIDPGVVNYVGACFLDRETNSETNFVLKSATYKQQMGKEIARRRKKIRISGKLEKELLEYRKLNPNISSKCSINLNSNLDFIKYRLIFFISSQKLYSKKNYCRLNWDSHISSRRAIDILVNKLLDLNKSKEKTLVCFGDGSLAEGKSYGRNLIPSFNNLKKAFLRRKDKCRVIDVDEYLTTQSCSKCFSKLVDPPRHARVDRLVQQRRRHDHRFKTCKQCKTVWDRDVNAARNMINVALGIYNFRTKSSGGSIDLARPSDWRAYKMKFSFPNSLKVAPVVTLR

SEQ ID NO: 2225 - protein, 327 aa, Platycheirus albimanus
TGATSTSTAATSTSTAATTSTARTTAARGTTAPPEDFSNYKYLLGIDPGVVNYVGACFLDRETNSETNFVLKSATYKQQMGKERARRRKKIQISGKLEKELLEYRKLNPNISSKCSINLNSNSDYIKYRLKFFIASQKLYSKKNYCRLNWDSYICSRRAIDILVNKLLDLNKSKEKTLVCFGDGSLAEGKSYGRNLIPSFNNLKKAFLRRKDKCRVIDVDEYLTTQSCSKCFSKLVDPRRHARVDRLVQQRRRHDHRFKTCKQCKTVWDRDVNAARNMINVALGIYNFRTKSSGGSIDLARPSDWRAYKMKFSFPNSLKVAPVVTLR

SEQ ID NO: 2226 - protein, 240 aa, Platycheirus albimanus
KESNSANIGTNTEEEKNSNKEEYNINSSNNINLLGIDPGVVNYVGACFLDRETNSETNFVLKSATYKQQMGKERARRRKKIQISGKLEKELLEYRKLNSNISSKCSINTNSNSDNIKYRLKFFIASQKLYSKKNYCRLNWDSYISSRRAIDILVNKLLDLNKSKEKTLVCFGDGLLGEGKRYGRNLIPSFNNLKKAFLRRKDKCRVIDVDEYLMTQSCSKCFSKLVDPPRHARVDRLVHI

SEQ ID NO: 2227 - protein, 240 aa, Platycheirus albimanus
KESNSANIGTNTEEEKNSNKEEYNINSSNNINLLGIDPGVVNYVGACFLDRETNSETNFVLKSATYKQQMGKERARRRKKIQISGKLEKELLEYRKLNSNISSKCSINTNSNSDNIKYRLKFFIASQKLYSKKNYCRLNWDSYISSRRAIDILVNILLDLNKSKEKTLVCFGDGSLGEGKRYGRNLIPSFNNLKKAFLRRKDKCRVIDVDEYLTTQSCSKCFSKLVDPPRHARVDRLVHI

SEQ ID NO: 2228 - protein, 200 aa, Platycheirus albimanus
TDMSGLAWTTQDQGKQLKFVRKSATYKQQMGKERARRRKKIQISGKLEKELLEYRKLNSNISSKCSINTNSNSDYIKYRLKFFIASQKLYSKKNYCRLNWDSYISSRRAIDILVNKLLDLNKSKEKTLVCFGDGSLGEGKRYGRNLIPSFNNLKKAFLRRKDKCRVIDVDEYLTTQSCSKCFSKLVDPPRHARVDRLVHI

SEQ ID NO: 2229 - protein, 776 aa, Platycheirus albimanus
LIYFNHSTMTSKNVVMLCKKCNGTDHCRSSSKLCKNRILPQKERFLQSSTEETIETYTVKMGFNAFCRDEVLKKRIVEDVLEISDLCIEASLYVHFHYTKILHEDGDNFPKMFTYNHLLDFYYHLQNKKQKKERVARDEEYFTLRENRRIYDGSHRSFLIQAIAKQHETAMKNCISVHLIKRIARYLYEKTEKKTIYQWMVIVEDQLFQKDNTEKPCTEIEAFLEEFKFDPKKKFLNLDNDWWSLIPFLFKLGQWFAGRNLKSFNIFPIFKPGRKHVRYGGEALRELLSATGLLKKVSVADFSASTPKYWWKYFDVDHAVYGDLDASTLKIEPKNGKSFGMTFTTNGIDCSVGMNRYVRISVDNTGPNKTEKRKATAQTSEPIPKKKKTATKKKTTSTAATTSTAGTTSTAATSTAATTSTAATTSTAATTSTAATTSTAATTSTAATTSKAATSTSTSTAATTSTARTTAARGTTATPGTTTSREDFSNYKYLLGIDPGVVNYVGACFLDRETNSETNFVLKSATYKQQMGKERARRRKRIKISGKLEKELLEYRKLNPNISPKCLVTYSSDYIKYRLKFFNCSQKLYSQKNYCRLKWDSIICSRRAVDILVNKLLDLNKSKQKTLVCFGDGSLEQGKSYGRNLIPAFNNLKKAFIRRKDKCRVIDVDEYLTTQSCSKCFSKLVDPPRHARVDRLVQQRRRHDHRFKTCKQCKTVWDRDVNAARNMINVALGIYDFRRKSSGGCIDLARPSDWRAYKMKFSFPNCLKVAPVVTLK

SEQ ID NO: 2230 - protein, 743 aa, Platycheirus albimanus
LIYFNHSTMTSKNVVMLCKKCNGTDHCRSSSKLCKNRILPQKERFLQSSTEETIETYTVKMGFNAFCRDGVLKKRIVEDVLEISDLCIEASLYVHFHYTKILHEDGDNFPKMFTYNHLLDFYYHLQNKKQKKERVARDEEYFKLRENNRVYDGSYRSFLIQAIAKQHETAMKNCISVHLIKRIARYLYEKTEKKTIYQWMVIVEDQLFQKDNTEKPCTEIEAFLEEFKFDPKKKFINLDNDWWSLIPFLFKLGQWFAGRNLKSFNIFPIFKPGRKHVRYGGEALRELLSATGLLKKVSVSDFSASTPKYWWKYFDVDHAVYGDLDASTLKIEPKNGKSFGMTFTTNGIDCSVGMNRYVRISVDNTGPNKTEKRKATAQTSEPIPKKKKTATKKKTTSTAATTSTAATTSTAATTSKAATSTSTAATTSTARTTAARGTTATPGTTTATSREDFSNYKYLLGIDPGVVNYVGACFLDRETNSETNFVLKSATYKQQMGKERARRRKKIKISGKLEKELLEYRKLNPNISPKCLINYSSDYIKYRLKFFNCSQKLYSKKNYCRLKWDSIICSRRAVDILVNKLLDLNKSKEKTLVCFGDGSLEQGKSYGRNLIPAFNNLKKAFIRRKDKCRVIDVDEYLTTQSCSKCFSKLVDPPRHARVDRLVQQRRRRRHDHRFKTCKQCKTVWDRDVNAARNMINVALGIYDFRRKSSGGCIDLARPSDWRAYKMKFSFPNCLKVAPVVTLK

SEQ ID NO: 2231 - protein, 411 aa, Platycheirus albimanus
FFGIDSEILVEIFRFGACSVWRPRRVNTENRAQKWKIFWYDIHNEWHEFRCSVGMNRYVRISVDNTGPKKTEKRKATAQTSEPIPKKKKTATKKKTTSTAATTSTAATTSTAATTSTAATSTAATTSTAATSTAATTSKAATSTSTAATTSTARTTAARGTTATPGTTAATSREDFSNYKYLLGIDPGVVNYVGACFLDRETNSETNFVLKSATYKQQMGKERARRRKKIKISGKLEKELLEYRKLNPNISPKCLITYSSDYIKYRLKFFNCSQKLYNKKNYCRLKWDSYICSRRAVDILVNKLLDLNKSKEKTLVCFGDGSLEQGKSYGRNLIPAFNNLKKAFIRRKDKCRVIDVDEYLTTPTQSCSKCFSKLVDPPRHARVDRLVTTIDSKRANSVKLFGIVMSMLLEI

SEQ ID NO: 2232 - protein, 257 aa, Platycheirus albimanus
LFVRRCELCGRLFPGQGNKFRNKFCSEVGHIQATNGKKRARRRKKIRISGKLEKKSLEYRKLNPNISSKCSINSNSNPDFIKYRLKFFISSQKLYSQKNYCRLNWDSYISSRRAIDILVTNKLLDLNKSKEKTLVCFGDGSLEEGKSYGLNLIPAFNNLKKAFLRRKDKCRVIDVGEYLTTQSCSKCFSKLVDPPKHARVDRLVQQRRRHDHRFKTCKQCKTVWDRDVNAARNMINVALGIYNFRKKSSGGSIGLIK

SEQ ID NO: 2233 - protein, 1488 aa, Steromphala cineraria
CQLTIAVVRGWRKDPFGILLQASQDGELDTVDQICTKHKINVNRRGPNGKTALMAASLNGHRAVFDFLRSNGADVYMLDDNKNTILHFACFNDNDEFVKYLLSLNITDINIRGRCGRTPIMVAAQFGCRKVFDLLRTEGADINVVEDSENTILHVACSNDNVEFVKYLLSLNIADINIRGQWGGTPIMVAAQEGCRKVFDLLRAEGADINVVDEDKDSILHYACLNDNVEFVKYLLSLNIADINIRGQWGGTPIMVAAQLGCRKVFDLLRTEGADINVVDNYKNTILHVACSNDNVEFVKYLLSLNIADINIRGQWGNTPIMVAAERGCRKVFDLLSAEGADINVVDNNKDSILHYACLNDNVEFVKYLLSLNIADINIRGQWGGTPIIVAAQFECRKVFDLLRTEGADINVVDDYKNTILHYACFNDNVEFVKYLLSLNIADINIRGPWGRTPIMIAAHYGCRKVFDLLRAEGADINVVDEDKNSILHYACFNDNVEFVKYLLSLNIADINIRGQWGRTLIMIAAHYGCRKVFDLLRAEGADINVVDEDKSSILHVACSNDNVEFMKYLLSFNIADINIRGQGGRTPIMFPAQKGCRKVFDLLRAEGADINVVDDYKNSILHYACFNDNVEFVKYLLSLNITDINSRGQLGGTPIMIAAQKGCRKVFDLLRAEGADINVVDDNKNTILHVACLNDNVEFVKYLLSLNIADINIRGQWGRTPIMIAAHYGCRKVFDLLRAEGADINELDDNKNTILHVACLNDNVEFVKYLLSLNIADINIRGQWGRTPIMIAAHYGCRKVFDLLRAEGADINVVDEDKNSILHVACFNDNVEFVKYLLSLNIADINIREQGGGTPIMVAAQEGCRKVFDLLRAEGADINELDDNKNTILHVACLNDNVEFVKYLLSLNIADINIRGQWGRTPIMIAAHYGCRKVFDLLRAEGADINVVDEDKNSILHVACSNDNVEFVKYLLSLNIADINIRGQGGRTPIMFPAQKGCRKVFDLLRAEGADINVVDDNKNTILHVACLNDNVEFVKYLLSLNIADINIREQGGGTPIMVAAQEGCRKVFDLLRAEGADINELDDNKNTILHVACLNDNVEFVKYLLSLNIADINIREQGGGTPIMVAAQEGCRKVFDLLRAEGADINVVDEDKNTILHYACFNDNVEFVKYLLSLNIADINISGQWDRTPIMVAAEKGCRKVFDLLRAEGADINVVDEDKNTILHYACFNDNVEFVKYLLSLNIADINIREQGGGTPIMAAAQEGCRKVFDLLRAEGADINVVDDNKNTILHVACLNDNVEFVKYLLSLNIADINIREQGGGTPIMVAAQEGCRKVFDLLRAEGADINELDDNKNTILHVACLNDNVEFVKYLLSLNIADINIREQGGGTPIMVAAQEGCRKVFDLLRAEGADINVVDEDKNTILHYACFNDNVEFVKYLLSLNIADINIRGQWDRTPIMVAAEKGCRKVFDLLRAEGAEVREEQHQ

SEQ ID NO: 2234 - protein, 207 aa, Dryobotodes eremita
IAILGAAYKPGISVSLSMNRIKQEQFPNKKPKRADYDCIILVDPGSRLPLATVEPRRYAFRPITKKYVLSYMLEWKRDNKLISQIGAAEQWDRESFTFPILSKNINHVAEYTLFRLKRFDIRQSPYELHAKLTRLKLDKYSRTVKCEERIVRQVFKSSGVEKKLVLYGAGSTFMNKATFPGRKFKHDSLLRRLRSKRNIDVEVVVES

SEQ ID NO: 2235 - protein, 222 aa, Philereme vetulata
KVQSHRARKRLRFLKDIEERIKADRESTEQEIRIELTQKSQNAEPYTRFQLKWFDEKQRIYEQRRVQRLMFDKYINDQKMLHKIVDEYFGKEPDTLVVYGAGFDFMNKGTFKGHRKFRHHDVIKIIKQRRNLSVYVINEAYTTKNCSYCHDRDRIQQKLSVSKSLHRYVHCSVCRKGIHRDKNGAKNILLKYENMKKLPISLSSIGTDMSLVDGGSPQGSLS

SEQ ID NO: 2236 - protein, 269 aa, Pollenia angustigena
NGANILIFQKLVVKSKNFSLQTDGVAVSFSMKKPKRIESTPKKKKKKYRKKIGLDPGLRLIYGGVRNGKPIKLSSTSYHHMSGFHSRNVKLKNYTKNFKEESQLSPYSENYIEYTRYQLEIFHLKQTLYSQRKVTKLKLQKFICVEKTVNTVAENLVPDMKQKTLICIGSTEIAANSPMRGYVRTPNRKLIAALRRRKADILLVNEFRTTKLCANCFSENTTSKTPHRYQYCPNCRTCWNRDVNAGINILYLGECIIHQIKKIQILLEI

SEQ ID NO: 2237 - protein, 231 aa, Pollenia angustigena
KFNENFKEDSELSPYAENFKEYTKYQLEIFKQKQCLYSQRKVTKLKLQKFINVEKTVNAVAANLVPDMKEKTLICIGSTEIAANSPMRGYIRTPNKKLIAALRKRRADVLFVNEFRTTKLCANCFRENTTSKSPHRYQYCPNCSICWNRDVNAGKNISTLASASSINVKNTRILLEFKYHYFLYGEKYVYMSVFLQNGLTPTDPANTTVLGGSEGITINRLLTCVLIKLLR

SEQ ID NO: 2238 - protein, 259 aa, Pollenia angustigena
KVKNELEVKLLLYEKKNRLEQKNPDCSGNLLKIRSTTYDNKLGLDPGLRLIYGGVKNGKPIKLRSTTYHHMSGFYSRKRKLKKFTENFKEDSKHSPYAENFKEYTKYQLEIFKQKQCLYSQRKVTKLKLQKFINVEKTVNAVAANLVPDMKEKTLICIGSTEIAANSPMRGYIRTPNKKLIAALRKRRADVLFVNEFRTTKLCANCFRENTTSKSPHRYQYCPNCSICWNRDVNAGKNILYLGECIVNQREKHKNFVRI

SEQ ID NO: 2239 - protein, 225 aa, Pollenia angustigena
RLIEYFKLPETANKKFNYSLQTDGVAVSFSMKKPKRVESTPKKKLQQNEADCSGNLLKIRSTNYDNKLGLDPRLWLIYGGVKNGKPIKLSSKTHHHMSGFHSRNLKLKKYTEHFTENSQVSPYAAYLEEYTKYQLKIFKQKQHLYSQRKVTKLKLQKFINVEKTVNVAAANLVPDLKEKTLICIGSTEIAANSPMRGYVRTPNNKLIAALRRRADILLVNEFRTT

SEQ ID NO: 2240 - protein, 544 aa, Pollenia angustigena
MSKPPSPAAEETETVVVKRALRSTCKNEAIFQKIQLDVREMSSLFVDVSRYLHFSLMKQWSTGNFEPIKFQSYYYPLMKKKKSIYVLDSEYEELRNNLPLYDSSFRSNLFTAAANQYEVIFHNNLWMHAYSRLRRFFRYEKDKKKVYRTLSYIFQSTSTEVPDEELLQQMRDKLWWDGEKLDKIQNRKLFWSYIPLFYNLQRYNEKMNLKNFSLIPILKHGLHHIQYDSFAFYQLLCGLKLYKGSRLNFDREIEWRKYFNFPETSSKKLNFSLQTDGVAVSFSMKKPKRIESTPKKKKKIQKNEADCSGNLLKIRSTTNDNKLGLDPGLRLIYGGVRNGKPIKLSSTSYHHMSGFHSRNVKLKNYTKNFKEESQLSPYSENYIEYARYQLEIFHLKQTLYSQRKVTKLKLQKFICVEKTVNTVAENLVPDMKQKTLICIGSTEIAANSPMRGYVRTPNRKLIAALRRRKADIFLVNEFRTTKLCANCFSENTTSKTPHRYQYCPNCRTCWNRDVNAGINIVYLGECIINQIEKNTNFVRNLSFI

SEQ ID NO: 2241 - protein, 349 aa, Pollenia angustigena
SYIPLFYNLQRYNEKMNLKNFSLIPILKHGLHHIQYESFAFYQLLCGLKLYKGSRLNFDREIEWRKYFNFPETSSKKFNFSLQTDGVAVSFSMKKPKRIESTPKKKKKIQKNEADCSGNLLKIRSTTYDNKLGLDPGLRLIYGGVRNGKPIKLSTTSYHHMSGFHSRNVKLKNYTKNFKEESQLSPYSENYIEYARYQLEIFHLKQTLYSQRKVTKLKLQKFICVEKTVNTVAENLVPDMKQKTLICIGSTEIAANSPMRGYVRTPNRKLIAALRRRKADILLVNEFRTTKLCANCFSENTTSKTPHRYQYCPNCRTCWNRDVNAGINILYLGECIIHQIEKIQILLEI

SEQ ID NO: 2242 - protein, 223 aa, Pollenia angustigena
RNLNELKVRRKRRKKIQKNKADCSGNLLKIRSTTYDNKLGLDPGLRLIYGGVRNGKPIKLSSTSCHHMSGFHSRNVKLKNYTKHFKEESQLSPYSENYIEYARYQLEIFHLKQTLYSQRKVTKLKLQKFICVEKTVNTVAENLVPDMKQQTLICIGSTEISANSPMRGYVRTPNRKLIAALRRRKADILLVNEFRTTKLCANCFSENTTSKTPHRYQRIAFCN

SEQ ID NO: 2243 - protein, 338 aa, Pollenia angustigena
MNLKNFSLIPILKHGLHHIQYDSFAFYQLLCGLKLYKGSRLNFDREIEWRKYFNFPETSSKKFNFSLQTDGVAVSFSMKKPKRIESTPKKKKKIQKNEADCSGNLLKIRSTTYDNKLGLDPGLRLIYGGVRNGKPIKLSSTSYHHMSGFHSRNVKLKNYTKNVKEESQLSPYSENYIEYARYQLEIFHLKQTLYSQRKVTKLKLQKFICVEKTVNTVAENLVPDMKQKTLICIGSTEIAANSPMRGYVRTPNIKLIAALRRRKAEILLVNEFRTTKLCANCFSENTTSKTPHRYQYCPNCRTCWNRDVNAGINILYLGECIIHQIEKNTNFVRNLSFI

SEQ ID NO: 2244 - protein, 218 aa, Pollenia angustigena
GYILDIYGGVRNGKPIKLSSSSYHHMSGFHSRNVKLKNYTKNFQEESQLSPYSENYIEYARYQLEIFHLKQTLYSQRKVTKLKLQKFICVEKTVNTVAENLVPDMKQKTLICIGSTEIAANSPMRGYVRTPNRKLIAALRRRKADILLVNEFRTTKLCAKCFSENTTSKTPHRYQYCPNCRTCWNRDVNAGINILYLGECIIHQIEKNTNFVRNLSFI

SEQ ID NO: 2245 - protein, 252 aa, Pollenia angustigena
RIKSTPKNKTKVQQIESDCSGNLLKIRSQTYDNKLGLDPGLRLIYGGVGNGKPIKLKSTTYHTMSGFHSRNCKLQKYTMKFKEDSQLSPYAENSEAYTKYQLTIFDQKQKLYSQRKVTKLKLKKFINVEKTVYTVAASLVPNMKEKNLICIGSTKIAANSPMRGYVRTPYRKLITAQRKRRADILHVNEFRTTKLCANCFSENITSKSPHRYQYCPNCSTCWNRGVNAGINILYLGECVINQKEKHENFFRN

SEQ ID NO: 2246 - protein, 545 aa, Pollenia angustigena
RDRNRCCKNALRNTCKNEAVFNQIQNDVREMSALFVEVSRYIHFCLMKRWRENNFEPVHFESFYYCLMKKKRPKYKIDTEYEAMRGELPLYDSSYRSNIFIASANQYHVIFHNNIWRHAYTRLRRFFKNEPDKKKVYRTLSHLFEPNSKEIPDTNLLEKMRSELMWNGEKLYNIKNKKLFWTSVRLFYNLQRFNEKNGLKNFALIPILKHGSHHIQYDSMAFYHMLCGLKLYKGKWSTFDRETEWRKYFKFPETSTKKFNFSMQTDGVAISFSMKKPNRREISKTKKKKVQKDECDCSGNLVKIRSTNYDNKIGLDPGLRLIFGGICNGKPIKLKNATYQQMSGFHCRKLKLSTYSQHFKEDSQLSPYAENFNLYIKYQLSIFERKQSLYSQRKVTRLKLKKFICVQQTANTIAKNLVANVNEKTLICIGSTEIGANSPMKGYRRTPNKKIIEALKARKADILMVNEFRTTKLCAKCYNENITSRSPHRYQYCPNCRTCWNRDVNAGANILYLGECIVNETEKNHSFNRTIKSIVISNIAKNTNT

SEQ ID NO: 2247 - protein, 311 aa, Pollenia angustigena
SCTKVNGVLLSERQNGEYFLKFPETSTKKFNFSMQKPNRREISKTKKKKVQKDECDCSGNLDKIRSTNYDSKIGLDPGLRLIFGGIRNGKPIKLKNATYQQMTGFHCGKLKLNTYTKHFKEDSQLSPYSENFNQYIKYQLSIFERKQSLYSQRKVTRLKLKKFICVQHTANTIAKNFVANVNEKTLICIGSTEIAANSPMKGYIRTPNKKIIEALKTRKADILMVNEFRTTKLCAKCYNENITSRSPHRYQYCPNCRTCWNRDVNAGANILYLGECIVNETEKNRNFNKQQSIVISNIAKIRILDYFFKIV

SEQ ID NO: 2248 - protein, 304 aa, Pollenia angustigena
SCTKVNGVLLSERQNGEYFLKFPETSTKKFNFSMQKPNRREISKTKKKKVQKDECDCSGNLDKIRSTNYDSKIGLDPGLRLIFGGIRNGKPIKLKNATYQQMTGFHCGKLKLNTYTKHFKEDSQLSPYSENFNQYIKYQLSIFERKQSLYSQRKVTRLKLKKFICVQHTANTIAKNFVANVNEKTLICIGSTEIAANSPMKGYIRTPNKKIIEALKTRKADILMVNEFRTTKLCAKCYNENITSRSPHRYQYCPNCRTCWNRDVNAGANILYLGECIVNETEKNRNFNKQQSIVISNIAKNTNT

SEQ ID NO: 2249 - protein, 431 aa, Pollenia angustigena
ILNTKRYDSSYRSNIFIASANQYHVIFHNIWMHAYTRLRRFFKNEPDKKKVMWNGENLHNIKNKKLFWTSVRLFYNLQRFNEKNGLKNFALIPILKHGSHHIQYDSLAFHQMLCGLKLYKGKWSTFERETEWRKYLKFPETSTKKFNFSMQTDGVAISFSMKKPNRREISKTKKKKVQKDECDCSGNLDKIRSTNYDSKIGLDPGLRLIFGGICNGKPIKLKNATYQQMSGFYCRKVKLNTYTKHFKEDSQLSPYPENFNQYIKYQLSIFERKQSLYSQRKVTRLKLKKFICVQQTANTIAKNLVANVKEKTLICIGSTEIAANSPMKGYIRTPNKKIIEALKARKADILMVNEFRTTKLCAKCYNENITSRSPHRYQYCPNCRTCWNRDVNAGANILYLGECIVNETEKNRNFNKQQSIVISNIAKNTNT

SEQ ID NO: 2250 - protein, 248 aa, Pollenia angustigena
TRDFKVQKDECDCSGNLVKIRSTNYDSKIDLDPGLRLIFGGICNCKPIKLKNATYQQMTGFHCRKLKMNTYTKHFKEDSQLSPYSENFNQYIKYQLSIFERKQSLYSQRKVTRLKLKKFICVQQTANTIAKNLVANVKEKTLICIGSTEIAANSPMKGYIRTPNKKIIEALKARKADILMVNEFRTTKLCAKCYNENITSRSPHRYQYCPNCRTCWNRDVNAGANILYLGECIVNETEKIATLINNKV

SEQ ID NO: 2251 - protein, 246 aa, Pollenia angustigena
TRDFKVQKDECDCSGNLVKIRSTNYDSKIDLDPGLRLIFGGICNCKPIKLKNATYQQMTGFHCRKLKLNTYTKHFKEDSQLSPYSENFNQYIKYQLSIFERKQSLYSQRKVTRLKLKKFICVQQTANTIAKNLVANVKEKTLICIGSTEIAANSPMKGYIRTPNKKIIEALKARKADILMVNEFRTTKLCAKCYNENITSRSPHRYQYCPNCRTCWNRDVNAGRDETIRVNTSTYSILLYKYQLFL

SEQ ID NO: 2252 - protein, 203 aa, Pollenia angustigena
LHWTAGLDPGVRLLFGGVRNGKPIKLKNATSQMTGFHCRKMKLNTYTKHFKEDSQLSPYSENFHQYIKYQLSIFERKQSLYSQRKVTRLKLKKFMCSTEKTRIYIRSTEIAANSPMKGYIRTPNKKNIEALKTRKADIFMVNEFRTTKLCAKCYNENITSRSPHRYRYFPNCRTCWHRDVNAGANILYLGECIVNETEKKSQL

SEQ ID NO: 2253 - protein, 439 aa, Pollenia angustigena
KRKNLYMFLILNTKNYAIIYPCTTALSARIYLLQLLTNMKLYFTTIYGCTLTADCVDFLEMRRIKKRCTELYRLDKLDKIQNRKLFWSYIPLFYNLQRYNEKMNLKNFSLIPILKHGLHHIQYDSFAFYQLLCGLKLYKGSWLNFDRKIEWRKYFNFPETSSKKFNFSLQTDCVAVSFSMKKPKRFESTTKKKKKIQKNEADCSGNLLKTRSTTYDNKLGLDPGLRLIYGGVKNGKPIKLSSTSYHHMSGFHSRNVKLKNYTKNFKESQLSPYSENYIEYARYQLEIFHLKQTLHSQRKVTKLKLQKCICVEKTVNTVAENLVPDMKQKTLICIGSTEIADNSPMRGYVRTPNRKLIAALRRRKADILLVNEFRTTKLCANCFGENTTSKSPHRYQYCPNCRTCWNRDVNAGINILYLGECIIHQIEKNTNFVRNLSFI

SEQ ID NO: 2254 - protein, 206 aa, Catocala fraxini
NYSKIRSVDPGAKTPTVTCMRNSGSSGSFVYNILKKERVVYEFKYHHRSRKRLRFIKDVEDRVRLLDQEAAGLETVASLTPKSSNVQLYTRFQLKWFYEKQRIYEQRRLQRLKFDKFMNDQKMLNKFVDEYFGKEPDTLVVYGAGFDFINKRSCKGHCKFRHNEVLKIAKQRKNLSVYVINEALYIHIHTCTARPLFCSDPNTVGL

SEQ ID NO: 2255 - protein, 231 aa, Apotomis betuletana
TRGRVPIATVESKKFAFKRLTKKYVRSHTLECKRERARDKILKPVLDAVHRERASFTFPVSSKNTDHVIEYTIFRMKWFEAMQVPYEKHSKLTRFGLDKYMRTARCEERIVREVFDGGGIEKVLVLYGAGSKFMNAASFSGRKFKHDSLLKKLRSKSNVAVEIVDEVYTSQACSACNERTGKFIKIGMAWTVDCGGEHAPCATAYSTGTLTPPKIFSSTISGLPSVGHDVL

SEQ ID NO: 2256 - protein, 212 aa, Apotomis betuletana
NVTIRLLRITILIRILNSVCFRTYNKKICTFTQEWKRERIRNKILNPFGRHAEGSASFTFPVSKNTDHVLEYTVFRMQWFDAMQAPYEKHSEFTRFGLDKYMRTAKCQERIVKVFDGGGVENVLVLYGAGSKFMNVASFSGRKFMNVASFSGRKFMNVASFSGRKFKHNALLKKLHSKANMIVDEAYTSQACLACNERTGAFINKFLSKMSF

SEQ ID NO: 2257 - protein, 895 aa, Bombylius major
ATTTTGNSSSSSSSSSRNNVENCQPRDNSVVDKQTYCTVKSGLRNFTADLVTFERMPAAEQIATIDAKNVEKNMNLPSPLELYNKINEDASILSMMTIEVSYSLYVEINLNPDVLKHLEKEPNFLHLFYNLKSECRVPLIGFEFNTYNRLRAEAGIHYRYDMRNRSAIMKESAKQLTICFKTNVTTHMRNRIYRYFRTRYDKLSNSEIGDIMDVLQRKSDTIDIEVMEIISDFRRKFNLEDDLWFQPSEIKQNWWKYVGFLHRMQKYMYDIGGKSFMVSPIYDYGRKHIHYYNTGFNELLKRLGKYIDRSDVRKYWYECFNIKKFEAKAKKFKGISTNGVDVSILLQKPKKQFPENHEERKLEEVKENYRTGKYSKIIGVDPGLVNPIARVSIKPDQLDRRNYKNKKILNKNLRKGLGDLKRKRKFKRLTSRRHDFIRQFDERSQNQSPKSGNYLEFIKLRLEYFERIQGARSHPQVTRLKFDRYICRRKFVDNFANGICKPIIEGKKTLVAFGDGTISSFIRGYRRAPAKEIVLALERNPNIDVVMVDEYSTTQFCSKCYNRLKIQKDRSAKCEYCNMFWDRDINAANNMINIIKCMLENRPRPVELQRPPNNEVQNIPRPAEMRRPPNNEVQNIPRPVEMQRPPNNEVQNIPRPAEMQRPPENEVQNIPRPAEMQRPPENEVQNIPRPDNFQILNREFEYLDIDFQRNDGVNVHDAMVQYHSEKEDSDQGYYQYESDISIIEYDSEDFDDSHAVENYRHVDDFDNGVHEPGDEIVRDEDHHGVHDAMVEEYLEEEPFFENIMENGVQNDFQPNDGHVDDFDHGVHEPGNEIVRDEAPQPDCSTSEAQLRAPLPPPVPYRRYLEEMVGNVDEHEPLVQEAELGGYSMLEFLLRG

SEQ ID NO: 2258 - protein, 417 aa, Bombylius major
LGRGNKLRSFVLSRLDYFDFFEESNYVSPKSDNYYSYVKTQLKHFPNVQRLQSNKKVTRIIFDKYIRTRRSLNKIVNYFCEPNIPGTRTLVGYGNVEIGEHIRGHQRMPNKRFFKTVERHEDADVFVVDERKTTITCSICFSILKVSKSPHRFAKCLTCGTIWNRDINAANNMIRLVLDEVEGKPRNPAFCPDFNLRAEHHVENTHEAKKVKPKDKVASPHIDNTSENEALEIESDDSDYRNLEVSDEEYFDLEASEDEVENPDFQKSKLKHFERFMHDVQKYFGLAVDSGNEDEVENPHYDLDSEKVEEHSDQEYYELQSNLETSESSSEDEVENPHYDLEHFESFMHEKYYEIQSDLETSERSLEDEVNNLSVVTQEVVIPKSPTPRFVGKRKVDDHDLSYARKKKKLILELEGQ

SEQ ID NO: 2259 - protein, 373 aa, Bombylius major
TRKGSCNTIEKSWKTLKNKKYSKFVGIDLGVICLFSLVSTDTNESDINYKNSLLKNEVVRKMTGQESRGNKLRRFVISTLDYFDFFEESNNVWSRSDNYHSYVKTLKTQLKHFSKVQRLYFNEKVTRLKFDKYIRTRRSLDKIANYICERNKPGTITLIGYGSQEIGKHIRGHPRIPNKGFLKSLKRNEKADVIVVNEYNTTNTCSNCRSKLKVSKSPHRFATCLICGKMWNRDINAANNMKNIVLDEVKGKPRHPAFCPDFNLRAEHHVGNTHDAKKVKPKDKVASPHIDNTSDNEALEIESDDSDYRNLEVSDEEYLGIAVSDSGNEDEVESPHYNLHHVQNIHDAEMAESEKERLLTTTTPMLERKKNLS

SEQ ID NO: 2260 - protein, 1386 aa, Bombylius major
KVNFISLFIKLEGFLKLKFHFFNIQAYYITLLINISFFLFVLCFRSSSLGKNFGAEKASKNCAEKANKNCAEKASKNCAEKANKNCAEKASKNCAEKASKNCAEKANKNCAEKASKNCAEKASKNCAEKASKNCAEKASKNCAEKANKNCAEKASKNVTEICKNTTICINEAQAGAETDTLESATDRRNYRYWLQQHDIADIARIEYGYGTAEANTSFEVVGSLQQLKIQFERFKATVARDEERQLTLIVNLNNNHWVTLVISHQNAQYHAYYVDSMNRGVPLMILEFQEQTQAEINVCDVSFPQQEDGHNCGLWALENARDIIAILRERSSDIPTAIRTYLQTQFKLRNKDYFIRLRKDVSVKLNADLQRSQLFAAMQQQFAGTAKSANHVKVSTENTEKRTNATICTIEKRTYEAQTKSANSAKVSTAKSANHVKVSTTKSANHVKVSTTKSANHVKVSTENTEKRTNATICTIEKRTYEAQTKSANSAKVSTKKRTSRAKPSTKTFTNTKPGTEKSTNKDNSMEISTIKCGLPKFVKDYQDLKKLPVSEAEKIRIKRDKEQLPDPIATYNLIIDIAQFVSNVMFEVSLCIGTVLNDQPSLFTDDEKEPNLLLFFYVVKNICRNAKNRKQIDCSSYTTIRDYFDFLKYDCKYRNAVIQESVKGLKTNLITNITTHMYSRVKKYFVAILNPKIAKEGTAKQKRRRITMVAYDNVSTIMKRLFKDNSNVLNEVCMKAIDNFRAEFGLVPTFSFKANDVRMKWWTYIEFLLKLQKFMYNRGEKSFAVIPKHGFGTKHVLFTNTGFRELLVSLGCPARNMSKDQLQDYWKKCFNIDKFARGDMTFRCFSTNGIDVSIIFERPKRQNLEPAKVHEILLKKARKTLKNDKYSNYVGIDPGVICLFGLVSKNTKEFDINRNSKKAIPKKQRHYKNSLLKNEVYRKMTGEESRGNKLRRFVLSTLDYFNFFEESNYVSPKSDNYYSYVETQLQHFPNVQRLQSNKKVTRLKFDKYIRTRRSLIKIVNYFCEPNKPGTRTLVAYGDAEIGEYIRGHQRMPNKRFCKIVKRHEDADVIVVNEYKTTIICSICFSILEVSKSPHRFAKCHTCGTIWNRDINAANNMIRLALDEVEGKPRNPAFCPDFNTYDAKKVKPKDKVASPHINKNTHGPKKVKPKDKVASPHIDNTPENEALEIESDDSDYRNMDVSDDENPHYDLEHFESFMHDVQEYFGLAVDSGNEDEVENLVHKRKVDHDHSYARKEEPNYSCSRVQKPVGKYEILKSPTPQVVEYEILKSPTPRFVGKRKVDDHDLSYARKKKKIDPRAGRTVMKEPNYSCSRVQKPVGKYEILKSPTPQVVEYEILKSPTPQPSCSRHIPPLPGRRIGMEDRKSK

SEQ ID NO: 2261 - protein, 373 aa, Bombylius major
ESKSKVKKYFVAILNPKIAKEGTAKQKRRRITMVAYDNVSTIMKRLFEDNSNVLNEVCMQAIEKFRAQFGLVPTFSFKANDVRMKWWTYIEFLLKLQKFMYNRGEKSFAVIPKHGFGTKHVLFTNTGFRELLLSLGCPARNMSKDQLQDYWKKCFNIDKFARGDMTFRCFSTNGIDVSIIFERPKRQNLEPAKVHEILLKKARKTLKNEKYSNYVGIDPGVICLFGLVSTNTKEFDINRNSKKAIPKKQRHYKNSLLKNEVYRKMTGQESRGNKLRRFVLSTLDYFDFFEESNYVSPKSDNYYSYVETQLKHFPKVQRLQSNKKVTRLKFDKYIRTRRSLNKIVNYFCEPNIPGTRTLVGYGNVEIGEHIRGH

SEQ ID NO: 2262 - protein, 905 aa, Bombylius major
NIYRSTKKRQGGATSSNAAKRRKSGAATTTTGNSSSSSSSSSSRNNVENCQPRDNSVVDKQTYCTVKSGLRNFTADLVTFERMPAAEQIATIDAKNVEKNMNLPSPLELYNKINEDASILSMMTIEVSYSLYVEINLNPDILKHLEKEPNFLHLFYNLKSECRVPLIGFEFNTYNRLRAEAGIHYRYDMRNRSAIMKESAKQLTTCFKTNVTTHMRNRIYRYFRTRYDELSNSEIGDIMDVLQRKSDTIDIEVMEIISDFRRKFNLEDDLWFQPSEIKQNWWKYVGFLHRMQKYMYDIGGKSFMVSPIYDYGRKHIHYYNTGFNELLKRLGKYIDRSDVRKYWYECFNIKKFEAKAKKFKGISTNGVDVSILLQKPKKQFPENHEERKLEKVKENYKTGKYSKIIGVDPGLVNPIARVSIKPDQLDRRNYKNKKILNKNLRKGLGDLKRKRKFKRLTSRRHDFIRQFDERSQNQSPKSGNYLEFIKLRLEYFERIQGARSHPQVTRLKFDRYICRRKFVDNFANGICKPIIEGKKTLVAFGDGTISSFIRGYRRAPAKEIVLALERNPNIDVVMVDEYSTTQFCSKCYNRLKIQKDRSAKCEYCNMFWDRDINAANNMINIIKCMLENRPRPVELQRPPNNEVQNIPRPAEMQRPPNNEVQNIPRPAEMQRPPNNEVQNIPRPAEMQRPPENEVQNIPRPDNFQILNREFEHLDIDFQRNDGVNVHDAMVQYHSEKEDSDQGYYQYESDISIIEYDSEDSDDSHAVENYRHVDDFDNGVHEPDDEIVRDEDHHGVHDAMVEEYLEEEPFFENIMENGVQNDFQPNDGHVDDFDHGVHEPGNEIVRDEAPQPDCSTSEARLRAPLPPPVPYRRYLEEMVGNVDEHEPLVQEAELGGYSMLEFLLRG

SEQ ID NO: 2263 - protein, 1003 aa, Bombylius major
FKFSNKIFIYRSTKKRQGGPTSSNAAKRRKSGAATTTTGNSSSSSSSSSSRNNVENCQPRDNSVVDKQTYCTVKSGLRNFTVDLVTFERMPAAEQIATIDAKNVEKNMNLPSPLELYNKINEDASILSMMTIEVSYSLYVEINLNPDVLKHLEKEPNFLHLFYNLKSECRVPLTVFEFNTYNRLRAEAGIHYRYDMRNRSAIMKESAKQLTICFKTNVTTHMRNRIYRYFRTRYDKLSNSEIGDIMDVLQRKSDTIDIEVMEIISDFRRKFNLEDDLWFQPSEIKQNWWKYVGFLHRMQKYMYDIGGKSFMVSPIYDYGRKHIHYYNTGFNELLKRLGKYIDRSDVRKYWYECFNIKKFEAKAKKFKGISTNGVDVSILLQKPKKQFPENHEERKLEEVKENYRTGKYSKIIGVDPGLVNPIARVSIKPDQLDRRNYKNKKILNKNLRKGLGDLKRKRKFKRLTSRRHDFIRQFDERSQNQSPKSGNYLEFIKLRLEYFERIQGARSHPQVTRLKFDRYICRRKFVDNFANGICKPIIEGKKTLVAFGDGTISSFIRGYRRAPAKEIVLALERNPNIDVVMVDEYSTTQFCSKCYNRLKIQKDRSAKCEYCNMFWDRDINAANNMINIIKCMLENRPRPVELQRPPNNEVQNIPRPVEMQRPPNNEVQNIPRPAEMQRPPNNEVQNIPRPVEMQRPPNNEVQNIPRPAEMQRPPENEVQNIPRPVEMQRPPENEVQNIPRPDNFQILNREFEHLDIDFQRNDGVNVHDAMVQYHSEKEDSDQGYYQYESDISSIEYDSEDSDDSHAVENYRHVDDFDNGVHEPGSEIVRDEDHHGVNDAMVEEYLEEEPFFENIMENGVQNDFQPNDGHVDDFDHGVHEPGDEIVRDEDHHGVNDAMVEEYLEEEPFFENIMENGVQNDFQPNDGHVDDFDHGVHEPGNEIVRDEAPQPDCSTSEARLRAPLPPPVPYRRYLEEMVGNVDEHEPLVQEAELGGYSMLEFLLRG

SEQ ID NO: 2264 - protein, 314 aa, Bombylius major
TPPSHTIFFISHRDLPPISVWHTNCETPCIKVHLKYFAEIQRLESNAKLTRLQFDKYIRTRRALDKIAYYICKPNKPGTRTLVGYGNRKIEKHIRGYVRISNKGFYKALKRNKNADVFKVDEYGTTKTCSKCFHRLKVSESPHRFAECLNCKTMWNRDINAGNNMIHIGLAEVQGKPRHPAFCPNFSLQALRNYNLHHVGNTHEAEMAEPEDEVASPHINENIHDAKKVKPKNKVASPHIDNQNLENEELEIESDDSDYRNLKFSDQEYFGLVVSDSSSEDEVNNLSVATEGYVIPKSPTSHFVRKRKVVDHDH

SEQ ID NO: 2265 - protein, 229 aa, Bombylius major
KTLEDKKYSKTVGIDPGLKCLFGMVSIDNSKPVINRNSKKALPRGQRHYKNSLLKNEVYRKMIGEVSRENKRKKFVENKPVYKEYLRDTDKLSPKSQEYFDYIKVHLKYFAEMQRLESNAKVTRLQFDKYIRTRRALDKISYYICKPNKPSTRTLVGYDTQKIEKHIRGFVCIRTRTHPSTSWTSTNSYSTNISKKISSTSNTNTSSTNISNENENSSELLVTDSTHVK

SEQ ID NO: 2266 - protein, 455 aa, Bombylius major
IFAEIAEIHVFYRKKVFYCHSYIYISMGDNMFCSQIRVEMQRLESNAKVTRLQFDKYIRTRRAVDKIANYICKSNKPGTRILVGYGNQKIEKHIRGYVRIANKALYEALKRNKNDDVFMVDEYGTTKTCSKCFHTLEVSASPHRFAECWNCKTMWNRDINAGNNMIHIILAEVQGKPRHPDNQNLENEALEIESDDSDYYGLMVSDSSSEDEVENPHYDLHRVEKCMHDVEMAEPEKYSYQEYYDLVEASESSSKDEVNNLSVATQYVIPKSPASRYVRKRKVADYDVSYAAAAVGKIKKLVLELEALEYKKRSRRMRSQNLLLNLLVRGHILPLPGRRIGAQWKSTSTNSTTSKKISSTNISNENGTSSGDRIQPISKVSEACFPTNNYYYYIVCAFSNTILFFSFQPQKPVGFIPVCHQLFFLEVILHLKRVQNNPCLVHVGSSLNVKMLHLA

SEQ ID NO: 2267 - protein, 1123 aa, Bombylius major
YFKFHFFNIQAYYITLLINISCFLYVLCFRSSSLGKNVGAEKANKNCAEKANKNCAEKANKNVTEICANKNCAEKANKNCAEKANKNCAEKANKNCAEKANKNVTEICTNTTICINEAQVGAETDTLESATDRRNYRYWLQQHDIADIARIEYGYGTAEANTSFEVVGSLQQLKIQFERFKATVARDEERQLTLIVNLNNNHWVTLVISHQNAQYHAYYVDSMNRGVPLMILEFQEQTQAEINVCDVSFPQQEDGHNCGLWALENARDIIAVLRERSSIDIPTAIRIYLRTQFELRDKDYFIRLRKDMSVKLNVDLQRSQLFAAMQQQFAGTAKRANSAKVSTTNSANHVKVSTENTEKRTNEAQTKSANSAKVSTTNSANHVKVSTENTEKRTNEAQTKSANSAKVSTTNSANHVEVSTTNSANHVKVSTTNSANHVKVSTENTEKRTNEAQTKSANSAKVSTTNSANHVKVSTTNSANHVKVSTENTEKRTNEAQTKSANSAKVSTKKRTSRAKPSTKTFTNTKPGTEKSTNKDNSVEMFTIKCGLRKFVKDYEDLKKLPVSEAEKIRIKRDKEQLPDPIATYNLIIDIAQFVSNVMFEVSLCIGTVLNDQPSLFTDDEKEPNLLLFFYVVKNICRNAKNRKQIDCSSYTTIRDYFDFLKYDCKYRNAVIQESVKGLKTNLITNITTHMYSRVKKYFVAILNPKIAKEGTAKQKRRRITMVAYDNVSTIMKRLFEDNSNVLNEVCMKAIDNFRAEFGLVPTFSFKANDVRMKWWTYIEFLLKLQKFMYNHGEKSFAVIPKHGFGTKHVLFTNTGFRELLVSLGCPARNMSKDQLQDYWKKCFNIDKFARRDMTFRCFSTNGIDVSIIFERPKRQNLEPAKAHEILLKKAGKTLKNKKYSNYIGIDPGVICLFGLVSKNTKEFDINRNSKKAIPKEQRNYKNYLLKNEVYRKMTGEESRGNKLRRFVLSTLDYFNFFEESNYVSFKSDNYYSYVETQLQHFPNVQRLQSNKKVTRLKFDKYIRTRRSLIKIVNYFCEPNEPGTRTLIGYGNVEIGKHIRGHQRMPNKRFLKTIERHEDTDVVVVDERNTTITCSICFSILKFLNLHIVLLNVILVVRFGTET

SEQ ID NO: 2268 - protein, 1328 aa, Bombylius major
KVNFISLFIKLEGFLKLKFHFFNIQAYYITLLINISFFLFVLCFRSSSLGKNFGAEKASKNCAEKANKNCAEKANKNCAEKASKNCAEKANKNCAEKASKNCAEKANKNCAEKANKNCAEKANKNCAEKASKNCAEKANKNCAEKASKNCAEKASKNCAEKASKNVTEICKNTTICINEAQAGAETDTLESATDRRNYRYWLQQHDIADIARIEYGYGTAEANTSFEVVGSLQQLKIQFERFKATVARDEERQLTLIVNLNNNHWVTLVISHQNAQYHAYYVDSMNRGVPLMILEFQEQTQAEINVCDVSFPQQEDGHNCGLWALENARDIIAILRERSSDIPTAIRTYLQTQFKLRNKDYFIRLRKDVSVKLNADLQRSQLFAAMQQQFAGTAKSANHVKVSTENTEKRTNATICTIEKRTYEAQTKSANSAKVSTKKRTSRAKPSTKTFTNTKPGTEKSTNKDNSMEISTIKCGLPKFVKDYQDLKKLPVSEAEKIRIKRDKEQLPDPIATYNLIIDIAQFVSNVMFEVSLCIGTVLNDQPSLFTDDEKEPNLLLFFYVVKNICRNAKNRKQIDCSSYTTIRDYFDFLKYDCKYRNAVIQESVKGLKTNLITNITTHMYSRVKKYFVAILNPKIAKEGTAKQKRRRITMVAYDNVSTIMKRLFKDNSNVLNEVCMKAIDNFRAEFGLVPTFSFKANDVRMKWWTYIEFLLKLQKFMYNRGEKSFAVIPKHGFGTKHVLFTNTGFRELLVSLGCPARNMSKDQLQDYWKKCFNIDKFARGDMTFRCFSTNGIDVSIIFERPKRQNLEPAKVHEILLKKARKTLKNDKYSNYVGIDPGVICLFGLVSKNTKEFDINRNSKKAIPKKQRHYKNSLLKNEVYRKMTGEESRGNKLRRFVLSTLDYFNFFEESNYVSPKSDNYYSYVETQLQHFPNVQRLQSNKKVTRLKFDKYIRTRRSLIKIVNYFCEPNKPGTRTLVAYGDAEIGEYIRGHQRMPNKRFCKIVKRHEDADVIVVNEYKTTIICSICFSILEVSKSPHRFAKCHTCGTIWNRDINAANNMIRLALDEVEGKPRNPAFCPDFNTYDAKKVKPKDKVASPHINKNTHGPKKVKPKDKVASPHIDNTPENEALEIESDDSDYRNMDVSDDENPHYDLEHFESFMHDVQEYFGLEVDSGNEDEVENLVHKRKVDHDHSYARKEEPNYSCSRVQKPVGKYEILKSPTPQVVEYEILKSPTPRFVGKRKVDDHDLSYARKKKKIDPRAGRTVMKEPNYSCSRVQKPVGKYEILKSPTPQVVEYEILKSPTPQPSCSRHIPPLPGRRIGMEDRKSK

SEQ ID NO: 2269 - protein, 219 aa, Bombylius major
KNSLLKNEVYRKMIGEVSRENKRKKFVENEPVYKDYLRDTDKLSPKSQEYFDYIKVHLKYFAEIQRLESNAKVTRLQFDKYIRTRRALDKIAYYICKPNKPGTRTLVAYGNQKIEKHIRGYVRISNKGFLKALKRNKNADVFIVDEYGTTKTCSKCFHTLKVSASPHRFAECLNCKTMWNRDINAGNNIIHIVLAEVQNYNFHHVGNTHDVVYKIDQIY

SEQ ID NO: 2270 - protein, 454 aa, Bombylius major
TRQMELYVSFDVIRELYELEKSKITKMCCKLTECHIAPNTFQKMRVCYAAQIFSKSSAIMKESAKQLTTCFKTNVTTHMRNRIYRYFRTRYDELSNSEISDIMDVLQRKSDTIDIEVMEIISDFRRKFNLEDDLWFEPSEIKQNWWKYVGFLHRMQKYMYDIGGKSFMVSPIYDYGRKHIHYYNTGFDELLKRLGKYIDKSDVRKYWCECFNIKKFEAKAKKFKGISKNGVDVSILLQKPKKQFPENHEERKLEEVKENYKTGKYSKIIGVDPGLVNPIARVSIKPDQLDRRNYKNKNILNKNLRKGLGDLKRKRKFKRLTSRRHDFIRQFDERSQNQSPKSGNYLGFIKLRLEYFERIQGARSHPQVTRLKFDRYICRRKFVDSFANGICKPLIEGKKTLVAFGDGTISSFIRGYPKHQQKKLCWLLNEAQISMLSWSMSITPLNFAQSVIIG

SEQ ID NO: 2271 - protein, 262 aa, Bombylius major
VLLYERCRRFDNIRTSKEASFESVEINEILLKKAGKTLEDKKYSKTVGIDPGLKCLFDMISIDNSKPVINRNSKKALPRGQRHYKNSLLKNEVYRKMIGEDSRKNKRERFVENEPVYQEYLRDTEELSPKSQEYFKYINVHLKYFAEIQRLESNAKVNRLQFDKYIRTRRALDKIAYYICKPNKPGTRTLVGYGNQKIEKHIRGYRRISNKGFLKALKKNKNADVFMVDEYGTTKTCSKCFHTLKVSESPHRFAECLNFKTM

SEQ ID NO: 2272 - protein, 213 aa, Bombylius major
FKIFGFFSIGEAKANYETGKYSKIIGVDPGLVNPIARVSFKLDAPRNYKNKKMVNLNLQKGLGDRKRKTKWERLTSRKHDFIGQFNEMSQNQSPKSRNYLGYIQLRLEYFERIQGARLHTQVTRLKFDRYICICRRKFADNFANGICKPITEAKKKHLLHLAMEQLVVLFVGTPEHQQKKLCWLLNETQISILSCSMSMEPPKHAQSVIIGWK

SEQ ID NO: 2273 - protein, 388 aa, Nephrotoma flavescens
PTLRKYWELYFNIKRFETAIKKFDNSIYTDGVGVPIQLAVSSTEEKCNKSLKRLKSVLDMKKQKLTTTTSPPPPSANILLKYMKSIEKTKLNKIKSITNTPQPSNKIKSSTSTPNYTKIVGIDPGERLMLGGIEYFTDEKTNEITHHASIKIKSAKYRYDTGEMSRRARLKKYTRDPDIQREAAEPSTPIVSNNKNGRRRRKKRPPDPMNKAQLLMIEINKKYNIVLSHGPKNYKIYTAWRLQYINYLQDLYTQRRVAHLKMEKYIRVERTLHEYRRRLAPPTHHTFIAWGSSNLAADSIIKGYVRTPKRKLLNLLEESTNCTVLLENEFRTSKLCSCCHQNLAISKSPNRFAVCQNCKIVWNRDVNAAKNILQLALNGNTIPDPFKK

SEQ ID NO: 2274 - protein, 277 aa, Nephrotoma flavescens
KEKSSKRQKKQNHEDDVFGNIAKIKENINSYDTKIGLDPGLKLIVGKNGKPIKIKSSKFLQMTGVTRVLHKKFKLKKWTTNLKDVKSPISKNYEEYTKFQLSKFKATQNDFVQRKVAHLKLQKYICVEKTAYKLAKQTIGYHKNLKSLVVIGSSKITANSPMKGYIRTPQPKLLRALKTYSDVLEIGEFCTTKLCANCHNQHITSLPPHRYQFCPKCGITWNRDVNAGKNILYLGLRKINGLEKHEIFNKTTRTSTTSRTGTTPPTKKTSNVKVNIK

SEQ ID NO: 2275 - protein, 202 aa, Nephrotoma flavescens
TLLNTMKQKMTNHDILQMAETSLKNHIIPIGKPYTSKAFKTKNGPKNYKIYTAWRLQYINYLQDLYTQRRVAHLKMEKYIRVERTLHEYRRRLAPPTYHTFIAWGSSNLAANSIIQGYVRTPKRKLLSLLQQSKYCTVYLQNEFRTSKLCSCCHQSLAISKSPNRFAVCQNCKIVWNRDVNAAKNILQLALNGNTTPHSFKR

SEQ ID NO: 2276 - protein, 284 aa, Nephrotoma flavescens
ETKNKKFENSIMTDDVAISFLMGKNEKKKEIKSKKPNKQNHEDDVFGNIAKIKENINSYDTKIGLDPGLKLIVGGVKNNQPIKIKSSRFRHMTGVNTRKLKLKKWTTNSPNTMSPMSKNFEEYTKFELSIFNSTQNEFMQRKVARLKLQKYICVEKASYKLAKEIIGDDKNTKALVVIGSTKIASNSPILKALKTYSDVLEVGEFRTKLCSICYNELITSLSPHRYQFCQKCGITWNRDVNAGKNLLYLGLCQIHGVEIHENFKRTTILSTTKKKTANVKVNIQ

SEQ ID NO: 2277 - protein, 687 aa, Nephrotoma flavescens
LFVVLDVVKMPPKRKINNDGDNGDGSMISKKITNQKCFLNRLCKSESLRDTIDEQIIKMSMFYVEASVYCHYLLNKLLIEHHQNSRKKEFVLPGGKSFIADCFNSLKLKSRQSKKMDYGFIRDGWKLTKYSVLMHNSFNCMYQQYETMLKNNIWMHAYNRVRRFVIVATEKERDKYSMTRIYNGMRGLFNIKPDITDNSKQVKNSNEGAFIIKLILDKLEHPIDDEKYFYGIKHNPYKYLLFFHRLQRYNEENALRNFILFPQMHAGRKYMHVDTSDLRDLLLHAKIISSEEAKWTNFKLNTQKYWKMYFHIERFETAAKKFDNSIYTDGVGVSVQLAVSSTEEKCNKSLKRLKSVLDVKKQKLTTTTSPPPPPANILLKYMKSIEKTKLNKIKSITNTPQPSNKIKSSTSTPNYTKIVGIDPGERLMLGGIEYFIDEKTNEITHHASIKIKSATYHYDTGEMSRRARLKKYTRDPDIQREAAEPSTPIVSNNKNGRRRRKKRPPHPMNKAQLLMIEINKKYNIVLSHGPKNYKIYTAWRLQYINYLQHLYTQRRVAHLKMEKYIRVERTLHEYRRRLAPPTHHTFIAWGSSNLAANSIIQGYVRTPKRKLLNLLEESKNCTVYLQNEFRTSKLCSCCHQSLAISKSPNRFSVCQNCKIVWNRDVNAANNILQLALNGNTIPDPIKK

SEQ ID NO: 2278 - protein, 695 aa, Nephrotoma flavescens
FFVVLDVVKMPPKRKINNDGDNGDGSKISKKITNQKCFLNRLCKSESLRDIIDEQVIKMSMFYVEASVYCHYLLNKLLIEHHENSRKKEFVLPGGKSFIADCFNSLKLKLRQSKKMVERHTLDKDYGFIRDGWKLTKYSVLLHNSFNCMYQQYETMLKNNIWMHAYNRVRRFVIVATEKERDKYSMTRIYNGMRALFNIKPDITDNSKQVKNSNEGAFIIKLILDKLEHPIDDEKYFYGIKHNPYKYLLFFHRLQRYNEENELKNFILFPQMKAGRKYIHIDTKDLHDLLLHANIINSEKAKWENFKQQTRKYWEMYFNIERFETATKKFDNSIYTDGVGVSVQLAVSSTEEKCDKSLKRLKSVLDVKKQKLTTTISPPPPPANILLKYMKSIEKTKLNKIKSTINTPQPSNKIKSSTSTPNYTKIVGIDPGERLMIGGIEYFIDEKTNEITHHASIKIKSATYHYDTGEMSRRARLKKYTRDPDIQREAAEPSTPIVSNNKNGRRRRKKRPPDPMNKAQLLMIEINKKYNIVLSHGPKNYKIYTAWRLQYINYLQHLYTQRRVAHLKMEKYIRIQKTLHEYRRRIAPPTHHTFIAWGSSNLAANSIIKGYVRTPKRKLLNLLEESKNCTVYLQNEFRTTKLCSCCHQSLAISKSPNRFSVCQNCKIVWNRDVNAAKNILQLALNRNTIPHSFKK

SEQ ID NO: 2279 - protein, 288 aa, Nephrotoma flavescens
LRRNHEEDVFGNLSKIREIFQNYNVKIGLNPGVKLIVGGVKNDKPIKIKSNKFRNCKLRKWTKNLADTNSPMSKNYLEYTKFQLSKFISTQNDFFKRKVARLILQKYICMEKAAYKLTKEIIGNDKNAKALVVIGSSKIAANSPMKGYIQTTRPKSLKALKQYSDVLEIGEFRTTKLCAVCYNEHITSLSPRRYQFCPKCGITWNRDVNAGKNILYLGLCQINETDKHENFKRTTKTITTTSRPGNPTTQSTKIGGTTNLTTTTTSTTSRTQTTPPNMKTSNVKVNIQ

SEQ ID NO: 2280 - protein, 567 aa, Nephrotoma flavescens
KMPKRKIGEEEEFETKFSNIKCGLKSKCNNELVFNKIQKDVEEISSLSVECSRYIHYSLMKKWENGIFEDIKFNDYYYHLFENKLSKYELEPNYRDIRNKFHLKLYDKCYKSNLIIDAANRYSTLFHNNFWMHGYRRIRNFLNRFDKNTYDTMHFLFNAISDRIPNPKLIEALREHLHWNGEKFYNLINKKTYFEHIKFFYKLQRYNEENNLKNFNLIPILKFGRHHVRYDSFALWQLLRSINLCTGPWKNFDQNLEWRKHFKILETKNKHFENSMMTDGVAISFLMGKNEKKEIKSKKTKKQNNEEYVFGNIGKIKENINLYDTKIGLDPGLKLIVAGVKNDKPIKIKSSRFRQMTGVNTRNFKLKKWTTNLPNTTISPMSKNFEQYTKYQLSIFNCTQNEFMQRKVARLKFQKYICVEKAAFKLAKEIIGDVKKQKTLVVIGSTKIAGNSPMRGYIRTPQPKILKALNTYSDVLEIGEFRTTKLCANCHNEHITSLSPHRYQFCQKCGITWNRDVNAGKNLLYLGLCKIHDIEKHENFKKNTILNTTKKKTANVKVNIQWTKYTI

SEQ ID NO: 2281 - protein, 224 aa, Nephrotoma flavescens
TTFIKVYNDTTVPFDDSEPLNNPRRTGRRKRRPPAPKNQAQVLMIAINQKYNIVLSHGPKNFTIYTAWRLQFLQYLQEIYVQRKVARLRMEKYMRVDKTLHMYKRRIAPPDAGNILIAWGSGKIAANSCMRGYVRTPKNKLLEILRTSKNCKIIMQDEFRTTKLCSSCYEPLTLSRSPHRFALCRKCHIVWNRDVNAGKNILQLALHKTGTIPHANFNKAQKIL

SEQ ID NO: 2282 - protein, 622 aa, Nephrotoma flavescens
RAITISGIKKKDIKNQKCFFKHFCKCEVLSELIERQVKSMSQFYIEASVYCHYKLNKLLHVVRAAATKENELIGFKMPEKFIANSFNELKIKLHASTKTKYKIDVDYAIMRQEFNLKEYPVICYNSVNYMYQQYETSLKNNIWIHGYNRIRRFVYASTKSERSEFTKEKIKRGLRALFPNVDDNITQVNNDGDFILELIKAKLNYNSIAEQNYFNKIKQQPYKYLPFFHRLQLYNEENNLKNFVLIPQMRPGRKYMHIDSQSLCKLLANLKLLKPGESTWANYKLVASQYWDKYFNIKRFETANKKFDNSIYTDGIGVSVQLVIERTDDITPKRLKSVKDSDQHKYSKWIGVDPGERLMLGGIEYHFDATNGNITHHTLVKMKSGTFRHDTGEISRRRRLLKYTRDDTTVPFDDSEPLNNPRRTGRRKRRPPAPKNQAQVLMIAINQKYNIVLSHGPKNFTIYTAWRLQFLQYLQEIYVQRKVARLRMEKYMRVEKTLHMYKRRIAPPDAGNILIAWGSGKIAANSCMRGYVRTPKNKLLELLRTSKNCKIIMQDEFRTTKLCSCCYEPLTLSKSPHRFALCRKCHIVWNRDVNAGKNILQLALHKPGTIPHANFNKAQKIL

SEQ ID NO: 2283 - protein, 547 aa, Nephrotoma flavescens
SVVREMSKRKVDGEIAEINKKIVTVKCGLKTKCLNDEIFKKIQNDVNEMSSLFVEASRYIHFSLNKQWENGDFKEIKFLDYYYHLLDGSKAKYELDDEYRNLRNRFGLKLYDKSYKSNLFVTEANKYDTIFHNNLWMHAYSRIRRFFKPFKKKSYDTLDYLFGNGTSPDPELIADLEEKLEWDGTKFYEIRFKSKYTKYLKIFYRLQCYNDTNGLKNFSLVPILKFGLHHVRYDSLALFQLLCSQKLFKGAWKTFNRDVEWRKYFTFPETSTKKFDYSIMTNGVSISFSMAKNEIMRIKNKRRKLYDDEDKVQGDLLKIRQNIDNYDTMIGLDPGRRLMFGGIRNDEPLKIKSSLFRHMTGFHQRLRLLKKWTPSTTTEQFSPMSSNFREYTIHQLSIFEARQKETGQRKVARLKLKKYICIERASHELAKKIIDSSKKALVVIGSTKTSANSPIKGYVRTPQPKVLAALKKRADVLEVGEFRTTKLCAGCHEEHYTSKSPHRYQFCKKCGITWNRDVNAGKNILYLGLCLIDNRKKHANFYKQIPK

SEQ ID NO: 2284 - protein, 547 aa, Nephrotoma flavescens
SVVREMSKRKVDGEIAEINKNIVNVKCGLRTRCLNDEIFQKIQNDVNEMSSLFVEASRYIHFSLNRQWENGDFKEIKFLDYYYHLLDGSKAKYELDDEYRNLRNRFGLKLYDKSYKSNLFVTEANKYDTIFHNNLWMHAYSRIRRFFKPFKKKSYDTLDYLFGNGTSPDPELIAALEEKLEWDGTKFHEIRFKSKYNKYLKIFYRLQRYNDANGLKNFSLVPILKFGLHHVRYDSLALCQLLWSQKLFKGAWKTFNRDVEWRKYFTFPETSTKKFDYSIMTNGVSISFSMVKNEIMHKKNKRRKLYDDEDKVQGDLLKIRQNIDNYDTMIGLDPGQRLMFGGIRNDEPLKIKSSLFRHMTGFHQRLRLLKKWTPSTTNEQFSPMSSNFREYTIHQLSIFKARQKETGQRKVARLKLKKYICIERASHELVKKIIGSSKKALVVIGSTKTASNSPIKGYVRTPQPKVLAALKKRADVLEVGEFRTTKLCAGCHEEHYTSKSPHRYQFCKKCGITWNRDVNAGKNILYLGLCLIDNRKKHANFYKQIPK

SEQ ID NO: 2285 - protein, 547 aa, Nephrotoma flavescens
SVVREMSKRKVDIEIAEINKKIVNVKCGLRKRCLNDEIFQKIQNDVNEMSSLFVEASRYIHFSLNKQWENGDFKEIKFLDYYYHLLDGSKAKYELDDEYRNLRNRFGLKLYDKSYKTNLFVAEANKYETIFHNNLWMHAYNRIRRFFKPFKKKSYDTLDYLFGSGKKPDPELIAALEEKLEWDGTKFHEIRFKSKYTKYLKIFYRLQRYNDANGLKNFSLVPILKFGLHHVRYDSFALFQLLCSQKLFKGAWKTFNRDVEWRKYFTFPETSTKKFDYSIMTDGVSISFSMAKNEIMHKKNKRRKLYDDEDKVEGDLLKIRQNIDNYDTMIGLDPGQRLMFGGIRNDEPLKIKSSLFRHMTGFHQRLKLLKKWTPSTTTEQFSPMSSNFREYTIHQLSIFKARQKETGQRKVARLKLKKYICIERASHELANKIIDSSKKALVVIGSTKTPANSPIKGYVRTPQPKVLAALKKRADVLEVGEFRTTKLCAGCHGEHYTSKSPHRYQFCKKCGITWNRDVNAGKNILYLGLCLIDNRKKHVNFCKQIPK

SEQ ID NO: 2286 - protein, 547 aa, Nephrotoma flavescens
SVVREMSKRKVDGEIAEINKKIVNVKCGLKTRCLNDEIFKKIQNDVNEMSSLFVEASRYIHFSLNRQWENGDFQEIKFLDYYYHLLDGSRAKYELDDEYRNLRNRFGLKLYDKSYKSNLFVAEANKYETIFHNNLWMHAYSRIRRFFKPFKKKSYDTLDYLFGNGKKPDPELIAALEEKLEWDGTKFHEIRFKSKYTKYLKIFYRLQLYNDANRLKNFSLVPILKFGLHHVRYDSFALFQLLSSKKLFKGTWKTFNRDVEWRKYFTFPETSTKKFDYSIMTDGVSISFSMAKNEIMHKKNKRRKLYDDEDKVQGDLLKIRQNIDNYDTMIGLDPGQRLMFGGIRNDEPLKIKSSLFRHMTGFHQRLKLLKKWTPSTTTEQFSPMSSNFREYTVHQLSIFKARQKETGQRKVARLKLKKYICIERASHELAKKIIGSSKKTLVVIGSTKTPANSPIKGYVRTPQPKVLAALKKRVDVLEVGEFRTTKLCAGCHEEHYTSKSPHRYQFCKKCGITWNRDVNAGKNILYLGLCLIDNRKKNVNFYKQIPK

SEQ ID NO: 2287 - protein, 376 aa, Aplysia californica
SIKVKTFKFKLYNHKRCKKLHQSINAASSIWNHCIALHKRYYRLYGQHLSCSNLQKHIAKKRKTSAYWQLVGSQSMQDICQRIERAYQLFFKYHSRGTKPPGFKKRIKYKSFTLKQSSYKLLGKGRIKIGQQIYRYWNSREIQGNVKTITVKRNPLGEIFIFVVTDHVDEHQQPMTGKSAGFDFGLKTFLTISGGSEIKSPLFLKQGINQIALAHRHLSKKQKGSKGRERARKHLARAYEAIKNRRTDWFWKLAHQLTDQYDHLFFETLNLKGMQRLWGRKVSDLAFREFLQILAFVACKKGKTVGYVDQWYPSSKTCNHCKHVLESLPLDVRRWRCPSCQTVNDRDGNAANNIKEAGSLSLGVGDVRPSLTAIAA

SEQ ID NO: 2288 - protein, 373 aa, Aplysia californica
HCEMQKAFRYRFYPTLEQENLLRRTLGCVRLVYNKMLHERTTAFYDRQEKISYNQSSSLLTEWKQQDELSFLSEVSSVPLQQGLRHLQQAFKGFWNQRTAYPTFKKKRNGGSAEFTRSAFKWDGQSLTLAKCTDPLPIRWSRQIPQDCEPSSVTVRLDPAGRWFVSILVDDPTIKPLSPTDGQTGIDLGITSLVTLSTGEKVANPKHFDKLYQRLRKAQKALSRKVKGSNNRYKARLRVARLQARIKDARQDYLHKLTTRLIRDNQVIAIEDLNVCGMVRNHKLARAISDCGWSEMVRQLAYKAQWYGRQLIKVDRWFPSSKRCGTCGHVISKLPLSRREWDCPECGTHHDRDINAANNILAQGLGLMSVERV

SEQ ID NO: 2289 - protein, 454 aa, Chlamydomonas reinhardtii
LHAFKHVNKCSWWYLMMWTPRLPRLEAASGMWAPGTSATLFDSSPSRGRGGSRARGRGGRRAHSSPSRGRGGSRARGHGGRRAHSSGGSGNEDGDQRGPRGGPGRAPGDNPVPGVVAAGDPLADFELETLGPMRIVGVDPSVGNYLVACVGSMPGFSPHSYSGRPRAAHVWRGPDGQAPGPAQSPLQRRRKRRRRRQQRRQQRRQQRQQRRRRRGQKRRWRRQGGGRWKGKRRGWRGTRQHTHQRAATERRRQQRACFTRLSGAGYRHCTGQTGRRLWQQARQEEQPALKCCQAGIPSARVASAADHELRIRYLYSGGGVDAAAAAGSAPAPAQQYGLWHLLRFYRQWGQRRWRLTVHVRTQKVGVEQMHPHQLHCADAAPMPRVQVLEHSAQQLAGGRPKEEVIVGWGNATTGHGGCISRLGRGPNRALLRLLVDKYAHLVVHVDEFYTSQAR

SEQ ID NO: 2290 - protein, 495 aa, Chlamydomonas reinhardtii
LAGGRAKEEVIVGWGNANTGYGGCVSRSGRGPNRALLRLLVDKYAHLVVYMDEYACPHQGSAGAFIGDKHSAAYEVCECVRKVCAKCGQRLLGNGQRCLQVVIPDGVSARDAQVCQHCRTVWVSLAQVESGAAGRVRYQTGSGALRFHVALQGRDANSATNMRHALMETLRGGGGGGGGGGGGGGGGGGGGGGGGGGGGGGGGGGGGGGGGGGGGGGGGGGGGGCGGGGGGGGGGGGGGCGGGGGCGGGGGGCGGGGGGCGGGGGGGGGGGGGGGGGGGGGGGGGGGGGGGGGGGGGGGGGGGGGGGGGGGGGGGGGGCGGGGGGGGGGGGGGGGGGGGGGGGGGGGGGGGGGGGGGGGGGGGGGGGGGGGGGGGGGGGGGGGGGGGGGGGGGGGGGGGGGGGGGGGGGGGGCCGPAPRWRRRRRRWWWWRAWPAGPTSSSSSSSSGAGPGGGAGHGPCSCGMHVRRRRARPRGGGARGAAQEAALARRLRPAGI

SEQ ID NO: 2291 - protein, 221 aa, Cyanidioschyzon merolae
NRGVKEHLEALSEVTSRGADFEAFLEFMKVCTAHWEALWQQYTKTRWARLHMRLHRGKQRAFDKFFNELRALKEDKRKMLVLAYGSGRWASTKGCIPAPSTRAYKDCAHLFVSILINAFGTSSIHHELGCTLQRVEMEKCQRSPGDIQKYGAVTEGQEMESRAQVRGLPALVSTSGDEKRLECVNRDFSASINIKSYAVLEKRLLELTRDNFVGQPLKVET

SEQ ID NO: 2292 - protein, 199 aa, Cyanidioschyzon merolae
ALWEAYTKPRWARLRMNVYCGKQRAFANFFNELSAFTDDESHRLVVAYGAGRWASRTGTTPVPSTRTYKECARHFAAMPVHVFRTSYTHHDLECTLLKVEVEKCQRSPEDIKLYGPLKEEQMESRAKLRELLALVCTTNDGKKRIKFLYRDFKAAINMRTCAVLENRAPEWTGGNLWGNISKWNYMRNNWNHSYVTGRG

SEQ ID NO: 2293 - protein, 295 aa, Cyanidioschyzon merolae
TDGVALCIHYRRLKKDRPVPPAAAPVTRDEEKEAARPATQEVEENDLVVGVTKDEDEKEADLATQEVEETDLVVGVTKDEDEKEADLATQKVQDNGFVVGADPGNTNIITIAAPKRARDGADGNLLQKDMRFLRFSRARYYREPGMMNARKKIGTWNVRMKDHLEALSEVTSRGADFGAFRKFMEIRVAQWDALWEEYTKPRCARLRLSLYCRKQRAFANFFNQLSALKEDDGQRLVIAYAAGRWASKRGTTPAPTTRVYKECARRFDTIRIDEFRTSYTHHELDCALQRVEMEK

SEQ ID NO: 2294 - protein, 200 aa, Cyanidioschyzon merolae
KASRAERSQSNRTLRCKAWCAGKGCRWRGPGNSNIVTVAVPKRVADGTNGTLHQTDMCLLRFSRARYDRESGMINARKKIETWNAGMKDHLQALSEVRSRGADFTDFREFMEVRVAHWDALWEDYTKPRWARLRMNLYCGKQRAFANFFNQVGALKEIESQRLVVAYGATRWKTQKRDYASSNDKNVQGVCTAFRCDTCR

SEQ ID NO: 2295 - protein, 342 aa, Cyanidioschyzon merolae
SFSEMHGCSCCSLGGAVGRVYKAPVGSFAYESVLWSAAGVREFFNELSALRELESQRLVVAYGVGRWKTHKGTPPAPTTRTYKENARRFVTIRIDEFRTSDTHHELECTLQRVEMEKRQGSPEDIAKYGPLPEVQMERRTKVRGLLAFVSTTNDGKKRMRFVNRDFNAAVNIRRCAAIEKRPPQQTRENFVGQPLKVQLYEKKLKPVVGGLPSKAGMRLPVSWRLLVRGAFAATTVHHWRQRFSFQRRLLLAVSMASALAAGVNPVDLARREMSFYADLFQKMTDSCFRKCVTRYHDGELQTGEGVCVDRCVFKYMGAVQRIGELLQEGQPMPAAGGAPSVQ

SEQ ID NO: 2296 - protein, 226 aa, Cyanidioschyzon merolae
RSRCCRESGITNARKKIETWNVGMKDHLEGISEATSRGAYFKSFRKFMEVRVAYLDALCKEYTKPRWARLRMNLYWGKWRAFANFFNELCALKEDVRQGLVVAHGAWRWKTRKGCASASTTRTYKACARHFVTIPMDEFRTSYTHHELECTPQRVEMEKCLRSLDDTKKYRPLTEEQTERRAKVRGLLALVCTTNDGEKHMAFVNRDYNAAINTTRYAVMETSPPE

SEQ ID NO: 2297 - protein, 208 aa, Cyanidioschyzon merolae
ERRCRWRGPQKHEYYSHRSTQARGRGIEGNLSQKDMRLLKLSRARYYRESGMMNARKKIEMWNEGMKDHLEAMSEVTSRGADFQTFLKFMEVRAAHWEALWKEYTNRRWAPLRVNLYCGKRRALANFFNQLSALKEHKSQRLVVAYGARRWASKKRCAPSPTTRAYKECAYRFVTIPIDEFRTTNTHHQLGCKRQRLEMKSASRPLRI

SEQ ID NO: 2298 - protein, 227 aa, Cyanidioschyzon merolae
MNLYCGKRRAFANFFNELSALKEDQSQGVVVAYGEGRWAPKKGTMPAPTTRVYKECARRFVTIPVDEFPTSYTHHELGCTLQRVEMEKCQRSPEEFAKYGPVTEEQMERRAKVRGLLALVSTTNDGKKRMEFVNCNFNAAISISGCAVLEERPRKSTRVNFVGQSLKVELYETRLEAVVGGRSNKTGRRLHVSRRLFVQGGLLATTVHRRRQRFSFERRLLLPVTAA

SEQ ID NO: 2299 - protein, 229 aa, Cyanidioschyzon merolae
RAAEPTLKLFGSPWKVRVAHWDTLWEEYTKRRWARLRKNLYCGKQRAFANFFNALSALKENESQRLVVAYGAERWASKKGTTPAPSTRTYKECARRFATIPVDEFRTSYTHHELGCTHHRVEMETCQRSPEDIKKYGALMEGQMERRAKFSGLLALVSTLNDGKKRMEFVNRDFHAVINVRCAVMEKRPRYWTRENFVGQPLKVELYKKKLEAVMGGRSKKTGRRQHIS

SEQ ID NO: 2300 - protein, 228 aa, Cyanidioschyzon merolae
EEYTKPRWARLRVNLYCGKQRAFANFLNELSALKKDESQRLVVSYGAGRWASKKGTTRAPTTRPYRECARRFVTIPIDELRTSYTHHELGRTPQKVEMEKCQQSPEDIKKYGPLTEEQMERKTKVRGLLALVSTTNNGKERMGFVNRDFNAAINIRRCPVMEKKRPPESTRERILLDNHPKWNYMRKSWNKSYVAGPKKLGGVCTSVPNVLTRARLPPLLYTAGDVRL

SEQ ID NO: 2301 - protein, 265 aa, Cyanidioschyzon merolae
YAKDGINANLRQMDMRMLRFSTARFNRESGMIGALRQTEAWNSRLKEHLEAVSKVTSCGADFRTYLEFMETHAAHDGDLWKEYIKPRWVRLPMDLYGGEQRAFANFFNEFCALKEGKSQRLVIAYGAGSSLPENGSTPAPSTQAFIECAKRFVTVVIVEFRTTCVHHELGCTLQKVRMGTQPPSSSGKENHGERTERPMPQRALVRGRLLLDTTVSAMKRREFVNRDFNAAMNIRRCALLKTRPPELTRANFEGSFPGSTCAGGN

SEQ ID NO: 2302 - protein, 251 aa, Cyanidioschyzon merolae
LIPLERQVPLALCHRRKGIRQQLETSHGIWYQRPPCLAFGSERRIGLDLSHHSSRFQCSVRRLLARSEPKRIGISRVLLMPRIGFRYLCHRGQHRVSPNCHRMEQRVLARTADSIRTEGISQKKSMIVGQGAGRGNIGLHIGEPCIPIKTVYREVKQALTRHMLALGGVMDISEHPTTPMYHRCEACTQAVYQQDAKSERGVDLFFRLCLEILENDRKLRNRDLNAAINLLRLLVTELDGHERAVPLKPRA

SEQ ID NO: 2303 - protein, 258 aa, Cyanidioschyzon merolae
QLYGWRGRWEYEYHNHRSIEAWVRWHRRQLKPERQASFEVLEIEIQSRIETWNGGMKDHLEALSEVSSQRADFEAFRKFMEVRVAHWDALWEEYTKPRWSRLRMNLYGGRQRAFADIFNQLSAFKKDENQSLVVAYGAGLWKTQKGTTRAPTTRTYNECARRFITIPVYEFRTSYTLHELGSILQRVEMEKCQRSPEEIAKYGPQTEKQMQRMAKVRGLLALVSTTSNDKKRMEFVNRDFNAAINIRRCAVLGNRPPE

SEQ ID NO: 2304 - protein, 200 aa, Cyanidioschyzon merolae
SLQIGCVFQQRHRQACVWNQFWGRECAHQAGRVHPPHLDPCRGMRMNLDCGRQRAFVNFFNQLSALKEDQSQRLVVAYGAGRWKTQKGTRPAPTTRMYEACTRRFVTIPIDEFRISYTHHELGCTLQRVEMETCQRSPEDIKKHGPLTEEQMERRAKVRALLALVSTTNDSKKRMEFVNRDFNPAINIRKCVVLETRPPE

SEQ ID NO: 2305 - protein, 202 aa, Cyanidioschyzon merolae
KEYTKPRWAGLRMSLYCGKRRAFANFFNELSALKEDESQRLVVAHGAGRWKTQKGTTPAPTTRTFKECARRFVTIPIDEFRTSYTNHELGCTLQRVEMEKRRRSPDDIRKYGALTEEQMERRAKVRGLGALVSTTTNGKKRMEFVNRDFDAAIYIRRYAVMERRPPELRRENFVGQPLNVELYEKKLKPVVGGQSKKMLGDV

SEQ ID NO: 2306 - protein, 315 aa, Cyanidioschyzon merolae
KVHDNDFVVGADPGNTNIITIAAPKCAEDGTDGSLRRKDMRLLRFSIARYNRESGIMNAREKIESRNSGMKDDLEALSEVASRGADFEAFRKFMKVHVAHWDAPWEEYTKPRWARFRMNLYCGKQRAFANFFNQLSALKEDESQRLVAAYGAGRWKTQKLCTPAPTTRTYKECAHRFVTLPVGEFRTSYTYHELGCILQRVEMETCQRSPEDMKKYGPLTEEQMERRVKVRGLGALGSTTTNGKKRMEFVNRDLNAAINTRKCAVLEKRPPEWTRENFLGQPLKVGQYEKKLEAVVGFRFKQTGRRLHARWRRLV

SEQ ID NO: 2307 - protein, 321 aa, Cyanidioschyzon merolae
CTHMATPSGSIIPVKNFCLITLRGLKSNIFFQYVFRFLPVNLRQKDVHLLRFSRAIYYRESDIVNARKKIETWNAGMKDRLETLSEVTSRGADFKALREFIEFRVAHWDALWDEYTKSRWARLRMNLYCGKRRAFANSFNQLSALKEDDRQGLVVAYGAGHWKTQKGCTPAPTTRAYKECARRFVTIPIDEFRTSYTHHELGCTLQRVAMEKCQRSPEEIAKYGQLAEEQMERRAKVRGLLPLVSTINGTKRMEFVNRDLNAAINVRRCAVLEKRPPESTTMNFIGQPLKVDLYEKKLEAVVGGRSKKTGRRLHVSWRLFV

SEQ ID NO: 2308 - protein, 209 aa, Cyanidioschyzon merolae
VAVDAIIPTTACCDGHDIRVPRARANDKVVLMHFLRRRTRLLLIFMLRHVQYRRRKWIMKEDERQRLVVAYGAGRWKTQKECVPAPSTRTYRECAQRFVTIPIDGFRTSYTHHELGCVLKRVGMEKCQRSPEDIEKYGPLTEEQMETRAKVRGLLALVSTTSDGKKRMEFVNRDFNAAINIRRCAVLESRPPALTRENFVGATSQSGTI

SEQ ID NO: 2309 - protein, 242 aa, Cyanidioschyzon merolae
RTRYYREFGVMNAKKKSGTWSAGVKKHLEAISQVTSREADFKAFRKFMEVRVAHWDALWEGHTKPRWARLRMNLYCGKQRAFANFFNQLSAVKEDERQRLVVAYGAGRWKTQKECVPAPSTRTYRECAQRFVTIPIDGFRTSYTHHELGCVLKRVGMEKCQRSPEDIEKYGPLTEEQMETRAKVRGLLALVSTTSDGKKRMEFVNRDFNAAINIRRCAVLESRPPALTRENFVGATSQSGTI

SEQ ID NO: 2310 - protein, 465 aa, Cyanidioschyzon merolae
KKDKERCYRLILLYFVFLDRELERKAEMRLKRENLEWEKRKAVLKGKRFNVVPLCNIKSHFVSIDPSVLYGIMEEISPEFKVSTEDFTGENRVTYWRSIFDFKPVKVSEQKVFTGLIKTDGVALCVHYRRLKKDRPVPHSAAPVTKDAENKEADAATQKLQDNDFMVDAAKDDDEKEAVPETEEMEDEDFVVRAVKDEEKKKAGPAMQEVQDNDLVIGAVKDEEKKEAGPAMQEVQDNDLVIGAVKDEEKKEAGPAMQEVQDHDLVIGAVKDEEKKEAGLEMQKVQDNDLVVGVDPGNTNIITIAAPKRAEDGTDGNLRQKDMRLLRFSRAKYYLESGTMNARKKIETWNAGRKDHLEALSEVTSRGADFQAFRKFMDDRVAHWDALREEYTKPRWARLRMNRYGGKQRAFSNLFNHLSALKEDKTRRLVVAYGAGRWKIQKGTTPAPTTRTYKECVHSVLLQYL

SEQ ID NO: 2311 - protein, 250 aa, Cyanidioschyzon merolae
SFSEIHGSSCCPLGCAVGGVYQAPVGSFPNEFVLWEPAGVREFFNELSVLKEDESQRLVVAYGAGRWMTQKGTTPAPTTRVYKACARRFVTIPVDEFRTSYTHQELGCTLQRVEIEKCQRSPEEIAKHGPMTGEQMERRANVRGLLALVRTINGNKKRMEYVNRDFNAAIHIRKCAVLEERPPDWTRENFIGQPLKVELYEKKLEAVVDARSEKTGRRLHVSWTRSVQGVRFATAVHGRRRSSHVLGSFR

SEQ ID NO: 2312 - protein, 206 aa, Cyanidioschyzon merolae
NAGMNNHLEALSEVTSRGAYYEAFRKFMEVRVAHWDALWEEYTKPRWALLRMNLYGERQRAFANLFNQLSALKEDQSQRLVVAYGARRWKTKKGYTPAPTTRTYKDSARRFVTIPLDEFRTLHTHHELGCTFQRVEIEKCQRSPEDIKKYGPLTEEQMERISKVRGLLALVSKTSDGKKRMEYVNRDFNAAINIRECAVLENRPPK

SEQ ID NO: 2313 - protein, 209 aa, Cyanidioschyzon merolae
EEYTKPRWARLRMNLYSGRQRAFANFSNELSALKDDEGQRLVVAYGAGHWKTQKGTTAAPTTRTYKECAQRLVTVSIVEFRTSYTHHELGCILQKVEMEKCQRSPEDMKKYGPLTEEQMERRAKFRGLLALVSTTTNGTKRTDFVNRDFNAAVNKRRCAVLESRPSELTRENFVGQSRKYELYEKKLEAVVGGRSKKTGRRLHLGKRLV

SEQ ID NO: 2314 - protein, 321 aa, Cyanidioschyzon merolae
KGWHPFILRYFVSLSRELERKAEMKLIEGKNEEWERRKAFLMGKRFNVVPMCNIKSHFVTIESRILYGIISEISPEFGVSKEGFSGENREKYWKNIFDFKRLKVSKQKVFAGMIETDGVALSVHNRRLKTDRPAPPATKNEDEKQAGPATQKVQDNDLVVGADPGNTNIVTIAALKCGEDGIDGNLRQKDLRLLRFSRARYYRESGIMNVRKKIVTWNSGMKDHLEALSEVTSRGAGLQAFRKFMNVRVPHWDALWEEYTNPSWALLRMNLYCGKRRAFANFFNQLSALKEDQSRRLVVAYRAGRWKIQKGTTPAPKTRTY

SEQ ID NO: 2315 - protein, 200 aa, Cyanidioschyzon merolae
SLQIGCVFQQRHRQACVWNQFWGRECAHQAGRVHPPHLDPCRGMRKNLDCGRQRAFVNFFNQLSALKEDQSQRLVVAYGAGRWKTHKGTRPAPTTRMYEACTRRFVTIPIDEFRISYTHHELGCTLQRVEMETCQRSPEDIKKHGPLTEEQMERRAKVRGQLALVSTTYDSKKRMEFVNRDFNPAINIRKCAVLETRPPE

SEQ ID NO: 2316 - protein, 236 aa, Cyanidioschyzon merolae
QQLASERHASFEVLESDILSRIGYNECKEENWDVECRNEGSPGSFERGDEPRSGLYSFSEIRGRSCCPLRCAVGGVYQARWARLRLNLYSGRQRAFANFFNQLSALKEDENQRLVVAYGAGRWKTQKGTTPAPTTRTYKECARRFVTIPVDEFRTSYTHQELGCTLQRVEMEKCQRSPEEIAKYAPLTEERMERRAKVRGLLALVSTTPNGMKRMEFVNRDLNAAISIRKCAVLEN

SEQ ID NO: 2317 - protein, 326 aa, Cyanidioschyzon merolae
PSAKHEEKKEADLARQKVQKNDFVVDADPGNTNIITIAVPKRAEDDIHGSLRRKNMRLLRFSTARYYRESGMMNARKKIETWNAGVKDHLEAMRKVTSCGADFRAFREFMETRAAHNEKLSNEYARPRWARLRMNLLCGKQRAFAKFLNQLSPLKENKIQRLVKAYRARREASGEGSTPAPSTRTYKECAHRFVTIPIDEFRASYVHHDLGCTIQRVEMERCQRIREDIKNFGALTEQQMERRAQVRGFLAVVSSISGKKRMEFVHQNINAAFNIRRCAVMEKRSPHLARANFMGQPLRVKVYEEKLKPVTGGRSKKPGRRLHVSV

SEQ ID NO: 2318 - protein, 239 aa, Cyanidioschyzon merolae
RTDPATQKVQDHDLVVGAAEHEDEKEAGLEKQKVQDDDFVVGADPRNTNIITIAVPKRAEDGIDGNLCQKDIRLLRFSRARYYRESGTMNARKKIDTWNGGMKGHLGALSEVTSRGADFRAFRKFMEVRVAHWEVLWKEYTKPRSARLRMNLYSGKQRAFANFFNQLSALKEDESQRLVVAYGTAHWAPKKGTKPAPTTRTYEECARRFVTIPIDEFRTLYTHHELGCILQRVEMEKSQ

SEQ ID NO: 2319 - protein, 228 aa, Cyanidioschyzon merolae
CRRCRITPLWLAGRRMKKRRRRVLRPKKCMITTLSLARTRGIRISSPLQHRSVPKMGLTATYVKKDMRLLRISRARYYRESGIMNAWKKISAWDAGMKDHLEATSEVTSREADFKAFRKFMEVRVAHWDALWEEYTMPRWARLRMNLYCGKQRAFANFFNELSALKEDENQRLVVAYRAGRWKTQKGCTPAPTTRVYKECARRFVTNPVDEFRTSYTHHELRCTLQRV

SEQ ID NO: 2320 - protein, 220 aa, Cyanidioschyzon merolae
NSGVKDHLEAMSEVTSRGADFKAFREFMKIRVSHWGTLWKEYSKPWWARLRMSLYCGKHRAFANFFNQLSALKEDESQKLVVAYGAGRWASKKRTTPAPTTRTYEECTRGFVTIPVDEFRMSYTHHELGCTLQSVDMEKCQRSPEDIQKYAALTEEQMEREAKVRGLLALVSTATNGKKRMVFVNRNFNAVISIRRCAVMETRPPKLREFYGATSQGGTI

SEQ ID NO: 2321 - protein, 295 aa, Volvox carteri
AAGRQPSQGPWTRTERPPASTSSAPGTICPGVQRVAKPTLLPCCQPCCLAAALLPRQTQWTRRCSDGGWCSCWRRTQVRRWWVWTRAAPTSSTPSRGWLSNPSRRGWVSSPPSYKLTRKQYYVESVESGVVKANTQSTAWQSYPAMRQALAVLAATSSKCVDVEGFRHHVAVVLDNSEMLWREHLKPRWVQPLLHLYGGEKRVFAQFFKRLQDGDPNKKVIVAYSAAKFAPVGAGELAVPTLRVFKECCQRFVTFPVDELWMTAVWNGDKATVLQAGPTLSGLGVAKNHCSWPPR

SEQ ID NO: 2322 - protein, 276 aa, Phytophthora sojae
YARGTGFESCLYFACAHFLRFCLPCEERIVYTHGYWYAQMPHVVAPLPVEDKGRCTAGDPGLKGFLTRMDLQGNIAHLGRANWERLLKLKVRQQAAQRRMSRFVANKKYRKRHHLGRHTGREWKQFVAARREFYTVTAKLDNYVKDLHYKAASHLCHNTDVILLPKFSTSSMLRPSAPWTHAFNDQMNTLAHYQFRRRLLAKCEVAGKAMVLCSETSSRICGRCCRLYLTLRNEDVFRCPHCGFLAGRDENAAYNILRFVCAGSLSVYAVNGVVQL

SEQ ID NO: 2323 - protein, 304 aa, Phytophthora sojae
GSHAPEAVEEDALEAAMKKLPPGYAPDVMIGIDPGVRTLCTAACEGSLPTRQSRRRRNRQGKRKHKNRRAKHKRMNRHGQRIVAINTREYYHMSKIGKHRFWNNGLREKEASYAKILDGMPTFKTARYQVYLDRLRYFLKHAEYLVLFSAQHSFRKWRFLLYRMKMKAIDTLAKRLVPTPSPHVCVAFGDWSCQDGLRGNPRAPVKAFRKALERRATVLPMDEFRTSKLCSCCHQSLRRARLQTKVKDKENKIVLKGNRNVLYCKNSRCRAHFWNRDVNAAINIFFRDNAAMGAQSNHFRIRVS

SEQ ID NO: 2324 - protein, 246 aa, Phytophthora sojae
PSNSAVATPTESTREAKAQEPTLAADRRHQHPRVLNMYKVGKHRFWNNGLREKEASYAKILDGMPTFKTARYQVYLDRLRYFLKHAEYLVLFSARHSFRKWRFLLYRMKMEAIDALTKQLVPIPSPQVCVAFRDRSYQDGLRGIPRAPVKAFRKALEQRATVLLMDEFRTSKLCSCCHQSLRRARQLINVKDKDTKEDKIVLKGKRNVLCCKKSLCRNRDVNAAINILEHLKCRLLDLGRLATFQP

SEQ ID NO: 2325 - protein, 206 aa, Phytophthora sojae
VPRALVPKSLKRRMGYGEFIDNMPSLKTTSSSRLLEGYKYMWRHMDDILLFSASVGFRKWRFTLSRFKRQAVCKLAKRIVPTIDRDVCVCLGNWNQHKGVSGYMNAPIKRLTAELSRRATLISVDEFRTSRLCLDCFTPMVGMPFADPESDEAKPSRNVRVCKNILCGARCWERDVNAAKNMWQLGLQQVSGRRRPWQFLRGRRLN

SEQ ID NO: 2326 - protein, 512 aa, Phytophthora sojae
YRVKEVPHLDVDGVDTGNVVYVWDEPRSTAERELHDWLGFVPWEWRIRQNPTHFFVKLYDMLQWMEAFVEKHPKTKGARLYSLPPYSSSFIPAHVTLNITSLHQVFCRLFTDPERQAEVKTYVKDELGVECGSTEQVRRQFSENKDAVFRKMFRLNGLETSTREFAYQITTDGYAASVLLRRQTLCREDDDNADQPRKRQKNNKGEVVKAPEAVEEDALEAAMKKLPPGYAPDVMIGIDPGVRTVCTAACEGSLPTRQSRRRRNRQGKRKHKIRRAKHKRKNRHRQRTVAINTREYYHMSKAGKHRFWNNGLREKEASYAKILDGMPTFKTARYQVYLDELRYFVKHAKYLVLFSARHFFRKWRFLLYCMKMKAIDTLAKRLVPTPSPQVCVAFGGWSCQDGLRGNPRDPVKAFRKALERRATVLPMDEFRNSKLCSCCHQSLRRARLLTKVKDKDTKEDKIVLKGNRNVLHCKNSRCRAHFWNRDVNAAINILELLKCRLLDLARLAAFQR

SEQ ID NO: 2327 - protein, 341 aa, Phytophthora sojae
GRHYTRAGSQYSERSQRLGSLPRPRASPPGNPRSRVCGCRSRQEGPLHGCDHRQASRQKEKAPPPPPPPPKPPRRHRNKRCPVEDRVSSTGPARTPVRRRRVPKLPKVQHEQRILQIKAGEYQHMSGSKKFNKWHEKLRLRFPEYQTAISSLPCLKTADSRVFLIRMEQVWLNLDYLLDFGIAHNFRKWRFFSHVEHRVAVDDVAKRLIPEAGSHVCVGFGNWSQSDNIKGGPKPPLRPLEKAMRKRATVVKVHEFRTSKLCSACYQPMKMAVFLDPDDPGPDELDADERPLYYDRSVLRCANKNCKKNFLNRDVNAAVNMQTLLMARLQGLPPPAEFVRQ

SEQ ID NO: 2328 - protein, 491 aa, Phytophthora sojae
SSSAAAQDRRVQHACAAQAARKGSSSPDKNCERAFEGITRDAFTGERPRAGEVPAQERDEAARVRGRVAHQARPPVSTEADARAGPAAQETMDACRYTHNKCVEYRHKLFVARPRQRQVPLEYPEDKGPVPEWVLETPSSVRKHAVSNFVSATSAAFTNLARGHITHINMHFKSRRESNYLTIYADAEKTHLNSARHRRGTRHFGPAPLPRDRKLKKVDQYLTIPSVPNILIRADEGTEIEGEVRIVYVHGYWYAQMPHVVAPLPVDDKGRCTAGDPGLKGFLTTMDLQGNIAHLGRANWERLLKLKVRQRAAQRRMSNRKRHHLGRHTGREWKQFVAARREFYTVTAKLDNYVKDLHCKAASHLCHNTDVILLPKFSTSSMLRSSAPWTHAFNDQMNTLAHHQFRQKLQAKCEVAGRAMVMCSEMYSSRTCGRCCRLHLTRRNEDVFRCPHYGFLAGRDENAAYNILRFVCAGSLSVYAVNGVAQLWLVV

SEQ ID NO: 2329 - protein, 272 aa, Phytophthora sojae
EGGSVPNDPLRTQHPHQSGRGHGDRGRGAHRGYWYAQMPHVVAPLPVEDKGRCTAGDPGLKGFLTTMDLQGNIAHLGRANWERLLKLKVRQRAAQRRMSNRKRHHLGRHTGREWKQFVAARREFYTVTAKLDNYVKDLHCKAASHLCHNTDVILLPKFSTSSMLRSSAPWTHAFNDQMNTLAHHQFRQKLQAKCEVAGRAMVMCSEMYSSRTCGRCCRLHLTRRNEDVFRCPHYGFLAGRDENAAYNILRFVCAGSLSVYAVNGVAQLWLVV

SEQ ID NO: 2330 - protein, 278 aa, Phytophthora sojae
EGGSVPNDPPVPNILIRADEGTEIEGEVRIVYAHGYWYAQMPHVVAPLPVEDTGRCTAGDPGLKGFLTTMDLQGNIAHLGRANWDRLLKLKTRQRAAQRRMSRFVANKKYRKRHHLGRHTGREWKQFVAARREFYTVTVKLDNYVKDLHYKAVSHLCHNTDVILLPKFSTSSMLRPSAPWTHAFNDQMNTLVHYQFRQRLLAKCEVAGKAMVLCSEMYSSRTCGRCCRLHLTLRNEDVFRCPHCGFLAGRDENAAYNILRFVCAGSLSVYAVNGVVQL

SEQ ID NO: 2331 - protein, 252 aa, Phytophthora sojae
VRSIRGVRGSRGPDLRRPADPADRAVCWVHVPLGRELQHRHLLSRPCPSPRSSWRRRPPYCSLPCLKTADARVFLIRMEQVWLNLDYLLDFGIAHNSRKWRFFSHVEHRVAVDDVAQWLIPEAGSHVCVGFGNWSQSDNIKGGPKPPLRPLEKAMRKRAIVVKVHEFRTSKLCSACYQPMKMAVFLDPDDPGSGELDADERPLYYDRSVLRCANKNCKKNFLNRDVNAAVNMQALLMARRQGLPRPAEFVRQ

SEQ ID NO: 2332 - protein, 219 aa, Phytophthora sojae
STKEYRHLAGFNQRQYWFENLKKREPVYAALLANMPSFRCASTQDYWVWISYFWKHVNFLIDFSSTHAFRRWRFRNYVYKFTALGYVAARVVPVPDDSTLVGVGEFSNPRGLRSNAVPPLKGIAKELSRRATVRLIDEYFTSKKCIACHSDLAETEFGRRRRAEPEEEPPAQAEEPRPQSLKHVAGQHILARQGPRTSCTIPTAPAGCTGTATRMRPAI

SEQ ID NO: 2333 - protein, 223 aa, Phytophthora sojae
YWFENLKQWEPVYAALLANMPSFRCASTQDYWVWLSYFWKHVNFLIDFSSTHAFRRWRFRNYVYKFKALGYVAARVVPVPDDSTLVGVGEFNNPRGLRGNAVPPLKGFEKELSRRATVRLIDEYFTSKKCFACHSDLAETEFGRRRRAEPEEEPPPPAPQARGVPAHPRATRSRNVLHCTNSTCRMYWDRDENAARNLMLVTEELAHGRPRPDYLRRPRRRDD

SEQ ID NO: 2334 - protein, 434 aa, Phytophthora sojae
SRRPMDACRYTHNKCVEYRRKGGDGGKDKLQKLFVARPRLRQVPLEYPEDMGPAPEWVLETPSSVRKHAVRNFVSATSAAFRNLARGHITHFSMHFKSRRESNYFTIYADAEKTHLNSARHHRSTRHFGPAPLPRDRKPKKVDQYLTIPSVPNILIRADEGTEIEGEVRIVYAHGYWYAQMAYVVAPLPVEDKGRCTAGDPGLKGFLTTMDLQGNIAHLGRANWGRLLKLKTRQRAAQRRMSRFVANKKYRKRHHLGRHTGREWKQFVAARREFYTVTPKLDNYVKDLHYKAASHLCHNTDVILLPKFSTSSMLRSSAPWTHAFNDQMNTLAHYQFRRRLLAKCEVAGEAMVLCSEMYSSRTCGRCCRLHLTLRNEDVFRCPHCGFLAGRDENAAYNILRFVCAGSLSVYAVNGVSAVVVGSVVLGLQRAWPRR

SEQ ID NO: 2335 - protein, 591 aa, Phytophthora sojae
EGGSVPNDPLRTQHPHQSGRGHGGRGRGARRVRTRILVRPDAARGRSTARGGQRALHAGDPGLKGFLTTMDLQGNIAHLGRANWERLLKLKDRQRAAQRRMSRFVANKKYRKRHHLGRHTGREWKQFVAARREFYTVTAKLGNYVKDLHYKAASHLCHNTDVILLPKFSTSSMLRPSAPWTHAFNDQMNTLAHYQFRQKLLAKCEVVGKAMVLCSEMYSSRTCGRCCRLHLTLRNEDVFRCPRCGFLAGRDENAACNILRLSLGLRSEWCSAVVVGSVVLGLQRACIRSARLGGVSHLRVKTCNTVAHGVDTHHASIFFRVESMLNGRSAGALFAVCYTGRRRCRALDALTPCLRSPRTDGARPQASADPCERRLVSTRHVEAGAAPLSNAIILEPSARQTRTLRIAAEVAHATTPSTPRPVRHEPRLRPPAGPRAARQVAHGPVGARRGHGASRPRLDVPAVAQQARAPDVADGGGRRGRREPARQAPQRQDASLPAQVQRAGGGRRHLQPRALRRGPVLVPAPERRRPPVPARAELRGGQAGGYASSPLGLHGRGLHQEDTKHAHRPERPGGRRGAGCGRGCLEDRLRR

SEQ ID NO: 2336 - protein, 588 aa, Spizellomyces punctatus
TYITIIHQLADHASHALKFYILSTSTSTSSFPVVHKDTIEALLYLLNKGEAWQPKIDAKRALRKSLLPYVQRYCQIVGFVPPNLQKEQQSVNYLTASMMTNLRVNVQEHFMQMLLRYINLRLDVKRQKQLPLKSNARKAFFTRLRYLKSVFLFDIVPESLDLTPLESEVLEEIWSLDLPFLPNDPLAYAIVADPMSFFPAYCKLSRLYERHGFRRFSAIPLRRSLIQSHIRIDTVILYAHILCITRQEAEAVEKVDLWLRVCNLRTKAFRSRRSMQFEGSITTDGTSVSVYLKHPEADKYGKRGARKSAKSLEDEVKAQYMEKNLPACRTAENVVVIDPNKRDILYCQDGNGTTFRYTANQRAMETGSRRQRKERQQMKKEAGMDLIESRIPSHKTMNLMDFTRYLLVRRVDWNRRKDFYSHPAHTRWKWHAFINRQKSESDLISNMRNKYGENLTVVMGDWSDAGRTARFQTSSKTKGWRTLFKRNRINCFLLDEYKTSSVCPRCSSSEFVEKKFKERPHSRPYRRREGKIEKVHGLLGCTNPNCLQQAWTMRYWNRDTLSTCNMLMIVQSMLDGHGRPEVFSRSVA

SEQ ID NO: 2337 - protein, 277 aa, Spizellomyces punctatus
RMKLKRNTWRKTYLLVEQQRMSLLSTQTSVIYSTAKTAMVRQCFTTPPTSKPWRLEAVDSKVQRQQMKKEAGVDLIESRIPSHKTMNLMDFTRYLLVRRADWDRHKEFYSHPAHTRWKWHAFINHQKSESDLISAMHNKYGENFTVVMGDWSDAGRTARFQTSSKTKGWRTLFKHNRITCFLLDEYKTSSVCPHCSSGVEKGFKTRPHSRPWCRREGKIEKVHGLLGCTNPNCQQAWTMRYWNRDTLSTCNMLMIVRSMLDGHCRPEVFSRSVPAIA

SEQ ID NO: 2338 - protein, 551 aa, Spizellomyces punctatus
IELFRLKVDIFSAAHYGARARLWRRRRVKESDDGDDNSTMDQGEYGRKNAVSNWQNCKESAHTYTNINVYTYIIGMSIYIRHSIRQQNVSLPSLGKFAKEHYVQKASVRKMLTVSTEAFEEAKRDFLLGISLKEKDIYEHWGQYFDLLYRIRKRFEQERDSWRELLKGKSMDEQKDLAKTDYRGGRLVDDFPLLPEFGDAWQPITLDSLGLGGLVGTRGKGQEHWRKVWSSVFDVGKVVPDPERAYTDRSFHYMILTDGVCAGVLVNTMNRTRRKAYEQWESVNQVSGIRPSTLSELSKVRPENLLNKVIISVDTNKDPIIAAGYYQIGSHLVDGQVQYQPYYLNRSQHHRFRKQRRWVQRKSKPRGRKRRIKRNARWRGRRKQERGQFWPQASCQKPKRSSYGHFALFSRRYRREITGERKRELWRKKWQADPRYGIKSIYKDAQNYSRRCSAAEYAQLVAFTYRTLAKRLKFTGLRKVRRLRLDRHICIKRAEGEFLRRFFPAGVPMNDLVVIWGDGDFHHNMPGSATSPKGVSKNSSEGASATTSIDG

SEQ ID NO: 2339 - protein, 595 aa, Spizellomyces punctatus
DRIQNYIQIVHELAAHATHALKFYILSSPHFPIINETVMEATLYLLNKGAAWQPGNMAKKDCRDILVPHIDRYCNVVGFTRPNLKYDQQSINYLTTSVITNIKVNVQEHFVKMLVRFINYRLDVKNQQKRLLGAERMSFFARLRYLKQLFLLDDIPQTDDLDLSNLESALLEDIWNILLDRVIGKEGKLAYLVACDPLSFFPSHCALSRLFERCGLPLFNAIPLRRSFIQSHVRIDTMILYQHVLKVSWREYDSVDKMDLWLRVCNLGSKAFTTRSGMAFDGSITTDGTSMSVCLKHPDAAKYGRHKHRNSEQAIEADIKSQYIENNLTACRSASNVVTIDPNKRDILYCRDLQKRRTFCYTSMQRTKEIGSRRFKKSREAMKRENGIDVIESAAPSHKTMNLDSYIHYLSWRHDNDAPLKDFYSHPAHTRWRWHTYMNTQRTEAKLISNMRKCFGSSFAVVMGDWSDGGHTQKYQISSKTTGWRNCFKCNRIDCFLLDEYRTSSICPRCLSGDHLQKGFKIRPHSRPWQRQKGRSEKVHGLLGCTNPNCIEQGCTYRYWNRDKLSTSNMVTIMKSYLDDGVRPAIFSRHVPLVA

SEQ ID NO: 2340 - protein, 351 aa, Spizellomyces punctatus
CGLPLFNAIPLQRSFIQSHVRIDTMILYQHVLKVSQREYDAVDKMDLWLRVCNLGSKVFMTRSGMAFDGSITMDGTSMSVCLKHPDAAKYGRHKHHNSEQAIEADIKSQYIENNLTACRSASNVVTIDPNKHDMLYCQDLQNGCMFHYTSMQRTKEIGSRRFNKSHEAMKHENGIDVIESAVPSHKTMNLDSYIHYLSWRHDNDAPLKDFYSHPTHTRWRWHTYMNTQRTEAKLISNMRKCFGSSFAVVMGDWSDGGHTQKYQISSKTTGWQNCFKCNRIDCFLLDEYRTSSICPRCLSGDHWQKGFKIRPHSRPWQHQKGCSEKVHGLLGCTNPNCIEQGCTYRYWNRDK

SEQ ID NO: 2341 - protein, 259 aa, Spizellomyces punctatus
AAENVIIIDPNKCDILYCQDSNGTTFCYTTNQRAVETGSHRFAKELQQMKKAGIDLIESCIPSHKTMNLMDFTHYLLIRRTDSDHRKDFYSHPAHTRWKWHAFINHQKSESNLISDLRNKYGENFTIVMGDWSDAGQTARFQTSSKTKGWHALFTCNRINCFLLDKYKTSSVCPHCSSGVEKGFKTRPHSRPWQRGKIEKVHGLLGCTNPNCLQQAWTMRYWNRDTLSTCNMVTIVQSMLAGHGRPDVFSRQCSSRSVA

SEQ ID NO: 2342 - protein, 413 aa, Spizellomyces punctatus
SRQAACLPHCHRRDVLLACILQTLPLYEHHGFRWFSAIPLRRSLIQSHIRIDTVILYSHVLCIPRRRREAEAIEKDDLWLRVCNLRTKAFQSRRSMQFEGSITTDGTSVSVYLKHPEADKYGKRGARKSAKTLEAEVKAVYVENNLPACRAAENVVIIDPNKRDLLYCQDSNGATMFHYTANQRCKETGSRRFAKERQQMKKEAGMDLIESRIPSHKTMNLMDFLRYLLVRCVDWNRRKDFYSHPAHTRWKWHSFINRQKSESDLISNMRNKYSENLTVVMGDWSDAGRTARFQTSSKTKGWRTLFKRNRIDCFLLDEYKTSSVCPRCSSSEFVEKKFKERPHSRPYRQREGKIEKVHGLLGCTNPNCLQQAWTMRYWNRDTLSTCNMLTIVQSMLDGHGRPEVFSRSVPAVA

SEQ ID NO: 2343 - protein, 219 aa, Spizellomyces punctatus
DTETVEKDDLWLRVCNLWNKAFRSRHGMQFEGSITTDGTSVSVYLKHPEADKYGKRRARKSANMVAAEVKVQYMEKNLPACRAAENVVVIDPNKHDILYCQDNSGMTFRYTANQRAVETGSRRFATERQQMKKEAGMDLIESRIPSHKTMNLMDFMRYLLVRRADWDRQKDFYSHPAHTWWKWHAFINRQKSESNLISNLRNKYGENFTIVMGDWSDAG

SEQ ID NO: 2344 - protein, 200 aa, Ostreococcus tauri
RSTSRSRATFSSASFGRARRKYVGTDVIFRRNSKQYKASTRRMKQLLARLHLKFTRWIEHEHKTVAKFLVNRYDGIICPPLDGAMFVRQANDTRAQKKMKRRCRRLKSATSMRKLVHALKYAAIRDGKYVMTERAIELGTPMTCGFCGWRHEHLGFERTFECHVCDLSIDRDVNGAQNNGLQALADGGFGRPPEYWNTHA

SEQ ID NO: 2345 - protein, 496 aa, Phytophthora parasitica
KRCPIDCTRSLYIERSSLILEFFSMGERPDWWKASVGRRAGETCLPLAQADRSRARMKGIKQKSWFQLNIVIEKESRPSSPSSSEASNPGETPNSVIKIRLYPTKPQKILLNKMFGTHRAVYNKLVESSREDCYKLKLSELSQQYRPISQKHSMMNYLPEYHLEVPEEVMYSTYRDFAKALKLSRALFKALKKKDKKTSFLDLRFNSKKDNSSSIEFRARGFKSMDGIVKFTPRYFGFSKNEGYLIKEKMPELQFSVRLQRTRDEKFYLCIPRSKIFEKTTSTRTCAIDPGVRSFITMYDPDGLTLGVDDANEYIFRRCLTIDRLISRHTKETNKRKCYRMQKRLTKCFNRVKAMIADMHHKVSGWLSTNFKQVLLPSFQTSDMTSKQKRISRKTSRAMLTWSHYKFKMMLAYKMERSGGRMVECEEHYTTKTCWCCGRINYSITSQKVFECNHCELVIDRDVNAARNIFLKNEELLTWVPTQVPGDAYSEVVRYA

SEQ ID NO: 2346 - protein, 260 aa, Phytophthora parasitica
YYLIAPRKKASSRSKTERVCAIDRGYRNFVTVYDPDGRTFSVKDVHNVFKRKFEAVDAMKSMLAVKGNVCKDRHRDKFRTQMKKGRKNPKSEEHRLRYHLRRRMRFTSRKATRCVNDLHQKLSCWLSENYHTVLLPSFQIQEMVRKHLNEVASDATPATGSEEDNATIKKRKMRSPTARALMAQAHFKFKQLLKYKMKHTGGRVVDCEEEYTSKTCSSCCVAKYNLGGDRVFRCTSCHAVLDRDVSAAKNILHKNISLLA

SEQ ID NO: 2347 - protein, 644 aa, Guillardia theta
SNMGKRKRGKQRKSCSDSQTTVKMCLKKHLKHHTMIGVIDDWVKHISKISHRGSIIFNHLLLWCFEKDSMQGDDTYITRLFDQIYNRTRKVTDKEKEEGMQEETVKTNGGEKVFFRTCFLMGEKRRGNAIQFDILDEFWQEKGNKYLPIQRRKEGDIRVLYYSADQYATNFQNYIFYTMGQKQTRYIKEWGKLNGISSEKEIQDIRNTVNGWSFPPKTRVLERQDVIDFIREQKEIIGWDNHYNLSWARDKIKKNPEQQKWMQLHMPNLVKYHFSVLRFLEIHDISDRYTIAPIFQIRKQFIRVDIWGLFYIMDQSGLLQYSKGGKSKCMKKFIQQKHKRFLSVLKLQSNLRKKGTVDSIQTDGVALCVTFKKRIHNETDNTTTKKSKTRDCDVSSRRVIAIDPGRNVLICGVEQIPGQEKPKQYRYTRRQYYHESHITRNNAKLEKWRQGITEESNDIARVSAKTSRLDHFERYIDTVVRLSEILFEHNCQNKFARLKMDNYIHKHKAIDTFFKKMKFNGTDQNPIIAYGDASFGCTGRGEKSVPVKWIKRRCQNFFEVTAVDEYRTTKCCNQCHQELYDLRRKQINKNGILADEVSVVRGLKWCRSTNCVQNRIKSRDVNAAMNILLCYMSLPARPDFLKRP

SEQ ID NO: 2348 - protein, 646 aa, Guillardia theta
SNMGKRKRGKQRKSCSDSQTTVKMCLKKHLKQHTMIGVIDDWVKHISKISHRGSIIFNHLLLWCFEKDSMQGDDTYITRLFDQIYNRTRKVTDKEKEEGMQEETVKTNGGEKVFFRTCFLMGEKRRGNAIQFDILDEFWQEKGNEYLPIQRRKEGDIRVLYYSADQYATNFQNYIFYTMGQKQTRYIKEWGKLNGISSEKEIQDIRNAVNGWSFPPKTRVLERQDVIDFIREQKEIIGWDNHYNLSWARDKIKKNPEQQKWMQLHMPNLVKYHFSVLRFLEIHDISDRYTIAPIFQIRKQFIRVDIWGLFYIMDQSGLLQYSKGGKSKCMKKFTQQKHKRFLSVLKLQSNLRKKGTVDSIQTDGVALCVTFKKRIHNETDRDDTTTKKSKTRDCDVSSRRVIAIDPGRNVLICGVEQIPGQEKPKQYRYTRRQYYHESHITRNNAKLEKWRQGITEESNDIARVSAKTSRLDHFERYIDTVVRLSEILFEHNCQNKFARLKMDNYIHKHKAIDTFFKKMKGNGTDQNPIIAYGDASFGCTGRGEKSVPVKWIKRRCQNFFEVTVVDEYRTTKCCNQCHQELYDLRRKQINKNGILADEVSVVRGLKWCRSTNCVQNRIKSRDVNAAMNILLCYMSLPARPDFLKRP

SEQ ID NO: 2349 - protein, 644 aa, Guillardia theta
SNMGKRKRGKQRKSCSDSQTTVKMCLKKHLKQHTMIDVIDDWVKHISKISHRGSIIFNHLLLWCFEKDSMQGDDTYITRLFDQIYNRTRKVTDKEKEEGMQEETVKTNGGEKVFFRTCFLMGEKRRGNAIQFDILDEFWQEKGNKYLPIQRRKEGDIRVLYYSADQYATNFQNYIFYTMGQKQTRYIKEWGKLNGISSEKEIQDIRNAVNGWSFPPKTRVLERQDVIDFIREQKEIIGWDNHYNLSWARDKIKKNPEQQKWMQLHIPNLVKYHFSVLRFLEIHDISDRYTIAPIFQIRKQFIRVDIWGLFYIMDQSGLLQYSKGGKSKCMKKFTQQKHKRFLSVLKLQSNLRKKGTVDSIQTDGVALCVTFKKRIHNETDNTTTKKSKTRDCDVSSRRVIAIDPGRNVLICGVEQIPGQEKPKQYRYTRRQYYHESHITRNNAKLEKWRQGITEESNDIARVSAKTSRLDHFERYIDTVVRLSEILFEHNCQNKFARLKMDNYIHKHKAIDTFFKKMKGNGTDQNPIIAYGDASFGCTGRGEKSVPVKWIKRRCQNFFEVTAVDEYRTTKCCNQCHQELYDLRRKQINKNGILADEVSVVRGLKWCRSTNCVQNRIKSRDVNAAMNILLCYMSLPARPDFLKRP

SEQ ID NO: 2350 - protein, 642 aa, Guillardia theta
HGFARLTYYNMPRKRKRITDDSDNGQEISYSKPFTRVVKCGLYSRLKVENRSILDVIDRWVLHISQITSRGSMIFNCFLIWGRDTGNLRYVVDEIKRAKSTFFWNVFTLGMEQHSRTDNKYPTLQRFWSEKRHLFVDLCRIRGDSQAIVFAANQYGTNFYQDLKANFTNRLEKFIAEFCKGELHINHQQEIEDVKNVLFQRKDYELKTEVFNRNNSQQIGTFIDHMKQLIGLSGDEDLFSFKYDKFDHRLQKNLFEIIETHMFMLKFFEDRGLSKKTFKAAPMSKFGRKHLTIDNDVMYYILKEANSLKPGEDKKSFMRIDQTLENSRNFRRIFDCSNLFRDQREEITSITTDGVSVCFRFTLIVKTIDGLEQEPSLRTTKWLADRKRAERKSAKKISISYKVLHENSEYQREIEECKNCPRVIAIDPGRSVIISAVEQFRDDQQIIRKRFQFSRKQYYHESHLNRNKKKRKTWDQDIQSTLHYLKGFSSKSGGSLSRFEDYLLAVTRHWEELTSHYSKRKYARMKFDIYISKRKSVDRFIRTMKGKGEIEPVIAYGNARFPSTGRRGERPVPVRWIRRRFEDHYRVVDVDEYRTTKCCNDCGSELDVLRRIENTGKEPDETCRLKTRKSEVRGLKFCRSSR

SEQ ID NO: 2351 - protein, 644 aa, Guillardia theta
SNMGKRKRGKQRKSCSDSQTTVKMCLKKHLKHHTMIGVIDDWVKHISKISHRGSIIFNHLLLWCFEKDSMQGDDTYITRLFDQIYNRTRKVTDKEKEEGMQEETVKTNGGEKVFFRTCFLMGEKRRGNAIQFDILDEFWQEKGNKYLPIQRRKEGDIRVLYYSADQYATNFQNYIFYTMGQKQTRYIKEWGKLNGISSEKEIQDIRNTVNGWSFPPKTRVLERQDVIDFIREQKEIIGWDNHYNLSWARDKIKKNPEQQKWMQLHMPNLVKYHFSVLRFLEIHDISDRYTIAPIFQIRKQFIRVDIWGLFYIMDQSGLLQYSKGGKSKCMKKFIQQKHKRFLSVLKLQSNLRKKGTVDSIQTDGVALCVTFKKRIHNETDNTTTKKSKTRDCDVSSRRVIAIDPGRNVLICGVEQIPGQEKPKQYRYTRRQYYHESHITRNNAKLEKWRQGITEESNDIARVSAKTSRLDHFERYIDTVVRLSEILFEHNCQNKFARLKMDNYIHKHKAIDTFFKKMKGNGTDQNPIIAYGDASFGCTGRGEKSVPVKWIKRRCQNFFEVTAVDEYRTTKCCNQCHQELYDLRRKQINKNGILADEVSVVRGLKWCRSTNCVQNRIKSRDVNAAMNILLCYMSLPARPDFLKRP

SEQ ID NO: 2352 - protein, 644 aa, Guillardia theta
SNMGKRKRGKQRKSCSDSQTTVKMCLKKHLKQHTMIGVIDDWVKHISKISHRGSIIFNHLLLWCFEKDSMQGDDTYITRLFDQIYNRTRKVTDKEKEEGMQEETVKTNGGDKVFFRTCFLMGEKRRGNAIQFDILDEFWQEKGNKYPPIQRRKEGDIRVLYYSADQYATNFQNYIFYTMGQKQTRYIKEWGKLNGISSENEIQDIRNTVNGWSFPPKTRVLERQDVIDFIREQKEIIGWDNHYNLSWTRDKIKKNPDQQKWMQLHMPNLVKYHFSVLRFLEIHDISDRYTIAPIFQIRKQFIRVDIWGLFYIMDQSGLLQYSKGGKSKCMKKFTQQKHKRFLSVLKLQSNLRKKGTVDSIQTDGVALCVTFKKRIHNETDNTTTKKSKTRDCDVSSRRVIAIDPGRNVLICGVEQIPGQEKPKQYRYTRRQYYHESHITRNNAKLEKWRQGITEESNDIARVSAKTSRLDHFERYIDTVVRLSEILFEHNCQNKFARLKMDNYIHKHKAIDTFFKKMKGNGTDQNPIIAYGDASFGCTGRGEKSVPVKWIKRRCQNFFEVTAVDEYRTTKCCNQCHQELYDLRRKQINKNGILADEVSVVRGLKWCRSTNCVQNRIKSRDVNAAMNILLCYMSLPARPDFLKRP

SEQ ID NO: 2353 - protein, 642 aa, Guillardia theta
HGFARLTYYNMPRKRKRITDDSDNGQEISYSKPFTRVVKCGLYSRLKVENRSILDVIDRWVLHISHVTSRGSMIFNCFLIWGRDTGNLRYVVDEIKRAKSTFFWNVFTLGMEQHSRTDNKYPTLQRFWSEKRHLFVDLCRIRGDSQAIVFAANQYGTNFYQDLKANFTNRLEKFIAEFCKGELHINHQQEIEDVKNVLFQRKDYELKTEVFNRNNSQQIGTFIDHMKQLIGLSGDEDLFSFKYDKFDHRLQKNLFEIIETHMFMLKFFEDRGLSKKTFKAAPMSKFGRKHLTIDNDVMYYILKEANSLKPGEDKKSFMRIDQTLENSRNFRRIFDCSNLFRDQREEITSITTDGVSVCFRFTLIVKTIDGLEQEPSLRTTKWLADRKRAERKSAKKISISYKVLHENSEYQREIEECKNCPRVIAIDPGRSVIISAVEQFRDDQQIIRKRFQFSRKQYYHESHLNRNKKKRKTWDQDIQSTLHYLKGFSSKSGGSLSRFEDYLLAVTSHWEELTSHYSKRKYARMKFDIYISKRKSVDRFIRTMKGKGEIEPVIAYGNARFPSIGRRGERPVPVRWIRRRFENHYRVVDVDEYRTTKCCNDCGSELDVLRRIENTGKEPDETCRLKTRKSEVRGLKFCRSSR

SEQ ID NO: 2354 - protein, 591 aa, Guillardia theta
HGFARLTYYNMPRKRKRITDDSDNGQEISYSKPFTRVVKCGLYSRLKVENRSILDVIDRWVLHISQITSRGSMIFNCFLIWGRDTGNLRYVVDEIKRAKSTFFWNVFTLGMEQHSRTDNKYPTLQRFWSEKRHLFVDLCRIRGDSQAIVFAANQYGTNFYQDLKANFTNRLEKFIAEFCKGELHINHQQEIEDVKNVLFQRKDYELKTEVFNRNNSQQIGTFIDHMKQLIGLSGDEDLFSFKYDKFDHRLQKNLFEIIETHMFMLKFFEDRGLSKKTFKAAPMSKFGRKHLTIDNDVMYYILKEANSLKPGEDKKSFMRIDQTLENSRNFRRIFDCSNLFRDQREEITSITTDGVSVCFRFTLIIKTIDGLEQEPSLRTTKWLADRKRAERKSAKKISISYKVLHENSEYQREIEECKNCPRVIAIDPGRSVIISAVEQFRDDQQIIRKRFQFSRKQYYHESHLNRNKKKRKTWDQDIQSTLHYLKGFSSKSGGSLSRFEDYLLAVTSHWEELTSHYSKRKYARMKFDIYISKRKSVDRFIRTMKGKGEIEPVIAYGNARFPSTGRRGERPVPPGQVDKKKIRESLQSRRC

SEQ ID NO: 2355 - protein, 644 aa, Guillardia theta
SNMGKRKRGKQRKSCSDSQTTVKMCLKKHLKQHTMIGVIDDWVKHISKISHRGSIIFNHLLLWCFEKDSMQGDDTYITRLFDQIYNRTRKVTDKEKEEGMQEETVKTNGGEKVFFRTCFLMGEKRRGNAIQFDILDEFWQEKGNKYLPIQRRKEGDIRVLYYSADQYATNFQNYIFYTMGQKQTRYIKEWGKLNGISSEKEIQDIRNAVNGWSFPPKTRVLERQDVIDFIREQKEIIGWDNHYNLSWARDKIKKNPEQQKWMQLHMPNLVKYHFSVLRFLEIHDISDRYTIAPIFQIRKQFIRVDIWGLFYIMDQSGLLQYSKGGKSKCMKKFTQQKHKRFLSVLKLQSNLRKKGTVDSIQTDGVALCVTFKKRIHNETDNTTTKKSKTRDCDVSSRRVIAIDPGRNVLICGVEQIPGQEKPKQYRYTRRQYYHESHITRNNAKLEKWRQGITEESNDIARVSAKTSRLDHFERYIDTVVRLSEILFEHNCQNKFARLKMDNYIHKHKAIDTFFKKMKGNGTDQNPIIAYGDASFGCTGRGEKSVPVKWIKRRCQNFFEVTAVDEYRTTKCCNQCHQELYDLRRKQINKNGILADEVSVVRGLKWCRSTNCVQNRIKSRDVNAAMNILLCYMSLPARPDFLKRP

SEQ ID NO: 2356 - protein, 279 aa, Guillardia theta
LSKQSMDSNRNLHCALPNGLPIEKGLNGNRRRRYQYHTKYYMKIQNTKERSKNVKNCPRVIAIDPGRSVIISAVEQFRDDQQIIRKRFQFSRKQYYHESHLNRNKKKRKTWDQDIQSTLHYLKGFSSKSGGSLSRFEDYLLAVTSHWEELTSHYSKRKYARMKFDIYISKRKSVDRFIRTMKGKGEIEPVIAYGNARFPSTGRRGERPVPVRWIRRRFENHYRVVDVDEYRTTKCCNDCGSELDVLRRIENTGKEPDETCRLKTRKSEVRGLKFCRSSR

SEQ ID NO: 2357 - protein, 631 aa, Guillardia theta
HGFARLTYYNMPRKRKRITDDSDNGQEISYSKPFTRVVKCGLYSRLKVENRSILDVIDRWVLHISQITSRGSMIFNCFLIWGRDTGNLRYVVDEIKRAKSTFFWNVFTLGMEQHSRTDNKYPTLQRFWSEKRHLFVDLCRIRGDSQAIVFAANQYGTNFYQDLKANFTNRLEKFIAEFCKGELHINHQQEIEDVKNVLFQRKDYELKTEVFNRNNSQQIGTFIDHMKQLIGLSGDEDLFSFKYDKFDHRLQKNLFEIIETHMFMLKFFEDRGLSKKTFKAAPMSKFGRKHLTIDNDVMYYILKEANSLKPGEDKKSFMRIDQTLENSKNFRRIFDCSNLFRDQREEITSITTDGVSVCFRFTLIVKTIDGLEQEPSLRTTKWLADRKRAERKSAKKISISYKVLHENSEYQREIEECKNCPRVIAIDPGRSVIISAVEQFRDDQQIIRKRFQFSRKQYYHESHLNRNKKKRKTWDQDIQSTLHYLKGFSSKSGGSLSRFEDYLLAVTSHWEELTSHYSKRKYARMKFDIYISKRKSVDRFIRTMKGKGEIEPVIAYGNARFPSTGRRGERPVPVRWIRRRFENHYRVVDVDEYRTTKCCNDCGSELDVLRRIENTGKEPDETCRLKTAKEK

SEQ ID NO: 2358 - protein, 272 aa, Guillardia theta
LEQEPSLRTTKWLADRKRAERKSAKKISISYKVLHENSEYQREIEECKNCPRVIAIDPGRSVIISAVEQFRDDQQIIRKRFQFSRKQYYHESHLNRNKKKRKTWDQDIQSTLHYLKGFSSKSGGSLSRFEDYLLAVTSHWEELTSHYSKRKYARMKFDIYISKRKSVDRFIRTMKGKGEIEPVIAYGNARFPSTGRRGERPVPVRWIRRRFENHYRVVDVDEYRTTKCCNDCGSELDVLRRIENTGKEPDETCRLKTRKSEVRGLKFCRSSR

SEQ ID NO: 2359 - protein, 668 aa, Guillardia theta
STKGLPKESWTSMTGVIDRFQSPIQWGCMRVLKKKKKSSRLPGVRRKVCGCSFHLYSKPFTRVVKCGLYSRLKAENRSILDVIDRWVLHISQITSRGSMIFNCFLIWGRDTGNLRYVVDEIKRAKSTFFWNVFTLGMEQHSRTDNKYPTLQRFWSEKRHLFVDLCRIRGDSQAIVFAANQYGTNFYQDLKANFTNRLEKFIAEFCKGELHINHQQEIEDVKNVLFQRKDYELKTEVFNRNNSQQIGTFIDHMKQLIGLSGYEDLFSFKYDKFDHRLQKNLFEIIETHMFMLKFFEDRGLSKKTFKAAPMSKFGRKHLTIDNDVMYYILKEANSLKPGEDKKSFMRIDQTLENSKNFRRIFDCSNLFRDQREEITSITTDGVSVCFRFTLIVKTIDGLEQEPSLRTTKWLADRKRAERKSAKKISISYKVLHENSEYQREIEECKNCPRVIAIDPGRSVIISAVEQFRDDQQIIRKRFQFSRKQYYHESHLNRNKKKRKTWDQDIQSTLHYLKGFSSKSGGSLSRFEDYLLAVTSHWEELTSHYSKRKYARMKFDIYISKRKSVDRFIRTMKGKGEIEPVIAYGNARFPSTGRRGERPVPVRWIRRRFENHYRVVDVDEYRTTKCCNDCGSELDVLRRIENTGKEPDETCRLKTRKSEVRGLKFCRSSR

SEQ ID NO: 2360 - protein, 503 aa, Guillardia theta
YFRRYLPIQRRKEGDIRVLYYSADQYATNFQNYIFYTMGQKQTRYIKEWGKLNGISSEKEIQDIRNTVNGWSFPPKTRVLERQDVIDFIREQKEIIGWDNHYNLSWARDKIKKNPEQQKWMQLHMPNLVKYHFSVLRFLEIHDISGRYTIAPIFQIRKQFIRVDIWRLFYIMDQSGLLQYSKGGKSKCMKKFIQQKHKRFLSVLKLQSNLRKKGTVDSIQTDGVALCVTFKKRIHNETDNTTTKKSKTRDCDVSSRRVIAIDPGRNVLICGVEQIPGQEKPKQYRYTRRQYYHESHITQNNAKLEKWRQCITEESNDIARVSAKTSRLDHFERYIDTVVRLSEILFEHNCQNKFARLKMDNYIHKHKAIDTFFKKMKGNGSDQNPIIAYGDASFGCTGRGEKSVPVKWIKRRCQNFFEVTAVDEYRTTKCCNQCHQELYDLRRKQINKNGILADEVSVVRGLKWCRSTNCVQNRIKSRDVNAAMNILLCYMSLPARPDFLKRP

SEQ ID NO: 2361 - protein, 479 aa, Guillardia theta
SICNKFPKLHILYDGTKQTRYIKEWGKLNGISSEKEIQDIRNTVNGWSFPPKTRVLERQDVIDFIREQKEIIGWDNHYNLSWARDKIKKNPEQQKWMQLHMPNLVKYHFSVLRFLEIHDISDRYTIAPIFQIRKQFIRVDIWGLFYIMDQSGLLQYSKGGKSKCMKKFIQQKHKRFLSVLKLQSNLRKKGTVDSIQTDGVALCVTFKKRIHNETDNTTTKKSKTRDCDVSSRRVIAIDPGRNVLICGVEQIPGQEKPKQYRYTRRQYYHESHITRNNAKLEKWRQGITEESNDIARVSAKTSRLDHFERYIDTVVRLSEILFEHNCQNKFARLKMDNYIHKHKAIDTFFKKMKGNGTDQNPIIAYGDASFGCTGRGEKSVPVKWIKRRCQNFFEVTAVDEYRTTKCCNQCHQELYDLRRKQINKNGILADEVSVVRGLKWCRSTNCVQNRIKSRDVNAAMNILLCYMSLPARPDFLKRP

SEQ ID NO: 2362 - protein, 640 aa, Guillardia theta
FMPRKRKEPLNDSTSERVEKYNTFKCCLVKHLKEKRLFPVIEEWVRHISQIMHRGSLIFNHFLIWCLERGYTPELKDQSFFYRCFLLGTNERKDIKLREPKDGKKDKRQQQQGYRDLLRSFWEEKHSTYDEYQINRIKGDWQAIMYAIHQYMTNLKMYLAYTINSRQLRYINEWTESQRSKFDMPNSEWKDFQRTIRCAINGWEFPPLSCLGQEDVSLFIQEQRLILGLQMNQFVSFNQAHLKSYPRWYETHQNELLRYQYMMLSFFEEQGTKTYSLAPVCSIKSHFINIDKTILPYMLKKLDLTVIEMDEIQMKDAFKCERYEKNGKKLKRVQTDGVALCFHFVKEEIREKQDQPKKKKAKYGKQCCQSDEKKAEHDEEQVVRKQNLRGGRVIAIDPGRTVLICGIEDGADKKFRFSRNQYYQESHIKRNERRSRKWGIEIQEINNRLSNASLKTCKMDVFEHNIRVVLDVRTKCFEHHCKRREALLRMDNFIHKNRVVDRFLNTMQTKDQEEPTLAYGDGSFNSTGRGEKMAPVKWIKEKCKKRFKRFVEIDEHFTTAKCNRCGERLYDFRRHSMRRKGIHNTRKTCVRGLKWCSSTRCFKSPFVSRDVNATMNILLCFKSLPQRPGFLQRPLYHRPQ

SEQ ID NO: 2363 - protein, 644 aa, Guillardia theta
SNMGKRKRGKQRKSCSDSQTTVKMCLKKHLKQHTMIGVIDDWVKHISKISHRGSIIFNHLLLWCFEKDSMQCDDTYITRLFDQIYNRTRKVTDKEKEEGMQEDTVKTNGGDKVFFRTCFLMGEKRRGNAIQFDILDEFWQEKGNKYPPIQRRKEGDIRVLYYSADQYATNFQNYIFYTMGQKQTRYIKEWGKLNGISSEKEIQDIRNAVNGWSFPPKTRVLERQDVIDFIREQKEIIGWDNHYNLSWARDKIKKNPDQQKWMQLHMPNLVKYHFSVLRFLEIHDISDRYTIAPIFQIRKQFIRVDIWGLFYIMDQSGLLQYSKGGKSKCMKKFTQQKHKRFLSVLKLQSNLRKKGTVDSIQTDGVALCVTFKKRIHNETDNTTTKKSKTRDCDVSSRRVIAIDPGRNVLICGVEQIPGQEKPKQYRYTRRQYYHESHITRNNAKLEKWRQGITEESNDIARVSAKTSRLDHFERYIDTVVRLSEILFEHNCQNKFARLKMDNYIHKHKAIDTFFKKMKGNGTDQNPIIAYGDASFGCTGRGEKSVPVKWIKRRCQNFFEVTAVDEYRTTKCCNQCHQELYDLRRKQINKNGILADEVSVVRGLKWCRSTNCVQNRIKSRDVNAAMNILLCYMSLPARPDFLKRP

SEQ ID NO: 2364 - protein, 256 aa, Guillardia theta
SVRHDEDLSDQESRGGRSVLICGVEQIPGQEKPKQYRYTRRQYYHEFHITRNNAKFEKWRQGITEESSDIARVSAKTSRLDHYERYIDTVVRLSEILFEHNCQNKFARLKMDNYIHKHKAIDTFFKKMKDGNGSDQNPIIAYGDASFGCTGRGEKSVPVKWIKRRCQNFFEVTAVDEYRTTECCNQCHQELYDLKRKKINKNGILADEVSVVRGLKWCRSTNCVQNRIKSRDINAAMNILLCYMSLPARPDFLKRP

SEQ ID NO: 2365 - protein, 642 aa, Guillardia theta
HGFARLTYYNMPRKRKRITDDSDNGQEISYSKPFTRVVKCGLYSRLKVENRSILDVIDRWVLHISQITSRGSMIFNCFLIWGRDTGNLRYVVDEIKRAKSTFFWNVFTLGMEQHSRTDNKYPTLQRFWSEKRHLFVDLCRIRGDSQAIVFAANQYGTNFYQDLKANFTNRLEKFIAEFCKGELHINHQQEIEDVKNVLFQRKDYELTTEVFNRNNSQQIGTFIDHMKQLIGLSGDEDLFSFKYDKFDHRLQKNLFEIIETHMFMLKFFEDRGLSKKTFKAAPMSKFGRKHLTIDNDVMYYILKEANSLKPGEDKKSFMRIDQTLENSKNFRRIFDCSNLFRDQREEITSITTDGVSVCFRFTLTVKTIDGLEQEPSLRTTKWLADRKRAERKSAKKISISYKVLHENSEYQREIEECKNCPRVIAIDPGRSVIISAVEQFRDDQQIIRKRFQFSRKQYYHESHLNRNKKKRKTWDQDIQSTLHYLKGFSSKSGGSLSRFEDYLLAVTSHWEELTSHYSKRKYARMKFDIYISKRKSVDRFIRTMKGKGEIEPVIAYGNARFPSTGRRGERPVPVRWIRRRFENHYRVVDVDEYRTTKCCNDCGSELDVLRRIENTGKEPDETCRLKTRKSEVRGLKFCRSSR

SEQ ID NO: 2366 - protein, 326 aa, Guillardia theta
DNRDTHVHVEVLRRSWIFDCSNLFRDQREEITSITTDGVSVCFRFTLIIKTIDGLEQEPSLRTTKWLADRKRAERKSAKKISISYKVLHENSEYQREIEECKNCPRVIAIDPGRSVIISAVEQFRDDQQIIRKRFQFSRKQYYHESHLNRNKKKRKTWDQDIQSTLHYLKGFSSKSGGSLSRFEDYLLAVTSHWEELTSHYSKRKYARMKFDIYISKRKSVDRFIRTMKGKGEIEPVIAYGNARFPSTGRRGERPVPVRWIRRRFENHYRVVDVDEYRTTKCCNDCGSELDVLRRIENTGKEPDETCRLKTRKSEVRGLKFCRSSR

SEQ ID NO: 2367 - protein, 642 aa, Guillardia theta
HGFARLTYYNMPRKRKRITDDSDNGQEISYSKPFTRVVKCGLYSRLKVENRSILDVIDRWVLHISQITSRGSMIFNCFLIWGRDTGNLRYVVDEIKRAKSTFFWNVFTLGMEQHSRTDNKYPTLQRFWSEKRHLFVDLCRIRGDSQAIVFAANQYGTNFYQDLKANFTNRLEKFIAEFCKGELHINHQQEIEDVKNVLFQRKDYELKTEVFNRNNSQQIGTFIDHMKQLIGLSGDEDLFSFKYDKFDHRLQKNLFEIIETHMFMLKFFEDRGLSKKTFKAAPMSKFGRKHLTIDNDVMYYILKEANSLKPGEDKKSFMRIDQTLENSKNFRRIFDCSNLFRDQREEITSITTDGVSVCFRFTLIVKTIDGLEQEPSLRTTKWLADRKRAERKSAKKISISYKVLHENSEYQREIEECKNCPRVIAIDPGRSVIISAVEQFRDDQQIIRKRFQFSRKQYYHESHLNRNKKKRKTWDQDIQSTLQYLKGFSSKSGGSLSRFEDYLLAVTSHWEELTSHYSKRKYARMKFDIYISKRKSVDRFIRTMKGKGEIEPVIAYGNARFPSTGRRGERPVPVRWIRRRFENHYRVVDVDEYRTTKCCNDCGSELDVLRRIENTGKEPDETCRLKTRKSEVRGLKFCRSSR

SEQ ID NO: 2368 - protein, 594 aa, Guillardia theta
LQIHQRLFPVIDEWVKHISQIMHRGSLIFNHFLLWCLERKYTPELNDQSFFYKCFLLGTETRKEYKLREPKKGKEDKIQQQQNYRDMLRSFWEEKHSTYDEYQINRIKGDGQAILYAIQQYITNLKTYLAYTINSRQIRYIEEWTETQIKELKIPKMKVTELKEFQHNLRCVINGWAFPPLRYLMQEDVSRFVQDQRNVLGLQRGQFVLLNQKHLKAHTWWYENHQLELLRYQHMILSFLEQNETKTYSLAPICTIKSHFITIDAKILSAMSKGLRLTVVEMDEDFFQMKDVFRYDRYAKNGKTLKRVQTDGVSLCFHFEKEVIQKKQEQREKKKARHVENTSNRVIAIDPGRTVLICGIEDGTGKQFRFSRNQYYQESHMKRNERRSRKWNTEIKEINNRLSNASLKTCNSKVFEQNIKVVLDVRKQCFQHHCKRREALLRMDNFIHKNRVVDRFLNTLQTKDQEEPMLAYGDGSFNSTGRGEKMAPVKWIKEKCKKRFKKFVEIDEYFTTAKCNCCGERLHDFTRRHSMRKKGKHNTRKKIVRGLKWCSSTRCFKSPFVSRDVNAAMNILLCFRTLPGRPEFLQRPLYHRPQ

SEQ ID NO: 2369 - protein, 387 aa, Guillardia theta
DNRDTHVHVEVLVEDRGLSKKTFKAAPMSKFGRKHLTIDNDVMYYILKEANSLKPGEDKKSFMRIDQTLENSKNFRRIFDCSNLFRDQREEITSITTDGVSVCFRFTLIVKTIDGLEQEPSLRTTKWLADRKRAERKSAKKISISYKVLHENSEYQREIEECKNCPRVIAIDPGRSVIISAVEQFRDDQQIIRKRFQFSRKQYYHESHLNRNKKKRKTWDQDIQSTLHYLKGFSSKSGGSLSRFEDYLLAVTSHWEELTSHYSKRKYARMKFDIYISKRKSVDRFIRTMKGKGEIEPVIAYGNARFPSTGRRGERPVPVRWIRRRFENHYRVVDVDEYRTTKCCNDCGSELDVLRRIENTGKEPDETCRLKTRKSEVRGLKFCRSSR

SEQ ID NO: 2370 - protein, 559 aa, Copidosoma floridanum
RMAMVCQLQPRLRRRAIGKTRAQRKRILRCKRALVMDIVKKRKKHHKQAAKENKQSQKMATGNHNKKTLSPLVSKKQVKGNEKQPKGKKTLGKDKAQRVLAYASLKSFVTPKSLRKTGSGKDSRSPGSANAAKPVLLSKKQRKDQVLGQIARLFAIQGTENARKGKEIPELACVLREDENLDFSQMKSQFWKFIPIFFRIQQKLIERGEKSFTLIPINKIHERFIHYGQIAVSKTCSRLAKMNIVKISAQTDKHLKLVENFSKMFDLTTVFKQKPKYTFAWKISCNSVESSVHLFSRRKDQDDGRKSAHKNRFCAKNKNKQIKDVKEDALKQTGQKEVKINVPTKNYQKPFNRLVGIDPGVKIPLAVYTVDLEKRKLANQSSQSVDPKGSDQFDMIRYQWFKFASGISTRKWRASHYNSIIKEKMIKLQEKFPSINLLKKTENSGTTKYRIDYYFALGPVYWRKFWSRQKFDAKIRSRSLVDTLINEIVYDNYQGKDRKNVCTFLALGKTKISGKISGHGRVPMALIVKRLNDFSKEYPKTLTVSIFNHDFVFSFTSFK

SEQ ID NO: 2371 - protein, 513 aa, Copidosoma floridanum
RIGSLSDKINCISFFPRNSDVFSPYLSLSLPLSGRQHKAYDQLEIERRFYTFFLGSLSLSRVSSTECYRFYGRSYQPTAYHFAANAAKPVLLTKKQRKDQVLGQIARLFAIQGTENARKGKEIPELACVLREDENLDFSQMKSQFWKFIPIFFRIQQKLIERGEKSFTLIPINKIHERFIHYGPIAVSKTCSRLAKMNIVKISAQTDKHLKLVENFSKMFDLTTVFKQKPKHAFAWKISCNSVESSVHLFSRRKDQDDGRKLAHKNRFCAKNKNKQIKDVKEDALKQTGQRGKINVPTKNYQKPFNRLVGIDPGVKIPLAVYTVDLEKRKLANQSSQSVDPKGSDQFDMIRYQWFKFASGISTRKWRASHYHSIIKEKMIKLQEKFPSINLLKKTENSGTTKYRIDYYFALGPVYWRKFWSRQKFDAKIRSRSLVDTLINEIVYDNYQGKDRKNVCTFLALGKTKISGKISGHGRVPMALIVKRLNDFSKEYPKTLTVSIFNHDFVFSFTSFK

SEQ ID NO: 2372 - protein, 312 aa, Copidosoma floridanum
CRAYTEICIRQKFYFGPKSFKLAKLFNKILRHKSNVARARKRFDYYIKKSRKTSTLAKSVVYGPNLPKRLIKRNKHGKQPRNRNKKKFVRDSKRKESSEKNKVDNDGTKEDRSDIRKKMRAQVALFKSEPALIAIGDASISKFVKGHRMHALGKIFDEVSREVATNDVMILRKVNEFRTTVICSHCGSFALVAPSPGRFIYCHKCKITMHHDLNGARNILLKALVDEHLLKPSQVGNYGNFAQTFAKPRNECEALRQVFKTVLFTLLSCLVVEYQRKLVICSFNESCASVGRRREIVVVLGNGDKQLEALHR

SEQ ID NO: 2373 - protein, 206 aa, Copidosoma floridanum
SKEEKNNLESILGSRALAKCFVKRLRLFVRRQPIAERRSIVSLKYDRFVQTRIAVLKIVNKILFRDAPKGQRSDVAPSFISIDGAKISGAAKGYARTPQQLLYQRLCEVARQSRKSAIVITNEFRTSRLCNVCNGLCHMQKRNRDVKNIVHNHRNVFSQKSEGRTHCGTSGNRDVRSGHNLLMLGAIRCGLRSTNFIPKYRNFHRD

SEQ ID NO: 2374 - protein, 208 aa, Auxenochlorella protothecoides
NSPSSCRCPTHKTASTEVLLSRVVRIVPNLRQGLAWHRDEKPFRKVRHQAYVGRERAITRLAEQFRAPPGMTTIVGVGNWSAQDRGGIMRGTPPGPWICFLRRLRRVCRVVVVDEHRTSKLCCACHTSLHAHQYMRVRRGEEKLVDVWDTKRCTNKGCNVNVVNRDVNGAANILMLAKCFFKNALRPTAFGGPPVSSSPAHPPPLVRH

SEQ ID NO: 2375 - protein, 220 aa, Auxenochlorella protothecoides
TASTEVLLSRVAWIVPTLRQGLAWHRDEKPFRKLRHQAYVGRERAINWQAEQFRAPPCMTTIVGVGNWSAQDRGGIMRGAPPGPWIRFLRRLRRVCRVVVVDEHRSSKLCCACHATLHAHQYVRVCRGEEKLVDVWDTKRCVNKGCRVHVVNRDVNGAANILMLTKCFFAGALRPTAFGGPPASPSRPPPPPPLVRRSRQPTAPVRSRLREAAVQPAQAR

SEQ ID NO: 2376 - protein, 313 aa, Auxenochlorella protothecoides
LPGTLASGAGVLAALFLGVTVDVVYTSSEVHPSFPPTHSPANHPHLPRSYNTTHPIPPTYTHLCRQDPPPDDARIDKYVGIDPGRTKMFTAVDEHADVTSLSSRSFTPCWGPSGGRRLLGSGTRRPHPMSRSCTSEWCLVCGVYAGTGPTGAGTVSRHPALLQLYQSPCSNPSSHRCPTHKTASTEVLLLRVAWIIPYQRRGLAWRIYKKPFRKQRHHAYVGRERAINWQAEQFHAPPRMTTIVGVGNWSAQDGGGIMRGTPPRPWIRSLGRLRRVCRVVVVDQHRTFNCAAAVTPPCMPTSTNRSATAWRSG

SEQ ID NO: 2377 - protein, 212 aa, Auxenochlorella protothecoides
SEGSSPPCDRAWPGTGTRSRFGRCATRPTSAGSGPSTGWRSSSAPPPGMTTVVGVGNWSAHDRGGIMRGTPPGPWIKSLRRLRRVCRVVVVDEHRTSKLCCACHATLHAHQYVRVRNGEEKLVDVWDTKRCGNKACRVHVVNRDVNGAANMLMLTKCFFANALRPTAFGGPPASPSSTLPPPPPPLVRRSRQTTAPVRSRLREAAVQPAQAR

SEQ ID NO: 2378 - protein, 238 aa, Auxenochlorella protothecoides
PEHTYQALDSSSRLQHPSFRQVLLSRVVKIVPDLREGLAWHRDKQPFRKLRHQAYVGRERAITRLAEQFRAPPGMTTVVGVGNWSAQDRGGIMRGPPPGPWIRFLRRLRRVCRVVVVDEHRSSKLCCACHATLHSHQYVRVRNGKEKLVDVWDTKRCVNKGCRVHVVNRDVNGAANMLMLTKCFFENALRPTAFGGPPVSSSPALPPPPPPLVRRSRQPTAPVRSRVREAAVQPAQAR

SEQ ID NO: 2379 - protein, 238 aa, Auxenochlorella protothecoides
IPTGLAPVAQLLPADGISLAQLVASIGEPEGVGGWEGGRRRSRGSTKCCGTKCILKKTLELHQDVDRPVDVAVDNVDLAGPVGAPLRVAQFRPRHTASLLLYQTPSSNSPSSRRCPTHKTASTEVLLSRVVRIVPNLRRGLAWHMHENPFRKVRHQAYVGRERAITQLAEQFRAPPGMTTIVGVGNWSAQDRGGTMRGTPPGPWIRFLRRLRRVCRVVVVDEHRTSKLCCACHTTLVQ

SEQ ID NO: 2380 - protein, 290 aa, Auxenochlorella protothecoides
WRTGGVGGGGKEGKAGGPPKAVGRGALSKKHLVSIRMFTAPFTSRLTTLTLQAGLTHRLVSHSSVHVSMPSLQVCTKPPPQTPPSSHRCPTYKTASTEVLLSRVAWIVPTLRRGLAWHMHEKPFRRVRHQAYVSRERAITQLAEQFRAPPGMTTVVGVGNWSAQDRGGIMRGTPPGPWIRFLRRLRRVCRVVVVDEHRTSKLCCACHATLHAHQYVRGCRGEEKLVDVWDTKRCVNPACKVNVINRDVNGAVNILMLTKSFLANAPRPTASGGPPASPSFPPTPHPPVRH

SEQ ID NO: 2381 - protein, 383 aa, Auxenochlorella protothecoides
APASNATAPSTTPGSGRRGRGRSRQCKTPPHPERSPMPLGPGRGSSCHQHAIQPLPTMPLPIHCLHSGLLQFSVNESPVQSTWQAGVRSVLLRHTDPYWACAGCTAASRKRDLTGAVGCLDRRTRGGGWGGRCGRRRSRGSTKSCGTKCILKKTLEQHQDVDRPVDVAVDNVDLAGPVGAPLRVAQFRPQHTASLPLYQTPSSNSPSSRRCTTHKTASTEVLLSRVVRIVPNLRRGLGWHMHEKPFRKVRHQAYVGRERAITRLAEQFRAPPGMTTIVGVGNWSAQDRGGIMRGTPPGPWIGFLRRLRRVCRMVVVNEHRSSKLCCACHATLQAHQYVRVRKGEEKLVDVWDTKRCTNKGCKVHVVNRDVNGAANMLMLTKIF

SEQ ID NO: 2382 - protein, 264 aa, Auxenochlorella protothecoides
NSEHSGAPIPGRLDRPQTARGPGLAHAPEAISQAPAPGLRRQAAGHHPAGGAVPRSPRHDYNCRRGQLVGPGQRGHHAGDSSWAWAIGWPRTRGGIMRGTLRGPWIRFLRRLRRVCRVVVVDEHRSSKLCCACHATLHAHQYVRVPNGVEKLVDVWDTKRCTNRGCKVNVVNRDVNGVVNMLMLLKCFFAGALRPTAFGGPPAPPSPAPPPLRFAIRGNQLRQPDPACGKQLCNRRKPGSGISSTRAPHSRIGVVRECRSQSKN

SEQ ID NO: 2383 - protein, 366 aa, Auxenochlorella protothecoides
AIRSLPGLRRLHSCFPQAGSDWRSWLPRSANQRGWGWWEGGRRGSRGSTKSCGTKCIRKKSLEQHQDVDRPVDVAIDNVDLAGPVGAPLRVAQFRPRHTASLPLYQPPSSNSPSSRRCPTHKTASTEVLLSRAVWIVPNLRQGLAWHRDEKPFRKRRHQAYVGRERFITQLTEQFRAPPGMTTFVGVGNWSAQDRGGIMRGPPPGPWIRFLRRLRRVCRVVVVDEHRSSKLCCACHATLHAHQYVRVCRGEEKLVDVWDTKRCTNRACKVNVVSRDVNGAANMLMLTKCFFENALRPTAFGGPPASPSFPPTPPTPSGSPIEATNCASRIPLAGSSCATGASPVGIYLPKQIPSAHPFSPISLGYF

SEQ ID NO: 2384 - protein, 262 aa, Auxenochlorella protothecoides
CRGMPRRGRHCVTTPCIAPTVPTLVLKPPSPPCHYHRCPTYKTASTEVLLSRVAWIVPTLRQGLAWHRDEKPFRKLRHQAYFGRERAISLLAEQFRAPLRMTTVVGVGNWSAQDRGGIMRGTPPRPWIRSLGRLRRVCRVVVVDEHRSSKLCCACHATLHAHQYVRVRNGEEELVDVWDTKRCVNKGCRVHVVNRDVNGAANMLMLTKCFFENAPRPTAFGGPAASPSFPPTPPPLVRRSRQPTAPAISRPREAAVQPAQAR

SEQ ID NO: 2385 - protein, 257 aa, Auxenochlorella protothecoides
LVCGVYAGVCLAGAGTLSRHHASLQPVSTLLRNPPPPPLATTTGARPLRQRAQRCSCRGSRGSSPTCDRAWPGTGTGSRSASCGTRPTSAGSGPSTGWRSSSGPPPGMTTVVGVGNWSAQDRGAIMRGPPPGPWIRFLRRLGRVCRVVVVNEHRSSKLCCACHATLHAHQYVRVRNGEEKLVDVWDTKRCVNPACKVNVVNRDVNGAVNMLMLVKRFFAREARPTVFGGPPCSPPPNPRPPSTHTLVRRQRQPTAPA

SEQ ID NO: 2386 - protein, 201 aa, Sphaeroforma arctica
ERVDKEKSAKNVSMARLFERALRARVRRLHEVWLAATLALSSEFAYSFSTTAAWMKSELSNRTHCRAGILSLCTFHNKLIRATSSPKSSCTLVDLGDEKYTTCVLSCCGTRLHNVGCSKVLYCHRCRIFIPRDFNGAVNCYRLYIARKKLVPNDLINEISRPTTKPRRHGHLNANVPKSKFYLQICLLGRTVRSNRNRRAL

SEQ ID NO: 2387 - protein, 992 aa, Sphaeroforma arctica
SWIRALPQNILCVGNVPTLKLVVPPNQTRDEMIQRMSPTANDARSMPIVFKLDSAGCYRGRISFPGYISKPTVLPEIRNPSTKPPLMFELLEQADPVFETALIHSAKVYVGERETEPRHLSPRVQVVPSDMKTFEAAICSITGEETVASIRVFGQVLHDSIDAVTRYFRDRFDFSEFCALLDVCRGDEQWVTIVDSLCDKSPGRKYDDALLRRMVQFVTRNDPNGFCKFINSASGDYIDRRVHVWATLLGLESDNPTKTDLIRAVKTRGPPVENDDSGETKIKIKRGKRRAGPRSVASLPVATDLTYNDEAFTLQFRGKLIKWTVQQFQRCTGATQMQMNLYQVPKSAMEAQKLMIGSLVKVSVEKHERTLSVSIHRNFDESAVEERHEALDRNVLVKMYDSAPGITCVWIPQPSRSVSRIQASVLNAKFPPLPPKTTKDTIKPYYERVDDEINYVSNGVTTTVAKSAHIGSMMGNLVRVSGKHACIFKVLEGAIKSRSVSRLRWAFETTVTQLDYVGVEWKSIGNFTVARKMANARIRQQLETGERKANYRLEVCNTASYEYFNAKNTVLDRPPENVLPESKYLAVPCLAYHDIDPKTLNAAGKNSNIRLLDHNVVRHNVYNVDAKFQRAKMNFLGGPNVTRLQLKPLKVPAPQDEGSHFQLRTAHILIPRDPHGCERGLKLKTTWKKVATDALVNKDLFEKQMGCEVRACKHTTNARRGTPGQDVVSETGGVIGRRRLPVAADFPNGRLPFKLSESHKLTSYTISVIDLVDRDSDSAVVKGLGVSDVGISTAHSIYDPDNKRFWEFGRGATGFLCDTLAKRVDKEKSAKNVSMARLFKRALRARVRRLHEVWLAATLALFSEFAYSFSTTAAWMKSELSKRTHRRAGILSLCRFHDKLTRATSSPKSSCTLVDLGDEKYTTCVLRCCGTRLHNVGCSKVLYCHRCRIFIPRDFNGAVNCYRLYIARKKLVPNDLINEGGLGELNAMTLLR

SEQ ID NO: 2388 - protein, 470 aa, Branchiostoma belcheri
NMACYRPKQSILWDTADVHFETDNGKHDAKRGAITFYRHYARESTTRQLNPRCQMSRSITARELWVRRQNKEPYDPSPTTTTSTTTTFVVGVTLTAKQKESHKIAAKMAAYVYNCCVNKTSRGKGSKLKETLLRELCDSSTPPDWVDRQVHHIIPAPPKETWAKFKLERKATVTRFLNDRERYGNRPACRRVGDVDIPLENIRHDTENKVRVIGLGIVSLHKPLDKIPPFEREGICLSRKPSGRYCLNVPCDPSYTRKPLGALSRHAVSIDPGYRAFLTAYSPTQKQCWRVGTPQQQRDLLKSKIDKYWAAKRQRVRALKLEHFQEADDRLRQMNRLEWELKLKLRHEHNNITSQLVREYGLIVLGKIDTRDVAKQNLLEEQKFNVKILDHEAFKRRLQDRARQTGCIVVVQSERYTSVTCGYCNVKQDLEASTVFHCEKCGYRVDRDINGARNIMRAFLGEIEQGKQST

SEQ ID NO: 2389 - protein, 227 aa, Phycomyces blakesleeanus
RRYTGSDRRGCHLEKPNIRARITKIETNFLSVKTVDFEKWKNYIVYASNHASSLFGLYNERSASFRFHNYQGRQRSYKEMTNILLNGGENYNKSKRLKTKKKIERKTKTKHQIQNNDKSITSLGKKPVRCKKFKFKSFRCVPLVVFSDRMKNRGIVRIKDHVSGTTAMLEIELKIRSRTFQAAVVGIDEFRTSRVCNFCKEMSLKATKLPSDKCTQSILDCKNCRIL

SEQ ID NO: 2390 - protein, 233 aa, Rhagoletis zephyria
AKVCDFVRIRLLIKIRATKYENKIGLDPGCRLILAGIQNNVPVKIKNSYYQHLSGFYSRKIKLNKYTKDFTTNSELSANSSNFKEYCKFELEILEQKQKIASQRKVARLKLKKYICRQKACNQIAQQLVPNKEEKTLICTGSTEIASNSPMRGYRRVPNRLLIAALSQRTADILMVNEFRTTKLCAKCYNVNLTSKSPHRYQFCPNCRTCWNHDVNAGKNILYLGECIINQEQ

SEQ ID NO: 2391 - protein, 298 aa, Rhagoletis zephyria
IRFVRITSKFRSHFIINQVYCQYYIKIPSSLYHKLGFSGLHQNSVVIILLYYCEGNLIKIRATKYDNKIGLDPGCRLIFAGIQKNVPVKSKNSYYQHLSGFYCREIKLHKYTKDFTIQSELSANSSNFREYCKFQLEILEQKQKNFSQREVARLKLKKYICRQKAFNQIAQQLIPNKEEKTLICIGSTEIASNSPMRGYRRTPNRLLITALKQRHADILMVNEFRTTKLCAKCYNVNLTSKSPHRYQFCQKCRTCWNRDVNVGKNILYLGECIINQEQKHENFHKDVIIPFMTKNLYI

SEQ ID NO: 2392 - protein, 218 aa, Rhagoletis zephyria
NGRGLRRFLRGALKLTCSRSVGQSITPFIKLKNLYYQHLSGFHSHKINLHKYTKDFTMQSELSANSSNFREYCKFELEILEQKQKIFSQRMVARLKLKKYICRQKACNQIAQQLVPNKEEKTLICIGSTEIAANSPIRGYRRTPNRLLIAALKQRQADILMVNEFWTTKLCAKCYNVNLTSKSPHRYQFCQKCCTCWNRDFNAGKNILYLGECIINQE

SEQ ID NO: 2393 - protein, 211 aa, Rhagoletis zephyria
NLGVGSFWLVSGTMFLSKLKVHTTKIFLVFFYRKNKLQKYTKDFTTKTELSANSSKFKEYCKFELEILQQKQPIFSQRKEARLKLKKYICRQKACNQIAQQLVPNTKESTLICIGSTEIASNSPVRRYRRTPNRLLLTALKQRHADILMVNEFRTTKLCATCFSVNLTAKSPHRYQFCPKCGSCWNRDVNAGKNILYLGECIFDQHENLKK

SEQ ID NO: 2394 - protein, 203 aa, Rhizopus microsporus
PLFREFFCACCVSLFVSKSIFLLLEMLNIMEDEEKRRRGIRKIRKLPQMLQTTCQQSKQLFFFGWLNKWKLLSYIENNRKVSLIVFENRMFEKDLVKIKGARCGVIGKLWKDVKKREKEDGLITITVDELNTSKACNNCEKIILEPAKRTRGNSILVCKTCNTLWQRDMNAAKNMMTISLSTWRGDGRPIVFQRSNENSNRAT

SEQ ID NO: 2395 - protein, 238 aa, Rhizopus microsporus
RHQISQSLQKPAKKDSVCMMILQVTIMKMPGKCKVWFFTCLFKQAKFCRSSKLKFQCYIRKQKGVHEICKGLMYGSVKYNKKSSTGVKTSSAENESKYCPPAPLDHPDKPRKTIIAFGDGMFNNSLRGNRGAPVRLIKKALQKYCGNQFEIRMVDEYLTSQICNRCKNRNMDNVVTEKPKRRVHMILKCKQNTCNIVWNRGIMAAYNILDMFLFAIRNNSQRLDVFMRQGTFNDQSSV

SEQ ID NO: 2396 - protein, 218 aa, Rhizopus microsporus
RIPTENKNKLLSIADKILERCHSSQGPSDEELEDKLDKFKKDTKSLLQTLQLLPLRKMRFSSKLLPQQNDDKLIKSLKKKSGHDAVLVLGDWFAANVKFHEPIRNKGLIQMLKKSGFDLYLINEYKTSSLCPDCERKLEKFKIVDSSGPYRRKDVSKVKCNGLLRCKDHSPNKLWNRDLAAVCNFRKILMSLRETGERASCFRQSQPFTKPSHKRKQG

SEQ ID NO: 2397 - protein, 199 aa, Rhizopus microsporus
LRNFYNSKKRVKLKRTCEIQNDHFRRRLYAKERTFLIGKKGKEHSNIRLMNTNYYINYLVKGRSRPCPIMFIRDRGMGVGSTIKGYRRYDGKWKQCMHGMNINVCITNENMTSQTCMYCFSKLDHSIHRKVIKGKEIKTKAKGAFLRRNLDCVLVTKKLPNLEITCLPLPLVFLAFAHCSFRKHFLNYLLKSATVALNL

SEQ ID NO: 2398 - protein, 309 aa, Contarinia nasturtii
VNLETNAKRFHWNTGHKTRNAKAKRWTNRFVVVERNDRNDRRLYPTMPSPLGIHWVHYTHHRLKMMKKGMDVYATTKYTRLRFEKYIRTVRASDEKAGELVNYKPSIIFFGAADTPPNSPIRIKRHMRCPGSRKLCASFKKRGNCVIVFVDEKFTSQTCARCIGRFDPRTKSHRFKVCQNCRPRFEAMLPSMVVAKKGRRQLRLDRLQIFLLQLEAIENATEPDQQKADSLLSKVLIHTYEWLINPVNGEMENVVAEQSNELYQESGWYQQPSVRKTVWDRNIVAAKCILIKGTYEFKLYHETTYFFAY

SEQ ID NO: 2399 - protein, 248 aa, Contarinia nasturtii
FQVNMKTSSKNNHWLTKYKMRDKKAKRWTKQFTLNEQNDRNNRQLYRRMPSLWTDYLHHRIKMLTKGMYVYTTPKYARLKFDKYVESNRTIDKLCDTLVNHQAALTHLGNANMSPNSSIRIKKHVRCPGTRKLLKGFRKRGNCVVHKVDEYFTSQTCAKCGGRFDPSTRSNRFKVCKNCAPVPNSIMANFLSSKIVAQLSKRRLKNNKVYIGESLTLFLARGGMTEHDFDIIADRLLSKVAVYPKNGK

SEQ ID NO: 2400 - protein, 203 aa, Contarinia nasturtii
VNLETNAKRFHWNTGHTTRNAKAKRWTNRFVVVERNDRNDRRLYPTMPSSLGIHWVYYTHHRLKMMKKGMDVYATTKYTRLRFEKYIRTVRASDEKAGELVNYKPSIIFFGAADTPPNSPIRIKRHMRCPGSRKLCASFKKRGNCVIVFVDKNFTSQTCARCIGRFDQRTKSHRFKVCQNCRPRFEAMLPSKYCSALLPSTAY

SEQ ID NO: 2401 - protein, 309 aa, Contarinia nasturtii
VNLETNAKRFHWNTGHKTRNAKAKRWTNRFVVVERNDRNDRRLYPTMPSPLGIHWVHYTHHRLKMMKKGMDVYATTKYTRLRFEKYIRTVRASDEKAGELVNYKPSIIFFGAADTPPNSPIRIKRHMRCPGSRKLCASFKKHGNCVIVFVDEKFTSQTCARCIGRFDPRTKSHRFKVCQNCRPRFEAMLPSMVVAKKGRRQLRLDRLQNFLLQLEAIENATEPDQQKADSLLSKVLIHTYEWLINPVNGEMENVVAEQSNELYQESGWYQQPRVRKTVWDRDIVAAKCILIKGTYEFKLYHETTYFFAY

SEQ ID NO: 2402 - protein, 236 aa, Contarinia nasturtii
ICTTRVNDQIAVCVTNNKPSLVQFGAWAMKPDRPFGIKKRKRCPGSRKFRVSIKKLGHSEVEMQDEWGTSQTCANCQERFPRHTKDDRFKVCYDCRAKKIDGLPDSVAGLPDIIMSTVNRRVLRRKRAIIKRQIIDGNREAVNEKLRTGRLMSKVKVTYKNWPLNVDDDDVVPQTVTWHRDIVAAKCIMLKGMNQLETEYSLFNVFTLNYIGLCRIFDVPLPVSLLRPPDQNNNVN

SEQ ID NO: 2403 - protein, 204 aa, Contarinia nasturtii
RGLPANSPIGKKKTKRCPGTRRLENSVKKLHHSDVVRVDEAYTSQHCASCMVKFPKETKKFRFKACKNCPRNAPIPAEIAKYMSLSPLIVSKKGSRRKTLDRCVKKLIDRGLVNQANLPKESKPERLASPKMYYWKNWPLNSVNALQMGDDAANTNDHHQQHQQQQPEQEHKYRELRFTIVWHRDIVAARCIMYKGTTFCSYLF

SEQ ID NO: 2404 - protein, 227 aa, Contarinia nasturtii
SLHEVTSLKSNQVDDNIALTVTNNMPSIIIFGASEMPPNRPFGLKRRKRCPGSRKLLVSVKKLGHSVVKMEDEWGTSQTCANCQERFPANTKPLRFKVCYGCKAKPIAGLPDSVASLPNIIVATVSKRALDKGRKEIKLRIRNGNHQDVARILRNGRLMSKVNVTYKNWPLNVQGDVAASQTVVWHRDIVAAKCIMLKGMNQLKIESIHYLMFLLLITQDFVGCLAY

SEQ ID NO: 2405 - protein, 239 aa, Contarinia nasturtii
RYARLSLDKYIDSQHETDWLAKSLTKNKPSLFTIGDADLPANSPIGKKKTKRCPGTRRLENSVKKLHHSDVVRVDEAYTSQHCASCMVKFPKETKKFRFKACKNCPRNAPIPLEIAKYMSLPPLIVSKKGSRRKTLDRCVKKLIDRGLVNQANLPKESKPERLASPKMYYWKNWPLNSVNALQMGHDAANTNDHHQQQQQKPEQEHKYRELRFTIVWHRDIVAARCIMYKGTIFCINLF

SEQ ID NO: 2406 - protein, 264 aa, Contarinia nasturtii
YFSNINCSVRFSGHLYVESNRTVDKLTGNLVNHKAAIIHMGNAEISPNSCIRIKKHVRAPGTRKLLKGFRKRRNCRVRKTDEWGTSQHCAKCGRRFNPATRSHRFKVCENCGAEPDSIFAEYLPSKIVAQRSKRQLRYNKDDVELNLMRFWAEGLMTEQEFDIAAERLLSKVAVYPKNWQVNTVSGKLEYAQVNADAPYATVQQPYAVDDENELEIEDKQLLMAVHKTSWDRDIVAAKCILIKGMCIRNLHLHIFYILNEMHTI

SEQ ID NO: 2407 - protein, 223 aa, Contarinia nasturtii
RIIGWNEKMWLAITHRNILKTPENNTKHAILLGNLAETKRKEAKNLAGRFDIEEKNHLKSYPFSPPRNSTWQWYIEYRIKMLRKGMSAYATRKYSRIDFDHYIKSNNVNDKIAVTVTSNMPSMIIFAPNRPFGLKRWKRCPGLRKFLVSVKKLGHSVVKMEDEWGTSQTCANCQESFPVNTKSHRFKVCYGCKAKPIAGLPDSVASLRDMIVATVSKRALLNR

SEQ ID NO: 2408 - protein, 312 aa, Contarinia nasturtii
FYQFIFWKIYKNRYIRNHERERKAALRRGERTELREYRNFTVVPTSSFERHYIRIDRRVFYRMLRQIECPHRLFRNKNGGPKQEKDIKSKEWDVLWRLYFDIDSIEREPRNKNDGHATIKFDNSIQTDGVGMSFLMERTKFIIEKDDEERMKETQEMLLKSQQVYGLDPGLRLVIGGVRINNFNDRNNRTETIIRLTSGQYQDMINSSRRNKWRKKLTIEIDKKMRLHRESFDEQPGPRAEDHKSYADHILRHFEEKFTAYKQYEYALQAFLQYIDTNRALDAYATKLIDGKQTFIFEWVRIKVSSNFHIKK

SEQ ID NO: 2409 - protein, 311 aa, Contarinia nasturtii
GFVSTIGSMETDSRRIRMTATFTKMEQSDREENYLVIPSPRGNGWIYYLDHRLKMMQDGLTAYARRGYARLSLDKYIDSQHETDWLAKSLTKNKPSLFTIGDADLPANSPIGKKKTKRCPGTRRLENSVQKLHHSDVVRVDEAYTSQHCASCMVKFPKETKKFRFKACKNCPRNASIPPEIAKYMSLPPLIVSKKGSRRKTLDRCVKKLIDRGLVNQANLPKESKPERLASPKMYYWKNWPLNSVNALQMGDDAANTNDHQQQQQQQPEQEHKYRELRFTIVWHRDSGYKHLPINSRKIIHAPKIREDSVF

SEQ ID NO: 2410 - protein, 265 aa, Contarinia nasturtii
QENNKISNPRFHWRTEQKKRDRKADRLSCWYVEEEQLDLRSYPFIIYARLELDHHIKATKTSDKVAMRITNNKPSWIWIGAGEMAPNRPWGIKKRKRCPGTRKLAISFKKQEHTKVSFQDEWGTSITCANCHERFARETKNHRFKICRNCIPKPIVGLPPIIVTNLSRQELKKERIVERAINPDRENIERLVPKIKVIFKTWSLTREYHELGDAAPEDMIEHVVIWHRDIVAAKNISFKGMCIIVYCINIKLRIESRALGVQCSY

SEQ ID NO: 2411 - protein, 229 aa, Contarinia nasturtii
VVFYLFYIKLYHICSIGNFFYNETINIFFFLLIPTYKENIKVSSQRYHWEAKYPKRNKKMKLFRREFTEFEQNDLKAHPVMPSPRGSQWLPYIRHRLRMLKRGMETYDSRKYARFRFDKYVEKNRAMDNFVNRLTKNKACLFYMGAVEISPNLPIKIKKHVRCPGTRKFVKSVKKKRNCVVRYVGEDYTSQTCPRCGNRYPQHTRSDRFKTCHNCVPEPAFQLPIIIVT

SEQ ID NO: 2412 - protein, 263 aa, Contarinia nasturtii
PWKSYIEYRIKMLRKGMAAYATREYARLDLDHHIRSTRVNDQIAVRVTNNKPSLIQFGAWAMKPDRPFGIKKRKRCPGSRKFCVSIKKLGHSEVEMQDEWGTSQTCANCQERFPRHTKDDRFKVCYDCRAKKIDGLPDSVAGLPDIIVSTVNRRVLRRKRTIIKRQIIDGNREAVNEKLRTGRLMSKVKVTYKNCPLNVDDDDVVPQTVTWHRDIVAATCIMLKGMNQLQTEYSLFNVFALNYIGLCRIFDVPLPVSLLRPPE

SEQ ID NO: 2413 - protein, 234 aa, Contarinia nasturtii
IFKENITIPNTRFYWETRQKRREKETKKLAGWFDIEEKDHLKTYPFGPPSPRNSTWQWYIEYRIKMLRKGMSAYATRKYSRLDFDHYMKSNQVNDNIVVTVTNNLPSMIIFGASETPPNRPFGLKRRKRCPASRKFLVSVKKLGHSVVKMEDEWGTSQTYANCQERFPANTKPHRFKVCYGCKAKPIAGLPDSVASLPDIIVATVSKRALQKGRKETKRRVCNGNYQNMGEINY

SEQ ID NO: 2414 - protein, 323 aa, Contarinia nasturtii
FFVSFCILKENIIIPNQRFHWETQQKKRDKEAKKLAGWFDIEEKEHLKTYPYRPPSPRNSTWKSYIEYRIKMLRKGMAAYATREYARLDLDHQIRSTRVNDQIAVRVTNNKPSLVQFGAWAMKPDRPFGIKKRKRCPGSRKFCVSIKKLGHSEVEMQDEWGTSQTCANCQERFPRHTKYDRFKVCYDCRAKKIDGLPDSVAGLPDIIVSTVNRRVLRRKRAIIKRQIIDGNREAVNEKLRTGRLMSKVKVTYKNWPLNVDDDDVVPQTVTWHRDIVAAKCLMPKGMNQLETEYSLFNVFALNYIGLCRIFDVPLPVSLLRPPD

SEQ ID NO: 2415 - protein, 270 aa, Contarinia nasturtii
KDWLAKKITKNEPSLINIGAVDMAPNSPIGIKKGKRCPGTRHLQCSVKKLGHSDVHKVNEDFTSQHCANCQKKFPIQTQKYRFKVCHCTRDAPLPQEIEPYISLPRLIVTKKSQRRKKKDSCVKKLIAKGIMDPANQPAEFQPGRLESKKMYFLKNWLLNPVNAIQMGGDADKYPEQQQQQQHQKRFCTVWHRDIVADRCIMYKGKHCNLFGIFSNNLNCLLLITGLCYIFNLKCTTRMSEHQHLQDHHHCVEDNQHAEEPMQTLFHIND

SEQ ID NO: 2416 - protein, 273 aa, Contarinia nasturtii
SSLPLDRASDKIAASLTKKKSALVFIGAAQIAPNSPIGIKKRLRCPGLRRLLNSFKKLGNCIVRLVDEYNTSQTCAKCFRPFDRRTKSDRYKVCQHCIPSEDESSQWNLPNVIITMKSNRVYQQLRKYAVDFVNRLNAANPDHIPMDSDGLVSKLQVCFKNWQLNTGIWKDDRAPFQLKTVWHRDIVAAKNIMYKGEKISLKLKMFKNVLANNLLFTILFLGLCTVLGLEIHPQLLRPQNQNAAVQNQAADDEDSSDDEDYVYVLDVSDDDQF

SEQ ID NO: 2417 - protein, 287 aa, Contarinia nasturtii
KANKCMVSILDYGGVRINNFNDRNNRTETIIRLTSGQYQDMMNSSRRNKWRKKLTIEIDEKMRLHRESFDEQPGPRAEDHKSYADHILHHFEEKFTAYTQYEYALQAFLQYIDTNRALDAYATKLIDGKQTFIFVGDLFIAADSPARGYIRSKVRDLFEKLKRRRKCTVVEVDEFRTTKLCSLCFRELEKPTKRGKVKEKYRYLTCHGCEPLCGENVLGKAQGPIESRKSNRKLTQQRKHRPRTDGPRMASKFRKYEEKTRIGRTITWNRDANAGRNILYKGLCLLN

SEQ ID NO: 2418 - protein, 240 aa, Contarinia nasturtii
ICHLIMNESDCEYNVVFVVLILLGEFAYIQQAISLDKHIESVRAIEKTACKMLLNQPSIFYMGASGSTPANSPIKIKKHVRCPGTRKLLAAIIKRGNCIIRMVDEYMTSPHCLLCFKRFPQATRRDRYRTCVGCVPNPVVGLPTLIVTNVSKRLLQMRRTIERMWREIRDMGDVIAATLRDGSNAGRLVSKKQRFFKARHRDIAAAKLILYNGMESIEIDTNCESIVIHVKCFCYISFGR

SEQ ID NO: 2419 - protein, 214 aa, Rhagoletis pomonella
NRFNKTKYKNKIGLDPGCRLILAGVRNNVPVKIKNSYYQHLSGFYSRKIKLHKYTKDLTIQSELSANSSNFREYCKFQLDIVQQKQQIFSQRKVARLKLKKYICRQKACNLICIGPTEIAAIWPTRGYRRTPNRLEIAALKQRHAGILMVNDFRTTKLCAKCCNINLTTKSLHRCQFCPKCGTCWNRDVNAGKNILYLGECIINQREKHLNFSK

SEQ ID NO: 2420 - protein, 218 aa, Rhagoletis pomonella
ILGVGLFWLVSGTMFLSKLKIHTTKIFLVFFSRKNKLQKYTNDFTTKTELSANSSIFKEYCKFQLEILEQKLQIFSKRKMAQLKLKKYICREKACNHISKQLVPNTKESTFKCIGSTEIASNSSIRGYRRTPNRLLLTALKQRHADILMVNEFRTTKLCATCFSVNLTATGTNLAQNVVAAGFETSMLGKTFSTWENVSSINTKNTKILKNKMSLFLL

SEQ ID NO: 2421 - protein, 199 aa, Rhagoletis pomonella
LASRTMFYSRKIKLHKYTKDLPIQSELSANSSNFREYCKFQLEILEQKHKNFSQRKVARLKLKKYICRQKAFNQIAQQLVPNKEEKTLICIGSTEIASNSPMRGYRRTPNRLLITALKQRHTDILMVNEFRTTKLCAKCYNVNLTSKSPHRYQFCQKCRTCWNRDVNAGKNILYLGECIINQEQKQKRIFTKKMSLFHL

SEQ ID NO: 2422 - protein, 404 aa, Rhagoletis pomonella
YFKFEKDKKKVYDTLSYLFDKNCKNNADEELLQRMRVELHWNGNKLHEIGNVKLFWSSIELFFNLQRYNEKNEIKNCSLIPQLKHGLHHVRYDRFEFHQLLCRLKLFKGPFSSFDKSEFGKYFKIPSTYTKTFSSLQTDGVSISFCMEKQIKVQNETKLVKKRKLKPNETDCTGDLIKIRGTKYDNKIGLDPGCRLILAGVRNNVPVKIKNSYYQHLSGVYSRKIKLEKYTKDFTTKSELSANSSNFKEYCKFELEILEQKQQIFSQRKVARLKLKKYICRQKACNQIAQQLLPNKEEKTLICIGSTEIAANSPIRGYRRTPNRLLIAALKQRQADILMVNEFRTTKLCAKCYNVNLTSKSPHRYQFCPNCRTCWNRDVNAGKNILYLGECIINQEQKHDNFHK

SEQ ID NO: 2423 - protein, 269 aa, Rhagoletis pomonella
IFSNTVWRCSAGKLKIEPVITKSFSSLVTDGVSVSFCMEKKIQNDQTKGKNRKLKPNETDCEGDLIKIRGTKYDNMIGLDAGCRLILAGIQNNVPVKIKNSYYQHLCGFYSRKIKLHKYTKVFTTKIELSANSSKFEEYCKFEHEILEQKQRIFWQRKVARLKLKKYICRQKACNQIAQQLVPNKEEKTLICIGSTEIAANSPIRGHGRTPNRLLIATLKQRHAYILMVNEFRTIKLCAKFYNVNLTAKSPHRYQFCQKCGHRRSKNEI

SEQ ID NO: 2424 - protein, 254 aa, Bradysia coprophila
LIPTSGTENYKTKRLGLCRHLGSLGSLGWLRQREAENKITPQQKKMLHRREGFNKADYRHRMELSKKSWNYLDYIKFELKHLINVQNMMVNPVLAHYKLKRSIFIRKTAVDVAKQLAETGQVVPSRPVLYKQEHKSKSPEQRQANKGKFETAKQTTLIIIGNFKMRPDSPMKCHPRSAVDQSHRELRRRCVLLVQNEHNTTKACYLCRNKLEIAKPPERFAQCRCNGKRNVTDTLFMISSFYSILTQLAFPLPM

SEQ ID NO: 2425 - protein, 234 aa, Bradysia coprophila
FTTLLCLLCRKSSPWGHDPRTCESVSISLHESIRQRFVPELLPGITLTAARRIDHFSFPSYTTNTYESLAFVLSGAEFSPNSPIKGHVRCPSIRTLPRAVARYKNTDCIYVDEFHTSQRCGLCLTKFPKSTKFFRFKKCGHCGDTPELELQRVPTIITRESKRNRQHHRQQTRTQAQRSRRFLYDGSTEIKNTTWHRDICACSCIRYKGIFQLGNLIFQHDPNFHIYRIISFVR

SEQ ID NO: 2426 - protein, 215 aa, Bradysia coprophila
PSWKPLILSMALIMGTNSTSTSPPTVFSVSVSMKRRKRLSTMCDDKFLQNVRNDLHNGEFDHIVALDPGARLSFAGIRRDCTTNQETTIRYSSSSYRYDSGQYNLNAKYRAITNPVLKKVEALRNNQPHKASSMANADTFVQFNLSIFKELNEVMLSKSLAKLGFRRYVCRQKAISKLAQQLAFGTEKCNEIRNLRAERKKARRKKRDIGSDCHP

SEQ ID NO: 2427 - protein, 251 aa, Mercenaria mercenaria
DRQDSERKVRLTYTMRSNLHEEQTVRRTIRFYVWHRSWRKNVLDNNKRTKKKGEKWHRKKKSQRRVGSTIDKIDGLHAKIDYVNSKMQAAIRRKQPQAKEDRQRQLQKVYYQLGNVIRWVHLRCTSNLMQYSYVAIGEIGIPSIIRRQCNGKRRRINKKSVRHLTVWNHCKFRERLVYRAKGTKTNVIVQDESYTSKTCSECGTINDKLGGSETFKCINPSCDYITNRDVNGAKNILRKSLGIGSIKTYRA

SEQ ID NO: 2428 - protein, 232 aa, Aphidius gifuensis
FEITYLHTVTFVASIFCFFFLLPILKKFHFKNKKELIKKNNSLECFVLNKPENYLLAAKYRLQYYKVSKLVFTSRRYARLQFDKYIKTNSAVSKEVNYLVNGNYSEKKTDQLSLKTLICSGQFKMSSGLKGYVLSQSSLLQHKLMNHPKVIFISVDEFRTTILCTNCNKLCSTSKSPHRYQHCSNCNIIYNRDINAASTILKLAIEKNSNGKIQLLKIMSNFSRSTKLVESI

SEQ ID NO: 2429 - protein, 934 aa, Aphidius gifuensis
IIIIIIFELIFSTTSVEWLEKNQDWLEKDETAVKDIIKLDPGYVEQIQREKQELQLQQQQQQQIQQQQQQQQQQQQQQLENNINIPPPPPPPPPSSVSSKKSRSTVKSKTTTKAKSTAYSRCSSVKTSTTTSSKRQESAGDKKFKGIPNLRDQTIQMSLKKLLGISGNNTNKKKTKVYDHIIDSVRKISEWCVACSFFLEFCINHKNGWLLQNIIKNNPRKSITAVFNILREDPKKIKYDEELVKLYKEYLKLRPETINPNTQKIPRKFDTSGISKIVDDVQKTYVTIFETNIKTHGYKRMCKYVFKQIKLQEEEKKENEEEEEEEEEEKTKYYYHNKSRNIMKNLITNNIHPDMPLFKKFKNLNFKEFNNGNKWHFFLPFFLELQKISPDFRVVPIYKFGWKHIRISTSILRQMKQKIDKKTEEEVKKIDDEQLWNDMMNINPTTQLGKKFYLTATTNGVEISLFLKVKKTTATTSVEKVENEIDSDIITDPDKMKKITIISRHTPADIKKIEFTNFVSIDPGERTPITAIFFNDYKDLGNKDKERRYCQKNSTLFYKSGFYKNEKKQKKITSTADKRIQNIVKKKEFENLNLKNPDDYIRNLEFRLLCYYDYQHIYGQLSIVTLNWTKKIQRRRVLDQQANFLAYGYYTKKSLKKPIKTDEMKKTKNQKLHGNKGKKQNAKGGNGGNGGNGGGNGEKTKNETSEENEKKKQKAENEKTKSELKKAAKLKKQQEKAAEHKKKLNDDQKSRRKKNRDREQKKKKEKKKSRKEMIEKKKLDFEKRQKEYQEMKKQKRSLYLERKKKNNNNDNNNNDNKKKNIKWTVIFIGQSKIMPNIKGYRKPPLMKLEKRLLLMENVVVIRVDEYNTTQNCSLCCKKAVVGKYGHRYTYCTHCHVTWHRDINAARNIARIGLAYSGINKNDSPDNYPTFERKG

SEQ ID NO: 2430 - protein, 1012 aa, Aphidius gifuensis
VSQLHKKEQTSCQLIRKILHFIICLSYYFYNNHFYLKKKKNFSAAVGSGGKRQRTGNNTNTTSTTSTTTTTTTARRSLFKVPERPSLNDSSSNMSLNNSTASNSSRSRSQSPSLSTVSASSRTSSQASICCNNYGTDHTNRSSKRCLNHRLPIKERAMKKLNQNKEKPTNYETHTIKMGFKSICPDENIRQEIYNDVELMSECIIDFSIFFEFTIRHDKQWMVQYLENHDKEPNLCLIAMHLKNNYSKKNKGIVELLDEYNTLYPCSNKHQYQFEHHSALIKNQVNLFQVNFKTNIVEHIRSRVNKYYCKVYNRDYSKINKLLDDLFLRNIHPKNDELFNNEQFKNLDFKKLYDTGDKWWKFISFHLKLQLHVDFVLSPINKLGLHSISFTTEAVHQLFRRKKFINNEKTLVNASYSIATNGPDDNYNEYEYENLWKKFIQIPPKYKFAYYITTDGISASIQCFKKINEKKLIFNIEEKNYQDIVNLKISDVERELLIKELNKLYKRFDGLDPGLRELFGGIIIQDFKDFFDKDKQERFKIKSNTYHRISHFYEREEKRKKWTQIYEETYKSLLKENNDLLKKDDPDKIFKLNDIKNYIAITKYRLGLFVQGQIILKARKIARLKWDKYINTQKTNDMIVNKLLFGEFVGDKQKLTIENNKKKKLDNKKLKRQRNQIKFKKKYDEKKLKRKKKLEEKIKLKTPEQQQQQQHNNNNNKLNGKKKRSILRDKNNTNIEFHDAALRQAMKDEEAERIKKKIEKLKARRKKKLDKRPKRIKKNKKKADNTTTDAAAAIADVIAGAIADAAAVDDAVVDNIPDENGGGGDNDNVKIKKKKKKSIKIITDKFNNNKRILIALGDTKISKWMKGYRRVSFKGIIRALYCRARLSKSKIDIVDTDEFNTTKLCSACNSVCLKSKSPDRLVIYLFINFILINLFIYLFCFLRYLLCQKQDCKVTWNRDINGGRNILILALIRRGLIPANIIPHFSNFKKGARTLGPSGVPRSSASSRWSWT

SEQ ID NO: 2431 - protein, 775 aa, Aphidius gifuensis
IFQRNFVSAETFGKIRNLSTVSFRFRFASVEVNFVSFCFEKPKRNENEIISVSGPALDDVDELSKMFIEFSYFFYFCLQHKDNQLIDEISKLNNKQLCLNKYLSVLTVLENRKKKKKEKSCIDDLFEEYMKLRESAGVEIPLYNVSYRSQVMQLNLRQFSTNFVTNITRNARPRVGKYLKMEKKIYNRKKRKRILDDLFYRNIKPKEPNDDTKIMELFDNDLDFTKIKFKWFLFLNFFKQLSNVEGMNFPLSPIMKPGLKHILYDTQSLWQMGRKLFPDQFESVWSQQMSIPYAYQKIWSFFFKIKKKYKKKHFNSTITTNGITVTLHLQRQIVKKKITKKKLKTTNKVGGNTSIDGKSKVNDDDNDEDADDFDDLNLFNYNDFDDDDDDDDDDGHNNKKNNIHNVNDQIYGRKGGLDAGKKLSYAAVFVDKLEDIGVKGKVQHYRLPSKVLLAKCGHYTRKNIRKNLTKDIEIKIRKIYDKYLKIKEDIYAEFIKGKKIQVTEYVEKKKSKKEKNKLKQMTEPMITDDDDKERNYKKWKEQNKLAKSGGDDDEKSKIIIKEPNIAPTVSTKKTMVEKKCPLELFVLNKSENYELTTKYRLEKFGLSQKFYASRRYVRLHDFDKYIRTHRATAREVNFLERGTYCGKKINALKDGKRTFLGAGQFIMSNATRGYTSSPLSLLKKKIDNNSMIDVVYVDEFRTTLLCNQCNNLCITSTSPHRYQYCRFCKITYNRDINASANMLNKAISNTDDSKNYLIKQPNNFKRSTKREDILQ

SEQ ID NO: 2432 - protein, 1440 aa, Aphidius gifuensis
LIINNCCCYFTKMSKSTGIKNSDNTCYFNSVIQGLFSLNTLHEKLKVCNTLNDNKLLCYIKNIFDALSKQDKKYIIIDKKYLKQILPKNFIIGQQHDSGELLTIWLEKISLISKCWLDEIFLVKTIIEKKCEKCQNYICDTLNNECQILYLNINQQEQHKSAATLQNLIDENFKEQQLRNSTLQCLNCNKKTNVKKIEKIVSTPLVLAIVISNSYFDQIGKTSKKNNINIKFDETLKLQKNQNFQVVDESFKLCSVVVHAGKQTNCGHYYTYARNKTTNLWQKYNDDIVTNVTFDELQNLNFPITPTVIFYEKSNINNDNELKSKTRCSIFDTYDSLKENKKSLPLTIPITPPSSPPSSSSSKQSSTVILQNLVEDMHIDEKAYKRFNDTPIAIIEDATVVKKKRSDSTTPSQQQQQQQQQQQQQQQQAQQQAAVAAAQQQQQEQQQQQQQQQQQQQQQQQQQQQQKQQQQQQQQKQVGKKKIKCGACGEIGHMRTNKNCPVNISKKKENLQQQKNKILLDNNCDDSNDSIQSTTNALENMPTRFMSTDESSNDEGNVSTSIESSQGAKKTLFRKPYTPKPLAKKSKIMMMNNDVKKPNRSRPRCRDLSPISRDSSTSRDSSTTSRDSSESIDSSISRDSSTSRDSTISKNSSIKRCPACQLEDHLTPKSKKCPNNIPSFKDRIFSPSIEWELFTRKQGIKSLIKDEKVFNAIIDDVNEMSKYVIDFSMFFEYCIRSSDQFMNEIINSSKEPDFSLFAMYLKDGYSGENQLLLNLHEEYCLLYPCIDNHKYDGHLRSAIIKQTIRSWTTSFHNNIFMHMKDRFRKYFIQHKKYSKQKTHKILSDLFDLDIRTNDDIFDFCDANLSFKNLHEHGTQWWKFLKLNLELQKKIDFVLSPICELGLKHILYTTDGVHQLLRRVYANDKKIKISSNFKEATSGPDLMEFKNLWKHFIKIPDRYKDKFSYSLTTNGIDVSLHLQRPKKDHSYFEKQIKHDIDEYDRIAGLDIGFKQIFGGVIMESHEDYLDKDKQQRFTILSRTYHHLTHYFEREEKRKIMTKKYEEMYENLLNEMSEYKKLRLNDPLDYIRVTIYRLELFELGQPIIGRRKVARLKFDKYINQQSTIHQICQYITTGSYTTLAKQQRIDKKKQLRQENKKKKKKRYNEKFKDKVSKKWLKNKSKKASTPLNQQQQQQQQQQQQQQQQQQQQQQQQQQQRQARLRKRGKKSTKKKKIKKLKFKESKLVKNSEKIAELLVNVMSKKNHNLNQNQLFNIAKKIVDMSIAASLFDEKAANEAKAIKRKLLLKKLKQKKRLERNGKAFEKIMNKQNNQFKIKNKIDNNNSFQNLNILEKKKKTRKKKKTIKITKSDSSNRRTLIVLGDTGISSKTRGYRQVPLRKIESYLIRLSNEPNSKIDVITTDEYKTTVLCCLCNERCTISKSPHR

SEQ ID NO: 2433 - protein, 243 aa, Aphidius gifuensis
EQGKEKEQEQEKEQEQKKEQEKKQEKEKSNDNPNLNNKLKNKIFVRKKNSLELFVINKSDNYILATKYRLEMFKVSIPIYTSRRYVRLNDFDKYIRTNRAVDQQVNFILNRTYSGKKCNTSNDGRKTLFAAGQFIMNGCTKGYTSSPLSLLKKKLDNHPMIVVINTDEFRTTMLCSVCSGILITSKSPHRYQYCPNCKITFNRDINGAKNLLQKTIVKLDPKRKHLIRNIDNFSRSTLREKIK

SEQ ID NO: 2434 - protein, 302 aa, Aphidius gifuensis
SYEAMQPVYGDLKLTKIRWNQKIQNRRALDRLVNFITTGQGPKSRLKKPIEVDKKKEKNKKKNNNNNNKNNTKVDKGNKSKNQLNKEKKLDRQREKAKENRDKLTERQKKRRAKNREKELIKKKSKKIERNKLNDEKKLIFEKKQKKYQNNKAKKRALYERSQNPNNNNNNNDDADDDSDDGGDDDNNDGLMIIFIGQTDMAPLGFGYRKPPLKKIEKKILADENVVLIRVDEYMTTQNCSKCKQQAIVSTHKHRYTHCPKCNITWHRDINSACGIAKIGAAFSGLNENDSIDNYSTYVRKG

SEQ ID NO: 2435 - protein, 284 aa, Aphidius gifuensis
ENITREPEKEKRQIYDKYVKVFEDKYEKFLEKKGIEIEEYMEVRKKKVKIKSTKIIDDNYDKNQAPKVKNYQKWKSEQKEKKEKLQEKEQEQNKEKEQEKEKKKEQEKEQENGNEKSNDNPSSNNKLKNKIFVRKKNSLELFIINKSDNYILATKYRLEMFRVSIPIYTSRRYVRLNDFDKYIRTNRAVDQQVNFILYSTYSGKKCNTSNDGRKTLFAAGQFIMNGSTKGYTASPLSLLKKKIDNHPMIVVINIDEFRTTILCSVCSGILITSKSPHRYQYCPN

SEQ ID NO: 2436 - protein, 1515 aa, Aphidius gifuensis
FYEKSISPIKRINEINIHNNTVEAKKPKIISDIILNKKPTTYKINLINNDEEIGIPNFDNTCYINSIIHPLNNTEEFYNIIMNSNYKEFDTFKKIFHLLTDKSSLKSSFKELIWKLQPYDDEEKKTQQDSFECLLKLFDEYSKNENCKKIINDLFYSNTIELKECVNCKNNSHGGGDSFFINNLYIQTDSSDTTQVQKLKNNDSKRQKITRVQELINNDAENQEYCNNCKQNNSCKIKKTFKNSPPYLIFNLNHFVYDRQYGKLKLIDNVILKIDEEINVPVVGIDQTSITYQNYKIYAIIIHKGNTLNSGHYYTYCKNKNTNKWYCFNDDKVTPKEFKDIEIFHSKSVSNDKEKPYLLFYKKSNIPSTIIPHNPIVNDHIDNLSDKFMKCPATPKAHQSSLKIINSPSVKDIDNLSDKFSKFSPSPKPKNKSKNFIASSPIHQFNPKLINSPSAKDIDRLTNQLSKCSASPKINELKINTNKIYKRKRTKNQCKKCQKFSHASEISKKCAFNKNNLLKKSNKPIADTSTKIVKKINKINNNNNRQENSNKRRCKKCNKTSHTTVYSKKCDFNKDNKNNLREKINNMKNIKIKPTEITDKSNNKLSKPIEITNKLNKKIIPKCRDCKEKGHYTKFSKKCKNNKENLREKSNDEIKKKLKEKRENQKKNKKLKKSNNNNNNNNNLKIKENTKKTRRGKRKSNEPKTMSTYCVKMGLNSIIRDDNDNNIKKHKKNILKLPTENKKPIKVAKRKKNNDSKTNENVDNNNNNNNDNNNYNKNQLIKETILSDVEELSLLFTEFTYLFHYFLHHEKNQLIDELSKQKSETLILNKYIAYLTILENRKKRTKDESYLDDVFKEYQKIRDDANFTRPYYKVDFRSQLLQFNLRQMATNFVTALTRNARPRVGKYLKVVKKIYNKKSRKKILDNLFFRNIKPTEPNDKNKIMDIFDNDLDFRQCKKKWYLFLNFFKKLSNIDGLNFPLSPIMKPGLKHIMYDTQSLWQMGRKLFPDDFEGTYNNQTKVPNFYPKIWNYFFNIKKKFRKKNFNNTISTNGITVSIHLNRENKIKEIQQPKKKIIRKSKKIVDINKEKNNEYYQDKDDYDDFNIFTCNDFSEDENDDDDDDNCQENNNNLSKKTFKKFTSAHPGQKLAYASITVNSIDDIGDKNKEIRYCLPRTKLLANTGYYTRMYIRKNMTKEPEKEKREIYDRYVKDFEDKYEKFLKEKGIEIDEYKEVRKKKVKIKSTKIIDDNNDKNKDDENQPTKVKNYQKWKWEQKQKKEKEKLQEKEQEQEQDKEKEQEKKKSNDNPSSNNKLRNKIFVRKKNSLELFVINKSDNYILATKYRLEMFRVSIPIYTSRRYVRLNDFDKYIRTNRAVDQQVNFILYSTYSGKKCNTSNDGRKTLFAAGQFIMNGSTKGYVSSPLSLLKKKLDNHPMIVVIITDEFRTTMLCSVCSGILITSKSPHRYQYCPNCKITFNRDINGAKNILQKTIVKLDPKRKYLIKNIDNFSRSTLREKIK

SEQ ID NO: 2437 - protein, 1277 aa, Aphidius gifuensis
KYIYKMIKRVGLENLGSNCYLNSIIQVLHAIKDFRDDIINKNEHDSSIIKELGKLFQLLSTSFSFMSKSPENFITSLKQSSLTKDFGYTQQEDCSEFLIQLFALCNQYEDIKKIIEKFFVGKLKIFHKCTNCNETIINIEIFHELQLCFPLKKSNKNLTIQDMFNNCLKSETLENVKCDNCEVERDKTKTTEIIQTPLHLILLLKRSSIKNNIINKIHDYVELNESIKVKNENYEIHSVTVHNGEKIRSGHYYTYNKDISENKWYIYDDDKEVKDVTFNEIKNLKSPHTPYMVIYKKKDDNVNLPEKNKQVKRKNDDDYLINKKKFKPNKDIKRKIDNKKSDISCIVEKKQKNNNNNKLEISKTSIFHRNNITSDDDDDDDNVETNQSNNLTPIITNNTTNSLCNNINNINMNSLNNTSNLLCQNMKNAKILGSTDTLDIDIDDLPDDGKWSNNKLKGKCIDCYRIGHASKKNKLCEFSDYRQKITCTDCKKKGHKSKRSSWCLSYKKNKIDDNNTSKAINVTNSINNSNIIIEQINPSKTTSSIICKDCNETGHATRRSKICKDYKLTPLERKFGKDTKLEMYSVQMGLNNLCDNELIKNEIINTVKELSGLSIEKSIQFEYFLRHKDRWLLNKIITSNTLPRLEHIGKFLHKDYKPQSSNDDAIEIEKLTKEFRKLNCNKNEERRQYDCTGRSPLFDEEYKIFITNFSNNVKMHAESRVRKFILRELNKNEENDVKKERISWYKANRMAINLFCNGKIDEKLANHELFIKHKNLKFQSFYDKWWQFLEFFMDLQKYIKFKLVPIQSPGLKCQTITTTGAYTLLRKLFKDEGAQPDRTGALDGDKPKEMWDKLLPNLKNHERINEAFAYSISTNGIYVSIHCARPINESNVKKDIYKKSINIDDYDGVYSFDPGGVYPLAGIFVKNINDIGDETKEKKILLKATSWRYRTGQYHRKYKLHNLGYDKLEIYLQELMEMKQFKDIDVDDPSNYINITKFRLKWFDRAQIFFQRRKIAWLSWNAKINDRRELARYVNYIRYGQEKYHPNKKDLPKHNKTKYKYLKYGPKTEQQTIRINKKIENAKILKTKMAENRKIKTAARIERRDNILKKLKEKKNKNKAVSISPATNPVNEGKLKKQKKNKKSKKEKVNLPKNNGKVLVFIGRVEMPSGIKGHVQAPLCRITRELAKCPDIDIALVNEYNTTKLCYKCGEKCFVSISPDRYVYCKNCKTVLHRDINSSKSIMNLALADYGIKPTSFVKNYSSYRPNYNKVDNINNP

SEQ ID NO: 2438 - protein, 1276 aa, Aphidius gifuensis
KYIYKMIKRVGLENLGSNCYLNSIIQVLHAIKDFRDDIINKNEHNSSIIRQLSTLFESLSISLEPIAKSPEEFIKSLKNSTFTKNFKYTRQEDCSEFLIQLFALCNQYEDLKKIIEKFFVGKFKIIHKCTNCNNTIINIESFNNLQLCFSSNKNLTIQDMFDNCLKSETLENVKCDNCKVERDKTKTTEIIQTPLHLILLLKRSSIKNNIINKIHDYVELNESIKVKNENYEIHSVTVHNGEKIRSGHYYTYNKDISENKWYIYDDDKEVKDVTFNEIKNLKSPHTPYMVIYKKKDDNLNLPEKNKQVKRKNDDDYLINKKKFKPNKDIKRKIDNKNSDISCIVEKKQKNNNNNNKLEISKTSIFHRNNIISVDDDDDDDNVETNQSNNLTPIITNNTTNSLCNNINNINMNSLNNTSNLLCQNMKNAKILGSTDTLDIDIDDLPDDGKWSNNKLKGKCIDCYRIGHASKKNKLCEFSDYRQKITCTDCKKKGHKSKRSSWCLSYKKNKIDDNNTSKAINVTNSINNSNIIIKQINPSKTTSSIICKDCNETGHATRRSKICKDYKLTPLERKFGKDTKLEMYSVQMGLNNLCNNELIKNEIINTVKELSGLSIEKSIQFEYFLRHKDRWLLNKIITSNTLPRLEHIGKFLHKDYKPNSSNDDSIEIEKLTKEFRKLNCNKNEERRQYDCTGRSPLFDEEYKIFITNFSNNVKMHAESRVRKFILRELNKNEENDVKKERISWYKANTMAINLFCNGKIDEKLANHELFIKHKNLKFKSFYDKWWQFLEFFMDLQKYIKFKLVPIQSPGLKCQTITTTGAFTLLRKLFKDKGAQSSRTGALDDDKPNEMWDKLLPNLKNHERINEAFAYSISTNGIYVTIHCARPIDESNVKKDIYKKSINIDDYDGVYSFDPGAVYPLAGIFVKNINDIGDETKEKKILLKATSWRYRTGQYHYKYKLHNLGYDKLEIYLQELMEMKQFKDIDVDDPSNYINITKFRLKWFDRAQIFFQRRKIAWLSWNAKINDRRELARYVNYIRYGQEKYHPNKKDLPKHNKTKYKYLKYGPKTEQQTLRINKKIENTKILKTKMAENRKIKTAARIERRDNILKKLKEKKNKNKAVSISPATNPVNEGKLKKQKKNKKNKKEKVNLPKNNRKVLVFIGKVEMPSGIKGHVQAPLCRITRELAKCPDIDIAFVNEYNTTKLCYKCGEKCFVSISPDRYVYCKNCKTVLHRDINSSKSIMNLALADYGIKPTSFVKNYSSYRPNYNKVDNINNP

SEQ ID NO: 2439 - protein, 1277 aa, Aphidius gifuensis
KYIYKMIKRVGLENLGSNCYLNSIIQVLHAIKDFRDDIINKNEHNSSIIRQLSTLFESLSISLEPIAKSPEEFIKSLKNSTFTKNFKYTRQEDCSEFLIQLFALCNQYEDLKKIIEKFFVGKFKIIHKCTNCNNTTINIESFNNLQLCFSSNKNLTIQDMFDNCLKSETLENVKCDNCKVERDKTKTTEIIQTPLHLILLLKRSSVKNNIINKIHDYVELNKSIKVKNENYEIHSVTVHNGEKIRSGHYYTYNKDISENKWYIYDDDKEVKDVTFNEIKNLKSPHTPYMVIYKKKDDNVNLPEKNKQVKRKNDDDDYLINKKKFKPNKDIKRKIDNKNSDISCIVEKKQKNNNNNNKLEISKTSIFHRNNIISVDDDDDDDDGTNKSNNLTPIITNNTTNSLCNNINNINMNSLNNTSNLLCQNMKNAKILGSTDTLDIDIDDLPDDGKWSNNKLKGKCIDCYRIGHASKKNKLCEFSDYRQKITCTDCKKKGHKSKRSSWCLSYKKNKIDDDNNTSKAINVTNSINNSNIIIKQINQSKTTSSIICKDCNETGHATRRSKICKDYKLTPLERKFGKDTKLEMYSVQMGLNNLCDNELIKNEIINTVKELSGLSIEKSIQFEYFLRHKDRWLLNKIITSNTLPRLEHIGKFLHKDYKPQSSNDDAIEIEKLTKEFRKLNCNKNEERRQYDCTGRSPLFDEEYKIFITNFSNNVKMHAESRVRKFILRELNKNEENDVKKERISWYKANRMAINLFCNGKIDEKLANHELFIKHKNLKFQSFYDKWWQFLEFFMDLQKYIKFKLVPIQSPGLKCQTITTTGAYTLLRKLFKDDGAQSSRTGALDDDKPNEMWDKLLPNLKNHERINKAFAYSISTNGIYVTIHCARPINEPNVKKDIYKKSINIDEYDGVYAFDPGGVYPLAGIFVKNINDIGDETKEKKILLKATSWRYRTGQYHRKYKLHNLGYDKLEIYLQELMEMKEFKDIDVDDPSNYINITKFRLKWFDRAQIFFQRRKIAWLSWNAKINDRRELARFVNYIRYGQEKYHPNKKDLPKHNKTKYKYLKYGPKTEQQTIRINKKIENTKILKTKMAENRKIKTAARIERRDNILKKLKEKKNKNKAVSISPATNPVNEGKLKKQKKNKKSKKEKVNLPKNNGKVLVFIGRVEMPSGIKGHVQAPLCRITRELAKCPDIDIAFVNEYNTTKLCYKCGEKCFVSISPDRYVYCKNCKTVLHRDINSSKSIMNLALADYGIKPTSFVKNYSSYRPNYNKVDNINNP

SEQ ID NO: 2440 - protein, 870 aa, Aphidius gifuensis
IFYNNKINFFSKTSWVEVYLSQENTTTQANNTTNLTTSDSNVNVIACNTTTTTTDANSIDESFKIPVVPVQPRAPSRSRSKSQCSSSSRHSSSSSTSAASSQCSSTSKKTSSGRSVSAGFKKFEGQNTRTRTIQMGLKTLLQIKNTQSEKYHIYQKIIDIVKRTSEWRIASSIFTEFCINHENGIILNLIATGDPVQVISNCFKILIKNSRIKCHEAILDLVNEYDELRPEPINKKTQKIKVKHDMKNLSRIVDSVVMEYIKNFKTNLLTHGYKHLKHFIQDDMKVTHVEAKKIIDTLFLQNKHPDIQLFDDFENLDFKLFNKKENWNIFVPFFAKLQKLTKNKFVLVPINKFGWAHVHISSSILTSLEYLFFPKVKGQKKPIIHNNLWEEVFGINKDTPFGEKFGESLSTNGAEVSILQYVENKVDISNHLDKIEKQFENKIISEDKIEGIKILSNVNLETIKKTKYTRINCIDPGERVPFATVIVKNINDFGDKNKEYRYCQKNSTFLYKSGFFSSEKKRKKITGEADKNVENITKLKEFNDPNNKVELNLKNADNYKSNLKYRLLCYYELQHVYGQLKYVLNRWHRKIQLRRAFDRQVNFLAYGLGSKKNIKKPIIPDEIKKQKNLKIHDLKQARKQKYKLEHPDADKNKDKTKSKIKKEKKIYRQEKLAEKHQATLSNEEKKRREKNRKQELEKKIKNKNLKKQLNIQKALNFKRKQEEYQLRKKNYQQKLNNNNNNNNHHHPHVNTNNEKVLILIGETKMMPGIRGYRHPPLLKIERKLLKMEDVTVVRVDEYRTTQNCSVCFQQLVVSTDGHRYCFCPHCKITWNRDLNAARNIGGKALAHLGINKKHTIDNYINFKRGGRKKN

SEQ ID NO: 2441 - protein, 957 aa, Aphidius gifuensis
IIIIIIIIIIIIIFELIFSTTSVEWLEKNQDWLEKDETAVKDIIKLDPGYVEQIQREKQELQLQQQQQQLQQQQQIQQQQQQQQLQQQQQQQQQQQQQQQLENNINIPPPPPPPSSVSSKKSRSTVKSKTTTKAKSTAYSRCSSVKTSTTTSSKRQESAGDKKFKGIPNLRDQTIQMSLKKLLGISGNNTDKYKTKVYDHIIDSVRKISEWCVACSFFLEFCINHKDGWLLKNIIENRPRKSINAVFNILREDPKKIKYDEELVKLYKEYLKLRPETINPNTQKIPEKFDTSGISKIVDDVQKTYVTIFETNIKTHGYSRMCKYVFKQIKLQEEEKKENEEEEEEEEEKTKYYYHNKSRNIMKNLITNNIHPDMPLFKKFKNLNFKEFNNGNKWHFFLPFFLELQKISPDFRVVPIYKFGWKHIRISTSILRQMKQKIDKKTEVEVKKIGDEQLWNDMMNINPTTQLGKKFYLTATTNGVEISLFLKVKKTTATTSVEKVENEIDSELITDPEKMKKITIISRHTPADIKKIEFTNFVSIDPGERTPITAIFFNDYKDLGNKDKERRYCQKNSTLFYKSGFYKNEKKRKKITSTADKRIENIVKMKKFENLNLKNPDDYIRNLKFRLLCYYDYQHIYGQLSIVTLNWTKKIQRRRVLDQQANFLAYGYYTKKSLKKSIKTDEMKKTKNQKLNGNKGKKQNAKGGNGGNGGGEKSKNETSEENEEKKQKAENEKTKSELRKAAKLKKQQEKAAEHKEKLNDQQKLRRKKNRDREQLKKKKKKQSRKEMIEKKKLDFEKRQKEYQEMKKQKRSLYLERKKKNNNKNNNNNDNNNDNNNDDNKKKNIKWTVIFIGQSKIMPNIKGYRKPPLMKLEKRLLLMENVVVIRVDEYNTTQNCSLCCKKAVVGKYGHRYTYCTHCHVTWHRDINAARNIARIGLAYSGINKNDSPDNYPTFERKG

SEQ ID NO: 2442 - protein, 1001 aa, Aphidius gifuensis
CVLMIFLIKFLIKIFRSSSLQKTKRSTRSSKQNERRPPNISSIVDPDTDDDDDVNMVVTPTPSTSTYINNNKQQLKNNDGNSSIIQRLSQELARTAVLENNNNMNMDIDDDLIVERQRREMTQIFGSQKSMQDEQVIKSQEWVVKSFSQPSTKNSENNDKKRPNILPIPELINKKIQKMTLPTPPSPPPPTPPPPPSFKTPTVQQTPIKQQKQKKQRNTQTAQSRTPSPSPSSTSTSRSTSSINSGKTSTSTKRRQKSAGAKKFANEPDKKMYTIQMGLRTLLKITKDTKSTDQNYKIYSKIQSDVDRVAKWKIAGSYFLEFCINHPEGWLVNHIFSNGANKIIQQIFNILKVPCSHGVKPVYDVNLIELYNEYCSIITRLNETDNLNIPLRFDVHGLAKICDDQIETYLTCFETNINTHKYKRLFKYIKKELGISGPEAYDILSDLIQHNKRPEKIKLFDQFEKLDFKLFNNNNKWYKFLPFFIELQKLTTNFIVVPINHFGWHHVRYSTSALRRFVGQLSDKELFTECKTLDDNALWKKIFNIDPESSLGKRFYLSLTTDGASVSIQCQKDVVNKNNNLDNNNIQKDVPKITILSQHSLDDLKNLNITHYSSIDQGQRCVVSGIHFENISDLKKKSKQKRFAIKNSTWLYKSGYFRNEKKRKRITSTVDEKVEKIVQSVEFKDILNLKNPINYLLNLKFRLLCFAIKQSVYGTLKMTLLKWNISIRKRTYLDDLAYFIATGQRKKKYLKKKIIDEKKKTKNIKAKELKKLRKQNYLKNHPSDKDKKTKHQLKLARKLESQVELAAKNKSTMTDKQKKQRARNRKREKRLKKATKSLEKQHKLELKLSFEKQQLNYHQEKEKKRKEYNNNKNKKIHNNSNNNNTKVREYSCCFIGDPNPHLRPKGYKRPPLCKLEKKLLEFKFVILVRVDEYKTTQNCSKCHRQLIVSTRGHRYAYCRTCGITWHRDINAGISVGNIGTTYAGMNPDDDIANYSNFERSR

SEQ ID NO: 2443 - protein, 1008 aa, Aphidius gifuensis
CVLMIFLIKFLIKIFRSSSLQKTKRSTRSSKQNERRPPNISSIVDPDTDDDDDVNMVVTPTPSTSTSINNNKQQLKNNDGSSSIIQRLSQELARTAVLDNNNNMDIDDDLIVERQRREMTQIFGSPKSMQDEQVIKSQEWVVKSFSQPSTSENNDKKRPNILPIPDIINKKIQKMTLPPPPPTPPSPSPPLPPPLPPPSFKTPTVQQTPIKQQKQKKQRNTQTAQSRTPSPSPSSTSTSRSSTSSINSGKTSTSTKRRQKSAGAKKFANEPDKKMYTIQMGLRTILKITKDTKSTDQNYKIYSKIQSDVDRVAKWKIGGSYFLEFCINHHRGWLLDHIFSNGAKKIISQIFNILKIPISQGRQPTYDVNLIELYDEYCNIITRLNETDNLNIPLRFDVHGLAKLCDDQIETYLTCFENNINTHKYKRLFKFIKNELNISGPEAYNILSDLIERNIRPENIKLFDQFKDLNFKLFNNNSNWHKFLPFFIELQKLTTNFIVVPINHFGWHHVRYSTSALRFFVGQLSDVKLSEECKTLDDNALWKKIFNIDPESSLGKRFYLSLTTDGASVSIQCQKDVVNKNNNLDNNNIQKDVPKITILSQHSLDDLKNYNITHYSSIDQGQRCVVSGIHFKNISDLKKKSKQKRFAIKNSTWLYKSGFFRNEKKRKKITSNVDKRLEEILQSVEFKDILNLKNPINYLMNLKFRLLCFVIQQPVYGTLKMTLLKWNISIRKRTYLDDLAYFIATGQRKKKYLKKKIIDEKKKTKNIKAKELKKLRKQNYLKNHPSDKDKKTKHQLKLARKLKSQVEHAAKNKLTMTGKQKKQRERNRKREKRLKEGTKILEKQRKLELKLSFEKQQLNYHQEKEKKRKEYNNNKNKKIHNNSNNNNNTKVREYSCCFIGDPNPQLRPKGYKRPPLCKLEKKMLEFKFVILVRVDEYKTTQNCSKCHGQLIVSTHGHRYAYCPTCGITWHRDINAGISVGNIGTTYAGMNPDDDIANYSNFERPTRTR

SEQ ID NO: 2444 - protein, 899 aa, Aphidius gifuensis
NNMMMIIIIFIFLYFSDFATPTPTKLFKSQIKKPTTCSACKKQGHQKNNKICEKYDEYLKNKSTATKTTATKTTTKTKTTPSTSRCATPLLVNNNSLDSDQTSTTKTTYRSNLSAGDEKFKGKNTRNFTIQMGLKKFIGLLPEMEIDHNNPKLLMYQALTNNVKLMSKFAITASYFFEFSINHKNEWLVNYIASQNKYTKINFVFNLLRTDMNQKRVKEVPQELISLKKEFDKIISDNNLNIEPSFYLKGKTTLFENLCVEYDRNLETNITTHMWQRLMIHLRFKLKITNWFKLLEDLFTKNIHPPNIDVFENYNHLNFTKIKSTWWKFLPFLLTMQKTNNNFFLIPTYSCGLKNIRISTSALKDIVHDLENTTYAEVDKIKPAELWQSWFNIKPKSSIDKKFAFSFTTNGVSASLSCRKEIIINDEKTPMKLPPLNKKIGLIGSDPGARCPMAGIKVQSLDDIGDKDKEQRFCEKNSTFRYRSGEFERAKKRVIIAGDVDNKVQNFTKLEFSHINLKNPLNYYENALYRLKCFEIKYPIYELDKLIKLKWSKQIQSMRQTDRQINKLLYNVGAKNRKKKIDDPVYIKHRKDMCKKINDAKKKTAKAVVDKISINIGDDFDAKRAAGAIEKYKKQAVKERLKNKNYSAKASDANVVAASKVVELVSTINAIRNNNNNNIDNIILLNHVVKTKAKLRKARKLAKQLRVADRNKDTKSKSKLKREKIAREKQQAKRKEEREKEKKIIEEKKLAQMSSYEQKKWPRKLRRLNVDGKKIIYCVGRPDYPKWIKAYKRPRLKIFDRKIRSRPGVFTIDVDEYNTTKLCSNCNEALVVGQHGQRYCWCPRCNITWHRDVNAGRNMLILALIRAGLLPENFIKNFNRLNGHLNFRHKVNNFFSIFF

SEQ ID NO: 2445 - protein, 1158 aa, Aphidius gifuensis
LVKLKIIHKCTNCNNTTINIESFNNLQLCFSSNKNLTIQDMFDNCLKSETLENVKCDNCKVERDKTKTTEIIQTPLHLILLLKRSSIKNNIINKIHDYVELNESIKVKNENYELHSVTVHNGEKIRSGHYYTYNKDISENKWYIYDDDKEVKDVTFNEIKNLKSPHTPYMVIYKKKDDNVNLPEKNKQVKRKNDDDDYLINKKKFKPNKDIKRKIDNKNSDISCIVEKKQKNNNNNKLEISKTSIFHRNNIISVDDDDDDDDDGTNKSNNLTPIITNNTTNSLCNNINNINMNSLNNTSNLLCQNMKNAKILGSTDTLDIDIDDLPDDGKWSINKLKGKCIDCYRIGHASKKNKLCELSDYRQKITCKDCKKKGHKSKRSTWCLSYKKNKIDDGNNTSKTINVTNSINNSNIIIKQINQSKTTSSIICKDCNETGHATRRSKICKDYKLTPLERKFGKDTKLEMYSVQMGLNNLCDNELIKNEIINTVKELSGLSIEKSIQFEYFLRHKDRWLLNKIITSNTLPRLEHIGKFLHKDYKPQSSNDDAIEIEKLTKEFRKLNCNKNEERRQYDCTGRSPLFDEEYKIFITNFSNNVKMHAESRVRKFILRELNKNEDNDVKKERISWYKANRMAINLFCNGKIDEKLANHELFIKHKNLKFQSFYDKWWQFLEFFMDLQKYIKFKLVPIQSPGLKCQTITTTGAFTLLRKLFKDKGAQSSRTGALDDDKPNEMWDKLLPNLKNHERINKAFAYSISTNGIYVSIHCARPIDESNVKKDIYKKSINIDDYDGVYSFDPGGVYPSAGIFVKNINDIGDETKEKKILLKATSWRYRTGQYHRKYKLHNLGYDKLEIYLQELMEMEQFKDIDVDDPSNYINITKFRLKWFDRAQIFFQRRKIAWLSWNAKINDRRELARFVNYIRYGQEKYHPNKKDLPKHNKTKYKYLKYGPKTEQQTIRINKNIENAKILKTKMAENRKIKTAARIERRDNILKKLKDKKNKNKEVSISPATNPVNEGKLKKQKKNKKSKKEKVNLPKNNGKVLVFIGRVEMPSGIKGHVQAPLCRITRELAKCPDIDIALVNEYNTTKLCYKCGEKCFVSISPDRYVYCKNCKTVLHRDINSSKSIMNLALADYGIKPTSFVKNYSSYRPNYNKVDNINNP

SEQ ID NO: 2446 - protein, 912 aa, Aphidius gifuensis
LSYSNSTTTNVSSQTTHENDHDDGKDKFIPYKIKPTPWSPSNINFIGYNELTATRSSSFIESKPFNNSQSQRYNIIIIIIKRMFIILFYCFYNDFVFFCVFSSDQQSSIDIQKKNINTCSNQKRLCKACGRKGHGTKFSQRCIKNVDNIPLAKRLEKTKLTQANKIDKIKNSKSKEAKALRQFNYQKKKRVGKLKSGQQKFSTIKSIKMSLNRIIKNQEVKKIIIDDIKVLSKLFKEFSYFVSFCFNHEQNEAINDIEKLTNKKEFHLNKYLNKLTYFRTKKRKKEEDFIDKLFKEYQIIRNEVGMPIEGYCGDLRTNLISMNLINFETNFMNNIIVNCRVRIGKYLKIVGKIYNRRKRKKMLDNLLFKNIKPKDKDNKIMDIFNDFNLNFTEIKYKWWKFMGFFKKLSNIDLMNFPLTPIYKPGLKHFMYSTSSVWQLANRVFGNKNKKLVRDWNQQKKMFNNNYYHMQKFIWKQCFKIKKKLIKKKFNFTISTNGVTVTIHLMKEIINNNCNDNNLSKKKLKTTVGAAAVTSSTTTTTTATTTATTTCSTDDNISSDEEDYDDINVLYNYTDIDENDDDNNNINNNNNIIDDNDDNSNRISDEEYDRGIGLDPGNKNIIGGVIVQSLNDIGNKDKEERYLLTSKALLHKSGHYTRQFVIKKLIKNVEKEKKQVYDQFVEIKKQEFENIVGEIEAEYIKKRKTKKERKQLKQQKIENNTKHDDDGKTRNWKKCKQLLKNKKNNNVVPSESAEPAPSIEPLEPSKLKKNSRQMIRKKTLLENFVINKPDNYVLSAKYNLTCMKLEEPVYSSRRYVRLQFDKFIRTNEAVSKEVNYLEHGTYDGKKTSQLEKKTLICGGQFQISKYMRGYPSAPSSLLKKKLQENKKIKLIIVDEFRTTILCNKCNNPCITSQ

SEQ ID NO: 2447 - protein, 243 aa, Aphidius gifuensis
RQEEKKKTTKTKKNKKKADNTTTDAAIADVIAGAIADAAAVDDAVVDNILDENGGGANDNVKIKKKKKKSIKIITDKFNNNKRILIALGDTKISKWMKGYRRVSFKGIIRALYCRARLSKSKIDIVDTDEFNTTKLCSACNSVCLKSKSPDRLVIFLFIYFLINLFIYLFCFLRYLLCQKQDCKVTWNRDINGGRNILILALIRRGLIPANIIPHFSNFKKGARTLGPSGVPRSSASSRWSWT

SEQ ID NO: 2448 - protein, 200 aa, Aphidius gifuensis
KIVNAKIMRSKIAENRKIKTAARIERRDNILKKLKEKKNKNKAVSISPATNPVNEGKLKKQKKNKKSKKEKVNLPKNNGKVLVFIGRVEMPSGIKGHVQAPLCRITRELAKCPDIDIALVNEYNTTKLCYKCGEKCFVSISPDRYVYCKNCKTVLHRDINSSKSIMNLALADYGIKPTSFVKNYSSYRPNYNKVDNINNP

SEQ ID NO: 2449 - protein, 571 aa, Aphidius gifuensis
LIFPIMLKCMLNQEVVKLILRELNKNEENDVKKERISWYKANRMAINLFCNGKIDEKLANHELFIKHKNLKFQSFYDKWWQFLEFFMDLQKYIKFKLVPIQSPGLKCQTITTTGAYTLLRKLFKDDGAQPNRDGALDDNKPNEMWDKLLPNLKNHERINKAFAYSISTNGIYVSIHCARPIDESNVKKDIYKKSINIDDYDGVYSFDPGAVYPLAGIFVKNINDIGDETKEKKILLKATSWRYRTGQYHYKYKLHNLGYDKLEIYLQELMEMKQFKDIDVDDPSNYINITKFRLKWFDRAQIFFQRRKIAWLSWNAKINDRRELARYVNYIRYGQEKYHPNKKDLPKHNKTKYKYLKYGPKTEQQTIRINKKIENAKILKTKMAENRKIKTAARIERRDKILKKLKEKKNKNKAVSISPATNPVNEGKLKKQKKNKKSKKEKVNLPKNNGKVLVFIGKVEMPSGIKGHVQAPLCRITRELAKCPDIDIAFVNEYNTTKLCYKCGEKCFVSISPDRYVYCKNCKTVLHRDINSSKSIMNLALADYGIKPTSFVKNYSSYRPNYNKVDNINNP

SEQ ID NO: 2450 - protein, 1728 aa, Aphidius gifuensis
VLIKNIYKMVMRVGLENLGLNCYLNSIIQVLHAIEDFRNDLINNKEHNSSIIKELCALFTKLSLSFSFMAKSPENFIKSLKKSDITEHFNYTRQEDCSEFLFKLFELCNGDENLCEIIKKYFVGEIKRLHKCTNCNKTKEIIESFNNLQLCFSSNENTIQDMFNNCFVPEILENVKCDNCKVKCNVTETKELTQTPLHLILLLKRFDFKNGRPKKKHDYVKLNENITVKNESYELHSVIIHKGEDIGSGHYYTYNKDISENKWYKYDDDKKVENVKFNVIENLKSPDTPYMVLYKKKDNNNNNNNLNKKNEQLKISPIKVTNKLDIHNNTVTKKPKIISNVILNKKKIANKIDLNLNNDDKSIGKCKTWVSSSIIPIGLANFDNSCYINSIIHPLMNTDEFYNKIMNTNYEEFDSFKRIFQLLINKESSKSSFKRLILKLKTEAFGEETCAQQDTSEFLITIFKNYSKNKNCKKMIKDLFCGEYNECRKCTNENCKKFCSKEPFFINYLNIQTNTTVKKLMSKNYKNEKQNCINCGQNNSCTIKKVNTILPPYMIFNLNFFVHDKKLNTFKLINNGTFEIDEEIKLPIEIPSKSETKLTDDKVRKSVGSQIYIIYAIIIHDGNTLNSGHYYTYCKDKNTNIWYCFNDNIVTQIKFEDIKTFHLNDNKKPYLLFYKKSNISSTIPSPPPQSAQHNPSVEDIVDNLSDLFSNFSTLSKDTNKSKNSIQSSSIIMKDIDNLSEKLSKCSTSSEEIKNQLKRKNNNHIGLIDKKKFKPYKQNLKRKINNKTLCIVEKKQKINKLESTQTSIFHKNQIISDDDDENDEKNQLNNIKNTNDLPDNTKLSNNKLKGVCNDCHRIGHASKKNKLCEFSDEKQKLKCTDCKKNGHSNKRSTWCRYNSSCKKKVIAKNSINDSKIIKRRNPSKTLKEKERHSTVQIGLKTAIGINTFNLNNMEKKDYDEKLELYNIIIDDVTRLAKLARDASILYEYCINHPNKWLLNYIANSDKEPRVNDIFNRLRADVRVNKDIDENIIRLLADYENDRPKNVKIPMLHNIDGCSRPFEEMMTQFETNLKVNLNEHGPKRVQKYFYSLKIKTKDGKEENKYTKDEIKKLLDDLFIYNIHPKEELFKEFKDLDFSLFYRKIKWWKFLPFFHKLQGILKNFILIPTFQCNLKHIRYSNTGLKKLASRLYNLKGTKVAETYNNNNNNIKELWKKMFPHIPHFENFDCSMTTNAVYACFLYKKKQKINDDDDDDDDDYDYYYDDKKDEYIVKPEKINNIKEKAKNCEQVVTADPGFRNPLAGITTRGKDCIKNFGDKEHGKPYCLKLSTYRRKTGTFKRQKKLKKITDKVDKAVNELLLKDRYKNLNTKDPTNYIQTMQWRTECTDIMSPVYTQLRVAKLSWDKIMMTRSIIDTTVNKMAWGIGKKNKKLIKNQKKQIEKKIKLLETTNTSKKNNDKNKKQDKKNDEKIVNNNNNNNNVDDDKNKKQDKNDKNKNKKTNHEQKKENKKNKLKEESDKRQNKLTDRQKYQRDRQRRKEQAKKVIRKQEKKEKLKQKYKNILSNINDHFEKKKIQFKNEPNKDKKNKIFNGNFRFYHKRKKLNGKTLFLMGSTKMSNRIRGYVFAPLNIFAKTLKKHKNIIFFNVDEYMTTQNCANCNEKCHVSTRGDRYLYCPNCHITWNRDINGGLNIGNVAFIHLLLKNENSMKNYNNFKRSYNNKKNNKNNKTIDKIK

SEQ ID NO: 2451 - protein, 233 aa, Hydra vulgaris
KMKVVCADPEMSDLLYFGSHNYKNELETFRYTQNQRRLETKNKKYNKIIDKVNKETFIDSKTIKELETSLSNLNSKSCNYEKFKLYCIEKNKINNQLYTHYEKSFFRKFKLNAFTNTQKSESKMIKNFENKYGKPNKTILVVGDYDKGDNNMKGKEPTICKKFRRIFRNAGYKTYLVNEFRTSKLCNCCNEEIEKFLEKPSKKPKRKGKIDLCHGILRCKSVKHNCEIYHNRD

SEQ ID NO: 2452 - protein, 555 aa, Rhizopus delemar
MSSPFYCKGLSVAQRKALSHYVYTLKQKQQSIWPSSLERNQCLEETIEKMNALWSRYQTMNCDAEDLYSKPHEFFKWLFYLQQKINEKVNIMEEKPATFASKSYIYRKLKELTFTSILNRRSFKSLQEQVLQSINSKIPLVLGKKLGKLEPHLPALLKFITSIQSRIEDGTFTPAKYTDRRGYRFFSILPVYSFAMKSIQIDAQAFWRLLKQSGIENIPKGVKDKSALSDFHYRLFNFSKMGFRTRKSLSEGKKQFQVRKKKQIDTLLGKQPEDFLEDIENGCEIWGVDPGIATLVTAVDTSGRQRTTSLDEYYHLCGYNDANSIRKKHQEQHKAQFLKVSNLSSLKTSDMAEFLKACKERLSLYDDITSYYNEKSWSSKLKFKCYMRKQKGVHEICKRFIHGSAKYDEKATTGVRTSTKKENRYYPSALIDHEKRSKKTIIAFGDGMFGSSLRGNKSAPVRMIKKALKKYCGKQLDICMVDEYLTSQICNKCKTRNVDNVVTAKSKRRVHTVLKCKQNNCNIIWNRDIMAAHNILDIFLFAAKNKNQRLDAFVR

SEQ ID NO: 2453 - protein, 555 aa, Rhizopus delemar
MSSPFYCKGLSVAQRKALSHYVYTLKQKQQSIWPSSLERNQCLEETIEKMNALWSRYQTMNCDAEDLYSKPHEFFKWLFYLQQKINEKVNIMEEKPATFASKSYIYRKLKELTFTSILNRRSFKSLQEQVLQSINSKIPLVLGKKLGKLEPHLPALLKFITSIQSRIEDGTFTPAKYTDRRGYRFFSILPVYSCAMKSIQIDAQAFWRLLQQSGIENIPKGVKDKSALSDFYYRFFNFSKMGFRTRKSLSEGKKQFQVRKKKQIDTLLGKQPEDFLEDIENGCEIWGVDPGIATLVTAVDTSGRQRTTSLDEYYHLCGYNDANSIRKKHQEQHKAQFLKVSNLSSLKTSDMAEFLKACKERLSLYDDITSYYNEKSWSSKLKFKCYMRKQKGVHEICKRFIHGSAKYDEKATTGVRTSTKKENRYYPSALIDHEKRSKKTIIAFGDGMFGSSLRGNKSAPVRMIKKALKKYCGKQLDICMVDEYLTSQICNKCKTRNVDNVVTAKSKRRVHTVLKCKQNNCNIIWNRDIMAAHNILDIFLFAAKNKNQRLDAFVR

SEQ ID NO: 2454 - protein, 251 aa, Rhizopus delemar
MDELIPNENYKILFGNTIKSDGFSVDFVFYRKERMNNGSDVELTLEDFNYEEVHNQYHPMFLVPGRKSLFTAILCKDTAHHRFQLYQGRQGAPEMMANILTHGTAKYNRSRRKRKKKKKKKDKKEDEGLSLRTDEKKLKWRTLPFQENKEKCPLVVFGAGVFGKDMVKMKGLWCGVIGKLFATLKKRDAAGELIVVTIDEFKTSKTCSSCFFDDLKVAKAPGFKGKGVLSCSKCKKVWQRDVNATTNGNDL

SEQ ID NO: 2455 - protein, 378 aa, Rhizopus delemar
MKPQGERKFMKFRGTIYTDGVGALVLKQNYDTKKKGGSSGEKPKSIKADEFQYIEKLGKEGLLAGVGKCVLIDPGRQDLLYCMHEKSTVENKMICRYTSNQKAIETKSRKFRKLNNNLKRDEVIAAELSLSHFKSSTVNKDRFVEYLQERAKVIPVMKAYYLNEDRPAAEDQGAGGFLPFRKMKLSNFINQQQADKRLAKKLRERFRNDAILILGNWSAGKVKYHEPVRGVGMRRMLAKEGFQVYLLDEFQTSSLCPSCQNGELEAFKKVQNPRPYQREKYPVVDRHGLLRCKNQQCLKAVTSTIEATDKVPLHYLMNRDMAPTLNFRHILFSLRANGERPERFCRSKKPLSTGSKRKDMSSPSASTSQPTKRQNNPL

SEQ ID NO: 2456 - protein, 298 aa, Rhizopus delemar
MYLMKKKDKINSTKSPNNLITEESYKCFENVDDLTVDTYLLEKPNKVAFSGTDNGLVTLSETNVLLIHFSKKIAYDTSTLDKDLLSVPTSFKIKSKDLLYLSGGYTSRNNLLRAKRSSLSGASATKSEALLLSYSIQHSSNLMEAKTAFNVHQQEKNVLRKFYYSSTRMKRKRRYEIQKRKAYDCVCSAERRRCHPCPSQKSSTRFIMFVGERGYGYGSRVKNHVRLGGPWKPLKHTLKTVNGTSVCNNNECILSLSGTSHKARDSVSALAIGISGASRLISGTTLEVFNPSATTTIR

SEQ ID NO: 2457 - protein, 611 aa, Rhizopus delemar
MKVYYLNEDLPAAEDQGADGFLPFRKMKLESFINRQQANKWLAKKFKERFRNGAILILDNWSAGNVKYHEPIRGGEMRRMLVNEGFQVYLLDQLRASSLCPSCQNGELETFKKVQNPRPYQREKYPIADCHGLLRCKSQRCLKAVTRTIEATDKVPLCRLWNRDMAATLNFRHILFSLRANVTAALISDTVTDDNQGQIKGMSTELTIYGYNEEPLPSVEIAHRNKDAVFNSLFDMEKVQHTCESNGLKFGQRMSVLPKLKVVRILGVKKTIVPPVKPQKMFYLKRILRDPNILLEGQKPLEDLKAETAKLEKEVKSLDQEREKALKYQKEQDSIKKIKELRKEWHNKVDKQTLYQRIEEERHLRDKTCLKINDIEDQLMEKKQVLYYQRMAIRHNSRIHTVDTTSTLPTTKKELKKDSRGLVHSEACVPRDFEDFTFCGTDNELVNMTAAVPFSLKRFSFHLKLHNYYSVLNDDNKAAPVVQDIEFQKYLKTPKATTISASEIDFGCGAFKQRVKRQTGKKLTRKGKEVQLIENSLSQKVTSTSNVSVEQFKHNFDAHVEHRKKLRDFYNTGNRMNERRHREIQKYRFTHRICTKERKALSQTSGSNFSG

SEQ ID NO: 2458 - protein, 435 aa, Rhizopus delemar
MFNIQSAFTYRTVPDYAEECVKLSLQNGIEYDNWYRNVASQPGCWVKPLSVKSTFYVCDHADIVQSRLPVEVKRWIEEHVDDALDSSIDNDNSSSVALRCEKYAEDTEKYLSMYNSIISFHLKLHNYYSVLDDDNKAAPVVQDIELQKYLKTPKVTIISASEIDFGCGAFKQRVKRQTGKKLTRKGKEAQLIENSLSQKVRSTSNVSVEQFKHNFDAHVEHRKKLRDFYNTGNRMNERRHREIQKHRFTHRICTKKLKALSQTSGNNPSTKKKLVMFIGDRGTGVGFRIKGFKRYGGRWKEVIHSEAANVCITNENMTSKTCIFCFRRLTHPRISVTKNGEVFSRKVKGSFYCTNPLCVSVLSKCAAKSRDSLSALAIGIVGLSTVLFGAPLPAFKSHKISNIEVEKYTILTSPSRFEEEIGSYAVVLEGRTVPL

SEQ ID NO: 2459 - protein, 422 aa, Rhizopus delemar
MQANKSSTSPKRHFKAFFRLAELSEAEQMKQFACFPLRITFIPCYMTLDSKIIHYHILKSKKNPKIGSKLETWGTVVDLNKKAFKHQGFQKSLRFQGTLETDGVSVSIIKQNTNTSRKSSKPNTEKKVDGNQTEHIEGLDQADLKSTEAKCVLLDPGRRDLMYCLKETSTVEEKRTLIFTKNSRSKCSGHFRYLRKCTQPFVIQKAEATLFRPESNSVNLEKFVRYIKTRASGKHTLYEYYGNESTKSKETCFPESEFDFRVDQKWNLYYENLLIARTRGFFPQLENYSTDNSIKSQLYVTYLQIRLQQKHIPEKLDDSEKSKALGLSKEILKAKFGQDGILFFGDWSVPNVKYQRPTRSKGLIRMSKKNGLAVYLINEYKTSSHCPTCENEVEKFKTVPNLRPYQLSGVRASHALNNKPQE

SEQ ID NO: 2460 - protein, 358 aa, Rhizopus delemar
MASPKNHFKAFFRLAELSEDEQMKQFACFPLRTTFIPCYMTLDSKIIHYHILKSKKNLKQEASLRHGAPSVDLNKKAFEHQGFRKSLRFQGTLETDGIGVSIIKQNTNTSRKSPKPNTEKKVNGNQTEHIEGLGQADLKSTEGKSKISGFFPHPKNYPTDSSVKSQLYATYLQIMLQQKHISERLDDSEKSKVLGLAKEMYRRSQKSNYKKTISTELEKLQLLPFRKLKFSSKLFFDQNDQKLVRSLRAKFGQDDVLVFGDWSASNVKYQESTRSKGLIRMLKKNGFVVYLINEYKTSSHCATFENELEKFKIMPNPRPYQRKKKPDVLLLDIRAPHVLNNKLQEQKEDFGIVIKPSY

SEQ ID NO: 2461 - protein, 517 aa, Rhizopus delemar
MSSPFYCKGLSVAQRKALSHYVYTLKQKQQSIWPSSLERNQCLEETIEKMNALWSRYQTMNCDAEDLYSKPHEFFKWFFYLQQKINEKVYIMEEKPATFASKSYIYRKLKELTFTSILNRRSFKSLQEQVLQSINSKIPLVLGKKLEKLEPHLPALLKFITSIQSRIEDGTFMPAKYTDQRGYRFFSILPVYSFAMKSIQIDAQAFWRLLKQSGIENIPKGVKDKSALSDFYYRLFNFSKMGFRTRKSLSEGKKQFQVRKKKQIDTLLGKQPEDFLEDIENGCEIWGVDPGVATLVTAVDTSGRQRTTSLEEYYHLCGYNDANSIRKKHQEQHKAQFLKISNLSSLKTSNMAEFLKACKERLSLYDDITSYYNEKSWSSKLKFKCYIRKQKGVHEICKRFIHGSAKYDEKATTGVRTSTKKENRYYPSAPIDHEKRSKKTIIAFGDGMFGSSLRGNKSAPVRMIKKALKKYCGKQLDICMVDEYLTSQICNKCKTRNIDNVVTAKSKRRVHTVLQSS

SEQ ID NO: 2462 - protein, 462 aa, Rhizopus delemar
MNMTQWKYNMIGLLRSPNYYSSQDKGIMTILAFIMNGGSQPSTSAGTVSTTGTLASGNRIFSVKSSTDGIGWNGQYRERLEAFANTTHATTTHAYSLSKFIFLCALQDDANFDIGSYINKEFFSEIWLSLNNIYYDAKANPCEYMMAFYHLARLFEALRLPIFNCFPLRRTWVPGYATIDSKTLCQNILERRWTNSINKMNLWAEIDYMNSAALRPQGFGVLWLRGTTQTDELEPYIPSLNAQQHENIAGRYVTIDRGRRGCLYCVHENSTADAPRTYRYTKPCQDKMEKTKKYRRIYDAVKPQEVQNAEATLVNSQSLNLQNFEEYLRNRALVTDLLQRHYTETTTNHLTTHPLHRKLKLSKYVISDTVFVMEYRIHNHIKDEIILKLFVMIYLGVEELREYLWNRDLAASLNMIHIVRNLRLNGETPEKFQRARAERRGPIIRRRRSEENEEKRVLPRTL

SEQ ID NO: 2463 - protein, 577 aa, Rhizopus delemar
MKYAHQIASYEMVKIVTAYLNGVKVQFGNKVRMFLNLLLKKNERIKALKSEMKKNEGTEKEIVATIKTITEQISKVKLAISSRNIEDMPKEFFSSNDLDKIRNLFDSYSTDYRFAKGSIYYDCKANPLKHIKAYYRLSSMCEALQNKSFNCFPLRKGFIPSYMTIDTYILNTQILKNSIISHLDKEVVWGAVLDVRSKAMKPQGERKIMKFRGTIYTDDVGVSVLKQSYDTMKKGGSSGGKPKSIKAEEFQYIEKLGKEELLAGVGKCVLIDPGRQDLLYCMHENSTVENKMIYRYTSNQKAIETKSRKFRKLRNNLKRDEVIAAELSLSHFKSSTVNKDKFIEYLQERAKATHVMKAYYLNEDRPAAEDQGAGGFLPFRKMKLSSFINQQQADKRLAKKLRERFGNDSILILGNWSAGKVKYHEPIRGVGMRRMLAKEGFQVYLLDEFRTSSLCPSCQNGELETFKKVQNPRPYQREKYPVVDRHGLLRCKNQQCLKAVMNTIETTDKAPLRRLWNRDMAATLNFRQILFSLRANGERPERFCRSKKPLSTGSKRKDMSSPSASTSQPTKRQNNPL

SEQ ID NO: 2464 - protein, 808 aa, Rhizopus delemar
MDRNVNDHKIDTIVDSFELYVEDNSDDDFQPVVTARKRKNKENTPQSGSQKRFKGKGKATDSEVTTTSSTGISTTDEPTMLNKITLDDYDLEYNNVDFDAPIIKRPFLGESTKSASRITKSTSAAVEPSTTASKTSINSSKPSKPVPIAFKSAATSVKSSFYPVPVGKASDIKEGPKKISKRVMTIKTTVKNIWKPAYLQPLYDLVHTTNLLVTHTFAFTKYIYLQELATNENFGLNNFVTKGFFVEVFLNLVLSKGGNSTRLKDTTKNYRRLISKYKEAYFEDASYSPPNLPYAQQIAMYECTKIQTAYYNSIKAHFGNRLRSLINKLFKKKEKAKSLRGEMQANKSSSKAIKEAIRKKIYRPCNQVKLAIAKKEMPEVGLLDDQSRTQLNDFLSSYPEDYTFQKNSIYYDVMASPKNHFKAFFRLAELSEAEQTKQLACFPLRTTFIPCYMTLDSKIIHYHILKSKKNPKTGSKFKTWGVIVDLNKKAFKHQGIQKTLQFQGTLETDGVGVSIIKQNTDTSRKSSKPNTEKKVDGNQTEHIEGLSQAELKSTEGKCVLIDPGRRDLMYCMKETSTVEEKQTLIFTKNNRSKCSRHFRYLRKRTQPFVVQKAESILSRSEFNSVKLKKFVQYIKTRASVKNTLYEYYGNETTKSKETYFPESEFDFRVDQKCNLYYVNLFIAKICGFFPQPENYSTDSSLKFSSKLFFDQNDQKLVRSLKAKFDQDAVLVFGDWSAPNVKYQEPTGGKGLIRMLKKNGFVVYLINEYKTSSYCPTCENELEKFKTVPNPRPYQRKKKSDVLCNGLLR

SEQ ID NO: 2465 - protein, 457 aa, Rhizopus delemar
MQANKSSSKAIKEAIRKKIYQPCNQVKLAIAKKEMPEVGLLDDKLRTQLNGFLSSYPEDYTFQENSIYYDVMANPKNHFKAFFRLAELPEAEQMKRAKRIQKTGSKFETWGAVVDLNKKAFKHQGFQKSLRFQGTLETDGIGVSIIKQNTNTSRKSPKPNTEKKVNGNQTEHIEGLGQADLKSTEGKCVLIDPGRRDLMKETSTVEEKQTLIFTKNNRSKCSRHFRYLRKRTQPFVVQKAEAILSRSEPNSVNLRKFVQYIKTRASVKTTLYEYYGNETTKSKETYFPESEFDFRVDQKCNLYYGNLFIAKIRGFFPQPKKYSTDSSESNYKKTISTALEKLQLLSFRKLKFSSKLFFDQNDQKLVRNLRAKFGQDAVLVFGDWSAPNVKYQESTRSKVLIKMLKKNGFVVYLINEYKTSSHCPTCENELEKFKTVPNPRPYQRKKKPVALCNGLLK

SEQ ID NO: 2466 - protein, 254 aa, Rhizopus delemar
MKAILDVTSKAMKPQGERKFMKFRGTICTDGVGVSVLKQSYDTKKKDGSSGGKSRFIKADEFQYVEKLGKEGLLAGVGKCVLTDPDCRDLYEKSTAENKMIYRYRSNQKNRLVDYLQERAKATPVMKAYYLNEDYPAKEDQHAGDFLPFRKMKLLSFINQQQADKRLRRRNEKTLAKEGFQMFLLDEFRISSLCPSCQNDKLETFKKVQNPRLYQREKHSIADRHSLLRCKNQQCLKAVTSTIEATDKVPLRHL

SEQ ID NO: 2467 - protein, 697 aa, Rhizopus delemar
MYEPTVFNKIALDDYDLEYSSDDFDAPVVKRPFLGESIKSASRITKSTSAAVESSTTASKTSIISPKPSKPVPTAFKSAVTSVKSSFCPVPVDKISDIREGPKKLSKRMMTIKTTELTANESFELNNFVTKDFFVEVFLSLVLSKGVNSTRLKDMTKNYRRLISKYKEAYFEDAGYTPLNLPYAQQIALYECTKIQTAYYNNIKTHFGNRLRNLINKLFKKKEKAESLRGEMQANKSSSKVIKEAIRKTIYRPCNRVKLAIAKKEMPEVGLLDDQSRTQFNDFLSSYPEDYTFQKNSIYYDVMASPKNHFKAFLRLAQLSEAEQTKQFACFPLRSTFIPCYMTLDSKIIHYHILKSKKNPKTGSKFETWGAAVDLNKKAFKNQGFQKSLRFQGTLETDGVGVSIIKQNTDTSRKSPKPNTEKKVDGNQTEHIEGLTQAELKSTEGKCVLIDPGRQDLMYCMKETSTVEEKQTLIFTKNNRSKCSRHFRYLRKNTQPFVVQKAKAVLSRSESNSVNLKKFVQYIKTRASVKNTLYEYYANETTKSKETYFPESEFDFRVDQKCNLYYGNLFIARIDGFFPQPENYSTDSLTISTALEKLQLLHFRKLKFSSKLFFDQNDKKLVRSLRAKFGQDAVLFFGDWSAPNVKYQESTRSKGLIRMLKNGFVVYLINEYKTSSHCPTCENGLEKFKTVPNPHPY

SEQ ID NO: 2468 - protein, 263 aa, Rhizopus delemar
MTLDNKTIHYHILKSKKNPKTGSKFETWGTVVDLNKKAFKHQGFQTTLRFQGTLETDGHIEGSGQADLKSTEAKIHRLFPQPMNYSADSSVKSQLYDTYLQIILQQKHISEKLDDSEKNKALGLTKEMYRRLQQSNYKKTTSTALEKLQLLPFRKLKFSSKLFFDQNNQKLVRSLRANFGQDAVLVFGDWSASDVKYQESTRSKGLIRVLKKNGFVVYLINEYKTSSHCPTYENELEKFKTAPNPRPYQRKKKPDVLCNGLLM

SEQ ID NO: 2469 - protein, 414 aa, Rhizopus delemar
MTIDTIILNTQILKNSIISHLDKELVWGAVLDVRSKAMKSQGERKIMKFRGTIYTDGVGVSILKQNYDTKKGGSSGRKPKSIEADEFQYIEKLGKEDLLTDVGKCVLIDPDRRDLLFCMHEKSTVENKMIYRYTSNQKAIETKSRRFRKLRNNLKRDKVIAAELSLTHSKPSTVNKDKFVDYLQERAKVIPVMKAYYLNEDRPVAEDQGAGGFLPFRKMKHSSFINQQQADKRLAKNLREKFGNDAILILGNWSAGKVKYHEPIRGVGMRRMLAKEGFQVYLLDEFRTSSLCPSCQNGELETFKKVQSPRPYQREKYPIADRHGLLRCKNQQCLKAVTSTIEATDKVPLRRLWNRDMAATLNFRHILSSLRANGERPERFCRSKKPLSTGSKRKDMSSPSASTSQPTKRQNNPL

SEQ ID NO: 2470 - protein, 219 aa, Rhizopus delemar
MNLWTEIIDMNSAALKPQELNVLRFRETIQTDDVSVTVFKKRQDRKSRYIGLQSTFVEPEPYITDLNVQQRGDITDRCSYSAPNTRYQEPVRGVGLRRLLKEHGFLMHLIDEFRTSQCCPSCGHRSLTTFKRMPDPQPYQRRNNPEVICHGLLSSGAEELCERLWNRGLVTCLSMIHIVRNLRLNSEIPERFQRAGIERRGPTRRRRSEENEERRALFL

SEQ ID NO: 2471 - protein, 385 aa, Rhizopus delemar
MTIDTYILNAQILKNSIISHLDKEVVWGAVLDVTSKAMKPQRERKVTKFRGTIYTDGVGVSVLKQNYDTKKKGGSSGGKPNSIEADEFQYIEELGKEDLLAGVGKCVLIDPGRRDLLYCMHEKSTVENKMICRYTSNQKAIETKSRKFRKLRNNLKRDEVIAAELSLSHFKSSTVNKDKFVEYLQERAKVIPVMKAYYLNEDRPAAEDQGADGFLPFRKMKFSSFINQQQADKRLAKKLRERFGNDAILILDNWSAGNIKYHESIRGDGMRRMLAKEGFQAYLLDEFRTSSLCPSCQNGELETFKKAVTSTIEVTAKVPLRRLWNCDIAATLNFRHILFSMRANGERPERFCKSKKPLFTGSKRKNMSSSSASTSQPTKRQNNPL

SEQ ID NO: 2472 - protein, 286 aa, Rhizopus delemar
MAYRYTSNQKAMETKSRKFRKLRNNLKRDEVIAAEFSLSHFKSSTVNKDKFVKYPQERAKVIPVMKAYYLNEDRPAAEDQGAGGFLPFRQMKLSSFINQQQAVKRLTKNLRERFENDTILIVGNWSAGNVKYHEPIKGVGMRRMLAKEGFQVYLLDEFRTSSLCPSCQNGELETFKKVQDPRPYQRENYPIADRHGLLRYKNQQCLKAVTSTIEATDKVPLRRLWNRDIAATLNFRRILFSLRANGDRPERFCKSKKPPSTGPKRKYMSSSSASTSQPTKRSNNPL

SEQ ID NO: 2473 - protein, 555 aa, Rhizopus delemar
MSSPFYCKGLSVAQRKALSHYVYTLKQKQQSTWPSSLERNQCLEETIEKMNALWSRYQTMNCDAEDLYSKPHEFFKWLFYLQQKINEKVNIMEEKPATFASKSYIYRKLKELTFTSILNRRSFKSLQEQVLQSINSKIPLVLGKKLGKLEPHLPALLKFITSIQSRIEDGTFTPAKYTDRRGYRFFSILPVYSFAMKSIQIDAQAFWRLLKQSGIENIPKGVKDKSALSDFYYRLFNFSKMGFRTRKSLSEGKKQFQVRKKKQIDTLLGKQPEDFLEDIENGCEIWGVDPGIATLVTAVDTSGRQRTTSLEEYYHLCGYNDANSIRKKHQEQHKAQFLKVSNLSSLKTSDMAEFLKACKERLSLYDDITSYYNEKSWSSKLKFKCYMRKQKGVHEICKRFIHGSAKYDEKATTGVRTSTKKENRYYPSAPIDHEKRSKKTIIAFGDGMFGSSLRGNKSAPVRMIKKALKKYCGKQLDICMVDEYLTSQICNKCKTRNVDNVVTAKSKRRVHTVLKCKQNNCNIIWNRDIMAAHNILDIFLFAAKNKNQRLDAFVR

SEQ ID NO: 2474 - protein, 555 aa, Rhizopus delemar
MSSPFYCKGLSVAQRKALSHYVYTLKQKQQSIWPSSLERNQCLEEIIEKMNALWSRYQTMNCDAEDLYSKPHEFFKWLFYLQQKINEKVYIMEEKPVTFASKSYIYRKLKELTFTSILNRRSFKSLQEQVLQSINSKIPLVLGKKLEKLEPHLPALLKFITSIQSRIEDGTFTPAKYTDRRGYRFFSILPVYSFAMKSIQIDAQAFWRLLQQSGIENIPKGVKDKSALSDFYYRLFNFSKMGFRTRKSLSEGKKQFQVRKKKQIDTLLGKQPEDFLEAIENGCEIWGVDPGIATLVTAVDTSGRQRTTSLEEYYHLCGYNDANSIRKKHQEQHKAQFLKVSNLSSLKTSDMAEFLKACKERLSLYDDITSYYNEKSWSSKLKFKCYMRKQKGVHEICKRFIHGSAKYDEKATTGVRTSTKKENRYYPSAPIDHEKRSKKTIIAFGDGMFGSSLRGNKSAPVRMIKKALKKHCGKQLDICMVDEYLTSQICNKCKTRNVDNVVTAKSKRRVHTVLKCKQNNCNIIWNRDIMAAHNILDIFLFAAKNKNQRLDAFVR

SEQ ID NO: 2475 - protein, 244 aa, Rhizopus delemar
MIYRYTSNQKAIKTKSRKFRKLRNNLKRDEVIVAELFLPHFKPSTVNKDKFVEYLQERAKVIPVMKAYYLNEDRPAAEDQGAGDFLPFRKMKLSSFINQQQADKRLVKKLRERFGNDAILILGNWSAGNVKYHGPIRGVGMKRMLAKEGFQVYLLDEFRTSSLCPSCQNGELEMFKKVQNSRPYQREKHPIADRHGFLSLRANGERPERFCRLKKSLSTNSKRKNISSSSASTSRLTKRPNNPL

SEQ ID NO: 2476 - protein, 378 aa, Rhizopus delemar
MKPQGERKFMKFRGTIYTDGVGVSVLKQNYDTKKKGGSSGGKPKSIEADEFQYIEKLGKEDLLAGVGKCVLIEPGRRDLLCCMHEKSTVENKMIYRYTSNQKAIETKSRKFRKLRNNLKKDEVIETELFLSHFKSSTVNKEKFVEYLQERAKVIPVMKAYYLNEDRPAAEDQGAGGFLPFRKMKLSSFINKQQADKRLTKKLRERFGNDAILILGNWSAGKVKYHEPIRGIGMRRMLAKEGFQVYLLDEFRTFSLCPSCQNGELETFKKVQNPRPYQREKYPVVDRHGLLRCKNQQCLKAVTSTTEAADKVPLRRLWNRDMAATLNFRQILFSLRANGERPERFCRSKKSLSTGSKRKNISSSSASTSPPTKIPNNSL

SEQ ID NO: 2477 - protein, 232 aa, Rhizopus delemar
MPKLSGDCCSNLVLKISQKVLKINRLFRTSTIGFLTFPKWDFELEKAFQRGKNSPPEDFLEDIENGCEIWGVDPGVATLVTAVDTSGRQRTTSLEEYYHLCGYNDANSIRKKHQEQHKAQFLKISNLSSLKTSNMAEFLKACKERLSLYDDITSYYNEKSWSSKLKFKCYIRKQKGVHEICKRFIHGSAKYDEKATTGVRTSTKKENRYYLSAPIDHEKRSKKTIIAFGDET

SEQ ID NO: 2478 - protein, 555 aa, Rhizopus delemar
MSSPFYCKGLSVAQRKALSHYVYTLKQKQQSTWPSSLERNQCLEETIEKMNALWSRYQTMNCDAEDLYSKPHEFFKWLFYLQQKINEKVNIMEEKPATFASKSYIYRKLKELTFTSILNRRSFKSLQEQVLQSINSKIPLVLGKKLGKLEPHLPALLKFITSIQSRIEDGTFTPAKYTDRRGYRFFSILPVYSFAMKSIQIDAQAFWRLLKQSGIENIPKGVKDKSALSNFYYRLFNFSKMGFRTRKSLSEGKKQFQVRKKKQIDTLLGKQPEDFLEDIENGCEIWGVDPGIATLVTAVDTSGRQRTTSLEEYYHLCGYNDANSIRKKHQEQHKAQFLKISNLSSLKTSNMAEFLKACKERLSLYDDITSYYNEKFWSSKLKFKCYIRKQKGVHEICKRFIHGSAKYDEKATTGVRTSTKKENRYYPSAPIDHEKRSKKTIIAFGDGMFGSSLRGNKSAPVRMIKKALKKYCGKQLDICMVDEYLTSQICNKCKTRNIDNVVTAKSKRRVHTVLKCKQNNCNIIWNRDIMAAHNILDIFLFAAKNKNQRLDVFLR

SEQ ID NO: 2479 - protein, 289 aa, Allomyces macrogynus
MLNNQLHTVPEVGANAAAIAASRRDAAQHNQLLETYVKKSQHTQAPPNQTGKWRSMSKGMMQEKRGRVERSQFMDKFRSARPALRRFNANMPMFKTLDLAALHNACQYVTAWLPVVKPMALSNSLASYEFGAANAERAFFDRLAAPLMLSPDPTRPALVYFGNVGHLSPHPHGVSTPVRKFLCMLVHAARVVLLDEWKTRKTCSLCGSEMPNDACRWGAKRCRTCKRIRARDRNAYLNMVRVAVMDVLAVSFPQHWRDRGHPLCKRAPLVISLGGAQQVGAGGEGGGAA

SEQ ID NO: 2480 - protein, 697 aa, Ectocarpus siliculosus
MDHLSCRLERRLWECRDDEHFWTNIPRAAKKIYEAAGQKTPERALPIIRKFVDQKRGSEKELLRPEWGEAMEHLLSEYRGLFEPLRVKRPPPKDPPEHPKTEEELTGREDFLYNVKARLNDVLRIEAGCRKVDFHLRKRRGEIWSEINERQQSIKSSKTKEGFLKQRHLLQEIPVPPWFDEGIKMSKKDASNLVRDVRNTRKDMWKSMREPGTEDPPKAFSLMPHFSLTRAFVRYDSQSIGTLAKSLDFPGVSENQVTLKTTGVKCSGKAERLWWTGIFDFHSERIVNRRPSTEKNQTQRTRKVLRLNNRYRKGIGVCNKDPWFTDEVLYSAKRDDPSCETPWIVNSISTDGLQVKVCLATLAKTNPLPKGVKELVKKGYASIQDKLRVSKSSKGVFKEAFPLYGTEKSRLSSPDNHIEVVGLDPGQVSVYATVRANITSPKTFEASEFKGSQSSISSREYKHQSLTRFSAKAEVGRRLDHVEYGQAVQAFDSVSLKQPGSSVAYSSVIYCTLRVRVVELLSEERRLQKFARLRARQRTVDGMARDIAFGNTYKQEVRKEQRSSAEPLSPERRKELLKKIRDKKRVVFFGNGQFGHGARGACPRKALIRALGVLCPVVLVDEFRTSKCCCSCGVPLKQVDGSRVFRCSSQMDEGQSCSVKFIDRDTNGSANIGVCGVFQLLGLKRPSFLCRKSSEGK

SEQ ID NO: 2481 - protein, 627 aa, Ectocarpus siliculosus
MEGLLSEFRGLFEPLRVKRPPPKDPPDHPKTEEELTGREDFLYNVKARLNDVLQIEAGCRKVDFHLRKRRGEIWSEVNERQQSIKSSKTKEGFLKQRHLLQEIPVPPWFDEGIEMSKKDASNLVRDVRNTRRDMWKSMKEPGTEHPPKAFSLMPHFSLTRAFVRYDSQSIGTLAKSLDFPGVSENQVTLKTTGVKCAGRAERLWWTGIFDFYSERIVNRRPSTEKNQTQRTRKVLRLNNRYRKGIGVCNKDPWFTDEVLYSAKRDDPSCETPWIVNSISTDGLQVKVCLATLAKTNPLPKGVKELVKKGYASIQDKLRVSKSSKGVFKEAFPLYDTEKSRLSSPDNHIEVVGLDPGQVSVYATVRANITSPETFKASDFKGSQSSISSREYKHQSLTRFSARAEVGRRLDNVEYGQAVQAFDSVSLKQPDSSVAYSSVIYCTLRVRVVELLSEERRLQKFARLRARQRTVDGMARDIAFGNTYRQEVRKEQRSSAEPLSPERRKELLKKIRDKRRVVFFGNGQFGHGARGACPRKALIRALGVLCPVVLVDEFRTSKCCCSCGVPLKQVDGSRVFRCSSQMDEGRSCPVRYIDRDANGSANIGVCGVFQLLGFKRPSFLCRKSSEGK

SEQ ID NO: 2482 - protein, 457 aa, unidentified
  source 1..457: note = [Ashbya] aceris (nom. inval.)
MPIFAAKKRQATLKNKLVLQQGDGLKKESLDIPSWARFKMIDHGQAANDQVLIPQKPSAAGDALKDHWTPKTIRIYPTSKQKEILHLWLTATRHMYNLAVAERIRLGKEAKQNGTKVKMKLKHLREVMPLKKCFDYERDPKLTYLKNVPFLIKDNGLRDFDKDYRTNLAKSKNTLRPFKIHFKKIKDRQSMTVEKKVWGLSRGIFHEVFRKGAFRSTEPLPEQLPHDSRLIREHGKWFLVIPYETHGLMTKKEAVNAVAVDPGVRTFLTTYDSSQRVLEIGEDGYLKLQHLDRRLRSLQSDVHKLRTKGIPLSKEDRKRKIRNRRTVISRLYQRKKNLANDVHRKASHLLASKYNYILIPVLNFHNFKKTNRRVKANLANMKHCLFVQRLKNKASHFENTMVIEVDEEFTTKTCSSCGVRSNIGASKVFKCDNCDATFDRDHNAAKNILLKYLGEIE

SEQ ID NO: 2483 - protein, 723 aa, Moesziomyces aphidis
MAPKDRSLPLIPPYRIPSLPLQANMTSVVLSNIARSKREMPRRGPDRGHHVYPFYDGHLAHKYHALVRPAQANQLSHESINTFEPTEMALSRCWTFAMVTDFAATAGQQKRWPFTHTTVLDCSSDYFPTDQGRLPVEDLGNEVVRAILQAADVGPAFPSAGSGAADPLAPVAGQVPSSAANAPALAPLARQAPSSVVTAEPTPMDLDHAPAPPGPTPSAAAAAPPPRPPPPSTQPTPQSSQTLVNKPEITNTRTAVYRIHAPTELKDRIRTFRRRTRLVKNEAVRLVNMATSTSHEHLNERRLYTLLANNGSAFSSKHPELLRCPTYARRQVILEAVAQRKSIITRYENLPGGRRRPLPSIRPPTKQTDKRRGFSVAFNHDTGRIEALYDVTGTEVTGLKLVMPAVTIGGTRYSEVRARICLRGERQRLRLLELCRWSRANAFKLPREWRVCCGADGRWYLHVLYELVDPKRFNADQQAEKKRRGITVLNGAIKVKSIDPGARTPFTVYTSEGETIDIGGQDDRARLCELRLAADRVQSRINEMKRLNRRPSTRVSREMRKRRFVRPARERSELHKRWRRIMADIKNLVKEVHCRTAHFLALSSDVIVMPRMEVLGMVRRRRSRLKISTKRELLTWSHSAFVNRLAIKCHDIAYDARFPHKAGHPTLLLVQPEAYTSKTCGACGRLNDRLGSQPDFLCPYQDCAYTTGRDHNGAFNMIIKAIR

SEQ ID NO: 2484 - protein, 549 aa, Klebsormidium nitens
MGYVSLSSARHHFGVSGKTLYRWEASGKVTVKRSPGNRRLFLVDDPQPQYEPTRESVVYVRVSSSKQQDDMRRQEKYLLDQHPGSRVVRDIGSGLNFKRKGLLSLLERSEEGLLRRVVVASEDRLCRFGFDLLAWQFKRHGVELLVCDKADKSPEAELAEDVLAVIQVFGCRWNGKRSYNRAVSLMHETSVYNKMRLRNMITPAEVNQDNLWLLETPKDIRAGAVFEAAKNIKAAFTNKARGNIENFKMGYRSRKKEDSCGWTINVPKTALKVKGERCLQVYRDSCPWLFQTLGRIGPLSMDCKIQFDGMRYFLIVPYERHVVSPRREGVIALDPGVRTFQTAYSPDGHCYELGRSCCRRLEALCVHLDRLISLASVTPKTLRRTKWAMGLRIKKLRRRLQSLRDEMHYKAADYLTRTAHIILLPTFETKDMTRRTTRRLRSRTVRNLSLLSHYKFKQRLIAKAAVRGVKVLQVSEHYTSKTCGRCGSIHETLGGRRVFKCPRCGVVLDRDCNGARNVLLRAMREEPPSRGAMQDGATVDMPCLAWTNE

SEQ ID NO: 2485 - protein, 1000 aa, Klebsormidium nitens
MAAEAFLKLDQNALRLIFDKAGVSIATVKEVCKDWLLVGRRICRKLTLTGNEVIPRDGTAGVLSCLQDVKTLVIEKGCFRRGSKLRQSTLKSIVAGVSYRHVQITSPPLKTCPGLVATLHKHLNMDRLKCICLSAPCIPKVLLAFLISQGRCLETILMGGTEDGDLSAALQSILINHSVKNFALNGHTISDMHPLSTALPMLSYLSVEVFGEVDWAGLKGLKELQQLYVAIKGSHPSEGGLFETLAEMKGVTVVDTLALAFAGRDMLEVDIMTGSAGVGTVVTDGLLAATSGTIRHLVIDIANLHMAADAGSPHPITGCTGYDLDKARALAVALRSKRVYSISLRAGRECGSLGDCVCPSDLLEVLMDDGTDGFEGTKRKRPDIALRIQQRRGKETSVVQTGWNVLCQDLVIRDRIEEIIPEVTRIRIETCLLLNLHFIRLLEEGRPIPVIDQNLVGRAMQCTYARKAQADSELQETFDHHYLPLCPNRPVNSCLPRITNILLDLRNQLLCNIKNHVSVLFQSRHKAFMKLLLREAAPGVPFFEEADEDLESCTRLLTTATLWRPNETVRELLPEYPRIYGRIPEAAIECLQDLVDSVRPEVGPLPAAPQSRPHLYMPWMRIISEESSDRELRSFSLVPHASFSAPFIAITPTTWPELQPKTGKRKAPRELRDAFPSIGRLESGGKTFTDRITTDGVSASVYFLVEKRTPPPEDRMVHIHPKQRVVGLDPGKHPDFLTGIALTGDWDGIECQEEIIGLGTKDFYHRAGFKKRTFLMHTWMSRDLDVAAFNENAPSGNTVNLEDFGKRVTSVCANLYVLVRFHTARRVRKLRRRVTIKKQIEVDRACKRITAGKKTVVAFGAAQVWPGRTKRQCGPCESVKRRLSSHHKATVVMTDEFRTSQVCSTCHSDVGKFAVLKRQHVTEDGIPTVTEGGRREDEDEDGGGRTSYKTCHNVRACTNPLCRMVWNRDVNAARNIAWICMSIARGEDRPAEFTRAGVWG

SEQ ID NO: 2486 - protein, 635 aa, Klebsormidium nitens
MDEDADHEDRTPPKHPAKRPDVAERIRLRKDKETSVVQMGWRALCRDMRITDRIEQIIPEVTRIRVETCLLLNLHFIRLLEEGKAIPPIDQNLVGRAMQCTYSKRPPADPDLHETFRAHYLPLCVNRPASSCLPRISDILLDQRNQLLSNVKNHVAVRFEARHRAFVRLLIEEAAQEVPFLAAAKEDLDSCTRILTTATLWRPNESIEQLLPEYPRLYGVIPPEAARRLQALADAIRPHVGPLPAAPAAKPHLYLPWLSRIAREFSDRGRRSFALVPQAAFSAPFLAITPTTWPELLPKAGKRKAPEALLDAFPAIGRLTSLGKSFANRITTDGVSASEYFLVEKKRAPKEEREVRIHPNQRVVGLDPGKSPDFLTGATVRGDWNGTDRQSGELHLGTREFYHRAGFKKRTFLMSRWMARDADVAWFNERAPSGDGLGLEEFGGRVTAVTGSMYALIRFHTARRVRKLRRRVTVQKQREVDRVCAEITGGKRAVVAFGAATVGKGGAKGQCGPCEAVRRRLSSHHGATVVMVEEFRTSRRCSTCLSGVGGFMVSRRRRIIEDGVPTVSRGGEGSYETCHNVRACTNPLCRIVWNRDVNAARNIAWICVSMARGESRPAEFTRAGVWGGATRRISP

SEQ ID NO: 2487 - protein, 736 aa, Klebsormidium nitens
MPSKKPPHIALEHECLAYASKLFKEPTRTREDVKLRAQRNKDTECTVVKTSLNSFCKEAARALPLENVLKEVNKAICEAYILANLHVLRMCELGREVPPLDQSFFYGCLSAVSVAGRQKSPIKDLFFRETVDLYLSSRPQGYKPPDGEHLASGWYQNASLQMSTCTKNSVSVNFYRRFKRYLKHKYSLDGSTCSQKMKNILADTYDGDVPLIVRYRAMLSKAIVGRADTSPHLLMPMQYMFLRYIESHHPLTEEALKKGKQLRLFSLLPTKRGFECSNLKMCTNGLYGLLKRGGIRLPAFGAEFRKLADDYWRQLFEIEKFETSSRKFAGEIFTDGKAVCILLRKPKPKQAARRPPAKDDGEELWGLDPGRRDLFVMVNDEGEKLKCSTREFYHDAKYKLSNARVKGWYEQSPEVLEAIRNMPTKKTSESAKLLNYVQFMLPRLEMLLSFHMRKGFRALKFKRYIFAQKKLHALCKSITRRVGTKTVVGFGDWSNKDSGGVNRGSPSGPVKRLERELGKHCRVVSVDEFRTSKLHFDCKMALHNQFSEKRCKDGAVKTVKVHSVLHCRNSGCNGMTVNRDVNAARNILALLKVQLEGGVRPADPVCWVLTSAAWRYSFSVHSNSLKVCHLHPVIAASLALCTSSNLPKKTGRILPRPAKVCSSFIHHSLSKKPADKMIMPYVAVSIAFSISFAASSPGFKERSSKKQCNPTFSSTLKSQTAKSRLQSAPQWLINTS

SEQ ID NO: 2488 - protein, 262 aa, Parasitella parasitica
MKYYNDNHSENPFLTSRPVTQTTDYRFYPLPRAHKLSSKDINHKCLKYKMSSKLEKAKKNTEEGKQVQQAEDKLSNLAKSLDVNSKDYFVYNMQERKLLRSFYFSTAMCRLRRSIELATIRTKDRAAAAERRFVKGGSNNALVMGIGNAGTGVGSTIKGYDRRGGKWLPKLYTRYAKVAMTDEYMTSQLCLYCYFPIVHAKTSSNKTVLGSARCLNPKCEAFKHGRACNNRDVMSATAIGISAMTKFLYSRSFPPFTKGNHQ

SEQ ID NO: 2489 - protein, 716 aa, Parasitella parasitica
MFKLLLEGKKAEVLKKRQEQSTSSPIQDVICKDCKEPGHYNKQYSTCKLHIEPTADDVGTSKKRKQSYQIKQDKKDAKRPRTDGTRTPTCGNCGKEGHKSSRSPDCPRHILSKQETFLIHLGPNYKAYTRKLPFDQCIQRAYRAILKQRIVSACEYVRNVVIRSQLFVNFYIISLANAGSPIPHAIYQQNFWYSIIQLVRNQRATNSTSLQHGLLDYWNSFKRRHPTIVYDEKIASGVSQCITEACQQLQTTYNNHIVELFESRICKYIFYKTQNTFISMDRSDVAKMVPYVYQHVCRGDPVWPRGSVITEGKKQIVDEVYLPLKNKIPTRVTLATMSKSPNSFVPCLFDIISEYEVEHRNHKPMDDLTPNGNNKILFGNMIKSDGFSVDLLFYRRKRKKNESDVVLNLGDFSHEEVVADYQPLSLDPGRKSLFTAVVGLESTKQIRKSSTKEYYHLTGSTVYSKKLESRKQRSGILPIETNMPTSKTALPDSYHEHISYMLTHLKNLLMFYGRDTARCHFQLYQGRQRAPEMIVNMLTHGTAKYNKSKRKKKGRRNVKRGEKKKKKSNMDKKEYAKLDTTAKKLKWKPLPFREEKEKCPLVIFGDGVFGKDMAKLKNLRCGVVGKLYLTLKKREAAGELIVLTIDEFKTSKTCSSCFDNNLGIVKTPYFKGNSVLACPKCKKVWQRDVNAAINMMTISRAVWMGEERPEVFRRSK

SEQ ID NO: 2490 - protein, 496 aa, Parasitella parasitica
MKKVEEYLTSAKFLERLQEYKEEAYRNCSFELHKEGQIYKVIIEGEKINLEISLRKNAQAVTMEEITDSIHPVNFDLIKMENGAKDEPDEPDVNWLKQKFRYFHTRPKATGSTIYMADFTWAATRAQIKSLHLSCVNFSSMSIFGGNKVNADEGIPLSTVGTTHLSELKFENCLFSSQVLARLLKETFEKVDKLIFEGCVFLSDYPRKLEIKFDHTEVGSLQFWRPCIRDGRSRLFLLSKKIHNQPVIYPQSVQKNALSIHAATAIQGIDPGLVTMASGIYTSPITLINSIKRYQGAPQSAEDDKTNTFKLTARFIDKACLKQYNIHSNHKRVQRRRVTRRIRLKKFYQKHCSRHKTKLNGRSVVTFVGDWSGVSTFVKGHTRRSTKPYYKQLSAPENDHLVVVDEFASTITCNSCFSRNQKQFCRLPSGKIRRVPGAVYCINPQCPRRLNSNATTTNRDRNGAMNTTLVGFSSLISEDGHSLPPFQRSYNLNKQV

SEQ ID NO: 2491 - protein, 388 aa, Parasitella parasitica
MENEPSTVASKGFVYRKLQEIQFVQSLNRKRFRSLQEKVLQSINSSETFVPGKKLSSLTLQQISILQQFIDTVKARIEDRTFFPAKCTDPRDAQALWRLVKQSNVPWYRPGAKTETDLTDAYHDLFRFSKLGFRTRESLSTGILLRNSTDLVLKKTEGYVEKKPSDFINDIQLGCQIFAIDPGIRDITTAVDQSGRERKTSLNEYYHLCGFNTASTQREEHKKQHMNEYQQISTLSSFKTTNLDDFVKACKERFDLYDIIKKYYDSDNRSSKLRFKCYIKKQKCVDEICRRLTFGSSKYGQKSKMAAKKQKTTYVPPSPIDDAKPRKTILAFGNGGQRAQFGKCHNSQVKAKSTCCIAVSETHLQYGMESRHNGSKKHFVFFFSKVRQ

SEQ ID NO: 2492 - protein, 220 aa, Parasitella parasitica
MLRLLKSEANATNCCDIYLSRSIGIQHCSTFEELETVFAQYSQAKNFVRKFYHSKSNAKRKKRYELAKGKYYDRLAAKDRRFTHASTHIMFIGDRRHAVGSPIKGHLRFGGHWKELRHSRYTPTLISNEHNSSQTCLWCFSKLSHPYTALDGQVKMTNGSFICLNAACPQKYVVMSRDRLSALAIGLAGAAQFMLGYTFPCFDPKNTTEKQKLRSYENLI

SEQ ID NO: 2493 - protein, 313 aa, Parasitella parasitica
MVLLPLSPFSYGFKQGCSILKFFDLKQYAHSQNAPIQDNEIHPNFNIFDFTKLKEHGLFQNSFMTDGFSTSFTFLKIVSSNSLPSLTLQDLTPEDLNHCKIWGIGTSVKEVFVAVDDSDRASEVSSNAHHQVLRFSSSEYYKDQGIDVLESGVTSPKTTQMDQISRYIADILDRLERPLTFYGVEFQRLKFLNYMGRQKVHNKLINIFLNGGKKPPRTAEASNDPPAGPSTTRRDKWRKQEFQRTPEDIVPVVCLGDGNFGRRTFRGRPHGLARTLRRLLREAENQGHLISIDINERYTSQDVAVVARKIWTT

SEQ ID NO: 2494 - protein, 1685 aa, Parasitella parasitica
MPGSTSVNAPASLTTSAMSTRSKATTESDESYMDALRSQFEHRIVKSINDCQKNKGSFEELYSRLPSGVVSGAEQAIDAPVNSIVVFMNRLTRSTLKKSIELWKEYLDKNFTSLKDSIVTQEAEGNQEMMEDEEETADDEKAEESTAYRSCSASFTSIIRKYLSKHVRLTFVDTINKTVESVSDYIADFSKQIMEILLLFKHNQITIENGKIQFVPREAQSLASLLPANYLDKDVLVPRPLDRQFLSKRIRKSTLNAARFHSAIVDALERVKDNVYSGLSSHVMKMARNVYVTNFANMWANNTIVNRSLNRILETLLTVYLSPARDQKFKRKREELTGRRKGKNREPPNDNCAVQVHSMPLINKTHNGRRRLFAKEIDRRNYYITQRSDWAVKHWRANLCQQRLNSYANVLQREKEEREARREHEHQQEDVLAEDVSTEDVSKLERKMVLYNFEGDIIRAASVTSQKYVIFSSFFDIDRLKTVCDGSGLQLAHRIHIIPGLQCLRILGVRYYQQPKNEQQEQQRPVAQTSPGSDDKGNDMAAALLEQKAVIRRKLKNAQTALNNYLVGAESASQLKKKWKDENINRAWLYQRIEEAKQRKRHLIRGVVSAKQALSTMNNTVYKLKHDADPSTKNKQRKVFIDLKKPCHHKVEECEINQEVDESKLVFSGTDNGVVNVTETVVFGVDKLKYHLRLYNHFQVLQDENDAFMEEKESGSLSWANKWLIMKQIFHDRSASSIAVRLKSWRQYLLSTPKPKILFANSIAPNQMPKRREGTNWQRASTTAKERRFTHASTPIMFIGDREHAVGSPIKGLLRFGGHWKELRHSRYTSTLITNEHNSSQTCLWCFSKLSHPYTALDGQVKMTNRSFICLNAACPQKYVVMSRDRLSALAIGLAGAAQLMLGYTFPCFDPKNTTEKQAMFSHLALVFSNRKQQTSSPSVGGGTDWVNNSLFFNNNGLINGQDSLIEPMNQATSTSDMTNLYLKQDFLTTNINQNITMPANINSTATKTGTTVSANTNTYNHNNNYTSQQHQEQLSKSYPLIAPFQRNIFQGFDMPNPTPSPSAPAPHPPVQTSPSIATNFHKNDHVQFNTNTFITTPTPASEVAIAAAAAQSAINSQTQRSSNHSSTTAAAAAAAAAATPTTDPPLPGPSRLEHMQTIISKPKIKITGDNVTSANIEEGYIQFVLDNDASYISDGIDSLMYTKRKFQSVPKTGDISYTTWDIYQLVLKLHKQEIKNWSQLVGQLGLHDMSGRPQFAQRVKRWMNRYKIDCYFDYLLGNEYEFNAPEGKYSTCLMIGNYKKRKSDNSSNNISAAAGDSEDEELEEDRTDQEHRIPVLLAGSRKRMRDTSQNSMQMIENAQKFLRLHQSESEEDEEEDETDDQEQGGSDIEENDSDIRSNVNNEDEDVDMAENEEEDEEEEEEDKEDRQEEDEREREEEEELADDEEDELASSTSSPISPPRKIISTPVVAPSPSKPVNAPASPVKSKIASPIASKPTISSHTVRSMSPASSSFTRSSTTTASPSFTNKSAIASPSLMHIPLTTASPANSTFSMSSASPGTIKLPSSPPKQPPPPLSLLSIPPLSSCSNCMVNDAKIVSMGTEITGLKAHIAQLELQLEKQNSQVNKLLRLRDRTERWRKQIISDLARGPQIASENDDDDDDDDDDDDDDEDDGDASNDINNNSGS

SEQ ID NO: 2495 - protein, 284 aa, Parasitella parasitica
MTKIVDKLFFNVFKLSKLCFRNIAELTPNGANNALLGDLICTDGFSVNFLFYKRKTNQDELAVKINQIDLKLEDFDLAEINNEYRPVSLDPGRKSVFTAALDLDCSSHLRCTTSEYYHIRGSTKSSKDQNSKKEAAKREGKEKEEQKQEEKGRGEEVLESSKDEEEKPAPFQESKKISLIVFGAGMFGKDLVKLKGLRCGAVGKLFQTLKRREAKGKLIVTTINEFKTSKTCTLCFSDDLSIIKVNNFKGVGVVCCKKCPKVWQRDINAANNMMAIATSICLKN

SEQ ID NO: 2496 - protein, 424 aa, Parasitella parasitica
MAVKSLPHLYRSKSDSLVPEGILINKDKHELKRRVTFSRVVILNNPTTFILVKEERGLQLEEEEKRRQDKITENDDAEERAAKGQKKGKSRQTTKRKQSLDEKKEKEALSEEKEARRKSEDKYSHYKVVHIALCPGYARKHGVFQTSFMTNGFSTSFTFIKIVAFKSLPSLTLQDLAPEDLNHFKIWEVDPGVKEVFVAVDSSDRAIYNASEVSSNAHHQMLWFSSSEYYVNAGFKKKPPNTRICQLKKDQGIDVLESGVTSPKKTQMDQINRYIADILDRLERLLTFYGVEFQRLKFLNYLDRQKVHNELINIFFKWGTQPPRAAEASSDPPAGPSTTRRNKWRKQEFQRTPEDIVSVVCLGDGNIGRRTFRGRPHGSARTLRRLLHEAENQGHLLSIDINERYASQVCSGCGEKKFGQPEAE

SEQ ID NO: 2497 - protein, 1123 aa, Parasitella parasitica
MTEEESHPESSTERRIMTIKSTIQNIWKSNYIEPLHKLVDITNHLVTHTYFFIKYIFLQEMKNTNEAFDMNAYVNKKFFVEVFLSLIERQVRDGAKTGKSRLGNDVLLFRALINAHKDSYFRLAKYTPPKLTNAQQIALYECEKIHTAYINNIRKHFGNRLRMFLNFCCKIKQRSADIRTRMTKARYSEANIRDVIYRTVTQPSNAIKDQASQKLVPSDSSLSSEHLGQVESFLAMYPAEYNFQKSSIYYDLKANPQSHFKAFYKLTELCQLNNLKNFHCFPLRTSFVPAYMTLDAKIANYHILKNKSMKEDKMTIWGLVCDLQNKAMKDQGTLKFHGTIETDGIAASVLKQNFPTSRKRPGGGEGGSGGEDEDQPQYVESLTMAQHQEIQGRCVLIDPNRRDLLFCMKESSTISRKQLYRHTQVCRNKQLRHFKKLQKKLKPESVRLAELALSETKSSSVDSVAFVNYVTIRAEHEDILYEYYGNETADFTQDFDWDIKHEFNIRNQKNLYWGHFFIAQYKGLFPENCIDTLDDRTNLQLQINYLEVMLSQSHVKKRISQDILDRLSLFASETFIWSQRNHTQEDLKEKLNETEELVNSELKLLNLLPFRKMRFSLKVYSKQNDANLVRSLRSKFGADCVLILGNWSAPTTKFHEPIRNKGLIKMLQKNGFTLFLIDEFKTSSVCPDCEGGLQKFKTIPNPRPYQREKMPKVTCNGLLKCKNHSTPKLWNRDVAAVGKNVSIHFLFILEQMTTEQKGQSTSNIRSGHELNQEKLEVYLLKHVEGFKSPLNISQFQFGQSNPTYLLKDGNQQQYVLRKKPPGALLSSTAHAVEREYRIIHALGTKTDVPVPKVYVLCEDIEVIGTPFYVMEFLAGRIYEDCRMLSIPFEERKQLWFSAIETLAKLHRVDFKAIGLETYGRHSGFYDRQMKSLGKVSQAQAITKDENGNTVGPIPRLDEMFAWFRKNQVKDQATIVHGDFKIDNMIFHPTEPRVIGVLDWELSTIGHPLSDLSNLLQPFYVPASDDASFGMLGFKNSKEPLPVPEANELIQHYCTTLGQPYPIDRWMFAVSFSFFRLAVILQGIAARVARKQASSAQARSYADRFRPVAKMGLDIIDDHPGSKL

SEQ ID NO: 2498 - protein, 368 aa, Parasitella parasitica
MRIKTRQIDSFTPGKTNTNSAASLQKPQATNPIIIDSKPSLHKAEDCELSDRVSLTNAVFAGTDNGLIKTTETVFFDIERFALHLELYRYFHISEDPMDIDDIVPSTCLNLPETHTVGPKQIAQQTGLTSYTSSLVSKKKRTTAGHQVMEAEELLSGCSIHQSTTAEELDRNYQEHEQCRESVRSFYYSNNQCKRRRHLELSKKKAHKRIAAAEREASGFKEGGKALVMFVGDRGHGVGSRIKGHQRFGGTWKQEIHGRYTPTVITNEYNSSQTCLFCFRKLSHPLKTIGDKVKTTNGSFICINDKCPNAFKVVCRDQVSALAIGLAGLASILFGVTFPCFDQQPCHFKRQQFNDLALSFWEQKQQQA

SEQ ID NO: 2499 - protein, 284 aa, Parasitella parasitica
MSQIAEEIKQNQSQMYVLNKKIHGQLVPDSHAPVAADNLMLLLANESTIVQGVDPGIVTTATGVATTVGSLLAAINRFEAISDDKIVPHLMDAHVEFGLTANTVNTAVMSNQDRKKREKSGMQKEQLQRMAVKRRIQEKRVYQRKVAQDKAKMRHKNASFITFIGNWSGSGKISRGTREKDFFVSVDEYKSITTCPSCFQRTTKQAQIRDGKVKSVLGAVVCFNPRCPRRISTRATTSNRDKNGASSIAMIGSPSLVSENGLPLPAFRRTQSNKKVLFNYRVFE

SEQ ID NO: 2500 - protein, 401 aa, Parasitella parasitica
MAKVFSQVQQVFQYLAKLFSEQKLSFKYSFTFKSQYDFQFLGSRASKKKGQDNSCIKTSLVQGTEDDKGSAKFLTAALKALKADLRVRRKEIKNLEKQRQDAGRESRRFEKVNKDLDAALYQKLKDIRKLCNHQYVEVLKLQEQIREARHLPASSTEECIIHIHAATVIQGIDPSLVTMASGIYTSPSTLINSIKRYQGAPQSTEDDKTNTFKLTARFIDKACLKQYNIHSNHKRVQRRRVTGRIRLKKFYQKHCSRHKTKLNGRSAITFVGNWSGVTPENDHLVVVDEFASTITCNSCFSRNQKQFCRLPSGKIRRVPGAVYCINPQCPRRLNSNATTTNRDRNGALNIALVGFSSLISEDGHPLPPFQRSYNSNKFNLSTLKLRQFGDNLKPLKRVQLS

SEQ ID NO: 2501 - protein, 527 aa, Parasitella parasitica
MGLPLDHITVFEMAGLAPAPFAGLVMADFGANVIRIDRSKGFSTDVLTRNKRSIALDLKNPAAIKTLLELFKTADVLLDPFRPGVMEKLGLGPDVLLKQNPRLIYARLSGFGQSGPRSHVAGHDINYLAISGVLSLIGRQGENPFFPVNILADFAGGGLMCVMGILMALIERSKSGKGQIIDANLTAGSSYLATFPYLMQKYGLVWEGERGSNMLDGGAHFYETYRTKDDQFMAVGAIEPQFYAVLLEKLNLSNDDSLPGQLDKEAWPDMKKRFQSIFASKTQHEWCLIFDGSDACVTPVLSYNNANRKADAPSPAPHLSRTPAKKSVCSNDGDPPFLNVGKNSIEVLQEFGIGAEQIEKLLRSNALVDSSDSNKYNKDSSIGEKKQISTTDKWIPSPYKITDLSVKTRIIAYGNASFGTSINEKIPAPTKQIAEAVKKLSKDPKGTYFIHVDEYLTSQTCKKCKQQNLQTSTPPNQSVKYMLRNFCNTVNCDVMASKNIHYILHYMSQYDNKRPLEFARHSDTTKV

SEQ ID NO: 2502 - protein, 289 aa, Parasitella parasitica
MFHRVIDFKKLRFNIDDLTPNGNNKILFGNMFKSDGFSVDLLFYRRERKKMNLTKKLSLIISRFPLILDANHFSQLFTVYSKKLESRKQRSGILPIETNMAASKIASPDSYHEHINYMLTHLNKLLMFAAEIMLVVISNYIKAKGPRNVYVTDFLFKLKWKPLPFREEKEKCPLVIFGDGVFGKDMAKLKNLRCGVVGKLYLTLKKREAAGELIVLTIDEFKTSKTCSSCFDNNLGIVKTPYFKGNSVLACPKCKKVWQRDVNAAINMMTISRAVWMGEERPEVFRHLN

SEQ ID NO: 2503 - protein, 786 aa, Parasitella parasitica
MTEEESHPESSTERRIMTIKSTIQNIWKSNYIEPLHKLVDITNHLVTHTYFFIKYIFLQEMKNTNEAFDMNAYVNKKFFVEVFLSLIERQVRDGAKTGKSRLGNDVVLFRALINAHKDSYFRLAKYTPPKLTNAQQIALYECEKIHTAYINNIRKHFGNRLRMFLNFCCKIKQRSADIRTRMTKARYSEANIRDVIYRTVTQPSNAIKDQVSQKLVPADSSLSSEHLGQVESFLAMYPAEYNFQKSSIYYDLKANPQSHFKAFYKLTELCQLNNLKNFHCFPLRTSFVPAYMTLDAKIANYHILKNKSMKEDKMTIWGLVCDLQNKAMKDQGTLKFHGTIETDGIAASVLKQNFPTSRKRPGGGEGGSGGEDEDQPQYVESLTMAQHQEIQGRCVLIDPNRRDLLFCMKESSTISRKQLYRHTQVCRNKQLRHFKKLQKKLKPESVRLAELALSETKSSSVDSVAFVNYVTIRAEHEDILYEYYGNETADFTQDFDWDIKHEFNIRNQKNLYWGHFFIAQYKGLFPENCIDTLDDRTNLQLQINYLEVMLSQSHVKKRISQDILDRLSLFASETFIWSQRNHTQEDLKEKLNETEELVNSELKLLNLLPFRKMRFSLKVYSKQNDANLVRSLRSKFGADCVLILGNWSAPTTKFHEPIRNKGLIKMLQKNGFTLFLIDEFKTSSVCPDCEGGLQKFKTIPNPRPYQREKMPKVTCNGLLKCKNHSTPKLWNRDVAAVSNFLKILNELRKTGNRPSCFSRSNTETKKRKNNRSPTSASSSKKVKHSA

SEQ ID NO: 2504 - protein, 338 aa, Parasitella parasitica
MFHRVIDFKKLRLNMSDLTPNGNNKILFGNMFKSDGFSVGLLFYRRKRKKNESVVVLNLGDFIHEEVVADYQPISLDPERKSLFTAVVCLESTKQIRKSSTKEYYHLTGSTVYSKKLESRKQRSGILPIETNMPTSKTASPDSYHEHISYMLTHLNKLLMFYGRDTARCHFQLYQCRQRAPEMIVNMLTHGTAKYNKLKRKKKRKKNVKRGEKKKKSNMGEKEYAKLDKTAKKHVQAQKSSMRGGKQTVFDNEKTREAAGELIVLTIDEFKTSKTCSSCFDSNLGIVKTPYFKGNSVLACPKCKKVWQRDVNAAINMMTISRAVWMGEERPEVFTRSK

SEQ ID NO: 2505 - protein, 354 aa, Parasitella parasitica
MNNAIYKLKHDADPSTKNKQRKAFIDLKKPCHHKMEECEIDQEVDESKLVSSGTDNGVVNVTETVAFGVDRLKYHLRLYNHFQVLQDENGTFMEENKDAQFQELPRSFKIRSAEIPQQSGLARLTILGQQVANYEADLSQSIGIQHCSTFGKLETAFDQYSQAKTSVRKFYHSKSNAKKKRRYELAKGKYYDRLAAKERRFTHASTPIMFIGDRGHAVVSPFKGHLRFGGHWKELCHSRYTPTLITNEHNSSQTCLWCFSKLSHPYTALDGQVKMTNGSFICLNAACPQKYVVMSRDRLSALAIGLAGAAQLMLGYTFPCFDPKNTTEKQAMFSHLALVFSNRKQQTSSPSVGG

SEQ ID NO: 2506 - protein, 849 aa, Parasitella parasitica
MEAESDDDFQPPIIRRKRSSRENTQQSGSQKRLKGKDKEIVADDNPILNTTTLDDYDYDDFQPPVVKRPDIGESSSSVNPTFFAAESSTRASHTSNNTPNTPSKRVITIKTTIKGIWKYDYRQPLYDLVHTTNLLVTHTYAFTKYIFLKELATDENFAFNELITKDFFVEVFLSLVSAKAGNSERLKDTTKRYRSLIGKHKDAYFEDAKYTPISLAYAQQIALYECAKVQTAYFNNMKAHFGNRLRALINKLFKKKEKVESLTKEMEANNFSIKEIKQAIRKNVYQPCNQVKLAITKKNMPESGLLDDKSVTQLNEFFSMYAVDYTFQKESIFYDVVANPEKHFKAFYKLAQLSEAYEVKPFACFPLRRTFIPCYMTVDSKILNYHILKNKKVLKMDEKFNAWGRVVNLERKAFKSQGCKKTLHFQGTLETDGVGVSILKQNTDTNRKSVMPKKPLEDIDDETKYIEKLEDAELKQTLGKCVLMDPGRRDLLYCMKETSRADKKEIMIFTKNDRSKCSRHFRRLRKLLQPSQIREAETYLSGFATKSVNMEKFVEYIQARASVKDILYEYYGNETAKSITEFYPESQFDFKVDQKCNLYYENLFVAKIRGFYPQPEHEPNDITLKSHMYHTYLQIMLNQKHISERLNSEKRRKIEDLAKAILEQPHESGHKTTISSLLGKLRLLPFRKMKFSTKLFSDNNDRKLVKNIKKKFGADAVLVLGNWSAPNTKYQDPTRNKGLRRMLKKNGFPLYLIDEFRTSSFCPKCESDLEKFKVIPNPRPHNQEKQPKVLCHGLLRCKNMSCLEQQTSEGNQRLWNRDQAAVLNFRKILNCLRETKQRPPLFSREPSKN

SEQ ID NO: 2507 - protein, 371 aa, Parasitella parasitica
MRAGKTSREFESLHGKRDAGLYQDLRRARHAFNQVYMEMSQIAEEIKQNQSQMYVLNKKVHGQLVPDSHAPVAADNLMLLLANESTIVQGVDPGIVTTATGVATTVGSLFAAINRFEAISDDKIVPHPMDAHIEFGLTANTVNTAVISNQDRKKREKSGMQKKQLQRMAVKRRIREKRFYQRKVAQDKAKTRHENASFITFTGNWSGSGKYVKGHSRRSTRPYYTQLAACEKDFVLSVDEYKSTITCSSCFQRTTKQTQIRDGKVKSIPGAVVCFNPRCQRRISTNATTSNRNRNGATNIAMIGFSSLVSEKGLPLPAFRRIQSNKYALSALFLSHQAHGEDRIPTKGALVLLGDLEFCVLWIRSKNVIHN

SEQ ID NO: 2508 - protein, 310 aa, Parasitella parasitica
MSFSEKANSEDCKWPSSVDKNDENNTLVERTLAFWSKFDVTGARPPTVPNVYARPHHYLKWAHEIQREMSDKQFIQENVPQQTATPGYVYKTYRLSTVSPKKDHKTFIAATQKEIQDKTFKPLKCTDSRGSRTFSLLPLYDCKAKSVKLISKHFGRLSTLVAKQIKISKISINYNKDSSIGEKKQTSTTDKRILSPPKDKTTYVKTRIPAYGNASFGTSMKGKLPAPTKRITEAVKKLSKDLKGTYFIYDDEYLTSQMCNKWKQRKLTNLNAAGSKRKVHAVLKCNSCDTVWNRDVMASKNIYYTMHVTT

SEQ ID NO: 2509 - protein, 298 aa, Parasitella parasitica
MQTNGYYVEFTFKKKLVKKSTSKPLTTADFCEDIKNNQFLIWGVDPGVTDIYTAADSGDASKRERIKRTSCKEYYHICGFNLAKQKRMQHQNNNLQDFDFISKLPILKTSNLIDFVNAAAQRLINYQRTSAYYNYDNCSIGEKKQTSTIDKWILSPPKDKATDSSVKTRIIAYGNASFGTSMKGKLPASSKRITEAVKKLSKDSKGTYLVYVDEYLTSQTCNKCRQQKLTNLNAAGSKRKVHAVLKCNSCDTVWNRDVMASKNIYFIMHYMSQHNNERPPEFARTSDTTESITCMRSP

SEQ ID NO: 2510 - protein, 339 aa, Parasitella parasitica
MPSIVDLYNCFEDNESELKYWKEVVVMELDKNSLVQQQLEGSCRAAINSKKTLQVSNKMNRLRSDDLGKISTLIAATQKKIQDKTFEPLKFTDSRGSRIFSLLPLYDCKAKSIQIDQQALWKIIFDISKLGFKNKQDLNNDKRLFWNLMQTNGYSVEFIFKKKPVKKSTSKPLTAVDFCEDINNNQVLIWGVDPGVTDIYTAAGSGDASKKSIGEKKQTSTTDKWIPPKDKAADSSVKTRILAYGNASFVTSMKGKLPAPTKRITEAVKKLSKDSKGTYFIYVDEHLTSQKCNKCKQRKLTNLNAVGPKRKVHAVLKCNSCDTLWNRDVMASKNIYYTL

SEQ ID NO: 2511 - protein, 367 aa, Parasitella parasitica
MSNSNKKIPYYSDEPSQSPAKSILQKSHDYEEHETPEHKYGALTMKRNYLPENLRAAHEEPDEFALDGQDDELPKTPKKTGIVFPNEPDEWKAIDEKERKIKEDAVQLLPPKIYGQLVPDSHAPVAADNLMLLLANESTIVQGVDPGIVTTAGYWAISDDKIVPLPMDAHVEFGLPANTVITAVMSNQDRNKREKSGMQKKQLQRTAAKRRIREKLFYQRKVAQDKAKTRHENASFITFTGNWSGSGKYVKGHSRSSTRPHYTQLAACEKDFVLSVDEYKSTITCSSCFQRTTKQTQIRDGKVKSIPGVVVCFDPRCPRRISTSATTSNRDRNEATKIAMIGFSSLVSEDGLPLPAFRRTQSNKCLP

SEQ ID NO: 2512 - protein, 347 aa, Parasitella parasitica
MPNQSVQAIKVSATRQGSLKNKGFFIVYDFSCFGYQRSYKRPRKWEEHIQPNASYRWVRFARKKKELEKKAALELEDFSKEEVEQLFLPVAVDPGRKTSFAGTDRRRRKILLKRAAGIENIESQIPTAKTVNMTRTKQYIEYILANIQSSFRFYNFQSAPFRFYDNQGKQRANAEMANILLKDGRKYNKAKRRKTSRNKRRKRRRRKSKNQGEIQAATSNYLPKESIYKKSKFISSGKLPVVVFGDGLKNEENVPMKGQLSGTSGVVLKSLYERLEQLTVAVVMMNEHNASKIVKTAQSCETGTLMQARTWLTYPCLYGMVKEGHQFLKDKENRRRENGLSLPSKSD

SEQ ID NO: 2513 - protein, 490 aa, Parasitella parasitica
MTVEKQLNWDYDALHVNCATLYFLYAKDHNLLKLDGQSVFSSAASIVSDADKTAIFNNFFKSRYLAKLFSEQKLSFKYSFTFKSQYDLQFLGSRASKKKGQDNSCIKTSLVQGTEDDKGSAKFLTAALKALKADLRVRRKEIKNLEKQRQDAGRESRRFEKVNKDLDAALYQKLKDIRKLCNHQYVEVLKLQEQIRDGQSRLFLLNKKIHNQPVIYTQPVQKNALSIHAATAIQGIDPGLVTMASGIYTSPITLINSIKRYQGAPQSAEDDKTNTFKLTARFIDKACLKQYSIHSNHKRVQRRRVTGRIRLKKFYQKHCSRHKTKLNGKSAVTFVGNWSGVGTFVKGHTRRSTKPYYKQLSAPENDHLVVVDEFASTITCNSCFLRNQKQFCRLPSGKIRRVPFAVYCINPQCPRRLNSNATTTNRDRNGAMNIALIGFSSLISEDGHPLPPFQRSYNSNKFNLSTLKLRQFGENLKPLKRGDSLDVLRA

SEQ ID NO: 2514 - protein, 533 aa, Parasitella parasitica
MHEFWQERDPNTLSLQELLAAPSSDVDANSNSNYYILLHCKEDIPEFLILYVPVDKQQTHYKLQTYWSYIRRQHPTIVYSVNLDSGNSHCVTEACVQVATTYSNAIVETFEKRVMSYLYYLIQNICMSMKPDQVKLVVKEYCYQYVFRGEPKWPTSIDPSNKGKLKIRDSCNTLRNLSNESISLKSLSAFLGNYVRWFSYILSIYKEDHRAHSPFDVRQLPLPRRFSITPIPSCRCKFVTVSASALSSFIKGTRPTGYEGQLELLYRVFNFTKLRFRDTKEYYDLTGSTKYTIKLQNLKNEAGITPIKTDIPTAKTCLAAVYHTYAAYMLLHRQALLDFYGFQRAKVRFYLYQGRQKAPQIMVNMLVNGGKKYNRRQRSKKKKRAKQKKRLKKQNRVIPPTTAKPAKFHQYTNKVPLIVFGSGMFGKDSVKLKGNKTGVTDILWRAIKKREKEGDLLAITIDEFKTSRICYRCYEDSLKKVDNVKGVSVLGCENCKTLWQRDVNAAKNMLLISSYIWNDHDRPFMFRRRTTTA

SEQ ID NO: 2515 - protein, 296 aa, Parasitella parasitica
MNSLVKVQERLKTLHFQVALHVNTTGVLITNQQLKTQTYQKFTEPAKRFKEALSRSPDPEILSATFASEEGTYLRTIEHLHPLSTSYPRNYRFQNDSIYYDLFSFETIMDTSLREELVTKFPGAMFVMGDYSAPNVRFQEPIRGKGFRRLLKKSGLRVFLIDENETNKTCPQSPDGTLKSFKSVRNLTPHRSTHTSYSYMSWCTNQSHMNHDLAAGATHRFFNRDSAACLSMIIILKSVRNGTGVLAKYQRVQRQQSAPALQQPHQLIAASTLNTIIYARGNKTCRYVLYVYKFQL

SEQ ID NO: 2516 - protein, 259 aa, Parasitella parasitica
MPGNKANQNQQYHESQFCRYHAIYKLKHDADRSTKNKQRKAFIDLQKPCHHKVEECEIDLEVDESKLVFSGTDNGVFNVTKTVAFGVDRLKYHLRLYNHFQVLQDENDTFMEESKDAQYQELPRSFKIRSAEIRQQSGLASYSTSLNRRKRLTVLGQQVADYEADLSRSIGIQHCSTFEEPETAFAQYSHAKNSVRKLYHSKLNAKRKRRYELAKGKYYDRLAAKERIFNHASTPIMFIGDRGHAVGSLIKGHSRFGGH

SEQ ID NO: 2517 - protein, 376 aa, Parasitella parasitica
MVNQHKSTNNKKDTTNKQREYNDAGMAIEPIDITQDDWRLSILAELNLLPYGENKDIKADQPQMAIMNTRQPIERKQDLIKQKLDMAAARRHQIKEMRLREQLDTALFETIQLLRQQEFERRENHASVVADSLILPLGNESTIVQGIDPEIVATATGIATTAGSLFAAINRFEAISDDKIVPHPMDAHVEFGLTANIVSTAVMSNQDRKKREKSGMQKKQLQRMAVKRRIREKRFHQRKVAQDKAKTRHENASFMTFTGNWSGSGKYIKGRSRRSTRPYYTQLAACEKVFVVSVDEYKSIITCSSCFQRTTKQTQIRDGKVRGSFNPRCSRRISTSNRDRIRATNIAMIGFSSLVSENGPSPTRIPAHTVKQVSTT

SEQ ID NO: 2518 - protein, 350 aa, Parasitella parasitica
MTLVRDAREQLQAAKRAIYEYRHPNTAPATNPIIIDSKPSLHKAEDCELSDRVSLTNAVFAGTDNGLIKTTETVFFDIERFVLHLELYRYFHISEDPMDIDDIVPSTCLNLPETHTVGPKQIAQQTELTSYTSSLVIKKKRTTAGHQVMEAEELLSGCSIHQSTTAEELDRNYQEHEQCRESVRSFYYSNNQRKRRRHLELSKKRAHDRIAAAERKASGFKEGGKALVMFVGDRGHGVGSRIKGHQRGGGTWKQEIHGRDTPTMITNEYNSSHTCLFCFQKLSHPLQTIGDKVKTTNGSFICINDKCPNAFKVVCRDQVSALAIGLAGLASILFGVTFPCFDQQPCRLKR

SEQ ID NO: 2519 - protein, 427 aa, Parasitella parasitica
MVNYSITLLDNYTHITISLETLFHNILIDIKNTVGENQVEAHPLPEHQPLLENCVKSVVVPFYRILRDDLPDQRKLIVKNKLNGAIDHFFDFTCMFLLIVQLTIIDFAMFGNQELNLNTLVSAPFCSLNVSRIQVPPALFGDSTSKSLDLKNLFGLNHLQIISSASFGAVGVKEKTAEDHPTWTSLQKRILKLFLTLNFQVKKETEFREKRLDFQRKVKKLRKARQDKETNEDFDEIGSHDISNRRLYQLKAAIKQLFYNQEPAQEYSMQLRDFYYCKKFNRLRRIVEIKKRTAKDQVTARERSFVAGGRKGAATIVAIGDKGAGVGSTIKGYDRRGGTWHQEKHNCYTTAVTTSENITSQLCVYCYHQISHPELGGSRCLNPSCPAVKRGRAVQTRDVMSAATIGLLAMTKILLNQSVPPLCQKLL

SEQ ID NO: 2520 - protein, 757 aa, Parasitella parasitica
MSSRKTVTEAEVDADLPATEIETFLKRYNRKKDTKSIDHWIKFVEENFQTLKTSSGRDIKRKERATDYQGVNDPIAKVQGKPKSTKEEIRCCTAQMKKIINDRIPKNISKHIQDTLDSTLVEVSDYITGYSVRLLSLILLLKENTFEIEDKSFSLKPITGLAIEDILPRNYEIETTAANVPPPLKRPCLESDTFNKHYKNMFSTDYLQCEMSTLPKLDAYRALRSEASAGQASLVDQELQLEIEAGSIPKAADGLVEMEEEGEIRESADTSRRRLNSLGAVIISMLYDHHGSQIKERHVKDKCSDIQENELRACLTICKLIMPYIPAKKNRYSLPYQLPFVLMANEVLCSSGYSKFKTSLLPLRSPFQLNALKINAPSLCQTVKIGGTLKNILPYQHCEVDKKQEEKKQRVKGSMMPKKRIEEEAARAVLEKRAYLERIQNVKGDLAKARQAHYLLIKYVKDDNTFKENIKDRPVVISKDRYKCMEKVEKMKLDNSVDLEAVAFGGTDNGLVTMSETSRFDMARFKFHLSLHNRFQILDNTEGTTSASDDLEDLDGKKNLSILKTHKIKASQIDHESGAKNLRRNLEKAKKLKRSQDGFTINEIEQKLAIVGAENQDDLKENRKSLKEERFYSLQRRKCLDRFCAAERRYVASQVQRSSILFVGNRGYGVGSSIKGHLKYGATWTPKKHALYITVYETNENNNSQTCLFYYEKLAHPITVIEKEGKKTIKTVNGTFVCSNRRCFTVENGQSHHKFLR

SEQ ID NO: 2521 - protein, 308 aa, Parasitella parasitica
MQIDQQAFWRIVSSCGKTNQEIKDSIPEEKNDETLRSCYSQIFDFSKLSFKNKQDLSNDKRLFWHLMQTNGYSVEFTFKKKPTKKSASKPLTAADFCEDIKNDQVLNWGVDTGVTDIYTAADSGDASKKERIRKQRILSYSNKYNKDSSIGEKKQTSTTDKWIPSPPKDKTTDSSVKTRVFAYGNASFGTSMKCKLPAPTKRITEAVKKLSKDSKGTYFIYVDEYLTSQTCNKCKQRKLTNLNNAESKRKVHVVLKCNSCNTLWNRDVMASKSIYCMMHYMSQHNNERSPKSARPSDTSESIPCMRSP

SEQ ID NO: 2522 - protein, 302 aa, Parasitella parasitica
MGLPLNLSQANAYAQYIYQATVNDSRFPPEWPNVYTNESLNEKLSQRIEYLVDATAEEWNELQTSRTARQRQTTTASLDTTSEASSSAARLNPMSHQTLHRQLPNEENMTWVYHFLSKLPEWNEMKRPQFEAHKVPSKFGDGTFAPLTFLVRYQARLFTIAPCPGYTQKYIRINKNSLGSILKFFDLKQYAHPQNASIQANGIHLNFNIFNFTKLKEDKWIKQEFQRTPEDIVPVVCLGDGNFGRRTFRGRPHGLARTLRRLLHEAKNQGHLLSIDINERYTSQVCSGCGEKKLDNLTLSSS

SEQ ID NO: 2523 - protein, 487 aa, Parasitella parasitica
MQSSFGKKAVLIVGDWSAPNARFHEPTRNKGLLRYLKKSGFPVYMVDEYHTSSCCPECFTIGLENFKEVPNPRPFKREKTPTVLCHGLLRCKNRSCLDNDRRRVINRDTAAVLNFRHILKSLREDGERPRRFERATKKRENIIAMVIYCRYQTSSTYKFIKYFKEKPLSDWEEEDFIRFYDGNNVSKTKRSGLQACFLYCLNCIILQDQDVPDDIKEILKMKRKDIRSSPINTPQTLYVGCKVSNSVNTGTQVTINTNQQSPAPAQTQASPPAQTQASPPAQTHESPPAQTQASPPAQTQTSSSQTQAVPRRKRSVKDANTNIENWNISSPSESSTWLINNIDVCQTFYSYQNSVKEKFVEMQGYLEIENSLYDLLALSGILFLQKDNQHQGLIKNHFSTEDLKMIYKAIKSEITSGKTIFNQNLYFSIKEAIDKFEEDEDELDFSINLLALCKTADQYEARAIKAIVYLFPELISVKNRTMDVFQN

SEQ ID NO: 2524 - protein, 280 aa, Parasitella parasitica
MHEAPPVSIHYETIRDGQSRLFLLNKKIHNQPVIYTQPVQKNALSIHAATAIQGIDPGLVTMASGIYTSPITLINSIKRYQGAPQSAEDDKTNTFKLTARFIDKACLKQYNIHSNHKRVQRRRVTGRIRLKKFYQKHCSRHKTKLNRRSVVTFVGNWSGVSKFVEGHERRSTGPYYRQLSAPKNGHLVVVDEFASTITCNSCFSRNQKQFCRLPNGKIRRVPGAVYCINPQCLRRLNSNAITTKRDRNGAMNIALVGFCSLIFEDGHLLPPFQRLYNSNK

SEQ ID NO: 2525 - protein, 347 aa, Parasitella parasitica
MSNDKRLFWNLMQTNGYSVEFTLKKKPAKKSTSKPLAAADYGDASKKERIRRTSCKEYFHMCGFNLAKQKRMQHQNNNQQDFDFISKLPTLKTSNLINFTRILAYGNASFGTWKGKLPAPTKRITEAVKKLSKDLKGTYFIYVDEYLTSQTCNKCKQRKLTNLNAAGTKQYNLYAIPMTVSHSSLSKNLVDKVLVKFNEGAATTDMYEDFFGYRKQTRQYLGHNFLEILWLSNAAGRKILIEQRITLKWKTNVRFSYNGARCQPSVPIASNRIPIVPSVRIICYHCNNRGHVSKKYDQNNAESVPANVRAVKRASAMLRDRKGAKTTPPSSKRADSERCDRPGLPHD

SEQ ID NO: 2526 - protein, 791 aa, Parasitella parasitica
MMYKAVILSKIRSAKEQRLSAAASNEESNTLEDAFTAALCKDCGDRGHFSKKFYKCKLYSSASADDVGTAGKKRKQTQSIRDAKRRAKRSGVASNNESNSICKRCQKSGHKSSRSAECEYHIKNKQETMLDNLGPNYQAFTRKLPFDTCVKNHYAQNLKARIISASRDIRNVVFRAQIFTNYYIMLRAEQPDNNEVPHCIFRQQYWYSICQLVNAKRVTNSTNLPENMIAVWNVFRSTYSSIIYNQALLSGTSQCLAEACTELATCYQNNFVEYFESRLLFFIYYSLQNIFKSMDSGTLRNIAKTYCYQYICRGEPIWPNTIVLPPGLTEEIFRNRVDQECEQIRALINQRVTLATLSYAPEIVYKCLKHILDKYEDEHFRHCPFDVRRLPLPRLFSILPNPSVHWRYVTISANALSAFVTIPFPRGYSNQLNLFQKVFNFNALRIDDLEPNGENKTLFGNIVRSDGFCVDFLFYRRATTENEDSALIENHDLGVDDFSIEEVSQLYRPSFLDPGRKCVYTATTGLNTTEHEIRRCSIKEYYHFTGSTTYSKRLEQMKNEAGIKAIESVTPTAKTARSIKFGRFLDHMLINMDRLFAFYNFKSAKNRFNLYQGRQRAKEMMVNLLLHGGAKYNRKKRFQKKKNKKRQQRKNRQQQYRRIGKWKPSKFAAEDKRKVPLIVFGNGMFNKDIVKLKGIRCGAVGILWRCLKKREAAGDLLVVPIDEYLTSQVCSSCQTRTLEDHGDVKGKSVLVCKTCNTLWQRDVNAAKNMMSISLSVWNGQGRPQIFRRSNA

SEQ ID NO: 2527 - protein, 255 aa, Parasitella parasitica
MSMDDLTTNGNNKILFGNTTVYSRKLESRKQRSGILPIETNMPTSKTASPDSYHEHISYMLTHLNKLLMFYGGATARCHGTAKYNKSKRKKRQRKNVKRGEKKKKKSNMDKKEYAKLDTTAKKLKWKPLPFREEKENCPLVIFGDGVFGKDMVKLKNLRCGVVGKLYLTLKKREAAGELIVLTIDEFKTSKTCSSCFDNNLGIVKTPYFKGNSVLACPKCKNVWQRDVNAAINTMTISRAVWMGEERPEVYRRSK

SEQ ID NO: 2528 - protein, 291 aa, Mucor ambiguus
MWSDSSIVNKLLKRLLRCLLCVHLRPDEDESQRAWLVAERKAGRDEPSEKIPKTGVPVNDICFARKIRNGRRKIITSEAKKQQKYLRKGKWVKKEHVASRKKMPLTMWKRHWPKMRYSQKGHKISPSEELDSYFSKSDKVCSNRRPCQSLVLSCYHSSSQCQFELRKNRYLDRIASYERKSSSVRHPIMFVGGRGHGYGFSIKGHLRGHWKEERHGRYTPTVTTDEYNSSQTCLFCFGKLSHPTYAKDDAVKIIRGIFLCMNTRCPNNFRFLCRDQVSALAIGLTGVAQHC

SEQ ID NO: 2529 - protein, 332 aa, Mucor ambiguus
MKIIDTLKVSKQSTLNTKEDSCFVKTELVNLNVNLVSQETCYGDDEESESKDANASHSKDPEDNLIPKTFRITSKFIDRGSGQQKQLHKLEKAKKAPNLRQEVLSFEAMKSDYPMFSAKTPDEVEEFEILHESQKQDRRDFYYSNSRCRGQPRYEFQRRRFINKLCVGERNHVSKKNPVLFVGDRGYGINSQINGHLRCGGTWKAKIHAQYCPVLTTNEHNTSQTCVFCFSKTSHPLKIVSRKNKQYLHSVNGTPICMNPDCVLRSRGETHKGRNSLSSLAIGLAGLSAVAIGQSIPCFDPTISKSKADNYKSPAKAFLNRNTTGSVSSLKV

SEQ ID NO: 2530 - protein, 449 aa, Gonapodya prolifera
MPILSMIENPISKSSWDENCQLWPHYLEALRFLLSDLEARTSILVAEGKSYPRPPRKFSLAPIYGFKPHHIMLDERGCRDLHSLHVQLGNRRIPAEELHIRQIFNVRAVENLSEAKQFAGTLTTNGLKVCIQKIMRIPRVDNSSGDGPSFESVELNDNTIVVAMDPNKPGGTVAGGPVSESGVKPSYCFDVSRNEYYHSTGLRASARRLKRYLKTGGWEAMQSSLPTAKTTNYRDALKRLEQFSLVARELLVAYRDSSCTQDNWNFSVARNRVLHRFARRISHLGQRDEKGQDFDFVRNSNRVRRRRKSSHREPVQEPERRDIVFVTSDLSAPERQGISGTTMLLKLLCSILHKGDGNRSYVRAVVNVGEDRTSQECNNCHHHGVPTVLTDVHIDGKKIWRIKRCAQCQTYWNRDICAALNIRSVWLFGNSHNGMRPGNFVRGYRGHPA

SEQ ID NO: 2531 - protein, 914 aa, Gonapodya prolifera
MTESSGPQRLRLRDFEVVVLSCGNQHQKLREDELLSKITQIPQVQARSGWIGGLYKSEIPIVRGGVESHPELALPILYKIYRYFETLPEAQWPIGKNGLPKEPRKSSLLPLKHGFTISHMKMCNLSLRGLLVRSGVSGLPSQDKWIKEGHAKSWWRKLFHISKYEKGTRKFAGEIEIDGKAVSVTLRCPAPDKVNPLTNKVKPKKQLLAEEKLKRILPEAVSVSSNTIWGLDPGRSDLFCATNNKGDSIHCHTAEFREDAYFKKSNQKHTTWTRARDDISRAYADMPRKKTVLLDQLESYGQFALARVDDLLRFSIQNPYRQLRFKRFIFAQKKLAKLAKQFAQEPDVLVGFGDWSNQDSGIIKSCPSGPVLKVMKKQVSHKHVRRFDKETGSKEIRFAKVKIHIFLRLLHPSDILSAKRNKTIYQFPDVADGCGAWMKIQANSSSDQATTMLQPEQSFSNSAVRSNSLSPETVTSPQTANAEVSGAPHVDSRGSTTWAISLRSVIILLVLINIASVGVVTVWLGIDTNSKSISKSSDEASRSIQALGKARLKDASGTIVTALPYLEPNQISGTSGTNFNQYHFLVRRVRCEVINYLLPPETPTATTSGASIGMYPNSSSRSFLNHMTLAKDSIIGGPGQATSLYLTVFNNATCQQMCRTSNTQGRVYGYWWDETTLKVANPTPMINTTIPLGTENFVAVPKGSAVLSDIRVVFNLPIQIMYLSVYSPSGSFIATSSITFLLRDFCSLLDTVKASLTPNTLTYILTTKQQGQVVGISGLGNSTMQLQALFGGSKIKTIFEYPLEQYPTLNTSAALLYQYSGNNLSTTIEDASFEMDNFMFHVTTVQIYNFRYLVVVGAPPSDFVGDTALLAETLRRDGARSSLIVIIAAIVLALVMSGISVVSVWVFVSSPLLV

SEQ ID NO: 2532 - protein, 845 aa, Gonapodya prolifera
MLNPAHGVPAHAPPQPPQAGQAGPPQQAQGAAQGQLPGQQVAQQAQPHGVGMFRAANVDFGGGDQGTEFTITSSLHSFFRKQYWFLERDFEDVCSQVGRLTVEAGLAHNGYIAHVLEEQFNLFWQWDLEAWDGFVAAQQHAVANNPLGPPAPWLPGQPPGFQALPPPQPPLPPAQLAALQATRAAYIAGKLAQFAPLAPNVQNMVQMGIMPIPFPSEVRTLIQPNVNFNAQLIAEVAQGVSRAPFHPPRPPNPQGHPPPPPINHTIIPNNPANLSVANYLRLYYRPQRVLQPYARVQGLGAIVSQVIRQMQTNVRNMISAKNVHIHLKGLFRLKLWPRLSSLNGGVGRRRLNITKRTAAGAAGFIFGLVYRRDPFLMPNKLDDFVQRAINRQVHGHATLQNNVDRYCREVYDWGMAMFGQVDLRPASIENEWDQWYPRLYYIQRCFDESPGVRGVFKKFSLAPHPDNKLPLILVTTQGLHEILMLSKTLRNHGALPQAEQDRIHNLNIPTWNAIRTAPNAAQLGIALWRRFTKFESFETQNHKFAASIRVDGVNTHLNMRKPTRSGIPVTLENYLQRPADDRDLRGKLVSSCDPNRGKTTYHATVDVPGNIVNKRPHLRPSDLNGWPVDYDRGFTTNEYYHRAGFDWEQKLREKCMNADPHIQYYNKHVPSNHTVDHARLLIDLNFRLRHLSRLLLFYGARRWRMMKLKARSTKQRALAALVQKFTRGRDPAECIIAWGAAEFDHASRGHRACPYKLIRKVFASAGVTVILVDEKNTSRVCSKCHQWFPKERGTKQKLWHVRSCTRRNGGCGTTWDRDRNAARNILFLFFFANARNTVARPGLFA

SEQ ID NO: 2533 - protein, 235 aa, Gonapodya prolifera
MEEREEEGFGGRGGRRGERQGGGLGLWPGNSPDGSAWWDAGLCPRYRPSLDLEKDLCRPPNLPQGKFRTYEQSQRVIRETIRRHVFDPIVEMLREGIEVTRVKLVYGGANFSSTSRGHAPSVDRRFIGKDGRQIVRVVEVIFELLEEYHSSALCSCCHGYAEPVTVTNFELHDTVKRRRRPWGLKKCTRCGIVFNRDHNAVRNMEYIYLFRQMTGHRPPGYRVPPSGDISWRSVA

SEQ ID NO: 2534 - protein, 709 aa, Nothophytophthora sp.
MVTKRPRSPTEDDPGPHWEVVPDSRESGEELARSSTETTRRRPDIVTASTGTQEHEESRSSGPWVAIKHRLRDAIGLLRALFFIQIEDERVCLRLRCILQYHTRTLSWMALLRSATVLETTLPGPLPDLQACMPQTLEEDVNVSDLLAVLSTILAHILRGDVSEYRSLVDKLAPGRLLMLERLLGTVYTDELSRGGTLRDVDGFRSWFTVRKRTPEQPINRSLENLQEFPHVPDWIVTERDHTVRREAFAMKSERDQETTELIALQMNLTQERAERQDHSAWSTDDEQGYEREMEEIKVRNKTLLAEKKLLFLRTRKYCLFPTRSQQKTLRQFMGTCRWTYNQAVAHYRKTNDFNAINLTAHYVTKNTRKTLAYLQSMGRPPEWAHDTPASMRGNVIRTFQTNVKSVLSNVTNGSIKKFKIQFSSKKRSPDFTFSEGGRYAKIKQNGSEFYLSISKLKNIRVKVDVLKEISSEIDILYSNGFWYVAIPQTVEPDPYEYRKSCIALDPGMKAFMTGMDLEGNVLEFGRGNKTRLKAVRGRLDAAQSAMATFKNQKGKSKRWQYRAYVRTKRTFLSCTAKLKNLVKDLHFKTCAYLIEHYDVILLPIFKTKDMVKKSSARTHGFNTSILSLNHFKFRQLLQAKCEVRGKSTVVCSEMYTSRTCGQCYRLHVKLGSNDVFACPRCDYRAGRDANAALNIMRYVCAGSLQVFI

SEQ ID NO: 2535 - protein, 648 aa, Nothophytophthora sp.
MKQIQLEAWHLVNLHALRCLENGLPLPDFSDETFFDHCYSGVSTTRQTSLIAQKDPDLWETIKIYQSQRERTGLIEVDHLTGYSELKAELRAQMVVNAGVMIREHFRQRLKLYVGITFGDLGRSLTKKQKKKKADLVKAIMHACYSADETDVAEAEQMRDVLAPDGTEWSEQWIPWPNHIAKKGLAFYVRLLWEFQSVIEQRMAATPNEKGVRAFSLFPVSTTFSRAHIKINGATLAGFYRRIQQRVRDYHWDLTSVGLSVSSFSKNRWSVMRHAFDVAGFETRTPECPLSKPEFALLPVEEKYEYASHLFANSVTTDGYSASVLLFRPQTEEERAEKNSREARVVPPGYVPNVMIGLDPGMRAICTAVREDFRSDDQRHRRRRRSRRKRKKDRPRWIRTPKAPRHRNGRDIVSVTTREYRHLAGFTRFRAWNEGQRKRHPDYQAILHGMPSFKTASYAKYLVRLEYFWRHVQFLMQFCVDRPFLKWKFFRQRMARVAVDEIARRIVPTVSRQTCVAYGDWGRRKGIKGHAPSPVKGLKEALRKRATVVSMDEFRTSKLCSQCHQTLSSVRYSVDTRLPKRKKRKGVVLARNRAEVEFKNKKCYAVLRCDHKQCEARYWDRDVNAAINMLELLKSEVLGLGRMEPFTR

SEQ ID NO: 2536 - protein, 1017 aa, Nothophytophthora sp.
NVRRDFECMLKTDGYAVSVILSKVKAVATGWDVPTLDVSLAGKRVVGVDPGRTDLANCAWMDEAGEPVFSSYSNKEYQQKIGLKKAGAKRRLWMSRANLQEAMTQLPSAKTPSTFTMMAHLEQLFLILNRVLALNGLRRVRGLRFSQHCLRQRVMYDICDRITSPGAAVEDDRPVVVAFGAGMFSSCSRGHCPGPVKGVRRALRERGVEMYDVNEDYTSQLCNCCHGKVVPMYSQGGSMAIHGVRRCLSATCMRKTLNRDVNAALNILYIFTVETLQGDRPRVFTRRYQTELARAAVHSDTTPGHQIKAQFPRTRSGRVDDMELAKEEPAEVELAPADGRAKACATCFQTFATDDELRLHESSAHSSAQPPPPPDAPEPARAEDEKSGDSSDQKPSKTCPKCGKTFATSTNLRTHLSNVSPCVQSGDPAPPQELQMSGKTCPKCGKKFASSQGLRGHLNRVNPCDGERKVPRVVLTKDQAAKRRCDKCGKTFASAQSLRFHMNRVKPCDQEKVVPTTDAGQKEEERKARARFHARKTYLKRLGRLDELGEFQSVIHPRAGGAGGVIPAKLVPEDRERKRSAADEGSSAGNATKRPRSEKNGLVDDIHMQSIPDEAKHEPPVPRQGADTVPPTHGRFVRRPNRGHGGDLLAGGCSCPPCVRRWARKLMARMQQLEDEVVTLRRQAAKGGGRDGTKVPTASPVRNIAATQPPPLTQQTASNAERVEAQSSSSQAGRSLPTKDKPERVVEVAAALSPATSLDAKQDQHLGQKDNVDATTGVSSPSMRGEALSDNKKPDPDPATTIGSGQDQEASHTQAMGDVKKNLTDVYDHLNAQILLNERAVEDSISRVRLLMDADKATAVEFQSQIDELQVSINVEKGKRDVAVAALVAHEWRTRRDEFEALAGPMAARSMPGAMQTFHEKCAEIATQMAQKDQLLAELAQTIEAVRGATSPIGNHGDRRSRYEELGGLSSKIFAEQAAKEVLNHERGEVFMCLVKSSRQIWSLVRSKLAEMGNTSP

SEQ ID NO: 2537 - protein, 468 aa, Nothophytophthora sp.
MEMPGARGPKNDELLLSRDVYNSFRDPTTPRASRQFIHRGWVHNAANQMATMAQNAVSRNFYRRFHKFLKRKYGVDGRDAYSLLERILANAYDGQDTVVLEWRARIPRSATGAPKMTAHLLVPLTYRFLQDIEERNRISQGDPELRQVRSFTVLPTKRGFECSHMKMCKLGLRALLQRAGTRVPPEGPKWNAVEKTYWRRLFNIKKFETANRKFAGQIVTDGKAVSIVMRRPKREPDPEQARVFSMSEFDFYEEARYTKAKQKIKGWQDRNPRVLEAIRNMPTKKSASLEMLGYYIRFMTKRMDLLLGFARRKPFRRLRLRSFIFMKRKLRQLCLVLARDGERTVVGFGDWSNQDVAGIIKKSPAGPVKRFERELAHYCTVISIAEFRTSKVHFDCECELKNQYSQRQCSDGEIRTQKVYSVLHCSSNGCRGITVNRDVNASRNMLRLLQCKLNGVDRPVAYARQART

SEQ ID NO: 2538 - protein, 693 aa, Nothophytophthora sp.
MRLKVRTPQLLLRRLIGARKQACTMESIMDGVTEPNLSIRVDSNAAGTGTIFGSITDEHLVLLFVLLRANPSRRPASGSSFSFFAMSGKRTKVDPPDKKTKRQCSDVGQRKARNKNTECSIVKCSLKSFCQKSASVLPWDSVLKDTNKAVAEAYILANLRVVRLCEAGRPIPALDQEFYYQCLSAVSVGLTARKKVDDEDLRQSVELYKSWRDPNVSFASSAHISYGWFQNASSQMATNASNHVVVNFYRRIQKYVKQRVGITGKERYELLRDVLAPTYAGSDERVLGFRRWIPRNAEGYIDKEKPHLILPVTYRFLQFIEQENYRKREGPRYEQLRSFSLLPMKRGFECSHFKMCKLGLYALLRRAGIQIPEIKRKEGQPCWNDVVDEWWHRLFKITKCETENRKFAGEISTDGKAVSIVLRKPKLPEPEKSPSLKKDPKQYNFGEVWGLDPGRRDLFVATNNFGETIACSTREFYEDAKYTSSNMTTRYWIDHNPKILEAIRNMPSPKTCSLQKLEAYVRFLSPRLDRLLDFRMAKPFRKLKFRRYIFMKNKLRELCAKLTARAGANTLIGFGDWSATDYGGFIKKCPTGPVKKLEKELKRYCIVDSVPEFRTSKLHADCRRELTYQYALRTCKDGIVRRVKVYSVLHYPHNGCFGMTVNRDQNASKNILLLTLPHFLGQDRHPACCRQGT

SEQ ID NO: 2539 - protein, 210 aa, Phytophthora megakarya
MTCRTYYRAQVRDRDARSVLKKKFEAVDEMKSMLARMTNARKARRSTPHDRTKTSRSSEHRLCYRLRRRICFTSRKATRAVSDMHQNLSSWLAMIFKQVLLPSFHTSEMARWYFLEAAGDAIPETAAVRKRQIRRPTARAMLAQAHYRFKMLLKYKMERAGGQLVECEEEYTSKTCSGRGAIKTPHCLALFDRDVNAARNIFHKNMGLLL

SEQ ID NO: 2540 - protein, 606 aa, Bifiguratus adelaidae
MMEAASRAQASTLGKRKPYSGDPDAGPPGDADADGDAVEARDRIMVVKGSITGIGWRNDLIPVLQEFVTTVHTTTFHAFSFAKYIFMAELDEHPEFDMAPWINKDFISEIWLSLVQYQEGRVRERTARFRGLIRRHLQGYLQITGYVKIPLQFAQQSALIEGKKMYVAYTNIKMRFGQHLQRVINVLLDINNRKQQMNRELIDGGLSAEEAKDIVRQAIILPATQFKEAISHRRVVLPELLRSLPIFVEAYNTLQPVLEAYNTGYQFRRDNIYYDVKASPVDHFRAFHQLARLLSFEKCAYSIDSKILSQNILGSRWMNGTEKSQGVNGQLQFRGTIQTDGVGVSIIKNTRDSNEAERATRAPVIEPDVPYVTTLGHRQHQQILGRCVTVDPGRRDLIYCVHETSTAQTPRKFRFTRNCEEKMRKTNKYAGIRQAVKDANPAIQEAETILSRVLSQTIHIDNFNNFLQTRGQQAAVLTAFYAESRTSHVNSNFLFRKLRMSSYINRVQADQKIVRALREKFENAVLIMGNWSAPHTRYHEPIRGVGMRKMLKKHDFDVFKTSRCCPTCQHDSSGNVQANPKSSSISTTANAHRDLSWPSQMYQSNL

SEQ ID NO: 2541 - protein, 260 aa, Dunaliella salina
MIPTYIKNRIKFHTRKNRGIQEPNYDCKLQMDSLGRFYLHIPCHVEACENQASSNRHEWCSLDPGVRTLFTLYCPTKGVSYKLADGDISRVFRLCVYLDKLISKTTKINGNYNQKRKRRKKHYRSIIKLRNRIKNLVTEVHCKVVLLLVKHFKNIVLPTFDVSQMVLKNGKMRKIGSKTARQMMSWRFYDLKMRLLNKAKLYGCNVILETEEWTSKTCTHCQFVKHNLGGSKIYNCDDCKLKADRDVCGARNIFMKSIKV

SEQ ID NO: 2542 - protein, 408 aa, Dunaliella salina
MAGENTLPKKGGRAKKKPKANKCRKFKISTSLEVQSQLRRWFGSTRTTYNWALECIKNKPNVHKCTNAIALRKRFINACNIPKNKAFLLDTPKHVRDTAIKDLTDAYKSNFAKKRTDPLHAFDMKFRSKKETQSITIPSNVIKGFFLENQKQNGEFNMYPTFLKNKIKFHVRKNTKCIPKIENDCKLILDQLGHFYLAIPFYEKACENQASRNQKEWCAIDPGVRTMLTIYSPTLGECYKIGDKGITKLFRLCKHLDKLISKRVRKKRKAIIKLRKRIRDLVTEVHCKSISFLLENFKHIIIPPFRVSQMVRKSERKLSKKSVRNMLTWRHYEFKQRLKEKALQCGVNVYERGEEYTSKTCTHCMNIKEDLGGSKVYSCNHCHLKADRDVCGARNIFIKNALECGRKL

SEQ ID NO: 2543 - protein, 496 aa, Chlamydomonas eustigma
MAVSTMLPDGRYLYISLRDRDRSLRTELVAPRIGLAEDGCYLECVGDDRCCEGARVRLDGAVIPPYHSVDVPAWLVSGVVTTSSEYVTGYLPMLAACVRRSFKLVGDSLDHDVPDIDVRLRVRADLERAVVDVTANGIVVDTCELVRKSGIDLTHRMTALIYNALVTSVYAYGALKTLRTDICDALGEDINSPKLVCLCCSRVASKTTGPGFSKCVRCLQAWYCEGDCLNRHRARCTTGNACLDLEIRDLLINGRINIYYMVGLYGGNPAVMKLTRKQYYTESGATSARYKTERWNRGIQTHLDALSTASTKGVSWTAHEWCLIERGRHQEALWSEYLKPRWARLRLSLYGGKKRVFANFFNRLSVRLPFPAGGRLVIAYGNAKFAPGGPGEQSVPTTRAYKECASRVATYSTDEFRTSKVHCRDDSTLQLLRGSDRRFSLRGLLYNPDLNKFVSRDLNAALNIRRCLVGPKPAILCREGVTQRLEQHIVKVLRRR

SEQ ID NO: 2544 - protein, 296 aa, Coemansia reversa
MICLLEELQATKGNCVLIDPGRGNLIYCMHKRSTADNPCLYCYSAQTTHKTIDPQRFRRYVEMRNCISPVLRGFYENHQTIESLTHQIHKEHGGFKLHRYPLHWKLQLSVYINQQQADARLARNLREKFGAYPVLVLVIGNWSAPNVRFHAPIRSVGLRDMLQAYRFKVYLIDEYCTMVACPVCYHQLEKFCWLDKPRPWQQKNHPRVLCHGLLRFTSERCSEDNMPNRIWNRDLAAVINMRAILHSLRNDNGIPRAFHRGNNNALAAPQPRHPRTSTSSVSGITNSGSASTSAAF

SEQ ID NO: 2545 - protein, 229 aa, Coemansia reversa
MSVSHLAPATNFYIDKQRNKKRRLGHFADIREKVKKNYPGNWIHAAEELLQNMCCSTVNPEKYKAYIKARSEVWELLDNFYNETVTTYAKSHPLHQKLHLSAYWNKVRANDRFAKGLHKKFGRDAVLIIGNWPAGMVRFHEPIRGKGWRDVLRRHGFTVYLLDEYKTSSLCPACGSGLEKFHKIPNPRPWQRVNKKDVLCNGLLRCKNKKLSEVCCEIQGFDSCAYVES

SEQ ID NO: 2546 - protein, 207 aa, Coemansia reversa
MRCKWSSLSQQKKRCVLIDPGRGDLLYCMSEMSTSADRCIYRYSCKNKQKELRTGHYKAICERVKDKYRDEFVKGAEIALSGTSCAPLNIEDFIEYLKMRVQVAPGLCDFYEKYMTDPTVQLQRRESGNVINSVKALRNPVTTHPLHCKLRLSAYINQQQLDKRLVRNICKKFSRNGKDPVLVMGNWSAPMTCFHEMIKGVGMKRML

SEQ ID NO: 2547 - protein, 827 aa, Coemansia reversa
MGNVQSSLPSYYNADPTNEAYKHSLSDYVDLASAAIGARVIRASNERFGAASNLIKPQEPGTADSGKVDAWVTRRHNPETDWAVVRLGSAGTIAGFDIDTRGLDGEQASHVSIQGCLTSDKAAVDSHGNIDDAEWEELLPEVEISANSHHLLALWRATKTPYNFVRITLHPDGGVSRLRILGTVTADLDTDGELDLALVTAGARVVQVSDEKLGAKENLILPGRATSAVRETQGWKTRRSQSDEHSDWAIVRLAEPGFLTRIELDTLFYDGDQPVSAAVQACYTELDSPDRDRECFWYQIVPRTELNGNKLHKIDVTLNDVPFSHIKLLIYPDGGIGRLRAFGQRVKEIEEEAAREKAEAAAEAALVAELAADADSFEQTEILVTETKVKTSTAEKKDARSKTSAAAAAARVETSGDEKDDGSQRKKTKKTEKPASRKKSKSSKTSHDTKEAVEDEDSDKFSSRAGELIQSLTSPLPPRKRGRPRSRAEDETDDGSINTMDSRAKRSHRKTKSRTTAAAQRYVEMRNLVSPVFRNFYENYQTIESSAHQIHKGHGGFKLCRYLLHRKLRLFHAPIRGVSLRDMLRAHVFKVYHIDEYRTSVTCPVCYHRLEKFRWVDNPHPWQRRNHPRVLCYGLLHFTSEKYSKDVLVPIEQSAENHKANIDSVVNPMHTLKTKARAKAKAKARVKKMLRDSPAKNMPNRIWNRDLAAVINMWAILHSLRDDNGIPRAFQHGNNNALAAPQSRCPRTSTSSVSAITNSGSTSTPAASQARHTRKSAWSMPETAGTSATSASVIVGPSNLQVEYLASDSDDPLIKRRRLDKGKEPEC

SEQ ID NO: 2548 - protein, 626 aa, Tetrabaena socialis
MVAAIRSRVIAASRRAVLASIALNLLVREVFHSQHDATIDIRDTTLLRQLMLGTEGANDPDARVSDLFLRYPKLLHNVTDRHLSDRNIYSAAAIKLGTNLRNHLVVNLRRVITKALADVPNDEERVLMLYKLYGWKGGPRKKTKPPKNPPKKANTSSSAAAQMAEIAPEPPTLSAAQLDFVRECRRILGFTDDAEELTERWMDKPANLPRILAFFVAVNCLLEGKLEEPSQVRPFAILSICKIKRHFVTLDTHSIHGVARDAEIVGPKCSSQAFLEHGDAHWASMVNHAKHLPKGGRFTGTIETDGVSVCIHYMRPKAKEEEGSGFAAPNPPKGHVGVETLAEKSKASRNPKSSPLRPTPEQLSRCRIVVIDPGRTNIIYAVEVTPDGVKIYRLTRAQYYQESGVERGKQQAANWLRGTKEELTKLSAASPKGADLQAFLVFVTTHLETSDARWEEALKPRWAQMHLRLYGGKKRVLAKFFDEIARGDPGAPARPVIIGYGAAKFAPGGKGELSVPTCGVFKACRARFPTHLVDEFRSTKVYHADDSILQGVAERRWKGDRMKTVRGLLWCGSTNETKSKFVNRDFNGAMNIRRCFLSEERPAILDRSKCQGRLQFIRTGRVIRMK

SEQ ID NO: 2549 - protein, 665 aa, Tetrabaena socialis
MTCGVFKEMRAGATGAKEAEQEALEELEFELLAAAASTTTVADDATITAVKMKLNSFCKDSPRLRSQIQALVLSMNRLLGEAYAFATFHILHLHDCGMYPAIDRNFFYRCLVAVSANNSRPATLGPELVNSRDVYHALRPLQGPGSQPVNTVGYAQVLADLSIVMATMAGNHLWENLEKRIFNYLKMKYPGQLMGDPLRKKVVEALVRKPLVCTADLFQLSPSVPPDSAAAERLRHARAVADELRVLLPLPSGDHYQTRAHLIIPLYIKMLQEIEEARAAAAATNLTTGKTVRGRVLPGTKLFTLLPQKAGFTISHIPISSMTLLDLLKRASLSSHRGDGRDEDHGALWRKHFAVNRVETRRRLFGNRIVTDGCAVSVMMQEMVPLIASYRQPLSDAELARARATSGGTVVGVDPGVTDVATVATLEGETRRYSSARYYERSKINLSNHRTRKWNAEKRERVEGLPSARTASIAEYADFVQRYLVLLPELLQHRATKGYRNMRFLRYVHRQESIHEICEVIAPREGGLVVVGFGDWRGVGTTPIRRRCSGPLQDIKKHLQKQAHVRLVIIDEYLTSRGCHGCLNRLTNMRAAPHTHGPGKERVQGATTQVHKVLHCRPSSQAAARSCCGTTWNRDVNASKNILLLTMLRLKGYQRPPELSRGHQQ

SEQ ID NO: 2550 - protein, 433 aa, Tetrabaena socialis
MSAEVLASVAEFDSFRPKILVETEAARDALEILGNDPADHKVRLRLFKLLPTKNGFTTSFIPISSMAMLHMLKSMGLENLAGDGRSMDATLLWRKYFNLNLVETKKRRFGGSIVTDGTGVSVLMAKPAAAATCHCGEPLCAEMRTILRERAIARVVGVDPGFRDVVTVAAADGSEPVSYSSRKYYEDAKIFLSQRRTDAWNQGTVELVDSIPTVCTSDLTRMRLHVTAYLANIRELLRHRFDKGYRNMRFLRSVFKRKAVEDICNLIAPAGKVTLVGFGNWSGGKGSPISRRTCGPLQDIKFCLRQRPDVFLKELDEHRTSVTCNGCLQVLSNMRAMSTLVNRFDGSRTVRRTRVHKVLHCRSSDGGKTNRCGASWNRDVNASRNLLMLMMCHVLGYERPPAFTRAWQSHSASLLMGSAIHIIPRGFTSSREV

SEQ ID NO: 2551 - protein, 445 aa, Tetrabaena socialis
MTRGVFSEMRAGATGAEEAGQDALEELEFELLAAAASTTTVADDATITAVKMKLNSFCKDSPRLRSQIQALVLSMNRLLGEAYAFATFHILNLHDCGTYPAIDRNFFYRCLVAVSANNSRPATLGPELVNSRDVYHALRPLQGPGSQPVNTVGYAQVLADLSIVMATMAGNHLWENLEKRIFNYLKMKYPGQLMGDPLRKKVVEALVRKPLVCTADLFQLSPSVPPDSAAAERLRHARAVADELRVVLPLPSGDHYQTRAHLTIPLYIKMLQEIEEARAAAAATNLTAGKTINLSNHRTRKWNAETRERVEGLPSARTASIAEYADFVQRYLVLLPELLQHRAAKGYRNMRFLRYVHRQESIHEICEVIAPREGGLVVDIKKHLQKQAHVRLVIIDEYLTSRGCHGCCGTTWNRDVNASKNILLLTMLRLKGYQRPPELSRGHQQ

SEQ ID NO: 2552 - protein, 276 aa, Tetrabaena socialis
MTLLDLLKRASLSSHSGDGRDEDHGALWRKHFAVNRVETRRRLFGNRIVTDGCAVSVMMQEMVPLIASYRQPLSDAELARARATSGGTVVGVDPGVTDVATVATLEGETRRYSSARYYERSKINLSNHRTRKWNAEKRERVEGLPSARTASIAEYADFVQRYLVLLPELLQHRATKGYRNMRFLRYVHRQESIHEICEVIAPREGGLVVDIKKHLQKQAHVRLVIIDEYLTSRGCHGCCGTTWNRDVNASKNILLLTMLRLKGYQRPPELSRGHQQ

SEQ ID NO: 2553 - protein, 382 aa, Tetrabaena socialis
MSAEVLASVAEFDSFRPKILVETEAARDALEILGNDPADHKVRLRLFKLLPTKNGFTTSFIPISSMAMLHMLKSMGLENLAGDGRSMDATLLWRKYFNLNLVETKKRRFGGSIVTDGTGVSVLMAKPAAAATCHCGEPLCAEMRTILRERAIARVVGVDPGFRDVVTVAAADGSEPVSYSSRKYYEDAKIFLSQRRTDAWNQGTVELVDSIPTVCTSDLTRMRLHVTAYLANIRELLRHRFDKGPDEEIIAATMTELERLFPNEVRADQSMAKIRKYKIIKTPLSVYESRSGREPCRPSQRTPISNFYLAGDFTKQKYLASMEGAIFSGKLAAEAVVEDATMGRTAAARAAAGTGTGSSPELVAASAMLALAAVGMGAAAML

SEQ ID NO: 2554 - protein, 583 aa, Tetrabaena socialis
MVNAIRSRVVAASRRVVLASIALNLLVREVFDRQPDATLDIRDETTLRQFMLGTASANKPDARVADIFLRNPGLLHEVSDRHLSDRNIYSAAAKKLGTNLRNHLVVNLRRVVNKALADVPNDAERVLMLYTLYGWKGGPRKKIKPPKKAKTSSSVAPTAEIAPEPPPLLSAPQLDFIRECRRILGFTDDTEELTERWMDKPANLPRILAFFVHVNRLLEHRGELEDDPLNRGPTCFALLPICKIKRHFVTLDTHSIHGVARDAEIVSSEGGVAGEKGAIETEESRAAKKPKSTAAQGEEAEEKVAKKPNSSPPRPTAEQLARCRIVVIDPGRTNIIYAVEVTSSGVKVYRLTRAQYYQESGVARGKQQATSWLRGVKDELAQLSTVSPKGADLPAFLLFVATHLATSEARWEEAMKPRWAQMRLRLYGGKKRVLSRFFNEIARGQGGADSRPVVIAYGAAKFAPGGKGELSVPTSGVFKACQERFPTYLVDEFRTTKIHHVDDSLLQGVGERRWKGDNVKTVRGLLWCGSTNEKKSKFINRDFNGAMNIRRCFVSAERPAILDRSKCQGRLQFVRTGRVIRMK

SEQ ID NO: 2555 - protein, 619 aa, Tetrabaena socialis
MVNAIRSRVVAASRRVVLASIALNLLVREVFDRQPDATLDIRDETTLRQFMLGTASANKPDARVADIFLRNPGLLHEVSDRHLSDRNIYSAAAKKLGTNLRNHLVVNLRRVVNKALADVPNDAERVLMLYTLYGWKGGPRKKIKPPKKAKTSSSVAPTAEIAPEPPPLLSAPQLDFIRECRRILGFTDDTEELTERWMDKPANLPRILAFFVHVNRLLEHRGELEDDPLNRGPTCFALLPICKIKRHFVTLDTHSIHGVARDAEIVGPQCSSKAFLEHGEAHWASMVKHAKHLPKGGRFTGTIETDGVAVCIHYVRPKVSSEGGVAGEKGAIETEESRAAKKPKSTAAQGEEAEEKVAKKPNSSPPRPTAEQLARCRIVVIDPGRTNIIYAVEVTSSGVKVYRLTRAQYYQESGVARGKQQATSWLRGVKDELAQLSTVSPKGADLPAFLLFVATHLATSEARWEEAMKPRWAQMRLRLYGGKKRVLSRFFNEIARGQGGADSRPVVIAYGAAKFAPGGKGELSVPTSGVFKACQERFPTYLVDEFRTTKIHHVDDSLLQGVGERRWKGDNVKTVRGLLWCGSTNEKKSKFINRDFNGAMNIRRCFVSAERPAILDRSK

SEQ ID NO: 2556 - protein, 352 aa, Tetrabaena socialis
MVIANASGTGGRFTGTIETDGVAVCIHYVRPKVSSEGGVAGEKGAIETEESRAAKKPKSTAAQGEEAEAEEKVAKKPNSSPPRPTAEQLARCRIVVIDPGRTNIIYAVEVTSSGVKVYRLTRAQYYQESGVARGKQQATSWLRGVKDELAQLSTVSPKGADLPAFLLFVATHLATSEARWEEAMKPRWAQMRLRLYGGKKRVLSRFFNEIARGQGGADSRPVVIAYGAAKFAPGGKGELSVPTSGVFKACQERFPTYLVDEFRTTKIHHVDDSLLQGVGERRWKGDNVKTVRGLLWCGSTNETKSKFVNRDFNGAMNIRRCFVSAERPAILDRSKCQGRLQFVRTGRVIRMK

SEQ ID NO: 2557 - protein, 355 aa, Tetrabaena socialis
MLQEIEEARAAAAATNLTAGKTVRGRVLPGTKLFTLLPQKAGFTISHIPISSMTLLDLLKRASLSSHRGDGRDEDHGALWRKHFAVNRVETRRRLFGNRIVTDGCAVSVMMQEMVPLIASYRQPLSDAELARARATSGGTVVGVDPGVTDVATVATLEGETRRYSSARYYERSKINLSNHRTRKWNAEKRERVEGLPSARTASIAEYADFVQRYLVLLPELLQHRATKGYRNMRFLRYVHRQESIHEICEVIAPREGGLVVVGFGDWRGVGTTPIRRRCSGPLQDIKKHLQKQAHVRLVIIDEYLTSRGCHGCLNRLTNMRAAPHTHGPGKERVQGATTQVSNVGMTMFGQVAFR

SEQ ID NO: 2558 - protein, 657 aa, Tetrabaena socialis
MTCGVFKEMRAGATGAKEAEQEALEELEFELLAAAASTTTVADDATITAVKMKLNSFCKDSPRLRSQIQALVLSMNRLLGEAYAFATFHILHLHDCGMYPAIDRNFFYRCLVAVSANNSRPATLGPELVNSRDVYHALRPLQGPGSQPVNTVGYAQVLADLSIVMATMAGNHLWENLEKRIFNYLKMKYPGQLMGTPLRRKVVEALVRKPLASTADLFQLSPSVPPDSAAAERLRRARVVADELRVLMPLPNGDHDRTRAHLTLPLYIKMLLEIEEARAAAAAAAADLSEAKTTRGRVSPGTKLFTLLPQKAGFTISHIPISSMTMMDLLKRTGLSSHKHDGRHEDSGALWRKHFAVNRVETRRRLFGNRIVTDGCAVSVVMREMAPLIASCPQPLSDEELARLLATSGGTTVGVDPGVTDVATIATLDGRTRRYSSARYYERSKINLSNRRTRKWNAETQGLVEGLPSARTASIEEYAGFVQRYLVVLPELLQHRAAKGYRNMRFLRYVHRQESIHEICEVIAPREGGLVVVGFGDWRGVGTTPIRRRCSGPLQDIKKHLQKQAHVRLVIIDEYLTSRGCHGCLNRLTNMRAAPHTHGPGKERVQGATTQTRTAHCPRAPGLCSVEPGGASSAHNTANPCGVAPDAPIVHVHKFLE

SEQ ID NO: 2559 - protein, 666 aa, Tetrabaena socialis
MTCGVFKEMRAGATGAKEAEQEALEELEFELLAAAASTTTVADDATITAVKMKLNSFCKDSPRLRSQIQALVLSMNRLLGEAYAFATFHILHLHDCGMYPAIDRNFFYRCLVAVSANNSRPATLGPELVNSRDVYHALRPLQGPGSQPVNTVGYAQVLADLSIVMATMAGNHLWENLEKRIFNYLKMKYPGQLMGDPLRKKVVEALVRKPLVCTADLFQLSPSVPPDSAAAERLRHARAVADELRVLLPLPSGDHYQTRAHLIIPLYIKMLQEIEEARAAAAATNLTAGKTVRGRVLPGTKLFTLLPQKAGFTISHIPISSMTLLDLLKRASLSSHRGDGRDEDHGALWRKHFAVNRVETRRRLFGNRIVTDGCAVSVMMQEMVPLIASYRQPLSDAELARARATSGGTVVGVDPGVTDVATVATLEGETRRYSSARYYERSKINLSNHRTRKWNAETRERVEGLPSARTASVAEYADFVQRYLVVLPELLQHRAAKGYRNMRFLRYVHRQESIHEICEVIAPREGGLVVVGFGDWRGVGTTPIRRRCSGPLQDIKKHLQKQAHVRLVIIDEYLTSRGCHGCLNRLTNMRAAPHTHGPGKERVQGATTQDCFRLRKCVTFDRKMKDKAADTIKRAWLAYKRRCRARRLAMVRLTLIPIIVRSVQWA

SEQ ID NO: 2560 - protein, 214 aa, Rhodotorula taiwanensis
MAHINSNLAHQLDMDRFASAQPGQLRPPVQDVVRDTWIRVLTKAHPVRDRIQLRYGIERDAEIGTFVSELGRAIAGKIKRQDSDRAKIKWIFFIGDGMSISDPSGASSQNTIMRALPAELRRRGIPCMFVRTPEDYTSQRCPNPRCRRADDEDRRSCAETMTREDGSPEYRLLRCLECGCVFDRDGAGACNVLATGLSWWWYGRPLWGAWIEEG

SEQ ID NO: 2561 - protein, 2183 aa, Raphidocelis subcapitata
MAAPRSPETLAFLDRERLVAFTVEADGNCLIASILAALDLQMAWLPGAVRQRLADALRCLFEELPEAADLLQELLVDGEKFKSLDDLLRACRTSGHPLPVWALALLAPILRVNVKVFTPTEHGPPHTDTWLCPGAVGTIHLLQEQTGVPGLTHLSPLRHLDSQAPPEGAALPLARQDAVVYAGLLWVLPALISNAEQQLRAAATAAEKERLERVLLILKGRLDRLRAPQPAHAEDARPAAQAGGGGGGSSSGGGSRPPQKRERPQPPAASPPAEVIREFEKLRCPLLRLVARVQEGGGSAARNSNDLVEPPQAEKGEQGRGRGGRQRRRRRKRQEKGDSGVGTRALPQTRAQQEEGGLAAAAVIGSGGGGAAAQPPDGDGTRAQIGARRLSNRQRGLLMEALRPESAPAGGQRQKARRRRRRSTQSKVASEGSGTCPSNNVAPAAPVPVAADADSGETGSSSGGTSDTGVTGDCGRKGEDAHRAARRQRRRRARRELARTCSLAEAADRLAAAKRATAAAQAGDQTDALQLEAALAEVARWERVGRAIAARAHRRQRWKAIKRRRRTKEDGLATQPPTGSGDGCSGAGGDEIRLIPSGITRRGPPACRPPADGDSDGAAGEPTRAGARAGLSKKRARDDEVNAGDGGGGGGGGGGGRGGGGGGGGGGGGGGGGGGGGGGGGGGGGGGGGGGGRDGGGGMDFFAEPGGAGTAILDEMFPPDGKGRTAKGEDASRRILAYAGLAHHYEFGGPDLRDAMKDLSEECDTLFPEALPEVLSDFKGNTLAELRKPQGTRLATNLRNALALTPMRVLRLVERIITTELALAAAPPLSAAARRRLVRGAAAALLDPKDGRIWEDQAWEPGDAGGIMPPLKQRLVEAQVNALAAACSSLRSLRVVLERTVRVGTADRCVLDFLREGGVLVDVESPKRAQEAAKEVADEAAAADGDSGGEGAGEDVEEDGDYAEEMPAEEAEPLPAGEEGGAAEQETEAVEALSRGERGLKLLVDVCSVWQGLAQPPQQQQQQQQPPQQPQPPQQPQQPPQQQQQQQQQQQQGQQGQGPVCLQSTAGHLLAALAHQPRPARPPEHERLVKAAQQEASQRNADHLAVALALLWDARLPARPPPTPSSAARSSCTDAYVLLRCALQRARARLPAALRHNVAGTLEAMASYLRGGARGPAVLVWGNCLGRNAELRRDETWGAGAGRGCAISSHVMQAFDEGVRAAGGFVFFMDALTQHLSPRALRGMGCLPDAAGFDGDDDCPCPSGGCSEVSFQEEAGAAAQLVARFLLLALCKPTPNTQRRDPPKVSVLFAGARAAAFAPQLRSALESAGLGVARSRSAKHPSLWTPAAAAGHLKWAGVRSRSDAALAALAAVKAAAPASGEKRGARSRAGQQHPGARYAEWQRADLELVARCAALEKRVRESDAAMEGDAATKAARSETECRAQLCAATAEAKSADAALVAARRRLKHRDEKRHKRRRRSAELAAAHADLERHRRAMPPLPALPAADPCVWKAAVKRALSAFDGAVDASAAARHSLVAATDAYSRLVRACRAPPAERAAHGTAQLRSQLSRRMRHASAAAQLAARHAEHACAALDAAAGQQPEPAGFATKAQRAADEAEAAARGAKAADDGMVTMLTGWDEATNRERLQRAEEEASTAELSVGYAARRLQSVIFDAAFCVGTAQAAAQGPRPGCAPPPGPPPACKAAEGLCHRLRAAAGRAQKLRFSLAPVPHFKTNFVDITDAGARCLHFEFSQHPSRPASFVRATQLTYAKKPERDAATQAAWCALFKPAALQRQKSTVAGGVSTDGVSLCVRVLRRPLPWDPPPRSRASACAVRAAANAEALQRAQAEIAELMRLHPSPLPPATDIAAWDALFLKWGVRFVAADPGIRHFATTIALGGPFAPGTLSPEPLDGIPRGEGGETKRSGPGGPWHRAHSWRANSLQHRNACAFDDYKRWRAGHLRRADPADRAAVAAVPSAKTASAPDFFSYCRAAAAAFEPGMRLHATLAHRRWAVRVQRAKERQLHRVAQSLIFGHPTLSGRWTACRPSPRPGLTIIAWGVASIGTGSPIPRAYIPPVRQLEALLRRHYGRRVIFLLIDEYLTSQVCPFCWEIRPDKFSLMGPKQGPKSRSTAVLACPGCMHSHLNRDASASMAIAARGIGQIAPKAPRGGLDGFDRERKAP

SEQ ID NO: 2562 - protein, 278 aa, Raphidocelis subcapitata
MSAFSFSPFQRRNYIPPGGNKSELRRWLSPRVFVESTAGFRDATGQVAAARKAEQCLRRADPADRARAIHNITTGRTASLAAFALHCRRKLAGFDAGRRLYGSKGARHARLRKHILRNRHFHRLVQMLAWGATSVTGRWWDPTRRRRRAVRKKPAVSIIGWGAASVGAGGPISRKGLGPSRDFERFVRSHYPTVLFAKVDEYCTSKVCTACWKKTHVNFTAGGRPTHKLQVCPDHAPPLVVDRDVSASYAIMTALLSHLFVGGAPEWQRRRRRAGPPA

SEQ ID NO: 2563 - protein, 1918 aa, Raphidocelis subcapitata
MAAGKRRRGRCGRPRRRRRRPQQDARHAARRQRRRRARRELARTCSPVEAAERLEAAKRAAAAAQAGGQAAAIQLQAALADVVHWERVGRAIAARACGRQRWKANRRQRRTESRAVLGATAVVFTAASRAEAAISACAVPRAVRLRSTLPPKPLPGVATRLPNFYRLAPGITRLGPPARRPPADGDGDGAAGEPTRGAGRSKKRARDDAADPGEGGSRGGGGGGGGGNDDGAANAGEGGGGGGDDGGGGGGGDGGGGGSTRKPNYRTFKKTLNAATTHRAVTTWLREVVDAVQPSLYKGRLILGALCTMAVSFPAASVASGEKAGRDDAGGSGNGGSGAQTRAQQEEAGLTAAAAIGTSAGGGGGGDDTRAQIGARRLSNRQRGLLMEALRAESAPVGEQPRQKARRRRLSKVAAKGTGACPSKSVTPRGGSAAPVLVAADTGETDSSSGGTSDTGVGGNGKSAKMRVLQLVERIVTTELALAAAPSLSTAALRRLVRGAAAALLDPKDGRIWEEQAWEPDDAGGIMPPLKQPLVEAQLSALAAARSALCSLRLDLERTVRVGNADLRVLDFLADGGELVDVARPGRAQEAAKEVADEAAAADGDSGGEGGYEDAEEDGDQAEEMPAEEAGPQPAGEEGNAVEQETDATEELSCGERGLKLLVVTAPAKQLILAGALLLHGSAYADKCQSRRDARIATRCAKALPLASTLQSVCSVWQGLVQPPQQLQPPQQPQQPQPQQPQQQQQQQQQQQQQPPQPQPQQLQQQGQGPTCLQGTAGDLLAALAHQPVQAHPSGPLVKAAQHEEAQQNAGLLRMALELLDEGAGAGAGAGAGAGAQAQGPADAYDILCDALHHVDARLPAALHHNVAGTLEAMRSYQHRGAQGPAVLVWGNCPGRNAVSGLDETWGAGAGPGCALSSHVMQAFDEGVRAAGGFVFFMDALTQHLSPRALRDMGRLPDAAGFDGDDDCPCPSGGCNEASFQEEAAAAAQLVARFLRLALGGSPEVRVLFAGARATAFAPQLRSALESAGLSVARSRSAKHPSLWTPAAAAGHLRWAGVRGRSDAALAALAAVKAAAPASGEKRGARSRAGQQHPGARYAEWHRVSLELEARCAALEKRVDESVAAMQETAAAEAACREVECRALLRAAAAEAKAADAALAAARATDKQRLREAAERRRKTAGARHYLKCREEKRHKRRRRSAELAAARADLERHREAKPPLPALPAADPQEWHRAVAQALSAFKDAVDASESARHSLVAATDAYSRLVRACRAPAPSAQSAAPDPSSLLAQLLARLHHVGTAAQLAKLCVEHACAALASAAGQQPEPAGLAAEAQQAAQMAKTAAAWVQAADNGERRVDNALPWDEAASRELLRRAERGAIEAELGVGYAARRLQATIFDAAFCVGTAQAAAQGPQPGGAPPPAAPPAAPPAAPPATPPAEPPAAPPAAPAVAGAFEGVAEGLCRRLRAAVRRAQKLRFSLAPVPHFTTNFVDITDDGARCLHFEFSRHPSRLASFVRATQLTYTKKPERDAATQAAWCALFKPAALQKDASEPFAGGVATDGVSLCVRVLRRPLPGDPPPRSRMGARAVRAAANAAALKRALTEIAGRVRADPDFEDPKRLPAATDIAAWDALFIKWGVRFVAVDPGIRHFITALILGGPFAPDAPSPNPLDGIPEGSVGAPQRPGPGGQWHRVHSWRTNSRQHRNACAFDDHKRWRAGHLRRADPADRAAVAAVPTAKTAHAPDFFSYCRAAVAAFEPGMKLYATLAHRRWAVRVHAAKQKQLHRPGLTIIAWGAASIGAGSPIPRACIPPVRALEALLRRHYGRHVIFLLIDEYKTSQVCPFCWQIRRDKFTLMGPKQGPKSRCTAVLACHGCMHSHLNRDASASMAIAARAIGQVAPAAPRGGLDGFERKRKAP

SEQ ID NO: 2564 - protein, 1439 aa, Raphidocelis subcapitata
MCVDFFAEPGGAGGAHPTAILDQIFPPGSKGRTAKGEDVCRTILAYAGLANHYNFGREDLRKAMEALHKECHTLFGKLPAALSSFAGTTLCELRKPQGTRLATNLRNALALTPMRVLQLVEHIVTTELALAAAPPLSKAARQRLVRGAAAALLDPKSDRIWEDQAWAPGGIMPPLKQPLVKAQLSALAAARSALCSLRLDLERTVRVGNADLRVLDFLREGAKLVDVERPGRAQEAAKAVVEEAAAADGDSGGEGGYEDAEEDGDQAEEMPAEEAEPLPSGEEGDAAEQGTDATEELGLGERGLTLLVVNAPAQQLILAGALLRHGSAYAEKCQSRRDACITTQCAKALPLASTLQSVCSVWQGLAPQPQQPPHPQEQQQQPQPEQPQPQQPPQQLHQQGQGPTCLQGTAGDLLAALAHQPRPERPPQQERFAKTAQLEAAQRNAERLRAALARLDAGAAPANCADAHALLCDALQREGAHLPAALLHNVAGALEAMTSYLQGGARGPAVLVWGNCPGRNVELRRDETWGAGAGRGCALSSHVMQAFDEGVRAAGGFVFFMDALTQHLSERALREMRYLPDAAGFDGNDDCPCPSDGCNEVFQKEAGAAAQLVARFLMLALCKPTTQRRDPPKVSVLFAGARATAFAPQLLSALKSEGLGVARSRSAKHPSLWTPDAAVGHLKWAGVRGRSKAALAALAAVKAAAPAAGEKRGARSGAGQQHTGARYAEWQRADLELQARCAALEERVRESEAAMKGDAAAMAARSEAECRAELRAAAAKVKAASKSPYRQIIAAALRRETAAARRYLKCRDEKRHKRRRRSAELAAARTDLERHRRAMPPLPALPAAAPQAWHQAVARALSAFKDAMDASESARRSLVAATDAYSRLVRACRAPASSAQSAAPDPPSLLAQFAARLHHVGTAAQLAQLCVEHACAALASAAGQQPEPADLAAQVQQAAEKAKTAAAWVQAADNGERRVDNPPQWDEAASRELLRRAEQGASGAELSVGYAAHRLQATIFDAAFCVGTAQSAVQGLRPDGAPPPAAPPAAADTFEGVAEGLCRRLRAASRRTQKLRFSLAPTPSFKTNFIDITDAGVRCLHYEFSRHPSRPANFIPATRLEHPKPERDAATQAAWCALFKPEALQKSSPFAGGVSTDGVSLSVRVLRRPLPGDPPPRSRMGARAVRAAANAAALKRALTEIAERVRADPDVDPKTLPPATDIVAWDALFTKWGVRFVAVDPGIRHFITALVLGGPFDPGTRSPEPLDGIPKGKGAHRPGPGGPWHRAHSWRANSRQHRNACAFDAYKRPGLTIIAWGAASIGAGSPVPRAYIPPVRQLETLLRRHYRSDVIFLLIDEYKTSQVCPFCWEIRPDLFTLMGPKEGPKSRCTAVLACPGCMHSHINRDASASMAIAARSIGQLAPDARRGGLDSFERKSKAP

SEQ ID NO: 2565 - protein, 1659 aa, Raphidocelis subcapitata
MQRYLLRTVASFQTPLLLSRHFQAVYLLFAIKRLFGDPVSGALPQRDRSFLDYVARTQSGHHAGADWIREVMRLLVETPHGGQHTAVSAEVQNVFGVTVQRAAADANWAGGGAAAPAAAVPLPGPAFDAVLQPHALALPDVTGELLNDIVSAHSRQQAQNLRRHVRSAPDRWATLIADQLTAAFRAVGARRLLAVEHRERLARAIVRALLGESDADWNDAAWQRGGAIWGEAGDRDGLDDAQRSVVTGLLRRWLGRRRPALEQLLPPSYYGAVAGAGGVQQRHGDRHGGLYHSSTGRPQSLRDWIVGSFRPIDEAGSDDEDEDAAMVLTIDTGAALMYHVARQREEFEADCNAGGGTTSGDERFPALLAARRRDWLARLRAAAAVRTATRAFQGVAPLDARAINDLRGAIRDLATHAAGIALPVSDAERYPRLGLAVLEQKRDEARSTAAEARRRLQQSQAARDENARQQQQQQQQQQQHQARWQQQQQQQQQLLLRRRLRQQVPQPPHAGPGREDPVVAALASDLGPPAAAAPHAHPHGQFAPLVPPRPRAALWATRKERRQRQNQQPQPMQQRPPPQERRKDARRREHDGALIRRHKAQADADRDWSHSQANVDARLAELDQRVAQRWGMLSPAQAAAWHNGMEAVGGLLQGASQALAAAASAAAHAVQHSQASRQLLGRAELHHANCNDINQSDARRQTAQQAEQRARTAAQQHQHAEVAAATLAAQGVMQASQQIQNAFGLWALATGDLYGAGSGRPYGAPPPGQPTQSAREARFPRPPPPLQPQQPQPQQPQQPQQPQQPQQPQQPQQPQQPPPQQPPPQLTADMAERMVREYEVDLTRLAQHFAAAQLEGALELLALLEAGGGGGGGGGGGGGGGAQQAQHAPAPLPPNLLGNLRDAAREATKMQSEAEHLADLLQKHRFSVTPQPSMACEHLQVPQSAFVEMDRIFQTRVLGHQAPAADEDKAAKWSRWFKDQGSTFAHSFSTDGVVVHFHHTVPETSRVAVACKTAYHAVMAARLGGRPHPIPASTVAAARREACAAARAVRPGAVAADEEARRHAFFDAVRRCGGDPRAANLDPTTLDFDWALPQLDEPYVQASGVDPGLTFPITAAYAAQGPRGQREGFFRFGADEWRHGCGFARDARQRERRKTHSKFQEFCRVEGALPSPHTTDLHQLISRMAWAAWIADVGKEQVYGSLSARRSRMRVHCFLRPRMIHRVIQVLLWHSTNILGRWGGTWRRWVTAGAGQPVPRPLRALCLFGSASLGRGSPISRRVVFPSKEVHTKACAMYSRRGVGRRGSLTDWHMQDEFRSSGVHSQAGNPASDGRSGSGAQKKPQPARPTLHPAPDPRAAVLASLCGTLQQLAERLARALAEWAAASEAATAAACRAAKAEGELAAARPERAGPPTKPDDPAAPAGAEHAQLAAAAAARAALAADNARLRSLLARQAAAYARDGESLCAGLDAANAQLAAVGEQLSAASGEAAQLALLLGPRPAQAAAHTAFLPCGGLDYASASSASASSATSSARGSEDGGARGEGAAPPPPPPPPPARASLRIVTAPQEAAAPALPTVQRPQQHAPTRCDEAAGGSPARRPRTPGREFSAAGGGGSGCRLETQAFSPGGGEDEGPRRAPQTPLSDGGGGGVEVRRGSGGRD

SEQ ID NO: 2566 - protein, 680 aa, Diversispora epigaea
MIPPPKRIIYAQEYPVKNSISNDKKKSYSTLNAKDCKPYWNDRAKVLSERLWLPTMIDYAGLPMNSSSTCSYSTLKNSWFSSTIRQPTNVNCPNIYLPSTLPSSADCKEEERPSIEGKGKKRKKILIVRKNKRRKKDENIIRTLNVKLYPNLAQKRLLKRWMGLMRLTYNTIIDYLQSRRFLIVRVDENKNKYKEMINFPKIQFLRTVAYLKLRSKKVYNDIPNNIIDTTVDEAIKNFNSKDNKTRLKFKTKKDLKNTITIHAQNFPKKNWNQFYISYLFCNSMRTPRKKPYNLIEGSRDLRALHFETKRKNNSWPLEKINNDCKLTYYRKTNDWIFQLKGTHERFVAIDPGVRTLFVMYSPTKGIIEVGKNDAQRLFRLCLHADKLSSTRDKLKSSISKRKKKQAKRIDKAISRIFRRIKNLRNELHKKTINHLVKNYDVVIIPEFNVSNMRFVAIDPGVRTLFVMYSPTKGIIEVGKNDAQRLFRLCLHADKLSSTRDKLKSSISKRKKKQAKRIDKAISRIFRRIKNLRNELHKKTINHLVKNYDVVIIPEFNVSNMVRRETRKINSKTVRRMLTWSHYSFRQRLKHKAEEIGMKMIQNEAYTSKPCSACGNIQNIGGRKVYKCKGCNVVMDRDVNRARGIFLHACHMHAYVGIDSMVINDVLQSIRTIVRFIFGLY

SEQ ID NO: 2567 - protein, 788 aa, Diversispora epigaea
MCIVIRDQLTFLNKNHLFNFLTKPPFYNLAQLNTTYQSAHKIQETYDVSVETLRRWADSGRIAIVRTPGGKRLYSITDIQEIFRDNQQTQITQKAKICYARVSSEHQRDDLERQIANLRQYYPEYKIISDIRLGLNWKRKGFVALLERIHTEGIEEVVVTRKDRLCRFGSELVEWIFEKNGTRLVVLGTDVSAESSEAGELAEDLLSIVTVFVARHNGMQTYDVSVETLRRWADSGRIAIVRTPGGKRLYSITDIQEIFRDNQQTQITQKAKICYARVSSEHQRDDLERQIANLRQYYPEYKIISDIRLGLNWKRKGFVALLERIHTEGIEEVVVTRKDRLCRFGSELVEWIFEKNGTRLVVLGTDVSAESSEAGELAEDLLSIVTVFVARHNGMRSAANRRRRREVVKAQEEQELQNSSRQDTTYLSLSYARGEVKTQTLDGNTVEKKGIEQTKKALRAQCLNAANFNNTELQWVLETPYDIRDEAMNDLLKSYSSNFAAKRKKFKMKFCSKKNQQQSITILSKHWGKSKGVYTFLCKMKSAENLPAELHYDSRLVMNRLGEFYLCIPQPLEIWAENQDPTQSDAVIALDPAVEWGKNDISRIYQLSHIYDKIQSTHDSIHGKVHKRKRYKLRRVMLRIHKKICCLINDCYHKLAKWLCQSYRIILLSKFQTQGMVRREKWRIRSKTARMMLTWSHFRFRQYLLHKVREYPWCRVIICTEEYTSKTCGCCGHIHRKLGGSKVFRCPSCTAELDWDINSARNILLRYLTITSKEPVYAGAGIYPLEPS

SEQ ID NO: 2568 - protein, 263 aa, Diversispora epigaea
MKSAENLPAELHYDLRLVMNRLGEFYLCIPQPLEIWAENQGPTQSDAVIALDPGVRTFITGYDPSGQAVEWGKNDISRIYRLSHIYDKIQSTHDSIHGKVHKRKRYKLRRVMLRIHKKIRCLINDCHHKLAKWLCQSYRIILLPKFQTQGMVRRGKRRIHSKTARMMLTWSHFRFRQYLLYKVREYPWCWVIICTEEYTSKTCGCCGHIHRKLGGSKVFRCPSCTAELDRDINGARNILLHYLTVTSKEPIYAGAGTYPLGPS

SEQ ID NO: 2569 - protein, 403 aa, Diversispora epigaea
MRTKFKRRMTSQLKHCNDGLTPEELLLSRHLVKNNSIQLLTYEKSLEITNRHKLCKRPRSVIPDINVSAESNKTGELVKDLLSIVMIFVTRYNGTHFTTNCRKKRKVFKTQKEQKLQNSIEKKSIKQTKKALQAQYLNVANFNNTKLQWILETPYDIHDKIKSAENLSAKLHYNTRLVINQLEEFYLYPDVRTFITGYDSSEQAVKWGKNDISRIYQLSYIYNKIQSIHNSIYGKVHKQKHYKFRKFKIQGMVKRGKWQIHSKIAWMMLIWFYFQFYQYLLHKVYEYPWYQIIIYIEEYTSKTCGYCDHIHQKLDKSKVFHCPSYTAELDWDINDAYNYTFYEYPWYQIIIYIEEYTSKTCGYCDHIHQKLDKSKVFHCPSYTAELDWDINDAYNYTCCPNPK

SEQ ID NO: 2570 - protein, 373 aa, Diversispora epigaea
MVLETPYDIRDEAMNDLLKSYSSNFAAKRKKFKMKFRSKKDQQQSIAILSKHWGKSKGVCTFLCKMKLAENLPAELHYDSRLVMNRLGEFYLCIPQPLEIWAKNQGPTQSDAVITLDPGVRTFITGYDPSEQAVEWGKNDISRIYRLSHIYDKIQSTHDSIHGKVHKRKRYKLCRVMLRIHKKICCLINDCHHKLAKWLCQSYRIILLPKFQTQGMVRHGKWRILREYPWCRVIICTEEYTSKTCGYCGHIHRKLGGSKVFRCPSCTAELDRDINGARNILLHYLTVTSKEPEYIGLIVGESHDEMKNCAKNGLNQITDKNYRSSTASHIEMIVEVTIVLCKKSTFVFAQLLQRKKDKLSTHVWEIISSAESG

SEQ ID NO: 2571 - protein, 487 aa, Diversispora epigaea
MVVPTIAKLENLQSSQCLWRNVTDYVQLPEGPKRLKSSKKEEKKPPAGKVQLYSTQNERLKLRKWMGTVRWTYNQCLIAIEKEETPYSIRDEAMKDLLKGYSSNFVSNKKFKMKFRSKKDPRQSIVIHSQHWGRSCGEYSFLPKIKSAKPLPEKLGYDSRLVMNRLGKFYLCMPKPLEIRTDQETPYSIRDEAMKDLLKGYSSNFVSNKKFKMKFRSKKDPRQSIVIHSQHWGRSCGEYSFLPKIKSAKPLPEKLGYDSRLVMNRLGKFYLCMPKPLEIRTDQGPLFSERQEKDQAGSRCTYFKTGYDPSGIAIEWEKNDIGRIYRLSHKYDKLQSKLNSIPGKKKQAYTLRRVMLRINKKIRCLVDDCHYHHNYQNFARTQGMIRRGQRRIRSKSARAMCTWSHYRSRQHLINKAREHPWCQIVVCTEEYTSKTCGSCGYIHKKLGGSKEFCCPQCKTKIDRDINGARNILLKYLTKKESAGPFII

SEQ ID NO: 2572 - protein, 315 aa, Diversispora epigaea
MNDLLKSYSSNFAAKRKKFKMKFRSKKDQQQSIAILSKHWGKSKEVYIFLCKMKSAENLPAELHYDSRLVMNRLGEFYLCIPQPLEIWVENQGPTQSDAVIALDPGIRTFITGYDPSGQAVEWGKNDISRIYRLSHIYDKIQSTHDSIHGKVHKRKHYKLHRVMLHIHKKICCLINDCHHKLAKWLCQSYRIILLPKFQTQEMVRRGKRRIRSKTARMMLTWSHFRFRQYLLHKVREYPWCRVIICTEEYTSKTCGCCGHIHRKLGGSKVFHCPSCTAELDRDINGARNILLRYLTVTFKEPVYAGAGTYPLGPS

SEQ ID NO: 2573 - protein, 506 aa, Diversispora epigaea
MTSNIRKRPRSAMPVISTENTSGFLPFWNEYTQEESKKWWLPKKTTCAALDSNSWSESLKKRGHKSWFSIQMVVPTIAKQENLQSSQCLWRDITDYVQLPEGENIPSKRLKSSKKEEKKPPAGKVQRIRLYPTQNERLKLRKWMRTVRWTYNQCLIAIEKEGVKRNKKDLRARYINWGRSRGEYSFLPKIKSAEPLPEKLGYDSRLVMNRLGEFYLCIPKPLEIRTENQGPLFSETQEKEGSGVISLDPGWGRSRGEYSFLPKIKSAEPLPEKLGYDSRLVMNRLGEFYLCIPKPLEIRTENQGPLFSETQEKEGSGVISLDPGVRTFMTGYDPSGIAIDHKYDKLQSKLNSIPGKKNKRTRYRLRRVMLRINKKIRCLVDDCHHKLSKWLCENYRVILLPEFRTQGMIRRGQRRIRSKTARAMCTWSHYRFRQHLINKAREHPWCQIVVCTEEYTSKTCGFCGYIHEKLGGSKEFCCPQCKTKINRDINGARNILLKYLTKKESA

SEQ ID NO: 2574 - protein, 378 aa, Diversispora epigaea
MTSNIRKRPRSAMSVISTENETNTHRRSRKSGGCPKRPLVLLWIQTHRDINHGSQFRWLPKPLEIRTETQEKEGSGVIALDPGVRTFMSGYDPSGIAIVWGKNDIGRIYRLSYKYDKLQSKLLEKKTSVYVIEPSEMTSNIRKRPRSTMPVIFALLERIYTGVVEKVVDINHGSQFRWLPKPLEIRTETQEKEGSGVIALDPGVRTFMSGYDPSGIAIVWGKNDIGRIYRLSYKYDKLQSKLLEKKTSVYVIDDCHHKLSKWLCKNYRVILLPEFCTQGMIRHGQRRIRSKTARAMCTWSHYRFRQHLINKAREHPWCQIVVCTEEYTSKTCGFCGYIHEKLGGSKEFCCPQCKTKIDRDINGARNILLKYLTKKESA

SEQ ID NO: 2575 - protein, 571 aa, Diversispora epigaea
MECVPPPIVEEDEKLPKPKKNKSSKIPAGKTQRIHFFPMQEEKLKLKRWMGTARWTYNRCLVAVEKEGIERTKKALRAQCLNIANFNNTELQWVLETPYNIRDEAMNDLLKSYSSNFVAKRKKFKMKFHSKKDQQQSIAILSKHWGKSKGVYTFLCKMKLAKNLPAELHYDSRLVMNRLGEFYLCIPQPLEIILVPKIDFGFLSILEIWAENQGPTQSDAVIVLDPGVRTFITGYDPSGQAVEWGKNDISRIYRLSHIYDKIQSTHDSIHGKVHKRICYKLCRVMLRIHKKICCLINNCRHKLAKWLCQSYRIILLPKFQTQGMVRCGKRRIRSKTARMMLTWSHFRFRQYLLHKVREYPWCWVIICTEEYTSKTCGCCGHIHRKLGGSKVFRCPSCTAELDRDINEHVYFLIGHDQKCDQIAECYELPSESLTEDFITEYGKYVHMKWFKNLQKLRDADTNNETITHENYRNDRFTTTCTPIKEINDRDRYKADTVKTCITTLKSRLGLLNIALNETYRLKFKAIDKNLRYYHLVCPFGNKDAPKLQNGEDIHYGYNKLPPDELPETVTK

SEQ ID NO: 2576 - protein, 276 aa, Diversispora epigaea
MNDLLKSYSSNFAAKRKKFKMKFRSKKDQQQSIAILSKHWGKSKGVYTFLCKMKSAENLPAEFHYDSRLVMNRLGEFYLCIPQPLKIWAENQGPTQSDAVIALDPGVRTFITGYDPSGQAVEWGKNDISRIYQLSHIYDKIQSTHDSIHGKVHKRKRYKFRRVMLRIYKKICCLINDCHHKLAKWLCQSYRIILLPKFQTQGMVRRGKRRIRSKTAQMMLTWSHFRFRQYLLHKVREYPWCRVIICTKEYTSKTCGCCGHIHRKLGGSRDGRRNTN

SEQ ID NO: 2577 - protein, 497 aa, Diversispora epigaea
MSESVQNINETTLNNKLQIFNNITQNTKSLVISDQDLTGNAGDVSAESNEAGELAKDLLSIVMIFVVRYNEIQKLQDFSKQDISLSYARGEVETQTLDGNSMMDLQSVSRSSQKRGYRCLNVANFNNTELQWILETPYDICDETINDLLKLYSSNFAAKRKKFKMKFFSRKSPSRAPLRCTTCDESVWRILSLYSTTRDMGQKSRFYTIRCSDPGVQTFITGYDPSGQAVEWGKNDISRIYQLSHIYDKIQSTHDSIHGKVHKRKRYKLRRVMLRIHKKICCLINDCHHKLAKWLCQSYRIILLPKFQTQGMVRRGKRRILSRKSPSRAPLRCTTCDESVWRILSLYSTTRDMGQKSRFYTIRCSDPGVQTFITGYDPSGQAVEWGKNDISRIYQLSHIYDKIQSTHDSIHGKVHKRKRYKLRRVMLLCESPWCRVIICTEEYTNKTSELDRDINGARNILLRYLTVTSKEPVYAGAGTYPWNLHDPCRTRIFPYWA

SEQ ID NO: 2578 - protein, 905 aa, Diversispora epigaea
MILPPPPLPSKRIIYAQEYPAKNNISNDKKKSYSTLNAKDCKPYWNERSCQRDCGLPMNSSSTCSYSTLKNSWFSSTIRQPTNVNCPNINLPSTLPSSADCKEEEQPSIEGKGKKRKKILTVRKNKRRKKDENIIRTLNVKLYPNLAQKRLLKRWMGLMRLTYNTIIDYLQSRRFLIVRVDENKNKYKEMINFPKIQFLRTVAYLKLRSKKVYNDIPNNIIDETVDEAIKNFNSKDNKTGLKFKTKKDLKHTITIRAQNFSKKNWNQFYVSYLFCNSMRTSRKKPYNIIEGSRDLRALHFETKRKNNSWPLEKINNDCKLTYHRKTNDWILSWVHERQKELKETHERFVAIDPGVRTPFVMYSPTKGITEVGKNDAQRLFRLCLHADKLSSTRDKLKSSISKRKKKQAKKIDKAISRIFRRIKNLRNELHKKTINHLVKNYDVVIIPEFNVSNMVRQETRKINSKTVKRMLTWSHYSFRQLLKHKAEEIGMKMITQNEAYTSKTCSACGNIQNIGGRKVYKCKGRRFLIVRVDENKNKYKEMINFPKIQFLRTVAYLKLRSKKVYNDIPNNIIDETVDEAIKNFNSKDNKTGLKFKTKKDLKHTITIRAQNFSKKNWNQFYVSYLFCNSMRTSRKKPYNIIEGSRDLRALHFETKRKNNSWPLEKINNDCKLTYHRKTNDWILSWVHERQKELKETHERFVAIDPGVRTPFVMYSPTKGITEVGKNDAQRLFRLCLHADKLSSTRDKLKSSISKRKKKQAKKIDKAISRIFRRIKNLRNELHKKTINHLVKNYDVVIIPEFNVSNMVRQETRKINSKTVKRMLTWSHYSFRQLLKHKAEEIGMKMITQNEAYTSKTCSACGNIQNIGGRKVYKCKGCNVVMDRDVNGARGIFLHALLDGAICMHM

SEQ ID NO: 2579 - protein, 331 aa, Diversispora epigaea
MDKVPYEVLDHAISDAIQARDEIITRNKENQCQHHVLHFRSKKNDHQTITIRAQYCREPLRFYIRLLYNKKLLAVDPNHPRHKMKLPFYHEHRRRNHGWPNEIGKVKMDSKLIYERKLGYWTFVWVHGKSIRENQVKEIHIAAIDPGVRTFLTWYSPTVGHGNIGDNDINCVFRLCFALDAFISRTTRALAKKRNSFKCTQARMRRHIQNLVDEVHKKTALWLTKTFDIIVLPKFNSVQMPHKQKRKINSKTVRKMMSWAHARFRNRLLSKAEEFGKIVITSVSEAYTSKTCSRCGYIKRNLGGNKVFRCDGYGLQINRDLNGALDGALVM

SEQ ID NO: 2580 - protein, 375 aa, Diversispora epigaea
MKRKRSATQELAQKSKKRILIGNVNTSNRNIQITNSGQVSTGNKSVSPFWKNHTKEISIEVVVTSKDRFCKFAYELVKWILNKNGTKIMVLGSDVNIDNTKSDQSRIIKDEKRLKTRRIRMYLTPEEKEKLKMWMGTHGYNDCFTNEKLSWVKRTPREVRSFVIRQLMSAYKTNIKTHGSNFRMKYKSKKDRSQTISILARDWNRDRGVSFRCHRNQEDVKGKVISLDPGVRTLMTCYDPKGQIVERGNGDLDKIFKLSKKYDNLQSDKYQALGRSNKRKRYRLGMKMRRIVKKIRNFVDECHHQLARWLCKSYEIILLPKFESSNMVLKNKRKISKEICELQDNRMYGRLVEIVDSLKKILVDQKRLDVILVIW

SEQ ID NO: 2581 - protein, 613 aa, Diversispora epigaea
MIPPPPPLPSKRIIYAQEYPVKNSISNDKKKSYSTLNAKDCKPYWNDRVKVLSERLWLPTMIDYAGLPMNSLSTCSYSTLKNSWFSSTIRQPTNVNCPNIYLPSTLPSSADCRRFLIVRVDENKNKYKEMINFPKIQFLRTVAYLKLRSKKVYNDIPNHIIDETVDEAIKNFNSKKVYNDIPNHIIDETVDEAIKNFNSKLIYFRKTNEWIFLWVHENQKELKETHERFVAIDPGVRTPFVMYSPTKGITEVGKNDAQRLFRLCLHADKLSSTRDKLKSSISKRKKKQAKRIDKAISRIFRRIKNLRNELHKKTINHLVKNYDVVIIPEFNVSNMVRRETRKINSKTLIYFRKTNEWIFLWVHENQKELKETHERFVAIDPGVRTPFVMYSPTKGITEVGKNDAQRLFRLCLHADKLSSTRDKLKSSISKRKKKQAKRIDKAISRIFRRIKNLRNELHKKTINHLVKNYDVVIIPEFNVSNMVRRETRKINSKTVKRMLTWSHYSFRQRLKHKAEEIGMKMIIQNEAYASKTCSACGNIQNIGGRKVQGMIRIHSPIENTNKYDRKQDNFIELCFTKDLAIAWQDNDINNNNVKDTKNYIDSEQNRKSRKDYS

SEQ ID NO: 2582 - protein, 235 aa, Diversispora epigaea
MKLPFHHEHRRRNHGWPNEIGKVKMDSKLIYERKLGYWTFVWVHGKSIRENQAEEIHVAAIDPGVRTFLTWYSPTVGHGNIGDNDINRVFRLCFALDAFISRTTRALAKKRNSFKRAQARMRRHIQNLVDEVHRKTALWLTKTFDIIVLPKFNSVQMSHKQKRKINSKTVRKMMSWAHARFRNRLLSKAEEFGKIVITSVSEAYTSKTCSRCGYIKRNLGGNKVFRCDGCCLMEP

SEQ ID NO: 2583 - protein, 237 aa, Diversispora epigaea
MTRTLRFRVLNPKYVCNCKLFSSPKYIKANIRRAVEDEDTTRRGVDDGKEIEEESKETHERFIAIDPGVRTPFVTEVDKNDAQRLVRLCLHADKLRDRLKSSISKRKKKKAKRIDKVISRIFRKIKNLRNKLHKKTVNHLVKNYDVVIIPEFNVSNMVRRETRKINSKTVRRMLPWSHYSFRQRRKHKAEEIGMNDHTERSVYFKNMFRMWKHTEYRRGGYEQGCKWGAGEIPSRVA

SEQ ID NO: 2584 - protein, 400 aa, Diversispora epigaea
MGLMRLTYNTIIDYLQSRRFLIVRVDENKNKYKEMINFPKIQFLRTVAYLKLRSKKVYNDIPNNIIDETVDEAIKNFNSKDNKTGLKFKTKKDLKNTITIRAQNFSKKNWNQFYVSYLFCNSMRTPRKKPYNLIEGSRDLRALHFETKRKNNSWPLEKINNDCKLTYHRKTNDWILSWVHERQKELKETHERFVAIDPGVRTPFVMYSPTKGTTEVGKNDAQRLFRLCLHADKLSSTRNKLKSSISKRKKKQAKRIDKAISRIFRRIKNLRNELHKKTINHLVKNYDVVIILEFNVSNMVRRETRKINSKTVRRMLTWSHYSFRQRLKHKAEEIGMKMIIQNEAYTSKTCSACGNIQNIGGRKVYKCKGCNVVMDRDVNGARGIFLRALLDGAICMHMHM

SEQ ID NO: 2585 - protein, 542 aa, Diversispora epigaea
MKNSMIPPPPPLPPPPPLPLPLPPPLPPPPPLPLPLPPPLPPPPPLPLPLPPPLPPPPPLPYWNDRAKVLSERLWLPTMIDYADLPMNSSSTCSYSTLKNSWFSSTIRQSTNVNCPNIYLPSTLPSSADCKEEEQPSIEGKGKKRKKILTVRKNKKDENIIRTLNMKLYPNLAQKHLLKRWMGLMRLTYNTIIDYLQSRRFLIVHVDENKNKYKKTINFPKIQFLRTVAYLKLRSKKVYDNIPNNIIDTTVDEAIKNFNSKDNKTRTPRKKPYNLIEGSRDLRALHFETKRKNNSWPLEKINNDCKLTYHRKTNDWILSWVHERQKELKETHERFVAIDPGVRTPFVMYSPTKGITEVGKNDAQRSFRLCLHADKLSSTRDKLKSSISKRKKKKAIRIDKAISRIFRRIKNLRNELHKKTINHLVKNYDVVIIPEFNVSNMVRRETRKINSKTVRRMLTWSHYSFRQRLKHKAEEIGMKMIIQNEAYTSKTCSACGNIQNIGGRKVYKCKGCNVVMDRDVNGARGIFLRALLDGAICMHMHM

SEQ ID NO: 2586 - protein, 510 aa, Gigaspora rosea
MWNNGNGLGQIISSMARLHATNCQNHVVVNLHKRLTRWIQWKLEKQLQFLSKNNNCTLTHHLVSKLVHNQPFSLPHFVDKLNPQYRILVEIRACYTFRKVKQVILENKLISEDVIKQEWWNYLRPLWKILITFEKNNHVDAESRCSSNRRGRGLCLFTILPHTSFQQQFVLIDSDALYQIFSKINFCGLGRVSKSDFSENIEEWWRVAFRIDKVTTTQRIFGFSIMTDGMSVSANLKKEVTKQDIPVNAYGFDKEGNFHPLDVRDNDRIVGLDPGRKDLFVAMSEEKKPIRCSTKEWHILCGHVYARKKTEVWIKGNNIVENILHNIPTPSCSSITSYNNYLTYVLQHMRILIEFYGERRWLRMRWKSYINRNKAYDKICERITKKNPRTIVAYGNGKFSSCSKGHVSGPIKGLYKELKRRLGKRVRLVDEYRTSIICSTCNGRMDKRSRFWSLKTLWNRDTNAARNIRRLFFYMNSNNGERLEEFRRSQNRGGEELPFTVATSGVSSDA

SEQ ID NO: 2587 - protein, 820 aa, Caulochytrium protostelioides
MFRRRPQAVLAWYEAQCATMEDAPSVGARGRPAPLAIRTTAERGDELEWSPTPALLARLTAAAAEVRADGAVCAATVPWSLTLSTAGIDAWLLAVAPRHQDAAASASASVSARDVSRARQALAQALQALDTQIPPRRRERLKLMLFLAWDRMLPSDASDADALDDDSDAWHPWRPYTRSLAPTHASLADMAGRSWARENAAADAVDAVPPPAPSLTDEMVELITASGSPLAARWEAWHGRWTGYYRQLQPALAHLQATFDAAEGLSSASSSAWRTALVTADMLINTRGLALGSMPSREPIHTAAVPATLADPALEALEYLVPLLDYCNHDAEHANAFWEVGVDGVRLMVKAGAVAAARAAADAHQQADAHATANARAAVDGIPLLISYGDDKSDLETVFLHGFASLPTVRCLDAATVTPMAPPLPLTGLVSALDRALTARAATQAADAKDAAPDAETRFAVLQRLGLPPVLDFMEFALSVSAVSPNAALATAAAPPRSILASGLNTDDRVRLHVMAASSEQPLVRLWEALDELDAADEAAGRVSDSSARIDVAAALFWRSDSQDNGDADDGAAVLEAALAGAVTATLHQSLHALHTAAAAVYRPSGDPTWQREAHAWLDLAEDALTTGTPARLPPFPVHALVQASRWCLDALDVADPHAFCLRSSLAWLARYAVALAALLPSADSAPNRSVNDQYYVEAGMKATQKQSETWQLHLKEPLSEMSSKSTALDAHRRFLEVWLATYEPLWATFLKPCRARQRLGLYSYKKRVFAKFMNRVAKEAATEMAPVVAEVRFRTVLVDEFRTTQHSEESGVLEEPSAS

SEQ ID NO: 2588 - protein, 554 aa, Caulochytrium protostelioides
MWQRHLKEPLLRLSGVSSKGTALDAHHRFLEVRLVTDEPLWAEFMKPRWACQRLRLYSGKQRVFAKLMNCVAKGAATEMAPMVAEVVVAYGASQFAPGGKSEIAVPTARAYQACAHRFRMILVDEIRTTQVHAETNDFPAKDRKEPWNDMKALDELKAHWPPQSPRHSYKDIKNSDRYVYVYPWVMTDGAADSAALCGDLLDPCKQSFKVARQLKVSPTVAPPSPALKPGEVPAAPPDQNPLKVTNPTLCICTSEAMSNNDIAELADKLSNLPTIIRTKFKSVVVLDPKHARLNDKKDEVLVLSKDDHRSGADVMLKGLGLFWPTDAAEQKGFYDAANNQDLCVAVGQSDDQIDAEEAFKYTAALFLDRFALKDPTLVDLNGRSRSFHESHIGCMLFQLRWAGQRLYGKDWKDLPSPATVYPVTLSQPSKHESYYAHFKIDKMPCPKGKKLKFGIVYESECSKKKEKTKVYFTAFQPDAAKWEPVSTNNAHCEEQESNKKRKKTEFTQKKVDLSPATLKDYREMFRQLTHSTEGTAGPVFDIMIYPEAACKIKD

SEQ ID NO: 2589 - protein, 457 aa, Elysia chlorotica
MAEKLRKTLWIPGNEPDSDCTVSITGKLNELVNSIDPAPEALGIYKVKFKLTRHQHNVLKDLLAASNLAWNWTKWLIEDKGIKRKDEKTLQSIVAKKSIEDPLMAPREVHDNAKLLHKTSTIRLTGMKSYLSALKSSMTLHKGRMEKFDVDYKELYPASGTFTVQKLFIKKFDISMVNKGVRSKVPEAFYRLSITPDSFGNRNEFTERFLRISKKRSYDRMPPINHDSQIQLRKDGHWLLLIPCDRSYLRCKQPESIEKSVVGVDPGGRTFQTTYDPIKREVKEFHSNKGAEFRYIELMKVKAKRHEEHAKNVKSFPKYKEHKAAARKYWHKYETKRNDLHRKLSSKMVRENKLIVIGDLSTKNACKKGGKLHKKSKDDLYTWAHYEFRQRLIDRARGTNTKVIVQDESYTSMTCGNCGHRKTDLGGDKVYNCTECGCSIGRDVNGGRNILIKAMIE

SEQ ID NO: 2590 - protein, 459 aa, Elysia chlorotica
MAEIIRKQLWYPGYKPENLSGVVEKLKEVGASNDESALGTFKIKLRPTAYQKACLKRVLAASNLAWNWTKWLIEEKGVSWKDKKTMQAIVVKKSIESLENQDMVAPEVRANQQLLSKTTSVRLTAMCSFVAATKSSMTLHKGCTRKFDVGYKELYPRSGTFGVQKPYIRKFEESMLPAKMPTEARKNFNRLRLSILPNSFAAKGNPNERFLRIGKRRSWESMPPISHDCKVEMRKDGSWLLLIPCDRSYLRFSKPVAEKNHAVSLDPGVRTFQTEYNPFKQETRNHGSQRDKDRINFFKTKAQRHEVLAKTNKKEYVRKEHKRQADKYWHKHGKYRDNIHRELASKLVNENDLVIVGDFSSSRCAAKRAGSKLTKQTRAEMYSWAHYRFKQRLIERARGTGTRVHFQDESYTSKTCGNCGNIKEDLGGNKTYACEVCGVVMDRDVNGARNIMIKSLTKN

SEQ ID NO: 2591 - protein, 1564 aa, Rhodotorula sp.
MGVNGWLPKHLQLDGLGWATSTHHGLERALKEVQDERENSNAFLVILDYGSLYYSTQFCSILGGRDKSDPATARTEARAAVEKKRREDANVIRNTLGVDTCILEIHDGPLRPEAKRATIGKRWKRRNKEREKYGRMKCGQFADEMMSGLGVRSEADFEANDYILIADDEGDRALNRVLTARHELPDPDADVELPRLGELDIFQAERLVCRSDPSSIVVIGRDTDEPAINTARERKWSILVGWNNGVAYRRRGSPADKTWRKKSGPYSDTILLFAPGLDRLYTSSRERRMKRSLLLGQDYSDRGLYGAGQKTIDSGRAKPLLDVDWRNLPALQAALARYFGSGTPTEAAEETARRFSTALRTWAGERVAVLDVSTFYAELDLDPARDPNAPIRRPGLVWPTANWPDARPAKTDQHPLAPAKLSPRMPRDPSRAGQIQPARSPRLRLRPFVESGSVLQGHQDAPPDKPRTPKTRRSKKEREASDDGDDEEEEDDKEEDDDEEEDDDEEEDDEEEDDGDKEDDGQGSKGTKRAAAQPKATGSFGTRARKPTFDYAPASTHRLVHGTWERSLVPECFIEQEEPLKGRRRRKRHLSGSAQRRKRRGHQPWQSRRRTEQSKQRDELLEQALAQAQKLDEDVDDEDVDMDSPSSGIGGPELEMTTGNDKLEGRRRGYVFGKRNLPSSSPPSSSSPPRSSLPPRSPSLLPPKQVPEPPRLVRLRPFQYVLRLVDFCMKQSLPWLRSAYSAWATSVSDPQTVGSAQEGAVRLATLETKGRDGVAHIGAMLAQAGGGREDAQEKARFVTFRQAATAAGHPRPPNFRRHFFITVLRPYDTAIHSESKKFIDDLGELGKSLGSDLVRSHDVLANFGLARTTGPLDPSLAQWLASSVPETHDLLGKTISRLLKKRRFRLLCANRGRAVPRLAASFPAPLQAHDQQRHPPLSDSVLTAIAQLSPTTPQLVASLQRTIEQILEFRDGLLSLIYETKNGQNVKLKCDGAKIKEFIAEEGLKEYMVGAHLLIRRMLGAQLLPNLQLEAFPFDAAELAATLDHYADLCADAERLAKSAIRDLVPALVPGAEKSRLAIAEPLLDLFETRNCASRSSRRAELKSAICSVKVVTVKFNGKSYGQIVVPEPVDLVVLRDESKAVAASVRKIKEIFGLGKKALVSLGKCGATSELLNIICRTERLPRGFLPTGAMSVSPASISLFGCRTTILRHNRAQFLKARGFDLGTISAGRLFERALSRTTEEPVFPRWSNLDPQGKPPRTSKGLPITWPDSDKTGGIVRVREFAATNEDRSTAGIDIGEVELVTLFTSSPYTENGAIAEGVALYARRSLLELQKLSSREASSLLVERQRVLSPSTAPSTGSTESRSSITIAALLSSSTSGRHQQEHARLRSRAEQQGAAAELARHILGGSASKEGVGTAEQAQAALVYVGKGSMVRAGGGHGPRSGAAIARQLEVELRRRQVRCLFVRTNEAYTSSVCPSAHCTNEDGQRNPVIAPKRTDGSTIGRLAFCAAENKMMHHDGVGAANIAISGEKQRLFGLPACPFANSVSTLSGSPSGTASAAA

SEQ ID NO: 2592 - protein, 433 aa, Globisporangium splendens
MKDVPDWWEWLVGARAKEIWLPSDQDKSSPVLSKRLKGKSWFTLNSAIETPAAKTASQSSSPTTVDSEKTPNSMLKVRLYPTNLQAKLLNKMFGTHRAIYNKLVECSREDCRKLKASELTAKYRPISQKHSLANYLPEYHLEVPEGVMDSTFRDYTKALKSSMALFKALKKRDKKTSFPELKFKSRKHNSSSIELRSRDIKSSDGVVRFFPRYFGFSKTEGIKIKEELPEREFAVRLQRTRYEKFYLCIPRVKEFEQTSSSRACAIDPGVRSFITMYDPEGLTLGVDDTNEEIFRRCLTIDRAISRKTKEASKRKRYRMNKRVFKMFQRVKAMIADMHQKVSSWLSKNYKEVLLPSFKTSDMTSKQKRISSKTSRAMLTWSHYKFKMMLEYKVKRSGGKMVECEEHYTTKTCSRCGRTTTSHERKSSIAQAVI

SEQ ID NO: 2593 - protein, 873 aa, Globisporangium splendens
MEDEVAPEADDKHLKDMIVPEYDNESENVIRNTDFKRSSRIFTSLEFARKVFRNWIIRSSIDVFIECTKKAKQLRLFSLVPLKRGFECSHLKICNNGLHGLLKRGGLQVPPSDSRWREEADSWWRKLFRIDRFGTSNRKFAGEILADGKAVSVVMRKPKKTVASRRIDLSDCSQVWGLDPGRKDMFVASNESGPKVPCSTREFYEDARYTESLKKIKRWQDSHPDILEAIRNMPTKKTASVKKLKQHVDFLLPRLDLLLDFHIRKDLHGLIFKQHVFAQKKLQLLCRKLTDGTRGRTLVGFGDWSNRDQVGFIKKSPAGPVEHFESQLERYCSAIAVDEYRTSKLHSECHGELKDQYPKKPCRDREVRVMKVPSVLHCTHNGCRDVTVNRDANASRNILLKCEISGVSLPVAFRRSRQCADVPTGGIYIARLLEHYLRHPTCMAPCFGKRSTLVSTSAASLLTKKSEMDATEQDASAAPRALTAAEKRAARRARVLQGGENRLKLVTGQISTLKEGSSAESAFNKEMDDALNELLGATDDSNTKSTSASVREEQSKTGAGGGATGGAAADPRFALRPDPAQRRRDAALRRQKKEAVVQELLAPLTATTQSRAEVTNTTVLSPAVAAKETTNVVPKSTTAKAPATFSRHAFALRLHSLEEKAITLVIFAAAVYLGFNYAFWLAAAMTIDLQSISTDLDAKDQILLSYQELLAQGLPLDSIRQQMEREHLEGPVVERIERLLSAQFSEAQPNVSFTNKFLPNVWDLPEYFSSLVCRPPVIVCVLLVRLLLTLVANGVHLAFQLPDVKNPQEDDLGFIVNLALSSKPALKDSHRSFVVTGIGYLIKFRKSFDDVFFFLYVLLLAVALRAIWAASFA

SEQ ID NO: 2594 - protein, 342 aa, Globisporangium splendens
MASNVAISKREFDEMDHESKTLFGSRLFVNQITMNGYSASVLLTRLKSETDSVKKKPKQTKTEEDMLNDEGRFLSSEYEAEALVATDPGMRSLCTAVSEGMKTKKKTMHGGRSPRQVGDGIVHSISTREYRHIAGMDKARFRYENLKKRKKHCSKAINSIKSYKTFSFEVYLWRLKIVWKHVSFLLEFCANNAFLKWRFFQSRMKEKTADVMAKRLVPIASVQVLAGYGDWSLRDGISGHASSPAKGFRKALKKQATVVPIDEYRTSKLCSDCHSPLDQALLSTKIKNNKVVLKKTRNVLRCATSSCKANFWNRGVNAARNILSLLKCKLLGLGRLEAFCRG

SEQ ID NO: 2595 - protein, 433 aa, Globisporangium splendens
MKDVPDWWEWLVGARAKEIWLPSDQDKSSPVLSKRLKGKSWFTLNSAIETPAAKTASQSSSPTTVDSEKTPNSMLKVRLYPTNLQAKLLNKMFGTHRAIYNKLVECSREDCRKLKASELTAKYRPISQKHSLANYLPEYHLEVPEGVMDSTFRDYTKALKSSMALFKALKKRDKKTSFPELKFKSRKHNSSSIELRSRDIKSSDGVVRFFPRYFGFSKTEGIKIKEELPEREFAVRLQRTRYEKFYLCIPRVKEFKQTSSSRACAIDPGVRSFITMYDPEGLTLGVDDTNEEIFRRCLTIDRAISRKTKEASKRKRYRMNKRVFKMFQQVKAMIADMHQKVSSWLSKNYKEVLLPSFKTSDMTSKQKRISSKTSRAMLTWSHYKFKMMLEYKVKRSGGKMVECEEHYTTKTCSRCGRTTTSHERKSSIAQAVI

SEQ ID NO: 2596 - protein, 327 aa, Globisporangium splendens
MRSNGLHGLLKQGGLQVPPSDSRWREEADSWWRKLFRIDRFETSNRKFAGEILTDGEAVSIAMRKPKKTVASRRIDLSDYSQVWGLDPGRKDVFVASNESGTKVSCSTREFYEDARCTESLKEIKRWQDSDPDILEGIQNLPTKKTASVTKLKQYVQFLLPRLDRLLDSHIHKDCRGLKFKRHVFARKKLQLLCRKLTDGTSGRTLVGFGDWSNRDQVGFIKKSPAGPLKRFEHQLKRYCTVIAVDEHRSSKLHSVCHGELKNQYSKKLCRDGEGRVMKVHSVLHCTHNGCRGMTVNRDANASRNILLLLECEIPGVNRPVAFCRSR

SEQ ID NO: 2597 - protein, 327 aa, Globisporangium splendens
MCSNGLRGPLKRGGLQVPPSDSRWREEADSWWRKLFRIDRFETSNRKFAGEILTDGEAVSIAMRKPKKTVASRRIDLSDYSQVWGLDPGRKDVFVASNESGTKVSCSTREFYEDARCTESLKEIKRWQDSDPDILEGIQNLPTKKTASVTKLKQYVQFLLPRLDRLLDSHIHKDCRGLKFKRHVFARKKLQLLCRKLTDGTSGRTLVGFGDWSNRDQVGFIKKSPAGPLKRFEHQLKRYCTVIAVDEHRSSKLHSVCHGELKNQYSKKLCRDGEGRVMKVHSVLHCTHNGCRGMTVNRDANASRNILLLLECEIPGVNRPVAFCRSR

SEQ ID NO: 2598 - protein, 272 aa, Synchytrium endobioticum
MVRPTRHRVAGVGPKIGKMATRAAFMKNPSKGRLLDEMFLLPPEMLTKSRYELDDRPRRYVRTPSFKTNGLVLCLLWIDTTSKPPPPDRKVEDAINLPNIFHNSTLRSTHKDAWVIAIDPGATCIAGAVPYDPKHPNQRRNLAVTTKCLAEPERRYRDWLEADKPEAICTAERECTKSDQETWAVFLRRFVISYDIARTYYSSTKYKRKRWDANKAKRGELDRVLEGIVNMVDESMGHKLSRDKQVIVAIGMGDFTSAKSRHVMFTRYLIYD

SEQ ID NO: 2599 - protein, 482 aa, Synchytrium endobioticum
MPHPPSPSLAHHCQTIQLLPSSSSSSSSSSSSSSSLDKPDVMADRAVIPVSMVKQMLSVLSPQLQLTALRAPLHDMVSQAVGTHHSEPLTALLNQDPDSVLRLLANPDLLRTRILEALDSPPQKVPQNEPSTNHPMLPNPDPHAANPHTRDRKDDRPIYHSAYPPTYHQMVDSNRTWEPVLELPAMSLCDKDLQQIAILQRKYVKPWVVWVAVTTKSLAESERRYRDWLEGDKPDAICTAERECTKSDQETWPVFLERFVISYDIARAYYSTKRYKRKRWDADKAKRGELDRVLEGIVNMVDESMGHKLSGGKKVIMAIGMGDFSSTKSRHVMFIRYLICKLRPLGYTIVGVNEYYTSKKCPCCEEFVEMPAMCRGCNKWYHRDVMAADNMVNIVRGYLEHDERPTYLKPPSKNKNTPMKWNADEGGGVKSREKVVYHLQFTDVIIYILQYNYIGTSPGMYLFSNFIWKTGWIREVGGRSIP

SEQ ID NO: 2600 - protein, 299 aa, Synchytrium endobioticum
METMTYDFLIVGSRRYTQRSFQKIVLKVAGVGLNARRAAFMKSPSKGRLPDEVFLFLPAMLAKSRHVLDNSQRRYVRTSSFKTNGLVLSLLWIDTTSKPPPPDRKVEDAINLPNVFHNNTLRSTHKDAWIIAIDPGATCIAGAVAYDPKHPNQRRNLAVSTKCLAEPERRYRDWLEADKLEAICTAEWDCTKSDQETWAEFLKRFVASYDKARTYYSTKKYKRKRWDVDKAKRGELDRVLDGIVKMVGEFMGHKLSDDKKVIVAIGMCDFGSTKSCHIMFIRYLIRKLRALGYTIVGGQ

SEQ ID NO: 2601 - protein, 509 aa, Synchytrium endobioticum
MLPLLKERVVEVVGEDGKQAIEEIEAWVDASLEDDSSSPPPPVQVFYKVNRLLPGPYRWSIVPHTSFGDGYVTMSEECLFDLLFDIPSFQKTVREVAGVGPKISKIATRAAFMKNPSKGRLLDEVFLLPPEMLAKSRYVLDDSPRRYVRTPSFKTNGLVLSLLWIDTTSKPPPPDRKVEDAINLPNIFHNKTLQSTHQDAWIIAIDPGATCIPSPPNALPNPNGVTEIGWRPTSRKPFAQPNGSAPSPTRRLGPSFERFVTSYDIARTYYSSTKYKRKRWDADKAKRGELDRVLEGIVNMVGESMGHKLSGGKQVIVAIGMDDFTSAKSRHVMFTSTKKYKRKRWDADKAKRGELDRVLEGIVNMVDESMGHKLSGGKKVIVAIGMGDFSSTKSRHVMFIRYLIRKLRPLGYTIVEVNEYYTSKKCPCCQEFVEMPAMRRLYCRGCNKWYHRDVMAADNMVNIVRGYLEHDERPTYLKPPSKDKNTPMKRKADEGGTSRAGPSKSRKTR

SEQ ID NO: 2602 - protein, 333 aa, Synchytrium endobioticum
MEYVLRWVDESLENDPPSPPQPVQVFYKVNRLLPGPYHWSIVPHTSFGDGYVTMSEECLFDLLFDIPSFQKTVREVAGVGPKALKIATRVAFMKNPSKGRLLDEVFLLPPEMLAKSKYVLDDSPRRYVRTPSFKTNGLVLSLLWIDTTSKPPPPDRKVEDTINLPYIFHNKTLRSTHKDAWIIALAPGATCIVGAVANDPNHPDQRRNLAVTTKCLAEPERRYRNWLEADKPEAICTAERECTKSDQETWAVFLRRFVTSYDIARAYYSTKKYKRKRWDADKAKRGELDRVLEGIVNMVDESMGYKLSGGKKVIVAIGMGDFSSTKSRHVMFI

SEQ ID NO: 2603 - protein, 263 aa, Synchytrium endobioticum
VEDAINLLNIFHNKTLRSTHKDAWVIAIDPGATCIAGAVAFDPNHPDQRRNLAVTTKCLAEPERRYRDWLEGDKPEAICTAERDCTKSDQETWPVFLERFVRSYDIARAYYSTKRYKRKRWDADKAKRGELDRVLEGIVNMVDESMGHKLSGGKQVIVAIGMGDFSSTKSRHVMFTRGYLEHDERPTYLKPPSKDKNAPMKRKADEGGGLKIRETLAYGPHLQALLALQISYMLRILTPSAHLQLASFLQQLLQQLLQQLESV

SEQ ID NO: 2604 - protein, 440 aa, Synchytrium endobioticum
MSEEYLLDLLFDILSLQKTVREVAGVGAKATKMVTRAAFMKNPSKGRLLDEVFLLPPKMLAKDRFVLDDRPRHYVRTSSFKTNGLVLSMLWIDTTSKPRLPDRKVEDAINLPNIFHNKTLRSTHEKAWIIALDPGPTCIAAVTTKCLAEPERECTKSDQETWAVFLERFTLRSTHEKAWIIALNPGATCIAGAVAYDPKHPNQRRNLVVTTKCLAEPERRYRDWLEADKPEAICTAKRECTKSDQETWAVFLERFVRSYDIARAYFGTNKCKRKRWDADKAKRGELDRVLEGIVNMVDESMGHKLSGNKKVIVAIGIGDFSSAKSRHVMFIRYLIRKLRPLGIYHCGVNEYYTSKKCPCCQEFVEMPAMRRLYCRRCNKWYHRDVMAADNMVNLVRGYLEHDERPAYLKPPSKDKDTPMKRKADEGGTSRGGPSKSRRTR

SEQ ID NO: 2605 - protein, 399 aa, Synchytrium endobioticum
MGIKYFWKYLTSLNVVKEKLGSVDSKQLFGVTGNGAPKGVPGGLKGVDGEGRQGRIYVDILGCFYTEIIRCVELGHPSRPYNFAPLMPPPDRKVEDSVNLPNIFHNKTLQSIHKKAWIIGLDPGATCIAGAVAFHPSHPDQRRNLAVTTKCLAEPERRHRDWPFAQPNGSAPSPTRRLGRLPRTHVRSYDIARAYYSTKKYKRKRWDADKAKRGELDRVLEGIVNMVGASMGYKLSGGKKVIVAIGMGDFSSTKSRHVMFIRWYITGWAEQESKDSLGGLKIRENVAYGSAKVFDPSIRNCQNDCAYHSKVNKPPYIPFMAIPNMAAGTPCSKRCYGAGPKEYGKAISHELGEALLSPAFFGWFDDHNNETADLCNSQVYQEGEVWLQPMWSNEKMACV

SEQ ID NO: 2606 - protein, 472 aa, Synchytrium endobioticum
MLKERVVEVVGEEGKQAIKEIETWVDVSLEDDSSSPPPPVQVFYKVNRLLPGPYRWSIVPHTSFGDEYVTMSEECLFDLLFDIPSFQKTVREVAGVGPKTLKMVARTAFMKNPSKGRLLDEVFLLPPEMLAKSRYVLDDSPRRYVRTPSFKTNGLVLSLLWIDTTSKPPPLDRKVEDTINLPNIFHNKALRSTHQDAWIIAIDPRATCIASAVAYDPNHPNQRRNLAVTTKCFAEPERRYKDWLEGDKPEAICTAERECTKFDEETWAEFLERFVISYDIARAYYSTKRYKRKRWDADKAERGELDRVLEGIVNMVDESMGHKLSGGKKVIVAIGMGDFSSTKSRHVMFIRYLIRKLRPLGYTIVAVNEYYTSKKCPCCEEFVEMPAMRRLYCRGCNKWYHRDVMAADNMVNIVRGYLEHDERPTYLKPPSKDKNTPMKRKADEGGGVKSRETMTYGLHAFDPRMLICSLLK

SEQ ID NO: 2607 - protein, 484 aa, Synchytrium endobioticum
MRDGWMYVVPSRQPYIVKYGGAVKLECRAVGKDGVPIKRASVQHSQCLWGRCQADKGLKWTKKSHFGSEIRNVYQQVAASVKGREFKVKKNPPWNCPGASAHVCHSSKQIPHPYKDADLYHRRVFDYVIYTDLESVSWITMYPGRPFGKLQQPSPLVPGDYRISNRRYTRIVAVDPGIKNLGSLVRATNGFDYDDKDDEMKEMPDIREISLREELNQAQLPAKEKGRRLKQLDQPWTYSNDQWKEKTGINLHHRLNQVRLLKHPHVQQIMADIPSACTSQYQDYIHRPRYLVRHLETLVDYHDKAKSSRWDRYKRKQRALHEICMSIRGSGTKDDTVVIWGNGNFTSLGRKQGAPTKALKRHARRYTHIITYDEYMTSQGCSHCARRGVPEAVADDPRLSGYARAQGKSGHVLMAKRTRANRLASVLEDAGCFVAQRCQPLHAVRYCETCSTVWDRDYNAAKNILHCFLYEPAFSERPRLFKRV

SEQ ID NO: 2608 - protein, 780 aa, Synchytrium endobioticum
MTLYAADDTWLANALLNQRDIASVLPIDRALWYGLELKTVLFASNQITTANLKSVAEPLAAKYQRLVVDLYWDAQNKDFQMCPAPYPSVIPSPTPTMLAATAAAVTGTATTSRAPSPTSTGTDSFIAGYNCSNSIRTLSDLLPYIASYMSDTSSRLAANVVFLVFNLHDLGITPTAGAAATTKTLSSTLLATIGNSSIYTPQDLAKHRSSVNDTWGFVSPYYVTSSSGNITSTSNGWPVAQYLTLTGKRLLVAFGTNTISSAVYDTAVDANTIFSATALAISMTGTGSFDSEHFRLVPGTTGLSYSFVQIQDSALTPFTQAEDLAATIWTWDVNEPSNKGRCAVLKKSNGRWAAADCDGRYAVACRSISDPYQWVISGGQEYHWNGDSLCPMGYRFAVPRSPIESTFLYNALAGTSNDQIWIDYNSNSLKNCWVVGGNTKCPYYDSALIIPDIIAASLREGLLVVVVAFIFLIWQVRRQASWRRIRMRRTEHSQVFILYYYKTTETIELLGVSFHLLHDEPLTKVPSSILVLGFDFVHDRLPRQPHTDRTTNNPRLATFRIMRYRDWLEADKPEAICTAERECTKSDQETWAVFRKRFVRPYEIARAYYRTNKYKRKRWDADKAKRGELDRVLEGIVNMVDESMGHKLSGGIKVIVTIGMCDFSSTQSRHVMFIRYLFRKLRPLGYTIVGVNEYFTSKKCPCGTEFVEMPAMRRLYCRRCNKWYHRDVMAADNMVNIVRGYLEHDERPTYLKPPSKDKNAPMKRKTDEGGGVKARVPTGR

SEQ ID NO: 2609 - protein, 316 aa, Synchytrium endobioticum
MELPNNVHNTTLQSTHQDAWIIAIDPGATCIAGAVAFDPNRPDQRRNLAVTTKSLAEPTRRYRDWLEADKPEAICTAERECTKSDQETWAVFRKRFVRPYEIARAYYRTNKYKRKRWDADKAKRGELDRVLEGIVNMVDESMGHKLSGGIKVIVTIGMCDFSSTQSRHVMFIRYLFRKLRPLGYTIVGVNEYFTSKKCPCGTEFVEMPAMRRLYCRRCNKWYHRDVMAADNMVNIVRGYLEHDERPTYLKPPSKDKNAPMKRKTDEGGVASAESRYIPGWAEQESKGSLGGLKIREKWPTGLLDQTRYQRGLHFNL

SEQ ID NO: 2610 - protein, 308 aa, Spizellomyces sp.
MSVSVYLKHPEADRYGKRTGRKSAKSLEEEVKVQYVENNLPACRTAANVIVIDPNKRDLLYCQDNKGIIFRYTSNQRAMETGSRQQQNQRQQMKKEAKIDLIESRIPSHKTMNLMDFTRYLLVRRVHCEHRKQFYSHPAHTRWKWHSFINKQKSESSLISNMHKKYGDFTVVMGDWSDAGRTAKFQTSSKTKGWRTLFKCNGIDCFLLDDYKTSSVCPHCNSPEFVQKCVKERPHSRPWRQREGKTEKVHGLLGCTNPNCLQQDWMMRYWNRDTLATCNMLSIVQSLLDGKGRQAVVQQVYSGGSVDG

SEQ ID NO: 2611 - protein, 1144 aa, Powellomyces hirtus
MSDRRSPPRKKQRTRSPEEYGDVHDPGGSSADSPWSSDPASSNTNVHTPPQEHPVPQIPATPRKKLRQPHRPDSNPSSSSSSSSSSDWDTSGDDSYSRELARRLRRRKKRKKPPAVPSVVTNKGSFARAWFGTAQERARLMSFINTVHHLAQHATWAIKYWLLRCQVAGSFPVLTLKHIRIILTLLNNPRYNPRAADMVYITTSLRPIIQAYVVEARFTPTTTGNKIQNAINYCAASILANMHTNVKMHFGEKIRSYINQRLRIKQLADVMQRFRSGNDLRLSLRHLYRRARHVKELAVYPEGLLQSPEVLLQLSPLELEVLEDIWGTYPDRAFNLSEDVTVDVDVVACPELYLESYAVVAHLFEMHGLPLFNALPLRTSHTQTYVTIDTKLLRDVVLLCKRMPINNLNNKMNIWAMCFNLGHSSFHRRGQHPFTHRFEGTIQTDGTGISVWLKAPGAATSGGTRKPTRMTKAKRKAMVEALYVDVPQNLERVRRAAQTDGKTNVILIDPGVRDLLYMKELYRAGSHHPDIPHTFPRTLRYTSMQRSSDMNSRRMRRQRETIRAQTLEVLPANFKGPPRTIMHLESTTPSHKTMNVLAFSEWVEWQAVNRASLVNCYNTGIWTTMKFDALRRKMSAEDKLIMHMRERFGPKLLVVMGDWSSQTKGTVPTEATQDASDRTYTITDSVPAEAAQDARIVQNTQNGAGSSTKRVRGAASRTWKGLKVSEISGSLGDLGTLLPIIVALSKTGQISLSASLIFGGLYNIITGLTFGIPMCVQPMKAIAAVALASNMPMEQIVTAGFSVSAIILVLGVTRTISVLNVLIPLPVVRGIQFGTGLTLVSKGVATIKQSDRWEFGNYSWLDNYFIAILSLIVVLSFYNNKRNPSALIIFIFGLSVAAAKIWGGFRLTGGVTTVPTPGFSFPSAIHPSGSDFKNGFLKAGLGQLPLTTLNSVIAVCKLADDLFPRLRKPVASVTHVAVCVGLMNIVGMWFGAMPFCHGSGGLAAQYRFGARTGTSMYFLGVIKLLLGLIFGSSLLALFTYIPFSILGVMLIAAGIEIISITKDLGGLPALTDRKRGDAFAIMLFTGCSTSFFANDGVGFLVGLVASTVFWISRCRHDGLDPYVDVRAKVKEVRGAWGKRVDRDD

SEQ ID NO: 2612 - protein, 320 aa, Trebouxia sp.
MPSLSPEDEKKFTAERASWWQRYTAYQSFCTHTERTHREFHFQVETDGISVSILMFQPASGSASAPPVAPNSKKRKRRQQQQTSSAWVSGLPDSQLLQAPRIVGLDPGRKALFTAVVHSQPAADSLHRGRPCESKYDTLSWSCSRWQEASGIKHRLRKSELWLNRKPALKAALLDTPTAKVWSTDQFMLHIKHRLQHAPEAIAHFGDRRHRQLRWSTYIKRQQAYAAVCKAISNGSRDTVVAYGDASFSSSCCKGNPSTPTVSLRRQLGGRCRVYDTDEFRTSKLCCACRTPMKGMPLPVTGNPQLQALATILPTYNWLH

SEQ ID NO: 2613 - protein, 569 aa, Trebouxia sp.
MSTRQQRRKANQAGRFYNVKSGVNSFFTDQALLGQIQQAVQLVTPLLVEGHLLANLHVLRCIEAGEAMPKLDQTFFNRCFHAVSFGTGNQARQFNRASDPSLATTHDTLYTQSLPANHQRPERPTSVKYMLNAAALKARVDLDNHVATNFFTRSRRWIRLQLEHKLEHKLHFANMEAARVKSWASSQAKFITINSASLLRLLKAAGWADLPSLSPAGEKQFTAERASWWQRCTDYQSFCTHTERTHREFHFQVETDGISVSILMFQPASGSASAPPVAPNSKKRKRRQQQQTSSAWVSGLPDSQLLQAPRIVGLDPGRKALFTAVVHSQPAADSLHRGRPCESKYDTLSWSCSRWREASGIKHRLRKSELWLNRKPALKAALLDTPTAKVWSTDQFMLHIKHRLQHAPEAIAHFGDRRHRQLRWSTYIKRQQAYAAVCKAISDGSRDTVVAYGDASFSSSCCKGNPSTPTVSLRRQLGGRCRVYDTDEFRTSKLCCACRTPMKGMPLPVTERGRKDHGPESYSVRLCRNTECRRILWNRDVNAAINILHLFLDWVEGRPKPPEFCRTGQ

SEQ ID NO: 2614 - protein, 604 aa, Trebouxia sp.
MSTRQQRRKANQAGRFYNVKSGVNSFFTDQALLGQIQQAVQLVTPLLVEGHLLANLHVLRCIEAGEAMPKLDQTFFNRCFYAVSFGTGNQARQFNRASDPSLATTHDTLYTQSLPANHQRPERPTSVKYMLNAAALKARVDLDNHVATNFFTRSRRWIRLQLEHKLEHKLHFANMEAARVKSWVSLLCRAATEDSSIWDLLPIYTSLREPPQDVATELEHLVATMQSLMGPLPVTDESLRREPQSYLAWLHFVLSDFQDAQDTPHAPKLFSMTPQASSQAKFITINSASLLRLLKAAGFANMPSLSPEDEKKFTAERASWWQRYTAYQSFCTHTERTHREFHFQVETDGISVSILMFQPASGSASAPPVAPNSKKRKRRQQQQTSSAWVSGLPDSQLLQAPRIVGLDPGRKALFTAVVHSQPAADSLHRGRPCESKYDTLSWSCSRWQEASGIKHRLRKSELWLNRKPALKAALLDTPTAKVWSTDQFMLHIKHRLQHAPEAIAHFGDRRHRQLRWSTYIKRQQAYAAVCKAISNGSRDTVVAYGDASFSSSCCKGNPSTPTVSLRRQLGGRCRREVAKITDPRATVYDCVETQNVVVYCGTGT

SEQ ID NO: 2615 - protein, 302 aa, Trebouxia sp.
MFQPASGSASAPPVAPNSKKRKRRQQQQTSSAWVSGLPDSQLLQAPRIVGLDPGRKALFTAVVHSQPAADSLHRGRPCESKYDTLSWSCSRWQEASGIKHRLRKSELWLNRKPALKAALLDTPTAKVWSTDQFMLHIKHRLQHAPEAIAHFGDRRHRQLRWSTYIKRQQAYAAVCKAISNGSRDTVVAYGDASFSSSCCKGNPSTPTVSLRRQLGGRCRVYDTDEFRTSKLCCACRTPMKGMPLPVTERGRKDHGPESYSVRLCRNTECRRILWNRDVNAAINHSSPISGLGRRATEATGIL

SEQ ID NO: 2616 - protein, 404 aa, Trebouxia sp.
MFQPASGSASAPPVAPNSKKRKRRQQQQTSSAWVSGLPDSQLLQAPRIVGLDPGRKALFTAVVHSQPAADSLHRGRPCESKYDTLSWSCSRWQEASGIKHRLRKSELWLNRKPALKAALLDTPTAKVWSTDQFMLHIKHRLQHAPEAIAHFGDRRHRQLRWSTYIKRQQAYAAVCKAISNGSRDTVVAYGDASFSSSCCKGNPSTPTVSLRRQLGGRCRVYDTDEFRTSKLCCACRTPMKGMPLSVTERGRKDHGPESYSLARKYQAAYIQLYIRCPAEVALQRNASRSQHQGVPEAVMRRMERLFEVPDPQKHAWEANTIVLDGSRLEMNFASDEIWQQILGMWKDPVQPVADAATLEQTRQHGRAANELSLQHQLDLFCRKAVSEIVQQLKANKDLLLLLLL

SEQ ID NO: 2617 - protein, 437 aa, Trebouxia sp.
MQSLMGPLPVTDESLRQEPQSYIAWLHLVLSDFQAAQDTPRAPKLFSMTPQASSQAKFITINSASLLRLLKAAGWANLPSLSPAGEKKFTAERASWWQRCTDYQSFCTHTQRTHREFHFQVETDGISVSILMFQPASGSASAPPVAPNSKKRKRRQQQQTSSAWVSGLPDSQLLQAPRIVGLDPGRKALFTAVVHSQPAADSLHRGRPCESKYDTLSWSCSRWQEASGIKHRLRKSELWLNRKPALKAALLDTPTAKVWSTDQFMLHIKHRLQHAPEAIAHFGDRRHRQLRWSTYIKRQQAYAAVCKAISNGSRDTVVAYGDASFSSSCCKGNPSTPTVSLRRQLGGRCRVYDTDEFRTSKLCCACRTPMKGMPLPVTERGRKDHGPESYSVRLCRNTECRRILWNRDVNAAINILHLFLDWVEGRPKPPEFCRTGQ

SEQ ID NO: 2618 - protein, 214 aa, Trebouxia sp.
GLPNRHLVQPARIVGLDPGRKALFTAVVHSQQAADSLQGERPAQHRYNSLSWSCSRWQEAAGIKYKLHKTELWISRKPELHAALLATPTAKVASSAQFLHHIRHRMQHTAAAQIHFGDRRHRQLRWRSFIKRQQAYSAICKEISGGRKETVVAYGDAKFSSSCCKGNPSTPTVSLRRKVGHCCQRGVAKIADPTATVCDCVSTQHVLVYCGTGT

SEQ ID NO: 2619 - protein, 249 aa, Trebouxia sp.
MFQPASGSASAPPVAPNSKKRKRRQQQQTSSAWVSGLPDSQLLQAPRIVGLDPGRKALFTAVVHSQPAADSLHRGRPCESKYDTLSWSCSRWQEASGIKHRLRKSELWLNRKPALKAALLDTPTAKVWSTDQFMLHIKHRLQHAPEAIAHFGDRRHRQLRWSTYIKRQQAYAAVCKAISNGSRDTVVAYGDASFSSSCCKGNPSTPTVSLRRQLGGRCRREVAKITDPRATVYDCVETQNVVVYCGTGT

SEQ ID NO: 2620 - protein, 491 aa, Trebouxia sp.
MALIPDTPYTVVKTGFNKVFHYAPLNAMIKQAVDFVTPLRIQGQLLATFHVIRLVENSIPVPRLTETFWNQCYQAVSTSTGPAAEQFDPARNPLLAASLTAYSQHLPVGHQEPERPTFIKDIVTQTAQLAEVNFRNHVVTNFRPRIKCWIRLRIGTYAYFGNMHRRKLKSWASLLLWAGTTPNQSVTALLPRLLHCMPNRHRFLPNLNSRITHDLVEVKKVFWWMMFTGCPQFCKKLSIRKKGWHFDREVLTDGVSVSIVLAQFPSPAPYAILPTMTPHQLPKKPPPPAPSVTGPVGATHPVVQTAGRIVGLDPGRNSLFVAVVHSQRAHTMIGAPQPTPADKYATFGWSRSKWYDSSDIDRRNARSAEWLSQSPLVESLLQTMPSAKLASTAMFGVHIRYRLQHVAPVLQLYTAHRFRKLRWTRHIKKQRAMATMCNDITASNPSTIVAFGDASFCHYGRGNPATPTKGLRRALGQKCHVFEIEGAEMDR

SEQ ID NO: 2621 - protein, 306 aa, Trebouxia sp.
MFQPASGSASAPPVAPNSKKRKRRQQQQTSSAWVSGLPDSQLLQAPRIVGLDPGRKALFTAVVHSQPAADSLHRGRPCESKYDTLSWSCSRWQEASGIKHRLRKSELWLNRKPALKAALLDTPTAKVWSTDQFMLHIKHRLQHAPEAIAHFGDRRHRQLRWSTYIKRQQAYAAVCKAISNGSRDTVVAYGDASFSSSCCKGNPSTPTVSLRRQLGGRCRVYDTDEFRTSKLCCACRTPMKGMPLPVTERGRKDHGPESNSVRLCRNTECRRILWNRDVNAAINILHLFLDWVEGRPKPPEFCRTGQ

SEQ ID NO: 2622 - protein, 1246 aa, Trebouxia sp.
MATRQARRDANKEGKLYSVKTGFNTIFTHPGLAATTLQAVQLVSPILIASNVLANLHVLRCLETTAGDVPKLDQTFFSNCMYAVTHATGHKAVQFDRAKNGELTKSLDIYLQQLPQGHQPLERPTLIKDILNAASLMARTNFKNHIVTNYFSRTLSWIRLQLGQQAFFANMDSRIASSWAKFVCRAAADNITNIWDLLPRYTSLAQPPQHIMDDLENLVATMQQLMGPLPVTEWSLQRRPESYLPWLQLVLKDFEEAQDTPDAPKLFSMLPQSNNNTKFITISSTSLQKLLLATGIANVPSLTAKAGAKEFTQHQESWWNQYTDCISFSKRAQQSRRRFKFQVQTDGISVSVLMFQPFPSTQTDTATAATAAPPPPPGRKRKRQQRSSRAAVGAWVQGLPNRHLVQPARIVGLDPGRKALFTAVVHSQQAADSLQGERPAQHRYNSLSWSCSRWQEAAGIKYRLHKTELWISRKPELHAALLATPTAKVASSAQFLHHIRHRMQHTAAAQIHFGDRRHRQLRWRSFIKRQQAYSAICKEISGGHIEAQGDGSWDEDLTEPDQHASDTAPGVDWAKLQSLAFLAGASTLAAVVAVQLSGKADLQGMAYDNIPKPLQEALPQLDEDKNKGPLSQWDVGAAVQNFTDQGNKQIGGLTLPFDLPHQNDRPKSPEKRKTELQESLDRTKQDREAKTEQSKKERQQRQKQKERDKDEAEKREKERKEKERKEKEKRKKFRDQALMGGYIIGRGVRVVEWDVTESPTGPTGHLVSMKLRALTPDGIRIAIAKEYGLSNYREVRQVSHWVTTTTPYFFEPMRTAATFKMLPDPAFVVWSKHPPTGVHKLPTRSSSPQSADTSSQDTLEGLTADQVTALMLKTISGVAAASRLRPRSDASRAADSASSRQHFNGSGSRSAQAAADRQGPAAAINKASEACEEVVAHSSGAHAQEKHPQSNGAEASAAQTVRQDPERTASGRSQQHVVAGKGISSSSAGHDKRHQPRMQAARASAATLSGYENSDVALASRKDEEQQGNSQASPSSNGSESLPHHAAKSGSENRNEGKASHKTQHLFHRSSKEFAEDASSIVKARPARYPSVRDAVLSGSHASSRHQDSGGSQKDADDSQKSSEQKNAQDGQERSGEDEVAGTLQGEADTNKQSTEKSADKAKEPQLWSEPSVLQCLCDRPSVSADTWGERLKLPDAFVCCTQDEEDCMVIAACKPDSKMLSLFRAYAPHNVLTFMRFARLVSLEQ

SEQ ID NO: 2623 - protein, 441 aa, Trebouxia sp.
MDSRIASSWAKFVCRAAADNITNIWDLLPRYTSLAQPPQHIMDDLENLVATMQQLMGPLPVTEWSLQRRPESYLPWLQLVLKDFEEAQDTPDAPKLFSMLPQSNNNTKFITISSTSLQKLLLATGIANVPSLTAKAGAKEFTQHQESWWNQYTDCISFSKRAQQSRRRFKFQVQTDGISVSVLMFQPFPSTQTDTATAATAAPPPPPGRKRKRQQRSSRAAVGAWVQGLPNRHLVQPARIVGLDPGRKALFTAVVHSQQAADSLQGERPAQHRYNSLSWSCSRWQEAAGIKYRLHKTELWISRKPELHAALLATPMAKVASSAQFLHHIRHRMQHTAAAQIHFGDRRHRQLRWRSFIKRQQAYSAICKEISGGRKDTVVAYGDAKFSSSCCKGNPSTPTVSLRRKVGHCCQRGVAKIADPTATVCDCVSTQHVLVYCGTGT

SEQ ID NO: 2624 - protein, 679 aa, Trichomonascus ciferrii
MSNNVKTTKIPITKLCADSITASVNKLVRAVQPLRHHGEDDETDDGCKDEEDPLPDDGENSGRDPPSPENGGAANGPDDDWRSNWGMRIERVRDLNFTDVTNWEDALGVLYHKLGGRYTPKTQETRRLNEKFGHLVEGYNGHGLDLVKEIVGRSHVIDTEVRERTTMLRNNLQANFVKMSLTYAKRLKMRYMKRVSKFRAVSQSANATSDEFNQAKGDLQALGIGIPTVADQEWEDMLKEQLDNELNSALRALQTLNVEGLLSRAEETSSGPYIKTIARDFNSLLLPQKRTRVREGRNITEPRDEMIAAFPHLFIQPYARLSKLFDHHGFQRFNAVPMTVTYEPQYVLIDNRTLVRSILGFKNDEKPEIIPVYWRVFCQGKEADDGLERLHNRVHTIKKRLRFKGRLAHISDELKPRLDYYRTKYGDAWDPQFLQEDKVVRLCYTQGQRNKALRYLKSKRRTEKAAVDEGINLVQGEMTENSRQSFDLDDFGQYVAAKNARFETLKIHYRRPFGVRAKESRYNAHKRADEGLLELMKDKFGSDCIHIIGHWHDAGRTAKYQQPTVSMGVRNILTSAGIQWYLCDEYKTSSICPFCYSTLEKTDKIRLSSRPHQREKGRTENVHGEKLCVNEACKYTYQNRDNVATRNMYNNAVSWLTTGQGIPPALSIKNGKVNSTQRP

SEQ ID NO: 2625 - protein, 768 aa, Tilletia walkeri
MGSSPPALIFPETLGARRPDYSCPTNRQSLQFSLLACTLACLHACLLSSLARLQLASPFGKSRFPNPTEIPESTSDATSTIFLLGGLDAALLSHSHPPIHQQGPNAVKMPHPPAPPPPVPDPPGASPLAPPPPAPDPLAASPLALSGPALSPANPPPPAPNPLNPAPPGSLPPGPQPPAPDPPAPSPPGSSPPAPLPPASSPPSPSIPAPQQQDGQLWFQQLWPPLPLPAYSTPPTPPPSFLPPLPRPPRPPPHPAPLQPPPPPHPSRAREWIASVATESSRWPSTHGTHSSMRRKPLHIGHSWFTRMETALDAMETTTVSRQLLDATEPLRQFVKRNPAAKPTRHIRAWAKSLSEDEVWRARKVRIFPDTRQKDILRQAVGTYRWTYNRAVHILKTYTGSQPSLTQLRQECVNDEAFDGDADMAWVFRSVYAIREQAVMEAMDAFLATKRRGSGELKFRKKRALFGTLRLPAKQWKGGFQKTYEYWEGGIEVSTEMWSGGEILGLKDEGGQPFGFVAAEEPVSATWEGGGSLSWENGVWYLMVPFVSGKPSDVAEGHHICAIDPGIRTFATVYDPLRQKAFQWGTGRDVKVLFDVALKIDNLLGKMHAPDIRHRARYRMKRAVNRYRMRLRHLVMEIHKKFALWLSKNYDTVLLPSLSAHGISARGRRKIRKSTVRQMFSWAHGKFRDRLSNKISFVEIKEHYTSRTCSQCGADNPRLGGKSVFRCPSPACGLEADRDVNAAKKIFLKWLHDFHQDASFACKLRRRQ

SEQ ID NO: 2626 - protein, 952 aa, Tilletia walkeri
MNEGAMNEGAMDEGAMDEGAMDASQTQSPSQPTAPSSSAADTSPLTQNMAPPTQDTEPSSSRSQVSSAGTPNRTPSKPSPTTGSIPSALSSSAPGAPLAASNRPPGVVQMSSAQIKFAQNAIRSLKARSEARWFLDPVDPVALNIPSYVDVVKEPMDLGTIDFKLSRTLFDRNAEDKGDRPLKPSGKVQQAIARQLNSYPTVASFERDVALVFDNCAKFNGEEHQIAKQGRELQKVFERRMKGMPADKPEPAKKPVEFSDERQSVAGPSGTKKRRRSPPSPDPLADVEMLGTDDDHDARLAEIQAHIARLEAEAASLRSKGVKHKQPPKPTHTATSSPSNKRAKTNSSGEASGSHRAAKKQRRASQPDEVEDTFQEITDQQKEELLSKAEDLPDHLVDGVLRILDEDKTLSVGDEDEVVVDVNGMDPRTLYKLYAYVVGFRSAVGSSGGEAVRSGEQALGGQSPGAEEQHAPQQHPPAEWINSITTQPACWPHIGGSNIMKWDDMDTNAWFSMRTLSLSAPVSVGVDLCEELNRVASLVREEGNRRQPSRPRNRTLPYARAEGPFVTRRERLYPTTEQKEALRKVAGVYRWTFNRAIAYLRQHPHSNLTQVRQATVKSTSIDEQDKEWVFKIPYAIRAQAAEEAHTANRNSQRAQAEGRIDHFTLHFRKRRSGFGGFKLEKRQWKDGTLHIPELLDGPIRVRTPIRSIERDGATVRQQNGKWEVLWSVTAGEEDLPAPAGLGPRVCAIDPGVRTFATLFDPLVGIAIKVGEGANARIFRLGLHLDNLLSRMAASNAKQRYRMRKAANRLRKRIKDLTTDLHKKLASFLRANYDTVFIPTFNAHEMSRRGKRRIGRRTIRQMMSLAHGRFRSWLGWKMKTVEIKEDWTSKTCSTCGRVNYRLGGSDTHRCPSCGTHSDRDVNAAKNIFIHSLFDLRRSLTTTGNGLNTAVVHL

SEQ ID NO: 2627 - protein, 210 aa, Apophysomyces ossiformis
MPQMLSVVKPLFEKNSIPVCGVDPGIRTTGVSTSTTSAWMIQRIRYFTSNTTTELRHNIYNPWGLRASTVNHHSRSNRRRLRKERAKNAEKEGTEAENLRIGREKRTREVFIQQAYHKGIKRLREVQRRKGLVVIVNEYNTSKTCHWCLKPQQLQKYRGKDDKVRKCNGAVCCVNPNCVSVVNGCNTINRDSNASKNIALKGVAMIVSTD

SEQ ID NO: 2628 - protein, 226 aa, Apophysomyces ossiformis
MRDVSKKGKGKEKSSASTSRGRKRKRKRQKRSSQATSSAKAKITEGYMPQMLSVVRSLFEKNSIPVCGVDPGIRTTGVSTSTTSAWRIQRIRDFTSNITTELQHDIYYTWSLQASAVNHHSRSNRHRLRRERAKTAEKEGTEAENRRIEREKRTREVFTQKAYHKYADVERIHFPPDMISQKAVHFYGHWQPTNSRIRGHARRGLKWLCEVQRRRGLVVIMNHYKY

SEQ ID NO: 2629 - protein, 247 aa, Apophysomyces ossiformis
MTILSASQATEEGKKVKAIEKKLSKNNVGNAVDIDSLHNYRKIGTENRDILRKFYSEKKSVKKSKRTQYIYTQKAYATVASNERNFLNGSGKKTNVLLMMIGSVGTGVCSPIRGHCRRGGKQLREQHLQQTSVGMTNEFRSSQLCPYCYQVLSHLNKKKDGYIKKNFGTVICTNSECISVKKGYGSRGRDQNAALNIAVAGTSALFSERHEPFQEFNPKKASKYLLDNNLLASLMSIPEGCGVGACA

SEQ ID NO: 2630 - protein, 413 aa, Apophysomyces ossiformis
MVSSLQERRNNQASVEPETKLTLSKAQLQERTDPTQATILSLEQQLKPMRKETGAVETERKNHSTSARGRTNSTAYRRLKQTCQKIRSKQNTPIVLQEKLKQARRDRYVLNKAMRDASKKGKVAAEKRKRKRQKRRSQATSSTKAKITEEYMLQPLFEKNSIPVCGVNPGVQTIGLSTSTASAWMIQRIRDFTSNTTTELQRDIYNTWSLRASTVNHHSRSNGHRLRRERAKNAEKEGTEGELNKAYHKYADVERIHFPPDMISQKAVHFYGHWQSTNSRIRGHARRGLKRLREVQRRKGLVVVVNEYNTSKTCHWCIKAIQLQRYRGKEGKARKCNGAVCCANPSCVSVVNGCSTMNRDGNASKNIALKDVSMIVSTDGSPIPMFSSHYSSNHKLAQQFARKPTPVPLLHGP

SEQ ID NO: 2631 - protein, 1285 aa, Apophysomyces ossiformis
MQVPHPQIRENKRKRKRVIQSNISLDKAIEALHDVFQNQLVTIISKELEDKPRKNTAKKARFQSEVEKQAKTNKILQELRTRLEKADRVPRTSLEQADDSINVTRGTIRRTLCFHYPEPASIGKLWRDYAAAHFNDAVAEARARLEEHGEVEEAGSSKEVTVNDDSKEEKEIIRTCSVRLSKILREDLDNQVKQTFLETIAITSEQATNYASELGTAVHATMLKYASGSVVLDAESKQAHYQQDGKTFNVLDVIHEEWIRHPELLNSELAIAVAPMPDNIKNYVKALPKKHNDEFLNLFTEAHLQFLHSDYFGRQSYKAQGKSFWSSLQHQGLKDLPKPPAGLSTVMHFQLKQYATDLQNMWAGGLFHKSINHLLRILLRINLASEREKKIQEITEKKLQEKEKQREESSRTMRRKKEWRRRKIKGRLKQERKSLRRLEKRLGIEMDGNQRANLLQRKKSCVEAIRRLEKQAKEKYRPKKADNQPHQKDEEARGDMDKLAISADISVMDDEGIEETIETAIEEAQDELEEVEIKTLKKEPSRRRLIRIQAITKKLLLSTDIDGNVQASDVSDIWNDNDELQKVEIDIVVKLANALRPYVPKGRLSSAISLRLRFVLLSNAILHATGYSKFTANICPTISPASIHALPLDAASMYEMFGSNSAKFNLYKEDGSTIDNIREARTNKSAVIGSFFDQEKVKHICNTRGLEPRWRITITPHQMAVIDSDVKKGRVIDTSHYEERKKKSKGKRADSASSQFEDKSGLDIANITCSLEDAKQRVKALESAEKQIKNALRQREEVVESRMESYRRSKDVARRKVRDKRKSEKFDIYDSRAKQKQTDIYKDLKAAKLERAKSQSELSKIRSQLADQRRLRYIYQKQRDILKKQQTNKETKPKDDEQEQETKLCKVASWNRPGCEANTEFLDISELHQEVKQDPKKTITFGGTDYGLRTLATTVPVTMERARLHFDLYNRQFGDGQTPVSIPKEMSTLPKPMRITAGYLEEKTLCRSFRKKRERRKKNNPAVISAEKTLSKRSSASATTVEQVLESQAVKRNCRRELRAFYHSNRAEHEKRTQKLYTDRIYDQVAAQERKFIKAAATTQTDGRQKALPIMAIGTQGTGVGLRLKGHLKRGGKWLRKRHRRYVPVSMTNEHRSSQLCVYCFERVERAKARRRKSRQWKTVRVNGASQCVNPCCPAYQSGHATQNRDVQAAVAIGLASASNILSANRSTLTPFDPSIFSAGKPFVPGATNFWCVNSSRKLCEELREPGPVAMTGVIRTYASVTEEF

SEQ ID NO: 2632 - protein, 815 aa, Scenedesmus sp.
MVCAATWRQGPGCTRVAHRRIAQRRCPNAPRHRGDHGRRYEAERIIRIKTAAHRDARGIERHRPWQQGRPGRPGRYDRRPPGGGDCVHACLNRVPAYSGTSVAAAGAWRNGRVHHVLNNAFAYSLLACRAECAWRLRKHGLKQRALHAAIQLTAYGRVFVRGRVRQHARLPADLPAVVLGIGDASLGMGGCISGPGPPRQALLALLRTYYARRRVAAVLMDEHRTSVTCSVCGARVEKLRGIYGLVQCPGCTVVAPRDDNAARNICALTLHELLRGSRGTAGGARLAGAFRQAAAAAARPAVPPRVRKMATNVSKKRKFIADGVFYAELNELLTRELAEDGYSGVEVRVTPMRTEIIIRATRTQSVLGEKGRRIRELTSAVQKRFNFPPETVELYAEKVANRGLCAVAQAESLRYKLLGGLAVRRACYGVLRFVMESGAKGCEVVVSGKLRAQRAKSMKFKDGYMVSSGDPTRLYLDGAVRHVLLRQGVLGIKVKIMKDWDPTGRQGPRLPLPDVVKVHEPKEEELHADKPYIGKEAELPPATLPPWSLPRAASARPGYIGPEFAQFPGPGGVPPPEFGGVGLERVFPCVRLRGLPFDVSEDEIRIFLGCEPVDILLVKREGRFSGEAFVVLGSPLQIQMAVDKNKSYMGRRYVEVFRAKKLDYYKAVMAEMYVDGGGMRAGFRPAMPGGYGMPYGGYPANGGRPADPAAAGPGNGAYGEAGPSNVLRLRGLPFSAQKEDIVRWFDDVQITPLTVDNVHIITDYGRPTGVALVEFASPQDAQAAAGKDKQMMGTRYIEVFPSSRDELQRYLPRSY

SEQ ID NO: 2633 - protein, 2196 aa, Scenedesmus sp.
MEPEPEPPPPPIGGGQQEAQQRAGAPAQADPAHPVAPAGLLALPVLNWGAPQPAAPAQPRPPPAGAGWHRAYRGPAEDDWLQPPPPPQQHQHQQQQQQRAGASAPRQPPAAGGFAYQEVVRGPARQDLPGHDCAQCRDFYGALSTWGAPAPGTMMLLPCTHALAPAALQAASRHRAKHAPPETPPGFGTSAALGGGGRGSPGPSSSSRSGSGSGWRGGSPAPRPDDAPVPAPAPPPPVAPQQRQPPAAAPRGAPARAPPKLMAPAGTCTGAQLALLKRELEDKGYALVHGRANGLCGFSLIAIAVLRMLEAAELQEPTHDLRSFEPDVLDMLDEQAGELRSRTVELIRELGLSDQLHPSGVPWRDVLGVAGADAVEELARDLEAGGYPSEAELRALCMRLADLVFLTDVYSLDTLLIALQEQGDAFQASEGNRLVALALPAAAAPEFAPVLGAQNPLPLNHWAAVVPARRPPPRGAPAELQQVREPPRGAPAQQRLQEAAPRAAELAADSSDEEGGPAAGQPRQPLQPLQPLQPLQPQQLGRKERRGKGNGAAAPLGTSNSDSSSSSSRRRRRAATAAAIDAAWEKPVERRAELDASKARAEAAGPSDEDVRRSKQRASYDAKHARRGGGASGGGQSGQSGARSGSVSGGGTSRARSDSAGGSAGSSTGGGTSGARSGGGTPGPPPARGIDPAERAAQPVSGADWEALRRHAQARGEAARAAAMAAVLSAPAASVGWSAGSAAASSDEEEGGPAAKRARGADAAQRRSRGRGRARLRGSAKAATRGGRTPSRGGGRARSRGGAAAAPRGRRKRSRGADEASGRGSPARGAAAAEAGDKAGRRQQQALPRHFAKRRKQQTEQAKKAAAGSGMRVRVCALRGAVRKPEVVPYLEALVCAYSRLGILGRDAHHVALVYGASRLYGLDTRQPPPQPAAQEQGPQQQQPPPAAPPAQQPAPPPPACACYLQAACGGAPLVYDLMNFFSQGNWRRVGGGLSSDLRHALEQACGVNELQRVPLPAWVTGTLHHHLLNPLAELYNTNMQLHLADGQRLEKALDAAALQAWFAAGCAGTPSRAARDCLIAGGAALLYSASPLLWERQGVLQPGEGVVPAAAGDGQDAGRLRLAMAMMRDMLARMRLHLEQPFPAAADGEARAPAAGAARTRQAAGAQATPGLQRWESDEAAGKHGRVLDWARSGMPRAPDAGAQAGGAPLVPQPSEPLAHGAGAAARQQHDAAYDAWRAALARQLEGLAYREGDADAMARRVARDFVVMLGQQHMFAACAPRLADSLAAQQGAAARPALEAMLRRAASLGAAPEPASAGALAAAVESLAEALDGSSGGSGSGSSSSSRSRGQRPPAPPKLLDASAQEPRLRELQRARELGKLEAAVQRLRAAVDASEAAVRLRKEPLKGLQREVAGATVPDRHARNRLRRLQRKDAHAAALRRRLAVEEARLLRARGQGAAPGAAPGQGPGAALPAAAAERLRLALAALTAAGDATVGADLAAVEAEWQAAMAQHHERDAALVQHQRALARPHGAAVAPDADAARRAADAARAARDQGARLLGDCGARLAAARGHLAAARGHLAAAAAAQGRAAPAPPAQQQQQQQQQQQQQQQQQQRARRARPRRRRRLSRRCVAMSRPAGATRGGAQPPQRAGGAGQHPDALVAVTGACKVLRGLRSRHAARVALPKRRAFTLAPVPKYGTQHLHLSTTGMQALDAALRARQARAPAGGQPAGQPPPPPPPPPPTQEGGGYDPVWDAYFDFGRRPGRARGVLHANTRFAGSVTFDLAALHVRVRVEGAADPAPRRGQQSRAAKAAQRAAEHRAGVEAARRLLCDALAPHGVADEAALDALPLDPCELRGVEGLPPGHALRGAAAAVHAGVRIVGIDPGRARMICAATWRQGPGCTRVAHRRIAQRRCPNAPRHRGDHGRRYEAERIIRIKTAAHRDSRGIERHCLWQQGRPGRPGRYDRRPPGGGDCVHACLNRVPAYSGTSVAAAGAWRNGRVHHVLDNAFAYSLLACRAECAWRLRKHGLKQRALHAAIQLTAYGRVFVRGRVRQHARLPADLPAVVLGIGDASLGMGGCISGPGPPRQALLALLRTYYARRRVAAVLMDEHRTSITCSVCGARVEKLRGIYGLVQCPGCTVVAPRDDNAARNICALTLHELLRGGRGTAGGARLAGAFRQAAAAAVDPPA

SEQ ID NO: 2634 - protein, 1289 aa, Dissophora ornata
MGLKGFYPWLRKKRGYHPTLRLPMHHHLPDDAIIRIDVLSFHNKIRRIYTKHAEDKTKAHAILFELLKKYGNPSRMAFYVDGAPALEKKETHRERNNKRVKALKTAKTAFETLSDCVSQGRQPTRQMFKNVEKSLYGGFKWSLRDREDFVHFLQDSDFFAYDSVTTIWRPVGKWDEVKILEYKRAAVLAQTGLLTTKFTALACVSSNDQNKNIPSMGIATNYSIIKDLPDADVPLLVEEHLESPLVVCNQEDIDFTASILVFTTMTQEIAAPEGVSSISSPSSQSATPLVASPVPSLSYELLCQQYKLVKDQHDRAKERKRQGNLSINSNAKPNRQGRHREFRRHRVIDRPAHQPGISRQVHRPRFSYKARPEPQQHEQPSICKQYQRKPYTAEQEERYWQSIAEATRKKAKMKRQREARRLKKEQDLAKKPPLKIDEMDKRQLINAMAWGHPHVFLTIGTVKANSKRAAAAATTGASLLPSSEQQQQHQQQEVSACILDIVGQVRVTRRHAQEFLGAFIETVFERGLTENDRTIMYSLCPAVKSKIRVTPQPNQDSQASSSSSAGAPAENEGEEDAEDDGDEDAEPSAMDKPFIAFYQILLAHIYSRKIKSKTVAERQVGQLVARATSLGITLPPAPPRNVSYPTAGLLESSTKQLYRSIKMMYRNGSINSQADGQPAAVLPMIDPELPAIENYLLLNKASGGSRRIAPLSPLAARYIGFSERQVLPLFWHWPTFKEKIRRMMAEDRYFQDPAIVPALADALDWLVKTTPGRFVTTFLTDVGLPPNKHDKGYRKMTTVMDLDGKGGKVGLREHLGYLRAETFDPMEWRGKGYVLKGSILTDGRLLQLLAFNLKELQSVRYRRVPEDKLPNPLVNTIGGTNSYLTEARNVFSTSAAVESLLAADPSQVSVLSLDLGISCIVGATVSLPPGQTPATLMRPHGKEGDEKKKKARRGKRKPGDRKRRRARQKARKLAKQPQTTRYFDLVVKRKAVSQPTGSFASWLEDWKESTTGASTGRTIQDLESALPPLKGEGASFCEYVAARRAFESDLNDFYNNTNFWKHQWDAKVCRKEEFYKVAEGLLNMIGGSVGRPRMPHQHVVIAVGLAKFTASQGPPSLDGTFQAFFVRLARSLGYLVIGINEYYSSKRCPICHDFVCATSDWRTIYCKTCKRFQQRDVMASGNMNNAIKDHLIHQRRPLYLQPRRQDGSYPWVDVAAGGGSGGGGGEAGGPSAEAMDSSGDGAGGSGEGAAIARKRGVSIVSVEDPNTDVDPTTDAPNSSSTRIEKKAKK

SEQ ID NO: 2635 - protein, 1131 aa, Dissophora ornata
MGYNPVPLYQSVVANIATNRRRRLDVLGTCYCAIRNSYSNTPQDVAHRMLEQEVSRFGSSLDMTLYIDGYQAVEKSDTAAEREGLRKRALERTTTALGTLESRLDQDLRVRKRHFVDVRSGLASSFYWSRESRLEFAQYMQDAGWTVKVADTEADLAIAIDAEPNDITISGDSDMIAYASIRTLWRPVSGGCILVYTVQDLLRALDVTRSQLTALAVVSRNDYNKNIRSLGPATNFSIIKSIKRADPKDIVLAYYLTAGLSSDDTIARLRVPRSFNRYRSIESPAPVSKDSENFPQQPPTAGLEPTSPSSSDPQDQSHPPLTRTRIPRHRQRFSFKERQGKVTHEPPLKAKQLVWKPPKKAPESPNDTSTSSTKKDSKKKDAKAKKTREEPSPDKGSSSYAEKGKKNLLRSLGWHHPISSLEVGTLKINIERALSDWPDLQLEVIKCIKEGSALAVDIKRKAQGLIGGYLEKLRTRMKAVEESKRRDLMEAGKTMSESERLKARQDAVTKDGRETLDYLCGRVEPKVDRDDHDDVDDSQEDSNDLDTEGKGNKHLQFLLSFLTYLYSRNLPDKNSKIGKAVDTFINILVGLQLFDICRNRNELNERMLFTAKSLVRSVAGQLSVELKKMYKNGTQLLYDQVKALKDKGRLEDHTDIRIQENISAAENYIALNELIPSSWRLVPITSLQQPFVTYSERELALFFWKRPLLKQRLVELALSDEDSTILTSTIDLEAWIGGREPGFIIKSFISDIDPVGLSNRQKRKAGNRGAIKLLSLDQIQNHLQLVEETKPKDYHRSGYIPQGSIRTDGFLVQILAFKMRERQDARFKRLAEEDMPPRLTTTVAGVDYFLPEIRNVIRSEQDIKELWPGKDVDRMKILTLDGGQACVVGAFAHLPNGLAETGNGKEKAEGGSCMDGIITTNQESTGVANQGSVTLDPVPPSTSTSTSAQAPVMDPLVTPSRPAYYNLAVKQKAVYQPTFRFRRWLENEKLTIPEGEEVSITDVETRLPPLRGPGASVVDYVRELEQVEQRLKKFYAGDDHRYKRHHWDMKRARQAEYQTVAERLLGIVGGSLGRRVEDNKDTDPVLIGIGLGQFSSKSRLSSLHSTFLSYFIQKARSLGYVVVGLNEFLIL

SEQ ID NO: 2636 - protein, 1311 aa, Haplosporangium gracile
MGLFDWYPFIRRKGYNPVVLHQSVLASQSTGTRRFDVMANCFPVIQRAYSNRNLTQDDPHRILEDDIKRFGNTLNMPLYIDGDQAEEKMNTAKARDAVRHKALHRTEESIKVFEERLNDDMRIRKRHFTDVKAGFKSSFHWSMRSRQEFANYMRHHGWTVFVCRTEADLAIALDAQDNDIIISKDSDMMAYRSVKTLWRPVSNNIVLVYKIPDVLATLGISRTQLTALAVVSRNDYHRNIHSLGPATNFSIIKDIGSRSDARDIITAYLTHGQVRMKNTEDETFENSIRVFILLQQERIKPLVQVSQAQELFLVLQDKFKELCIKHESLKNIRAAGVEKRTEEDVVRLSSPKSFNRFRTVESPKVVAKPNSAPASSPQSAPTPGPSQQTPSLTSNLDADGHPPLARTRIPRNRGRFSFKERTRRVVHAQPPKSKQFKLKFHQERPETVNNLTSAKKTTPKAKKPPPNTKPIADKDKKGLLRSLSWHHPTAWLEFGTLEANARRVSGDAATSTAPEKLPNSTIVQQEVVDCVQEAVQLAANVKRNTQRLIGKFIETLAVRMDAAEETKWTELQRVSPPRAITNTDRRKARRDAVTEGERKILTHLCERLKLNDTDKEQQDVEQGQEEDNTDLDSKGNLEQQFLQSFLTYLYSGNYPRKAGVGVVANEFIDWLAGHGLHRPARTRGDINETMPFTPVKLVRSISVQLAVEMKRIYGHGPQDLHKQAAAMIEKHLLPAETDIGIQDDISAVENFIQLNQITGNRRQIVPLTTSVLPFMSFTEPELASFFWKREPLKTRLTDLVAEDGSPTKAFSDIESWIAGKGPGVIIKQFIADVAPQVKTSRQRRKAGHRGAVKLLTLEQIKSHLTAVQDKWVDPINYATKGYVLRGSIRMDGFRLQVPAYKLRELQSVRYRRLEPAKLPPKLTSTVGGIDYYLQEIRHVIACEEDVEKLWPDVPVDRIKTLTLDGGQVCIIGAFADLVEDVLSQAKGKENMNESPIEVIAISSSALSKVPVPSPQSQGLSTVSSRTIFHNLAVKQKAVYQPTFRFRRWLEDAKQEQVSVDGQQVLISHIESRLPPLKGQGSSVINYVEELERVERNLLEFYAGSGNRFKRNKWDMVRARQYEYQLLADRLFGILGGSIGRRYDSSNPALIGVGLGQFSVKSGLSSLHSTFLNYFIQKARSLGYIVVGLNEYYTSKKCPHCGHFVAQVSPRRFFCHNYHCYHHRDVMAAENMANIVQGYLVQQERPLYLQPVAPDGSYPWLEAPTPAVSTSSTSGSSTSGSSSSAIPPPGRSKRAAIASLASGRSRKMAIQE

SEQ ID NO: 2637 - protein, 1620 aa, Haplosporangium gracile
MIASITTIGRRRFDVLGTSFRTTRNAYSSHPQGVVSRMLQKEVERFGNHLSTTLYLDDPQPVEKASTAQAREAALMKALDHLLTSLETFETRMEANLRIRKQHFISIKKNLVSAFYWPLSSRQRFAEYMKDVGWTVILCNTEADVAIARDAQPEDIIISSDSDMMAYASVQTLWRPVSQDLILVYSMPDVLKTIEFSRNQLIALAIVSRNDYQRNIYSLGPATNFSIIKAIGHKPAVRDLVSAYLQDGKVVTRNMQQEIFVTSMRVFIDQLRTWVEPVVIQTPSQIVFDACRHRFDDLMQRYDHWKQTQGTRSRSFQENIVRVRKPRSFNRYRIVKSPIQVSGSFLPKAAPVPQEHERPSATAQQDDGHPPLNRTRTPRNRARFSFKERTRKTVHDPPPKMKQFVLKYYKEHPTTTTNQASSNKSKAKAETDSTITKKPRGTKGKEGLVRSIAWYHPIVTLESGTLTVNTKRIFTPSSAPASSKPATAMPGSTVPTITAPAPSTPVLDRPDLQRLVVECLQEAPHLAPGVKREAQRLVSQFVEAMNKKMDAAELTVITKLQSTTESMTEADRIRKLFEARRDAISDDERRILDHLCERIKPKKDKGENEGGCEKKDSEDNGDIEDKDGTEQVLFLQSFFVFLYSGKTVESFNKNTGIIPTVNTFNNWLVDRQLYNRPRSRGEIDVQMPFTPTYLLRSVSGQLALELERIYGKRTFDLYEKAVVMKEKEPWGRPLTFRRKEISATANFLRLNHLTNNSRKIALFTASQQPFMSSSERGLASFFWKRKLLRERLEELARQDHTHMTSTTDLDTWIGGKEPGYIIKHFICDVAPQGLTSRQKKKAGHRAAVKLLSLSEIRAHLDVVKDKNLDLRKYALNKDKRGYVLRGSIRTDGFRVQLLAFKLRELQDVRYRRMAEDRLPDRLTSTVGGTDYYLQEIRNVITSQEDIERYWPGKKIEDIRTLTLDGGQACVFGAFAHLPAGLSTKSKGKEPVKNDLPMEGIIVTNQQPAVGAVVQDPSLPTTAQESTTSAPGILPRSVFYNLAVKSKAVYQPNFRFRRWLENEKKAIPDSEDESVLDIETRLPPLKGQEASVVDYIKELESVETRLLEFYSGSNNRYDRHVWDMERARHVEFQLMADQLLKIVGGGLGVRYNPTKPVLIGVGLGQFSTSSGLSSLHSSFLTYFIQKARSLGYLMVGLNEFYANKKCPGCGLFVCQVDMRRFYCPHCHVYHHRDIMAAENMGNIIQGYFVHQERPDYLHPVAEDGSLPWKAKRDDGSSSSSSTATTSNTISSPSEVEDIGAVDAIRATSVTYYGRPLSPSSPEATNQPKYMPFVVNQSSFHYPHILLTMASLATKLASASLNRSFVTLPATASGLRTVLNRSALYPSDDHHGHHGHHESPVAPSIPALKSTSLNNNRSFVTAPAGLSQQKRFNHTSARDTTNIPDFSKYKSGSGDATNRAFSYFMVGTTGAVTFIGAKSTVADFLANMSASADVLALAKVEVDLSTIPEGRNVTIKWRGKPVFIRHRTADEIDEANAVNIAELRDPQNDAERAQKPEWLVMLGVCTHLGCVPIGEAGDYGGWYCPCHGSHYDISGRIRKGPAPLNLEIPAYSFEEGNKIIIG

SEQ ID NO: 2638 - protein, 200 aa, Mortierella sp.
MILPDIQVVLVDPNMVGDESLRADKYRGAFFDPGIENTVTVAIFRSSDTNHIKNIAVTRGSWEQPSKFYRRGFEEAKANHRIPELESTIQPIKFTQATDDAEIRVWFEIFSSTIQHLISVLRVHNRLRSFYSSPLYKIKSRHQKQADNATLNRSIDRAIHETAGSQKYINGVGVRTLFGFGDGAFGSRTGKSMYHIKLMP

SEQ ID NO: 2639 - protein, 1216 aa, Mortierella sp.
MRHIGHADSMLIKNAYSNHPQDKTNTILEEHVIIWGSRDNLVFYVDGGQAVEKQHTTEIREAAREKASVKCARSLDVLEDRIDNNLKVRKSHFTNVRSSLASSFYWSFDDRQAFVTHMAQSGYMIRFCEAEADVAIAADCEPNDVVISGGSDMLAYASITMLWRPVSKSLFLVYDLPNLLRDIGLSRAQFTTLAIVSSNDYNRNIFQLRTIPLLNLRELVCSYLTDPRVVSKNKQDETFQFSIRVFVNLQQTPKHAGTHPSTPIHSTYNDLRPNPRGPFSGCISLGHPIATGLSNHLYSQVPRSLSCPCRIPPQLPKKTIGMQLLLQRPRDTHHCQERGPQESPMLLVSATNEENPALSSTTHGKIHMEPHKASPESSADHNTSTPAKSDAPKKRSPSTSRPVPTNKDKFVKALAWHHPLVTLEVGALDTNIKLVLASEPNLQQEVKQCVQEAAQLAAKIKRGAQRLIGQFIETIGDPRNFEATDRRILDHICERIKPKDQDDSNEQEVDTTDLGDNGNIQWQFLQSFMCYLYSGNYPMRLGVGEVANDFIDRLEKLKLYEPPRKRIATKVVMPLTPNFLVKSVATQLAAGLKRIYRNGSFDLYDKLKTKRDKGGLAETVDFRIREKDSSIENFVRLNKLSGNSRKISPVSSSQQPFISFSERELVAFFFKKDSLTKKLRDIMGLEYAALADVDNWIATKEPGFLIKRFLADVDPQGLTSRQRGKMGYRAAIRLFRKGYILRGSVRTDGFRIHLMAFKIRELQMVRYRRVSEDRLPSRLTSTVGGVDYWLQEIRHIISTKEDPERLWPGTRPEAIKMLTLDAGQAYVIGAYAHLPFAAATTCPTDAPLSASLPGAVKPSPSQESAAARPTDASSSTPSTNIAGPGSFQDLDAARPADALSTSFQESTFVLPTETVPVTSLNLAVNQKAVYQPQFRFQRWLEGEKEAVPEGETKSIADIESALPPLRGDGSRVVKYTAELKGENRLLEFYNGDNNRYKRYQWDLRRARQEEYSAIANRLLSIVDGSIGRIKDKSDPVLIGVGLGQFDSRIRLSSLDSTFLLFFIQKARSLGYIVVGLNKFYTSKKCPICHEFVAQVTLRRLYCLECQVYHHRDVMAAHNMYNLARGYLEDQQRPLYLHPRAQDGSYPWLTPTTTSTSTSTSASTTNSPSTPRKRAASTSTQGQGQPSTSNRPSSKRKRTASASNEALQRRGKAAKEE

SEQ ID NO: 2640 - protein, 1092 aa, Mortierella sp.
MRHIGHADSMLIKNAYSNHPQDKTNTILEEHVIIWGSRDNLVFYVDGGQAVEKQHTTEIREAAREKASVKCARSLDVLEDRIDNNLKVRKSHFTNVRSSLASSFYWSFDDRQSFVTHMAQSGYMIRFCEAEADVAIAADCEPNDVVISGGSDMLAYASITMLWRPVSKSLFLVYDLPNLLRDIGLSRAQFTTLAIVSSNDYNRNIFQLRTIPLLSPWKEKRAQGVHSAVAYPSVTQSLQDCRITYILRSQDLSLALAGFHLNCPRRRSGCSSYSSGQGTPTIAKNEDPRNRPRYSFQQRTRKIRHSPPPRMERYTWNPHKASPESSVNHNTSTPAKSDAPKKRSPLTSRPVPTNKDKFVKALAWHHPLVTLEVGALDTNIKLVLASEPNLQQEVKQCVQEAAQLAAKIKRGAQRLIGQFIETIGDPRNFEATDRRILDHICERIKPKDQDDSNEQEVDTTDLGDNGNIQWQFLQSFMCYLYSRNYPKRLGVGEVANDFIDRLEKLKLYEPPRKRIATKVVMPLTPNFLVKSVATQLAAGLKRIYRNGSFDLYDKLKTKRDKGGLAETVEFRIREKDSSIENFVRLNKLSGNSRKISPVSSSQQPFISFSERELVAFFFKKDSLKKKLRDMMGLEYAALADVDNWIATKEPGFLIKRFLADVDPQGLTSRQRGKMGYRAAIRLLSLDDIRTHLQNLEDPSFDPNNYSRKGYILRGSVRTDGFRIHLMAFKIRELQMVRYRRVSEDRLPSRLTSTVGGVDYWLQEIRHIISTKEDLERLWPGTRPEAIKMLTLDAGQAYVIGAYAHLPFAAATTCPTDAPLSASLPGAVKPSPSQESAAARPTDASSSTPSTNIAGPGSFQDLDAARPADALSTSFQESTFVLPTETVPVTSLNLAVNQKAVYQPQFRFQRWLEGEKEAVPEGETKSIADIESALPPLRGDGSRVVKYTAELKGENRLLEFYNGDNNRYKRYQWDLRRARQEEYSAIANRLLSIVDGSIGRIKDKSDPVLIGARSLGYIVVGLNKFYTSKKCPICHEFVAQVTLRRLYCLECQVYHHRDVMAAHNMYNLARGYLEDQQRLSTSIPEHKTDRTLG

SEQ ID NO: 2641 - protein, 1160 aa, Mortierella sp.
MGIGDTFQLLEEKAFVPTPCNPLGFVPQGNKTGHVDVLAWMRQYLIATYCNILFKLFKEDRLAGRVDWNRSLEDDVARIASERLSDALKKQLTKTFIPGNVLLHIDGQHSGQKAYAHSIRASNSDKDKRAFYHNMAKVKTLMGPFYGRNIPKPRPRTPGNTRDDDDDTPTDRRVPYSARHNVFRRSTKDKIVKIRKTMKALWKKAHPMDDNIKRVTCAALNNLGHNVHSCRGEADVCISTQGGEIYSFSGDSDFLYHPIHTFVRKDPKDPTTMLAYPTQEARASFNLTPAGMAALAVVSRNDYSVHVRGYSLKKNLKVFQSINGAKPSDAIHLSSEVLGWMSSNKYRIRNYTIPSGPSPSADGGDADQHQNQKKKKKKKGGRRTNKKQKTEEEKLKEEAVKREKAAARRRPDTSKKGRTEPNPNATPKNDDPATILDRVLKGKYALNVLEVGTVGQRLKDSIAFHCRKNLPEVRERIFNDLNDFFLALVKIATDVVHAARIALSCYIAKVMFDFPANTQAEIIARKNKLQDIGDIGGKHWFGSVLNAIFRWDQGRTEKQVVREIVGDYRALYAQAGLVHNRWTDLISGGMSSFLRQVGDDMESTIQGHFFGNIKELVERVKTTNPTWCQGEGAPLLNDMYVDPTNPKNDKHMFRNYGIVAAFWTLNAHLPSYRRFALFPKYKHKDLYVTITEKHIMEALPFRPNTSPATLAFLGPFTVRSVIAHPGELVYRLFMTSTVGYKKTSCLMNPSQSGPDFPPFFLPPSVDCDDFQDAYDALQSEYEIRGNRAATPAFSQAKRNFISAIDKAIMEAKDIRSAINDDDKNKERHRRMHILHGSIQTNGLDAKLHAFHTAQKKHLAGTYVPKTTKSLLGDIKTKYPSRDELLRNHLSPEVYRIVAMDPGLANTITAVILDSRSPNRVRNLAISSASQKEPERHYRRGLNAAKHKRGINFLENSIVPVEFPQFRNTGDDWVNWLCLRDSIRLNCVSELGVYKRLRAFYGSIMFKVKNRSLKLAQNATLNKAVGVIIRSCGIKGKWREGDNKVRPLFVAGDGNFTSRPGRPIRHLQFFKKLKTKLEALGYVIVSADEYFTSKSCCQCHTKSEDHITMDRRSIQCTQYNRARDRDHNGAHNMARAALQWMTVFSWPQELCRPTPSSQPQP

SEQ ID NO: 2642 - protein, 1485 aa, Haplosporangium sp.
MHHHGQASMVKGSGPEPVADLPLSTETERAEHSETDDVEFINNWHDSDAEGADHDEGDDTDNAQGYIVDSDQGKTSDSNASRNTDSVTTKAKKTRKSKRVPLRKENSFLGGIGSLKERGTHLTMSVEMAMALSMSERDAVPPEESSTATTGRKRVRKGTSSSIESNGPMTDSEREAWDRVKGLLRKVQDKDRQLKDSMNLLMDVQRQLQESVHKFEDFKSDFEIPAMSLVCIDKHKRKRGEKLSMDERCAVKHLHEIRVLENLNGKYVATGNPILRTSLYLRMSSKTISDVLDEKGLIDLRGQYTRTGTACAFASDLRQYTLDMNLIGRVVTVMCPHKRLMDSWPTDIVIRGHEIIRKTMHTVKLKYKKVGKTINYTETADIRAKKLHYLRGRESDKFKEALFLYGLTSRTVTNTTFAARSLGYIVIGVNELYTSKKCPVCEGFVSQANIRLLHCPTCETNVRRDVMAGHNIANIVRHHLVHQQRPLYLQPIDSQGRYPWMDGSSSSSNDGGNGSGSNSGSESGSGSGSDRKRQEQGPEERPHKKTRHSGNNNNAGADPNGQHHQKGGQGSALPLMHGTMDELLSAEFPLGMGNVRHTDGALNNGVHGNIMEGLDDLFNDDFPSVGNQQHLMHMPGHSQQNTVQHSQSLPASMHFPPTQSPQKQVSPLLQHQTHQTTGSLEPTSVPLPGHTGSTSLQGQQPPHQLPTTPSHLSQSPQVSPAMPLINPSVHQVQPNRPQQTPPTLSPSYPSSIPQQQPQQQPQPMNQPTAPRPVQPSIVQAPSPSQAQVQSRPVSNGQLATPAVARPTAAPNTLAPTATATPIPIAQAGSPLHHILTNVSPATGQQLKSLFALLQTNAVTPNEFLAHAEKLLDPAQFEILDGIRRRHAARPTPEGTASQQQSPNVSAANMPSLTTFPKQSVAPGTATGQIRSAQGMSLQTPDSGVGVPSTTTGISSTQPVSIASATTSMLQSAPVRKRTTDNITVATPPIESKLPPKRVKTEHQSIIPGATGAGISSGTVAQPITPAMPHSFPSTPGPATPGGVSSPATFNRVSLPGQQRASPMATAAGVGATAGGGGVSSAVVGGSGAALRAGATGSERVDYDNITDVISYVGVDLNAESDNIMRDSDSYSRSGGAGDGQDRTRVQNFVNTTLLKTIVERIAATHKLQTVEPDVIAYLALATQERLRGLTEKMIHASKHRGRSLATAPPPMYDEGHAMYKVGIHQDVKRQLLAIERVEREEETKRKEQIAERERRLTAGDDLDENGEPRGGGSGGGGGGGGGAKKGKKGKDGGPAVSARNMSEETRKKFANQTALGFAGGGRTYSWMMGGGGAGAASGGTSSPLPSGPAASSSASSPAPGATTAASPTASGGVTTGGGSVRSSLGRIPTSTSISNSSTLGGGTPGLGASGPAGLATPSLSRGASAGGGSMILPPSTLGRPTSLRDSTRKVNIRDALFCLERDRGGGGGEGSGQRVLIKSYVKWLK

SEQ ID NO: 2643 - protein, 827 aa, Haplosporangium sp.
MVGGAAGRPRDEANKVVIGVGLGKFSTKARLPSLHTSFQSYFVQKARSLGHIAVGVDEYYTSKKCPTCERFFGEVEIRRLYCKTCKTYMYQDVMAGHNICNAVRGHLMRQRHPLHLQPVGAEGNYVWEQAATPQTAASTGTSTGTSGQQGARSRKRAASEGGPAARLCLGESNCLNPKLCVSASTLNMIVQSNRQQQQQRALAARAANNGPAIKRQIEKPEPQPIPGTYTDYKLVSTSRDVLHHIMRFHGTKEVNPATFTAPVKLHRKRNENSYHYRGYYNKYNNQNSANNNNSNTAGSNIRDLSGDVKKEGAGVGGGASTSAAGTVPPTTGADTTLIAPYGGGVRNKQMLFKKRTRQIYIANEEERKKKEIEAAPWVVEDYDNQNNWTGQLEGGQGANYVIFVFSDDGFKVVPADKWYKFSSKLQYATLTAEEAEEQYQKSQKQSNSIRWLMRSKNKAKTEDGEEGAEEDVEREQLVTVDHEDDVGYDEDEARERKRMRGKHGDVDEMDFDEVWQDDEEMPSEMPGFEEDDKDDPRKKHGPSMDSDEDEDEEDTKGRLNDAGKAMKKALRKLEKNKVYESDDDKDPYASDQGSSDSDLDEIDKEKDVKKEDELTGLSQDGSKTKGKAKVNAKGAPLINKKSNMVKPSSTKPVSAKAMKTKTPLPTSRNASAGAQTNSKSSSSTVKIGSSTSQRAHSPTPAVAGGVSSGSSEKKRKLIDSNGGEGSGDIPMKKHARASISQSSSSTSTSQASSSASASQAPNNDSWLITEAEIVSYLKSRKEVTTRDLILSLKDKLRRDPRNKNLMATLTKKVAVPTNGILVLKPGY

SEQ ID NO: 2644 - protein, 297 aa, Haplosporangium sp.
MARLVKHPAPETMKLHKWKPWKHRKEDSATEADLPNEINNNEKKKMKGSSGSYQRKDVKCMDKKGLMYTMRGGHPTVAPNVGTLTSNLKRALEKSNSHLNAGTVGTRPLNELLPIIKKYLQDVYAANAKDVNSQLESLYNDYRRQTWKRHAWDAKKAFDEEYRQLADSLLKVVEGTTGTRKKDTNKVVIGLGLGEFSSKNKLSSLHQSFRDYFISKTRSLGYIVVGVNEYNTSKKCPICEGFVGQANIRRLHYPTSETNVHGDAMAGHNSANIVRHHLVHQPRPLYLQPIDSQGRYP

SEQ ID NO: 2645 - protein, 320 aa, Haplosporangium sp.
LTSTVGGTDYWLTEARNVVKTQQDVVALWRCRPEEIKIFGLDLEQACVVGASALLPKEPAGAGLDQGGDAPAKGPSDATKSAPSPAVYYSLAVKQEAIYQPIFKYRRWLEEQKQQVPSEVTESISDIESRLPSLCVDDANFTNYVKEVEDVKERLDGFYNADQSVKSISGMPERSLMPSSRLLQTAYSIWSEARALGYIVVGVNEYYTSKKCPTYRQFVGQVEIRRLFCKTCKTYMHRDVIAGHNICSIVRGHLMHQRRPLYLQPMDSEGNYVWGQAAMFQTAASTSTSTNTSGQLGARVRKRAASVERPTTRRPSQALS

SEQ ID NO: 2646 - protein, 889 aa, Haplosporangium sp.
MKRGLGRIYLLRILLRLHLAPRREERNRANKLVKTLKKSAKDVVRRAKNFDSENLAKDDIVQKLGLDIDDDNLAMDVDHDGLTKDITQQRKMGRNVWLSNVKWLLNGLSDVVERGKPGKAVQRVNINMALLRKLVGILYPYVPKKSPGKVSISHVTLHAPIVLIANSILRSTGYHEFTRKMAPVASTSSLHSLALGAMGVFEVFCAKGGMFNVNDASGEILTTGGNATLPENKPAIFGAFFDLERLKMICYDHGLRFYNRIVYVNPYTVHLVGNVIPNGGALIRGSESRNRRGHSVVSHIDQEKKRRKGSKATSKWTLEFQAQPLDSKEVKEMVDRLSAEIQDMEAAIKKPRKTAGKGQAEQTLLRRALKRAIPVKNKSDRKKAMESPIYKELGVKRDENRVGRKDLLEMENKLRAKRRELYYYSKLNDVPEKSKIYKAPATTPSNATVFRTNPTWNHFTGEEAIEHLDIKDLIQNCRNGERTVVFAGTDYGLCKMSETIALTRTQLEEHINYYSILLGDTPSSAPRESESSSAPAPAESESEASSSSVRAASSSSSQKPKVSRILCSNKITAPHVNDVSRSQRMGKRREKRLRKGAQEVRDAMDKVADKNNSLNRVTTLEEVDAAYKVRSDNKTRTTLRAFEHSKARMKDLRTQRLRTSRSWNKLGASERRFVQKVGHDEEQTTLPPKVSPINEYCNECQSHHLINSFHGPFTHAKNCTRATKMGVLPVMLIGNGGTSFGSRIKRHASKKMRKEHQKNCVVGITDEYRTSKVCIYCFQEIRVARSRRMINGQPKMVRVHGALECINPMCPSFKEGYTIKARDSHVAAAITIAGGCALLSTSHKTLPPFSRVPIESTDKNTSPSNWNYQNRSPDQSRFEKGFSAKKLGL

SEQ ID NO: 2647 - protein, 864 aa, Mortierella sp.
MFVHYTRTNVCNSLGLLRNQMKLLAIVSKTDYFTNVKGYGLHKNRRIIQAIPDSLLFFMELRYMTKVKVKTLKNGHAKSIFLNRKEDTLKNNAADAYQLSMQNQLNSYRRALGQMLNAQRLRARNFLPQPPPPPGQLPPPPPGPAGHGKRYSARTITVPTPTPVSGPAPLPPAYYQAKAARKAAEAAEEAQRALKRLKSSTSSVSVKSTSSQPQDDGGGDGDGDGDGDGDGDDGESGPADPAPLARKAMKRRHGIVSLEAGTLRANVRRAIAARAVQPSLSSQEVNIFRDGITQKIIDTMKFMTQCRRWMHWAIELFIADANTTPADYVQLMTWTSAQTIVYGIGRYLSMAREQVNADARWPMSRRIVLQALDALAARPLMPLGNILSPPPLNSVQIYTLLVKSVLGGTPATPSTTDTITNFRQLNQTLPFDDQWRFYPQISFQDANIRMSGAGLRDILYATDTPNLRRDMIRVFGPRNQCTDLAYQLFVERTNYAQTTMSMSAAAPYYMTPAPAVGTSSSAAPQLPGRRYRVTTGSIITNGFEVRVDAFDIRTRRPPPYKREISPLVRVRRIENFQADDPATWQRLTNWATVNGDLKVIGIDLGEVVPCSATAMTQTQPNRVTNAIITRKSMYDSAEGFLSALNERKRVPIRLNPSPTSTLKVSMVVPSIVEHEAAMPPRGRSDTVSILDFGAWMRVCEYPMMDFYGSFWFKRKQWDNERGFRGDYERAFCGMLRTAGINTNAPIGPNEHVVIAFGNGYFNTHTGRPTLHTAMTRFFIKKARALGIILCQVDEYKTSSVCPRCDSVDVEREMRTFHCTPAIDSVGAHNIARIAMDYIQNGARPVSLMRPAAVANLGHLPSLEG

SEQ ID NO: 2648 - protein, 485 aa, Podila horticola
MVDLGEVLEDWTKRLCEWKQDLVKVGFAPGTAAYHLTKEKRDHAERMRISLKQKIRDAKESGYYWTRISHEKKSETATTTMSTHTGTTAPQTLTTPTGKHMKCCDYAHLIDLSDIGPEIKLYFGGVDYGFRTMSTCMAITQEELRKAIWHANHARESGQPIGTSVPHLPVLRPSSDIKASTIHELSYCQTAINKLNAHVRKQPNVQAVLSQLADMRAAINANPSLKAIDDAANVQRECARFLIDVYNCARVQHDKRHVEIQTKIAYSKLAAEERAYICQDEEGVDDGVRKLAIIITGTSGTGVGSSIRGYAKRGGYKLMDAHGRNSIVAMTAETNTTKVCFACQTEQEAVKATLQKEDGTTTTKVVNGAKRCPNPDCERVKARMAVLNRDCNAAWGMAIAGGSEIYTGQRPPAYRRQIHVSRPGPGLARPPSMHPLIALRVHNMTPDNIPALAPPGGGSLIEIGMPSPSAQLDLPWFGHGTPKDV

SEQ ID NO: 2649 - protein, 1471 aa, Podila horticola
MVHLLQSGEQYPVHEKSDLVFRQIANALKIVIYLFSANRKPQVYPRDMPQKPEIAIGILDATSSFHTIGNPFSVLSVSPHIHPMDLDLPVPPSLVSSTSSSPSPTESPPHITTYRPHRRRPAPPKDLSFPGDDSSLWRPSLRDACVTKLDGFITSAVEGVLKKRGLADDAKETELENKKRILYNDLIGRDDVPRGTRPIILANARERCSAVPEKLETNHLHRRLADAGGVQVWKNVVEETFEDKWTETQKKAQSTPQATGTGRTGTRRRPASKNESITDVTPSTGPSLQAGPASIESPSEWQGTISRELSQCIQPWLLPHLETLDSIAIKSQKHFTNLMRELAFLVHKGLFVISKGDVFTEPGKQSPALLIHLQDLAPTLNSDDTVDVAPLPQLFQGALQGSDDQRKHPAASLFTQGHLQDLFFAFCAVGRDNHRTDGAQPGTPRHLWDRITDEIKARSDTGSIMQVEDGYSRLTTTMIRQLSAAVQRIWTGPLFNKMFDRLVNTVVRERLKHLNMATATLPVTRELVDTKEGAVHTTGAEAEDPPEAPLKTITMSAWRRRSRSLCDELNKALGMPGDDVRHDRKIHVIEYQMSKHLLKKPTPKSFKFRQLTRKERASRIIGNDGDGAEEDEDDDENNGEDGDDGEDDNDGPSNGVRTKDKGSKPVSKTRTFSQRVKWLAKTLKNLLESPAIDMHLNRNWLKKSDSLGLKGSDVTDDELNILVKIATILRPYVPKRVKVDGESHTKPAPALVVLRINASSCLPSSPLVHDTPFHWVLSSFKSQWNSAPGHFDAHQANGSSVFPCDLQKVMSSPENRLDYLRSFFNIDALQTLCKAYNYTLRPRLVYNTLNKDGRKGHPSKSHLDERRKQRFGKPAYDRSYWEQQYLNSSLSKDEIDQALEYKQQEVNTLDAEVKSISKRTKKLEREKSNAAIQAVGPWTPSFRFYTRAQRRFWKAYAEQQQQTETLDQAKKDLTWLRQVRIVAHSKTPPNPKALSLTKATTDYRRFEEDAQHLDISELINNPNIIKAWGATDYGVKRMSETVVLPTPVIQPHMNQFAVLEDLGDEDSNNASEALGQLIQEPVEHSLVAAGGKVSKDQAQKHGLVEKLARVPKTHTITAPQISAICHSASNAHRRQRRLRLEKNHTINIAIDNLKKPAVVPLAAKSLQDLDNALVVHRRDSPLIESFENSHRRLKELRTQHRRTGQALQIVTAHERRLIIRQARTAEGGSSEDTYKVSTQDGWCTQCSEHHRMHLDETLQYVYDPVCPKELKEVAVILLIGNAGTGVGSFIGGIEKRGGKRLRHHHMRSAIVCITNEFRTSKTCSLCLWRVTLARSRRLVDGKLKAVRVNGAVECHNQACPSVQKGYCIKSRDGNAALNIGLAGISTLTRPSRKTLSQFSQRPTTQPCLFPAPASSALVSTSPSGLATTKYSSTHLDETFSDISAHQEQTPAESTEASVKDATGIPASLAEA

SEQ ID NO: 2650 - protein, 311 aa, Podila horticola
MLSVARPTLKHRAWMEAQKNAVLVEPTGQDDIQPFTSSANATTRAQESIQLSTNNTEAAKAEPKSISGIESALPPLRGNRASFTDHMKHRNANKDALDMFYNDKKFKFKRHKWLAQRARVEEYYRLADGLLRMVGGSIGTRKKDEDKVIIGIGLGRFTSTSRLSSLHGTFEAFFVNKARALSYLVVGVNEVYTSKKCPKCAQFVAQTKNLRRLYCGHHCKKYMHRDVMAGHNTCNILRGHIKKERPDYLQPVDQYGNYPWKEKESKHKAQPKSAPGPSQQASSGGSGDNRGVRKRRATESDDKNENEKGGK

SEQ ID NO: 2651 - protein, 1315 aa, Mortierella sp.
MGVHGLWAWMRKKKVEPELHRVNHLYPTSLHLSSEKATIRLDFLGSFFPSVLWAYSNHTRDKAHYILESLLHKLGNQQRVVIYFDGEPAEEKLATQLQRQQLRNKAQSRASNVLDELRNRVDSGLGVRKIIFSKVRKYLRESFRLSTTDRDALIAFLKSKGWIVVLCETEADVRIAKDCQVNDIVISRDSDMLIHTKVKTLWRPIGHATQGKFLVYKIPIILASLGLTRTQLTSLGVISRNDYTRNIPTLGIATNYSLVKRLDGKQDVPTLIHQYLELDSVVLKNVAKQSFSLSINVFVYIRQTPITATSAIPSTDTLNYTALRSEFDRVCKVHAQLKKERQKAKLEKRSDARIPRHKPHQHFNRFRTIDQVPPSLPASASHKKPQNRPRYSFKMRRQGKEHDPPAAMTLYKRKDYKRPPDKPVVPSPPKSKKTPIRSVVTDQKKKTLLKALDFEHPLVSLDTGTLHVNVCNVHKSDPSFADEAVRCIQGAVREASNVKRRCQQLVGMYLEIVLSYKSINNTDRDILDHLCMRLSEKDINQAEEQVNASASATDTSTSTSSATISSTTSASASDTSTSTSSATISSTTSVSATDEADEEKNDTREDEDSSQNKQQVFLRSVMACLYSKNRPQNGSTASNFITRLEELDLLRTENILARGSSRRETEYAPSSLVRSVASQMSVELKKQYKNGSCELYKKLQQQMNWKLLPSNSAVVLQRDMSSIENFARLNALAMHSWTPIPLSPVEYGFVDFSEYDLANFFWSRDKLQDKLKDLMAPDFPSASRDKFNKTWCVADWLPGKEPGYLIKRFVCDIGKEGLTVRQQGKAGHRAAIKQLSFQQLFNHINHLRQPSFDPRTYNEKEYVLCGSIRTNGHHLQLLAYKLRELQSVRYRRYKEELLPNRLLTTTGGTDYFLTEIRNLIKSPKDVEDLLGCNTDKVREEVRVLGLDLGQAFVVGASAVQATPPKRRRKKRRKRGKKRGRRGRKKRSDTSMTAATDLRPPNYYNLAVKQKAVYQPIFKFRSWLEVKKRCTIIATEPAREELPNAQHVHTAVGSDLVTATDIQHQAPAPQDERAIRTICDIESSMPPLRGPKVNLKEYLEHRVTYAEQLDRFYNHDALYKRYSWDARKAQKEEYRRIADSLLKMVGGSIGARKKEGEKVIIGVGLGKFSVTTRLTSLHTSFQSYFVQKARSLGYLVVGVNEYYTSQKCPTCEHFVARVGDDIRCYYCPNCKKYMHRDVMAGNNICNVILGHLEKQQRPKYLQPVDKYNNYPWMEPNEPSQLARQTPASRRKREVAQLDEDDEPPKPKKHNDKILNA

SEQ ID NO: 2652 - protein, 317 aa, Mortierella hygrophila
IKILGIDLGQAFVVGASALLPSRNKHLDAEGGPEGAQKDPLVKQPTTKYFNLAVKQKAVYQPTLKHRRWLEQRKAQPLEGGGSICQIETSLPARFGPDASIAEYTTRMQEVEAQLGSFYGSVVLKKHRWNARKARDEEYRLIANRLLEMVGGSLGAKRKESNKIVIGVGLGQFSSRIRLSSLHESFESYFIQKARSLGYIVVGVNEYYTSKKCPTCGEFVGQVDLRRLYCSECKKYMHRDVMAGHNICNVIRGHLLKQERPRYLQPKDIDGNYPWEEKQSFRPRPGGSGAGGHKGKGVKRKATDEGTDSSQFRRVSV

SEQ ID NO: 2653 - protein, 320 aa, Mortierella hygrophila
ARQKARKLKEPQTTRYFDLVVKRKAVSRPSDSFAGWLEDRKEFTTGSSTVRTIQDIETALPPLMGEGASFREYVAARRASEEDLDNFYNQTNFWKHKWDSEVCRQEEFCKVAEGLLKMIGGSVGRPRMPHQRVVIAIGLAKFTGARSLGYLVIGINEYFSSKRCPCCHDFVCATSDWRTLFCKICKRFWQRDVMASKNMNNAIKDHLIHQQRPLYLQPQRRDGTYPWMDVTTGGDSGGGGGGEGADGPPEAMDVNVDGAGSSAGGGPAAASPSMAATTTVSGPTRKRRATSIVSVEDPNTDVVPTADTLSVHSKNKSKKQ

SEQ ID NO: 2654 - protein, 529 aa, Linnemannia zychae
TELATFFWKREPLKRRLKDLAAEDGSFTNTFSDIADWIAGKGPGNIIKQFIADVAPHVATSRQRRKEGYRGAVKLLTLEQIKSHLRAVQDEWVDPVNYNTKGYILRGSIRTDGFLLQLPAYKLRELQSVRYRRLEHAKLPPRLTSTIGGTDYYLQEIRHVITCKEDVEKLWPGVPVDRIKTLTLDGGQVCVIGAFADLAEDVLSHANGKENANESSMEGVTTTTTTVTTTKTTDNQLTINATTSKSSKVPVPLPHTQGSPTVSSRTTFLNLAVKQKSVYQPTFKFQRWLEDAKKEQVCVDGQQLSILEIESQLPPLKGQNSSVINYVQELERVEEYLQEFYAGSGYRFKRHKWDMKRARENEYQLIADRLLGIVGGSVGRRYDPSNPVLIGVGLGNFSARSLGYIIIGLNEFYTSKKCPHCGNFVAQVTLRRFFCHTCRTYHHRDVLAAENMANIIQGHLVQQERPLYLQPVASDGTYRWQKAQTPAVSTSSLSGTSTSDSSSSAIPSQGRSKRASASLSSGRSRKKAA

SEQ ID NO: 2655 - protein, 578 aa, Linnemannia zychae
LARLDNTTVTSTHDLEAWVGGLAPGLIIKNFVCDIDPIGLSNRRRRRCGHRAAVSIKSLDAIRSHLQVVKESKPKDYQVKGYLPRGSISTNGFRVNILAFKLRERQDARYKRLPQEDLPNRLTSTVAGTDYYLTEIRNAIKTKEDIEKLWPGKDVKRMKILCLDGGQACVFGAFAHLPMGHESSTMDKGKDSAGEGRGSAGEGRDSADEGQDRSGEGQGMEGVLVTSRKAIVDASHQSQVCEHSPIPTPLQSAIQPAEASEPAFLNLVVKAKAVYQPTLRFRRWQESEKTIVPDNEEESVHDIESRLPPLRGSASSVVDYTRELLQVEDRLKAFYAGDDHRFQRRQWDHARARQIEYQAMAERLLGIVGGSLGRRLEDNQDDDPILIGIGLGQFMSNGRLTSLHSSFLEYFIKAARSLGYFHRDTMAAENMYLVVRERLDNFQRPKHLQPIRADGSYPWQDNPLIETAQSSTSAPTSVSTPRRRKRTSVTYQSKPSKATRLTPSNLQGGLAPQLGHLQKKLRYNIRDGISIYQHETDTDTIAHLIQRGEQDIAMVQAWKTVDPRWLERIFKKPTPKKK

SEQ ID NO: 2656 - protein, 1347 aa, Linnemannia zychae
MGCRNLWRFFAKKKHKPSKRYLHDQHSALATPENRVRIDIQGAIFQTIRQAYTHCSSLEAAHKLVLKHIRKIGRREDSVLYFDGNPAQEKQGTHQQQASAREKALRAAEENVEEFAERVQTGLRIRKQLYINIKKNLAKGFYWDPEARESLIVYLENEGWTVTRSPTEADVQIAADCKAGDIVISGDSDLAIHPSVSLIWRPISGYKFLEYKLEDVMAALAISKTQLTVLGIVSHNDYNVNVHGLGCSTNFSIIKSSSGTDIPGMVADYLANSQVIVKNKDKLDFDASIEVFAFGRQTPILRQESNLCALTVDRINDKFNNAKERLAQWRITEAEATLLSKIAMTDRVSRHKASQKFNRYRVIDRPTPQGKKPLINRSTTYVVQPGQPVPHVPLATYRPRYSVKSHVRKAHNPPNAMKQYKLKPWKAKDPIANETPTASVTDKPKAPSRGPRLPSIERMSKAQLVTALSWKHPTVTLDIGTLAGNVNNALKVKDISRDPIELAEDSAVAKETIDCIRAIAKEANRVKHKCQGLFGAYLERINRDGVTSYDKEILKEFCPPIPQKMIENAAFNTSPSYQDSTIDDDDDTSDRQVQFIGCFMRYLYSNNYPRDTGVGTVVNRFISRLEQMEMHTPVRIRGSIDKKSEFTSGLLVRLASTQLAAEMKKIYWEGSVQLLEQLRTKFERDQKANTPNIRADKDKNTNTLKDADTVGDLGSAEHTADDRDTVPNRNRDKGTASNGKKDGSSRQLDSFTLSISNSMSAVENFLNLNKLAKNARRIVPMCSQEGRFLSFSETELLGLLCSRPLLQDRIRSWADHDFSTKPSASNLQNIWLDSKEPGFLIKMLLVDVGPKNLTSRQRGKAGYRLHTMADIREHIDPLRQDTFDPRHYDSKGYALRGSIRTDGYCLQLLGFKLKELQRCRFNRACRYPLPPRLTSTIGDLDYHLTEIRNVVKTPADVARIWPDCQPDAIEILCLDLGQAFVAGASALLPETARSTMLTQSTPLISSIAPTPPVTSNQVFHNVAISQKAVSQPTLQHRRWMERVKSIVPEGGESSFNDLECNLAPLRGESASIIEYLEGVRRIQGPLDDFYNGNNMLFKRHAFDAKRARQEEFIKAANRLLNMVGGSVGCKRKPENMTVIIIGLGQFKSSSGLTTLHGSFQAFFTQLARSLGYVVVGVNEFFTSKKCPTCEQFVYQVNIRRLFCKSCKSFVHRDILAAHNMCNIVKSHPLIQERADYLQPIDEDGNMPWKKNDSAAPTHNPSATSSPLPKKAQKIKAPPAQNPSSSNRSSKKTQKSKVPPTQDFSPALSRPFKRSNIDDEPQPSSAPSRPSKKAKPVPNVSSRDLAPR

SEQ ID NO: 2657 - protein, 305 aa, Mortierella antarctica
MPNKVAVLTVKRAALYAPIFRDRYVMNQLKEKPPPIPRSDTTARLTAAFRSNGSINDIQNGMVGFGDGSSQAVKEHLRAWERAFRKLREFYSCHTYKKRNWARRKAFRAEYDYAVTGLLRLALLDGEMNQLHRKVVPGMKKTLFVYGSARFNTHTKLSSLHTSLMGFFYRKATALGHVVVVADEFRTSSICPSCDAWVAKPTMRLDTHTYFDVKIRPDRADQVLAWTQAAAQDESSALAGVEYVGHVGELTNHLLYRVPKHQDDPNDDGLEEQRNKHVVDTLSAVQGVLQVDIQTLRQRAKRDEL

SEQ ID NO: 2658 - protein, 1111 aa, Entomortierella chlamydospora
MIQYAYSNFPVNKAQQHVQSKLDKALDKATALIYFDGAPPVEKVQVHRKRKETRRESLDKANKHADMLMERIDQHLRVRKRHFQSVQQSLRRAFHLDPAEAGSLLDYLRSMGWEAIESETEADIRIARDCLPGDVVVSGDSDLLIYQSVETVWRPTSGGRFLEYVIDDILDTLGLARSQWIALGVVSKNDYNSNIYGLGWATNFNIIKALNGDDPSTLVQQYLEDPRVMENKKNITFDAPARVFIHRLQTPISQTSMHHPPATIRLEEPSITFQSVSEKLRTAKENLAALKAVQQEPKIGKKSANIEARHKPTQKFNRYRTIDQPPSESNTVFRPRYSFKARQRTKTHDPPKALKQYEQKVPKDPVKSPEDVKSTSTTSSKRSGIKPPLPTNTLKRKDLLKALTWEHPTSALDVGTLHKNVEYALGESHAAREEVIKVIRRAVRVASKEKRRCQRLIAEYIQLIVSPENFHDDDRAILAHLCPYSSPCNSSSSIENNKEDEQDADDTDFDDSSDKQVQFLQSLMISLYSQNKPLGKIANVVNTFISRLEDLELLPQRQQPRVGALKKKTEFPSGALLRSVSVQMCAELKRHYKVGCEKLLEKLTKQQEKGLLPAECRVEVRSDVSAIENFAYLNKLADNAWRLAPLSPVKDGLVSFSELELIAILWQSPILKPLIQNLYTITSGVPSLEIIQKGLEPGRMINALLCKVGIDGLSWSQRKKAGIRAAIEMPASTFKKKELQSVRFRRYPEDVLPNRLLSTIGGTDSFLTEIRNVIQSPDIQEYLGNEPDRVKILGLDLGQTCTVAASTLLPQDASASEQLFLNLAVKSKAIYQPNLKHRRWMERRKHQALPGSNKSEESGQSEESGQSEESEESIADIESNLPSLRGKDSDKYLFERHDWDVRRAKQEEFRTIADRLLQSVGGSLRKKRDEDNKVVIAVGLGKFQSKSGMTSLHDAFAAYFVKTARSLGYLVVGVNEFYTSKKCPVCTNFVGQVTIRRLYCRTCRAYLHRDVMAAQNMCNIVQGYLLKRERPEYLQPKSIDGTYLWTTAISEASSSANLDPTTLEQASGTEPSAKGPSKTSVFLRKRIASDSELEEQVEELTIEPKKTTAHI

SEQ ID NO: 2659 - protein, 966 aa, Podila clonocystis
QDSVSTVLHRYEQNPEVQAAKARYNQQEEAIRLEKPVNIHAACRVYVDGKETPLTKAQTDGKRLTEHLQEQHVHGLKSRLVQASRTRREVIKSKKSQALTADQQQQLHCQRHYNRFKTMDCPSVQAPPPLPLYSLPQQAPPLPPPAPAHPLPPPASAHPLPHPPPAHQLLDQRQQQHQETINRQRQDRPTSVSTRAEACKKEHKAQGFDKLKSKRYGIRVRMVQPQQQQDNVSGDDGELPEGLVFKPFKPYTSVSPIAPKKTQRHSTYIPKDCQMTKQDVVKSITGFHQITTLSVGQLGRNIGHTVLPQCIPTNDPVDVKMYYAAKAGIATTETIQRIVRVANALLRHGQKALALFIASATSADLHRLKDTIFHKHRHCTVEVAISEAARKRLGKLGKVNNSNSTETLATIEAISEQGEEQEQDSSYPEEEADESGTKGDHGGFFGSLLQYMRTPTATIKYNNRHIALIRPIRTQYIQACPLDEAEFKILNHGLESSIVQTIGASLAVQNIRHYIGLTTGEDPSFIDISTKPPGWLLTHLITPVGGSLQSPVHNHMGQAHNNFARITTTATVEELNVLREAIRTQAIGNESSSQFLMDRRPNEDHVIINPKPGQPTNLLPSYLLRGMIVTDGRSLHLSAINLQLRKGKRFMTELTTNSNDGMVYRHHVLAPDPHRCLPSLTTAIPDQAALSQLFPDVSKVDVGAIDLGKEFMAAFTCRRYDRPDFVYTVHAKTKALYQPTNKAAKELERCLDNSTVTHVAGNESAISVYQSALPSLRSDPKHRVLLEQTDEYQQYAAFYNNHGRQQKRKEQAKRARCGEFDVLTNHILTAMGTHRARSLGYIVLGIDEYYTSRRCPSCKCSGSDAQDFVGYIGLRRTYCSSCRTWFHRDLLAASNMVEAGRYYLQHLSRPAHLLPISEDGKWVYNPWYGPVPPPEVPTGQLLDRRALQGQGKAQQMDVEMQDATAV

SEQ ID NO: 2660 - protein, 1944 aa, Gryganskiella cystojenkinii
MANTIFEQQLRSLQFPPATTILYMDGPSPEEKRATREVREARCTAGLTKADALLSEMEDIQRQGKKLRKQHFRKLYKAINAAFYFSADLRTSLARYLRDKGWMVTECPSEADLQIALNCKSNDIVVSGDSDSLIHSSSIKTIWRPLARGGYLEYDVPSLLQQLELSRASLTALGVVCRNDYTSNMKQMGLATNYEILQSLEGEDVDTLVNSYLTHPEVVLKNPIMTHFDSALKVFTRQEFTTWDHSLPPQVIQQEDALTETRLPPTLSGILARLRDLQNQLKIKNESPNTAHASEFEYRFNRYNTVDREPAISPPPHASGRKYKYRKRYAIKTRSRMIEHERPDVLKQYILKPWTAPPESPKESGPPPASKIPTKKILHKLDSMDKKWLVKELHMDKKWLVKELQWDHPTRILDVGTVNANVTRALAKGSLPNAYLPRIKACLSKVTKIAATTKRACQQAIGQYLENLSLENLDDQDKLILRLLCRPFTANDVLPANGVLPANGVLPANGVLPANDVLPAEGATEPGSVGQVEEEETEEEVDESDDSNDRKNPALQFFMSLLSAIYNAEPPKMSLELQRAKYMPKTLATEPKKESDSIQAVREFLIKAKDFLPPQSGQATAVYPSSTVLRSTALHLSVEYMKHYRNGSLDLCKKIRSLKKKGTLPSDTVDNIDLTLSPVENFIVLNRASGCRRCLSPMSYMGTGFVNLSELDLTKIFWYDNILCRRLQECAFPHFNLQIPEQVSLDTVGIWVGTSEPGMLINKFLTDIGGYAADERKKKKNFSRSAMRMSLNDIRSHLRYLRQDGFDPSSYNTNGYLLRGSIRTDGFRLQVLGFKLNELNCVKYRRLPPERLPDRITSTLAGTDYYLTEIRNIVKSQEDVTRLWGDDVDPRQIKILGIDLGQAFVVGASALLPSPTEPNSTPRPTRFFNLSVKQKAVYQPTFKHRSWLEHRKGRASAEMQSVAKIESELPPLRGPGASIKSYVEQINNVRAQLESFYGSVVLKKHKWNAQKAKVEEYKVMANRLLELVGGSLGAKRDKDNKVVIGIGLGDFSSKMRLSSLHGTFQSYFVQKARSLGYIVVGVNEYYTSKKCPVCEDFVGQVDIRRLYCSRCKAYMHRDEMGGHNIANVVRGHILNQQRPRYLQPVDAEGKYPWEDGRAVYRPKSTTIRPSKAIKRASVKRKAPVDWSEQDHDHVKRKPDYRPSTAHHSSTSATATTTMRREGTIDYTDEYNRFMARLEAFHQKHGTVLNREPVLGSQRLDLLKVYKLVTAYGGCEKVTSERGWKRITLPFNFPPTCTNSAYVMKSVYVKNLELFEQEDFFGKEVPVNKFETAESNISRSREASQAPSTGSKRGPYLTAHMKQQLQQQQLQQQQQQQQQQQQQQQQQQQHHHHQHPTPQPPMQPHAPSTPAATPAGSTAVVPARPANYLEGYYIDGGHQNRILLALKSELPNEIDWAFSRLIALSFEWNDFSLKMIPGLFNELLAFAQPFFDWWSTLEPKEIEELAEEDLLNMSDAHNMERVLQVFHILRNLSFLDQNTIILTEHMAYRKMLQQGLSMPSSTQLSELRIYCLDTLESLSIHITLRSKFDVYLRELHKLLQTNDKALILGSLRALTRLAANEHNEKILSDIDPEIIDRISQLLLIQDEELIGATLDYLYQFSSFHGDAAVQIAKNFPGNIVSALVRFLSWGSPKSVPPPVTADPAQQILIEPYRALHWVQSNFESSPQAYIYESELFKLYQTKFMAHGPMLRSADLITVSRVGFPKMETVFVQEVEGAPPVQIIKGISKKPWMDFSGADNRILCRWIGCQSVAATEEELFKHTVQEHIAPNMGLYTCQWLSCRRFTTPTIDRQQVIKHLKTHFPLTPTVKPFSNRPRWFDMRPTVLGTRELAGIPLTAVFVLRNLSRQKRNQKLFLPYEESLARIMGEFPKMAAFIVDILTYLRVG

SEQ ID NO: 2661 - protein, 280 aa, Gryganskiella cystojenkinii
DMTMSPTAPSSTTTTSSTTTTSSTTTTSSTTTTSSTTTTSSTTTTSSTTTTSSTTTTSSTTPVPNIKPNGFCTLCQTHHRPALVTERITDQSGQQTERYVLRHMQQCPKTAPVVIPLFLHGAAGMGVGSRLKGNAKMGGNHIPERHMHHGVVAKTNENMSSQTCPFCFHLVRLARGRRVVKGEGKLVRVHGAVECINPDCISARCGYGHRPRDTNAALNIALIGYTILTSPTRQTLRPFTNNPHRWLHPNPDASCRATGEITQSDVAAPRRTKDLDFGPT

SEQ ID NO: 2662 - protein, 1295 aa, Gryganskiella cystojenkinii
MSQLSLYTARRSEEKGQKGWYPFLRKKGYHPPVLNLSVAATTSNTSTRRIDLLSRFSVIRYAYTHNSVEQAHLTLEKDVAQFGTKENSVIYVDGPQAVEKEHTAKIRLEALEKAVDRCEKSLGVLQERINESMKVRKKHFTDVKTSLASTFYWSLTMRESFVEYMTRAGWKVQTCATEADVAIARDCQPGDIVVSADSDMLAYSSISVLWRPVSRSLIFVYNILDICQILGMSRIQLTALAVVSNNDSGKNIFSLGPATNFSIIKSIEKPDVRETVKAYLEDSRVVSKNTDNKTFEYSLRVFVDLQQTPVSTPRRLSCILSHGELYERFKGLQVLYQKKKDSDAQQQPSTGKDQIIRLRSPQSFIRYRTVESPAMPRPGPGSRLSEPSSPQPPQQLAKNPLDVSVATSPPQESTDHAPLQRARTPRNRHRYSFKTRKGEMARPPPEKMKQHVFKPFKEKTDNSEESSDLDETIPKAKIKPKLKTLRTSTTSNKTRKLAITHHLAYHHPTSSLDVGTLQANVGRIAAISPILRSQIVQCLRDAVRDAASTKRRGQRFIGRFIEHVNRLGSQLESDDRVFLDLLCPRVTKKDAKDHKDGEDDDDEDDLTDLGSASTVKKGDHGSFIWSFLIHLYSGNYPRAHGVGQKVNSFIVRLGELGIYTPPRSRSEVNEKTPFTPSDLLESVSGQLRVELKKMYKNGSCDIHQKLKKMKKRGLLGPSVDIGIQESISAVENYLTLNKLSQNPRRIIPLTSSKQPFVAFSERELAGFFFSRGGVLRARMQELVNGGCTSIADVHEWISEKEPGCLIKSLLVDIAPGNLTVRQRGKAGHRAAIELPTLGELKIHLEALDDKDFQPKNYTRKRYFPRGTIRTNGFNIQVLCFKLRELLSVKYKRLPDDRLPPRLTSTVHGTGDFLTEIRNVLGTKEDVARLWPDVNPQDIKILTLDAGQAYVVGAYAHIPRSGKGKDLAHGTPLSVKVSFPATSTSTATTLTLVQPRGISTPPSAAHHKTHHHNLAVNQKAVMQPVFRYRRWLEEEKQLKPEGPEQQLPSKPDIKLQSIATIESQLPPLRGPHTSIVNYVTKLEEVEERLSDFYNGNNDCFRKHTWDMKRAKHVEYQAIANSLLQIVGGSQGEHRKGDNPVLIGIGLGKFGSSSRLSSLHSSFLSYFVPLARSLGYLVVGLNEFYTSKKCPDYENFVAQVTLRQFYCPRCKRYQHRDIMAAENMSKIVRGYLVDQERPEYLHPKTSDGRYPWKTSTNSGQGETGNASTTIPVSIPRPRKRAFISTLPQGSTKAAREI

SEQ ID NO: 2663 - protein, 1144 aa, Podila epicladia
MKLGNKDELVLYVDGLPAAEKPTPTINASKTVLRLANARSESSSHWRTASRPTSTFANTTSTLPTKNSVQPSAGPWDSRDFVDYMANNDYEIILCATEADIKIAADCKEVDVVITGDSDLLYYKIVPAVLRPIGRGKSRRYWLYDKAAVLDTLDLTAMQLTALAVISGNDYNRNVPYLGIETNRKIIRGLAAVEDETTIVEKYLADPQVVFKIDKDESKNWTISSYADSLKVFVNMQQDIAPQPLTTPADLDTDTIPSYLALRSRMDQFKARFAEHTKAAYEARVAKRAQNAAQSLPPAEKKPRNIFATIDKPGPVRPDKYHPRYTPKVRYDPIKEQAPPLISYQHFTLDLGPLTKNVRAVLKDSPAAESVINCIRGAVHEASTVKRRCQELIGLFLNEVFFPAPAPGVPRPKEPAATISSQDQSFLDDLCPCLLSKEMAADAENENGAEDGHGECNKTTFLQCFLIYLYSGNLPQNKGKGVAINTFICRLQDLGILPKSEMTKAETLKNIKEYTPSHVVRAVASQLTAELKRHYKHGCKQLSEKNGFMTFTEIELGAFFHKRDDLHPELESLIGFKDNDRSLTQADVICDWLPFESPGKLIKHLVAPVDPDPDPITGPLCGRKKTEAGIATVVKIPTRADIRTHINTLCTEGFDPRSYTQKGYILCGSIKTDGYSMQLLTFKVCELLSVQYKRYPSEVLPDRLLTTTSGTGDFLTEVHNVFQTKEDVERLLGCTSDQADTISYLEIDLGQACVASAYAILPSYKEPRIGGHRRHRGHKKRGSRGRKNRGSRCGRVTKDTRARGKRHINLAAKQKAVALPTLKHRAWMEVQKNAVLVEPTGQDGIQATTQAQEGVQQLTNNTEETPAKAEPKSIIEIESALPPLRGNRASFTDHMKHRNANKDVLDMFYNDRKFKFKRHKWLARRAREEEYHRLADGLLRMVGGSIGTKKKGEDKVIIGIGLGRFASTSRLSSLHGTFEAFFVNKARALGYLVVGVNEYYTSKKCPKCGQFVAQTKNLRRLYCRHCKKYMHRDVMAGHNICNILQGHIKQERPDYLQPVDQYGNYPWKESRSKHKVQPKSASGPSQQASSGGGEDGHGVCKRRASEGDDENDSKKCGKRPKAVVGKRKTTMNKGKPSTAMHVDS

SEQ ID NO: 2664 - protein, 478 aa, Apophysomyces sp.
ATKSFIIDADKCKDAEILVRQLPEAIQEEINEFVCRQRNDLEKILLKKIGDKGTLLTFSIVLVQHVHIKDLIDHFYVGQYLAESGLKQSWYRYQYQATTVRKRGDCFTFVFDVATKVVTGGKQSSIVKKVNRCYKTKLHKRIPGTELPRYATKSRFLTDGLRLVAIYTDWCRSSFQQQRKVFLPEVRTLARRLREQQDNKPDSDLINYSGVVDLDLGETCAAASFYLPFDSERPGVQLTIKRNELYGRNGMNAAWLEDRKSKCGIDEDEAVLACGSQNSSLNKLLVYIRAWQYGDRGIRLRNFYANKSIMRRSWDTSLSLSSSLDKACNLVMKSTRKNVQLGKNNPSSKNRQKPVVFGFGMDGLRSGSRRGAPSSMDRRLMDRLRRHVRASDSDHKVCQVDEYCTSKVCCKCVQNGKVFFTKYLRRLSEEKDQEVIRILVCDVCEGVFRRGGNAAHNIASIASSIFMHHRRPAYFIRP

SEQ ID NO: 2665 - protein, 383 aa, Apophysomyces sp.
MKLIRRRQLRGDEGSENDDDDDGNNDVASTSTRGSHSRQLAGSKRKRKQSASEKAAKRQSGKERRYMSAKKSITPCPTCLENLLSDTAYSHSRSSHHDCPFQKLRKRQQEVGKTKTVCRKIGLDALLHINDSNDRQLRINSAKTTVIRSLETANTTNRTADMEKIHRYIDSILQAFGPLTVFYGRHDIRNRRRLGEELVNIFINGGNKRRYPPGSGERLLYTHWPLRSGTRWRRQLRRQSQVIDGDPPPKENEWKKVPTDNDATKVPVVVFGAAKFGRKTYKGKLGGLADKYRTLLQMAGKARRLILVDMDEYNTSQVSSKCGKKSLCGNEMSMLQETFVPSLKILSPMATDLDSWLDPPPPHSKNVLMFTNEIYWEFGTRRG

SEQ ID NO: 2666 - protein, 667 aa, Apophysomyces sp.
MFQYIAEANIREQINKFATNMVNRYKTSIETFDGDRCQLEVENLELGKAGADQEDLEEHDQKQEQERQAVGDILADLANNVHIQIENFITTERNLQVKGIRVSEVNLSECLGKTGRRGTNGGGNDEDDVFHRTHGGKLSKAKAARLIPFLIYFLERREGNFKSFVLYSLQAHHPFLSSIIEQLEQELQAGPNERGAHQLTRERKNLQNACTRLQGIGRTDPFSALFDICRQATIARDGSVDVRDRGYMRWLDQRILGNINKPRFTKRRVFRTDCVRLYCIYNDWLRSCSGNTTCKYLTELRRTTRETLKDTWEGDSHGDQFDYLQHYDGIVGLDFGEVCAAASVFRPREPGLCGSQLTIKRGYLYGRTIPNRDWLEARKAVNNIDDIEAALSEGSPRSTYARYQEYLRQLKENDNNIRPWKFYSNRSVRRRVWDNVISQRSYLDKACYLITNQAMHTFGMNREIDPTTRHVECPRLVYAFGLDRMSRKSRKGALAPMDHKIAKTIEGRIDNMPIYTLKSTNISRRSSIGQEKVLRIVQCANCGRTFHRDGNAADNQTTIARYMLRFQQRPRWFIRPSRRLETSSDGEATASGFRRSPSEGTTLISGSSQERASVREATRTPGPRRRPREEEALETTRSVRRRTRARRTQTMVEPPGSAGRTSQREEE

SEQ ID NO: 2667 - protein, 1026 aa, Apophysomyces sp.
MLEAKLQRLLEKEEQTTDEEARPPAKRQKKGRSRTTTKRKQNADERAAKRQARDDRKAQVDADRETPHKHCPTCIKASQVAVLKVTLASNEEERQRHRAEEQCCITKSRTHSRASNKDCTGYKERQAIKTKARLGGKVRPSTIKHGLAGLLQILPVAEQAQFLQGVETVVDYNRKLAIQAHLFLTYYLTYRLDAGLPIMPAFFDMHFVNGIFQLLLGGRFTSRAIFSQAIRDDLDTAFARYIEMFPNARCQKVPSPAARPPIAFSGLLASTATQIASTFTSHDLKRGQAKAYAQYAYQASANDPQFPPEWPTLYHSGAIDDVLNDALQTAMDEATDEWAAIHDQIQQDRRRRQDQGRTRSSSVASTSTDPLPESMEAPSPAVSISTIGSMGASQLDISADSFSVETSTLTAYPQLFLPVLFRILQVMENWNVADQELPATPQPEATPVWTRHWLQSLPAWESLKHRRRTSLVRAITKLVNDQVLFDPARLPVGFDQASIDTMTEFIHQAQQELAEGTFTPPTYLVRSQARLFTIAPVAAFTRKYVKIDHETLGIILRHFGLGQHTAMPHTPVPADRPHANFNIIDLSKMKASENSLSTDGFATSITFKKAVPENPLPSLALDDIKEEHLAQCKIWGVDLGVSEIFVAVDGSDAGTYEDPSTAANAPHQVLKFSAAEYFTKAGMKKTNASILEWKRADGITAIEAALPSPKSARMSNIEDHIRAVLQALPRLLSHYGARYQQLRFHSYRGKQKIQKEMVDIFLTGGAKYNGDHHNVSEAVALSRTRADGQMRSKRKARPHIIAQAAAPKPNKWQKAMFQETHRDICNVVCVGDGAFGRRTFRGKVSGQANMSTKHTRPKCAAAAVSGIWTMLKSMSNPNCTPSYYATTVDACGSAIVTQRATSMPWHSWPSSPATTLKAGLKSSPENKDKKQSGSQKPATVKRLRYLRIQQRNGRKTLTTLQGLSQDVDIKRLLKAVKKSFACNGTAVDDPEHGEILQLQGDQRLKLAEFLVVEGIAKKADIKVHGF

SEQ ID NO: 2668 - protein, 363 aa, Apophysomyces sp.
MDNVPPGNQRQLALSDMDPSMLDDLEIWGIDHGVTQVFVASNGCDPHAYINDNELTDEPSLATPDNPRHKIRQFSAAEYYCLAGFPKTNTKIREWKDLYGIPQLESSIGSPKTSSLQGIIYVLDLLLEFYGTDAQQLKFLNYRGRQKANDEMVKIFTNGGIKYGPHRERGNSLEVFERRRKTDGTLRRRRCQWNQTEALPPPSAPRAEKWRPLPYTQTPKIPLLCAGDGRFNRRTFRNKPHGLAKTFRKVLKQAQRQHLLMVVDVNSSWTSKVCSKYGSRGLENVLLDEDDQSSKLHSVVCCKACHTMWQRDYNASRNICAIALFAIYGFRPLVFTNDYGQETEGQQGQNHSPHPGTRNLLDE

SEQ ID NO: 2669 - protein, 232 aa, Apophysomyces sp.
MSLNCIADKLLGQYGTQNIPLQWTHKMKKRKRKRERWRVKAFEQEDMRPAIVAFGDADLRPMPGQAPLPIKDFRRILSHKALVVCIDEFRTSKVCSYCDRDTVELIRLTFIQSMLNRKKYLRLGTENRRRQRCMREDNSVLCYSSQCTQAREYGPQSWKSILYPVRMCPHCLSDTNEQHQLIWNRDVNTGKNMRRILREYIQSGCRIDSRPPALQRPARPPQTTQEQLVTGG

SEQ ID NO: 2670 - protein, 302 aa, Apophysomyces sp.
MITYGDMCQLDILKKKQKVKETEPDEDEEKEEIKLCKVASWNRPGCEASTKFLDIAELGREASQDPEKAITFGGTNYGLRNQKLDDGQAPVSVPEEMPKILRAMKIKAGYLEKKAFSRKFRKKRETRKNVWYRWSQDLTTLFYHSNRVHHEKRAQKLFTGRVYDQVAAQKRRSVKTAATTDKVGTRKVMPIMAIGTQGTGSGSRLKGHIKCGGAWLHRRHCRYVSVSMTNEHRSSQLCVYCFERVERAKARRKKNGKWKVVKVNGASQWVNPNCVAYRSGRATQNRGVEAALASASNLLSAD

SEQ ID NO: 2671 - protein, 620 aa, Apophysomyces sp.
MANDRGIQTAEEDPEGDDDADMMSLDGQSSAYGSIATTNASISTMGVSSLQINNPLPAMQPICITTSTLTLYPHLFIAIMYEILREIEDFNSNDVRLLPLEPQSVNKNWVYHHLSQMADWARLNHRQRSKLVGALPKIINEGVEFDPLRLPRELSCPDIFVQLTEQSHQQIITLIATTQASIQAGTFTTQEYLTRPQLRLFSILPVPSLTRKFIQVSHQSLAEIMRHFGLGEYALSSTSAASNTIHQNFKIFDMKKIKHGVPPGNQRQLALSDMDPSMLDDLEIWGIDHGVTQVFVASNGCDPHAYINDNELTDEPSLATPDNPRHKIRQFSAAEYYCLAGFPKTNTKIREWKDLYGIPQLESSIGSPKTSSLQGIIYVLDLLLEFYGTDAQQLKFLNYRGRQKANDEMVKIFTNGGIKYGPHRERGNSLEVFERRRKTDGTLRRRRRQWNQTEALPPPSAPRTEKWRPFPYAQTPRIPLLCVGDGRFDRRTFRNKPHGLAKTFRKVLKQAQRQHLLMVVDVNESWTSKVCSKCGSRGLENVLLDEDDQSSKLHSVVCCKACHTMWQRDYNASRNICAIALFAIYGFRPLVFTNDYGQETEGQQGQNHSPHPGTRNLLDE

SEQ ID NO: 2672 - protein, 576 aa, Apophysomyces sp.
MFQYIAEANIREQINKFATNMVNRYKTSIETFDGDRCQLEVENLELGKAGADQEDLEEHDQKQEQERQAVGDILADLANNVHIQIENFITTERNLQVKGIRVSEVNLSECLGKTGRRGTNGGGNDEDDVFHRTHGGKLSKAKAARLIPFLIYFLERREGNFKSFVLYSLQAHHPFLSSIIEQLEQELQAGPNERGAHQLTRDSRASAEQIHSAHFSISVGKLPSQEMDPLMSEIEATCDVGLDFGEVCAAASVFRPREPGLCGSQLTIKRGYLYGRTIPNRDWLEARKAVNNIDDIEAALSEGSPRSTYARYQEYLRQLKENDNNIRPWKFYSNRSVRRRVWDNVISQRSYLDKACYLITNQAMHTFGMNREIDPTTRHVECPRLVYAFGLDRMSRKSRKGALAPMDHKIAKTIEGRIDNMPIYTLKSTNISRRSSIGQEKVLRIVQCANCGRTFHRDGNAADNQTTIARYMLRFQQRPRWFIRPSRRLETSSDGEATASGFRRSPSEGTTLISGSSQERASVREATRTPGPRRRPREEEALETTRSVRRRTRARRTQTMVEPPGSAGRTSQREEE

SEQ ID NO: 2673 - protein, 297 aa, Linnemannia gamsii
MSKDAAWTSISESTTVSTPRTTGKCDKTIHHNLAVNQKAVLQPQFRYRRWLEDEKKAIPEDQSDSIANIESRLPALRGPGSSVINYMKELERVEDRLLDFYNGNNNRFKKHTLVMKNAKHAEYQAIASRLLGIVGGSIGRPRDVSNPVLIGVGLGKFQRIGRLSSLHSTFLSFFIELARSLNYIVVGINEYYSSKKCPDCQEFVAQVTLRQVYCTHCKRYYHRDVMAAENMCNIVQGYLVKQERPRYLQPITQDGRYPWDTTSTTGVGTSTVSTSTSASTSASAATPSQVPKRTSSI

SEQ ID NO: 2674 - protein, 270 aa, Linnemannia gamsii
MQVSSTMTYGQVSQYIRRYFETPNPFGALTDYDMFDMDDGKQSLDEAVVVLPPTSKITAPLSNDLTFSRQHAQSREKDLQADRKVSRAARAAVQRLSDTPMSTAATLIEVNYAEDIRREVRADTRAFFYSNKRRRQAKTQKLRTTRTYANLAASQRRQIKSEVKEKIKQKLKAKNQTNTHMKTESQESQQEETMTNPEDPEKVQIIPIILHWTGGSCVGSRVKGHAKRGDGKMCHQHRLYGVLAHTDEHRTSQVCCACFQQVELAWATRA

SEQ ID NO: 2675 - protein, 1401 aa, Linnemannia gamsii
MSLFDWFPFIRRKGYNPVELYHVIIDNLSTTSRRRFDVLGSCFPAIRDAYSKHPQKEAHSVLQKQIERFGKNNNMTLYLDGPQAVEKSATAETRESKRQKAIEKLSGRLDTFETRIDEGSRIRKQHYNDIKKDLGSSFYWSLDSRQDFAEHMRGQEWIVVVCDTEADVKIASDAQPGDIIISGDSDMLGYANIHTLWRPVSKTVILAYFLPDVLRTIGLSRAQLTALAVVSKNDYQRNIKGLGPASNFGVIKRLPGLSDPRLIVAAYLSDPTIIMKNKQEATFNDSIRVFLEMKQQQVMDPFRPNPTQAVYHALQKRFLDLCQKRESLNDVKGSEAQPRPVEEPIVRLRVPRSFNRYRPVESPANVAKDTGTHPMQSEDSGHPALARTRIPHHRERFSFQERTRKKAHAPPPRMKQFTLKYYRKPLETTNSKSTPTKPKTSVKKAPSSARKPLTEMKKVGLVRSLDWRHPSVSLEVGTLNANTKRVFMSGCTSSTTPPPTTPGSISLSPTTPSLLASNLQRTVVECLQECSRLAADKKREAQRLIGVFVETLRIRMDSAEETLRIKLLAEKQTLTEEQRIKARRDEISDTERQILDHLSERTKPKDEEEDEEEDEDEDAADSKRQINSDLDEKVSNQEGFLLAFLTFLYSGNYPRERDLKGFGPRDFLPKDKGNDEDKVKNKKTNAGVVVNHLIDWLVAGHFYKPLRRRDEIGVKMSYTPTNLVRSVAGQLAVEFKKMYRNGTYELHKKVQTMQQKGTLEASIDIRIQEQISAVENFLSLNKHTNNSRRIVPITTLQQPFVSFSERELGAFFWKREVLKRNLCELALQDGTRLYSIDDLDSWIGSKEPGFIIKRFICDVGSEGLTSRKKKKAGHRAAVRMWTLDDIRSHLQQFLPEDEKKVKANAKVDKEDDFHPAMYKEKGYVLRGSILTDGFRVKLQAFKLRELKDVRYRRWREDRLPPRLTSTVAGTDYYLQEIRNVLTCKEDIQRFWPGVDVKDIRTLTLDAGQACVIGGFAHLPEELAKKTKGKEIVKDLSPNDIVASEHLAPAFVSTSPASSSSTTASSLTAHDTSFGSSSNDLTPLSIQNVFSSTTSAQPSTASPVPSLRPVFFNLAVKTKAVYQPAFKFRRWAKSEKDSTPVGQDRSVTDIETHLPPLRGPSSDVINYIKELERVEEQLKGFYNGPDAKYKKHKCDMQRAIHGEFQLTAHRLLGIVGGGLGIRSDPSKPVIIGVGLGKFGTKSGLTSLHSTFLSYFIPLARSLGYIVLGLNEYYTSKKCPACGLFVAQVDLRRFFCSHCQVYHHRDIMAAENMANIIQGYLFDQQRPDYLHPIAPDGAMPWKQEPSGGSSKSSGTVGTTSTTGPTSTKTAAGGSTKAAPPSKRQRERSSTVSSLEQSSSKARK

SEQ ID NO: 2676 - protein, 402 aa, Linnemannia exigua
MTRVKELQSVRYRRVSNNKMPNPLSIAIGGTNNFLTEARNVFKTTEDAEDLLVADPSQISVLSLDLGTSCVVGASVSLPPGQTPATLKQPFDKERGKKKRRTRRAKRKPGSRKRRRERKKACKQVKQPNASRYFDLVVKCKAVSQPTHSFPKWLEDRKENATGQSTGRTIQDIETALPPLKGEGASFCKYIAARRASEDDLDNFYNNTNYWKHKWDANVCRKEEFYKVAEGLLNMIGGSVGRPKEPHQHVVIAIGLAKFTAAHGPPSLDGTLVRWATWSSGSANTIPRNHAQTRTLYCKTCKRLRQRDVMASDNMNAAVRNHLVDQQRPLYLQPKRQNGTYAWTGVMAGIGDEVVGAFQRWRQRPGLQFKDLPKSPRVNDQYRNTRTPSVPPVALPLNWSLP

SEQ ID NO: 2677 - protein, 824 aa, Dissophora globulifera
VSSASSSGSSTPSGASISLASSEGDAVQTTYTQFMSSNTYSVHTYTRPPPAQIQTPTTAKRSKSKRAKRKPQPIYNPSSRRARATPAAAAGQGGNPKSTTPEAILDSLLSSRRATISMNCGTVPTRLKSSLRYKRDLDDIERESLAGTMINLIREMARIATEATRRAQQAIAIHIAETMENHTGMDNASIAARRTALVHYSGFHNDTFFRNILQDIFTFYEQGPPRGRPRNMTKPHNIVVEDIIFEYRYFLFNNDLEPSPLNDNIQTGLSHLFALAGDRLGDQVQTHYHRNISELVSRLRRYNPAWCQGAEGTNVLGTINNGISTVHDQVSLFWILNTRLPQRAQMAFFPESPFRNSFFNITELMLVQAVFASDAGAALDPIKDLVGATVTVANKFVAEHPGELIHYLFFDKKLDYCRSTTVLATSPIRNNLQGRPVLKLSKPEKKAKRLLLHELSDNPSNADNKHALWEFLDEHLITPAQQKEDLDTGLTRNKYVLTGTLSTNGHELRVLAYSLTKPRPPAIPGPNTTRRKLEDVMTLNTQTSVMNVFPYNESFTVVGIDPGIHNTATATIIKSENENIMDNLSIPRSADAFCIKAFQSGLSRIKGDWVAEVTLPPGHPEGPGDEFLTVSEMEQAITPVVCTQAPTGRRQTWVNLSASIRAHVESVVSVQPGLRKFYSSRTFEMKRMHLKQARTATLDKGVTRLCHAAGLIKKVDNISPKPLFVVGDGHFGSRNTPVLHQRFISFLKSKVQALNGEIRCADEFRTSMVCCQCQTVGVLVNRAIQCPGCNQARDRDHNGATNLALATLSLLRGDGWPIALQRAA

SEQ ID NO: 2678 - protein, 1407 aa, Podila minutissima
MVITFHERSIICHLCLQGLVHLAHVASTSSTPSQDGTRTASEFHLKFSEPVVCPWICPYSDGINDVFTQQHQPRSISFGKTVKLQTASKYHDPQYMGVQHLSSCITSTNGEDPDLHQQETHFDTLSVLFSLLQHITFSILMEICKREQQKEIRAQQATAPNLSIIKQQTIIRGPPQQIDGSGRNPESLDVPGISLIDDIRVITNRARDDTILVLDNGGKIHADKCNDEEFLSKKISQACARVHRHLSSFLTPENTTLHLDGEPSIEKSAERTWRAQALEKRIAKVEQDIERRIMRLMNISSRTYSRLKNLYKAPADVMMAIMVGMKAFGWKTCQCKFQADTCIANEMQLNPKIAIVARDSDLFVYEQVQELTMPVSRNRKKVHKTFSKRVVLQSLSLDSALQLLLASIVSSNDYFIGFKGISFKDAVNTIKTIKLDHNGGSTSREIIEGGISEFTKRVDMTRKKPLDVPDGSFDNALSAFVDLVEHPGQDATASLSTHKQIKTLVKNIIDYKNKEPDPKPHPIVTDLDRDELTDGSPLDLEGQSVLHARRRGLKAESQRRRRQLKRQVKREERREREGHFEAHAAISDHIGDHDWTPRDSSSASKKRSINVDVPSTLDSAAPSSSINCSTGTTTQSKDKGKRRKVEPVEPPPTFPASSNTSLGSISSQGHEIALPQMKNQGAKTTVSSSSPDQQCASMESSATIKPVKGDMLQKQFRKAFQPVSMTAGTIEECLYRSTKMTKQENKTLAQTIDNNVTYLNDIRSFGFMALQLLVMSELGHVSPDTRDDEFSTDGVQQHLHPLNLVLDTVHGFTIIRHILRFLMDGKLSTIGRQPKPENKAINEQCRKLAERAYNLLTLQPSPETGEQLQNTRVILPMTTKAHASSLSHLKDQMASEMMTAVRQHFKKLPNTIKGLEDTNGVSGGDEIIDTIETPEDLEKEEKAKIPNGRIEHCWRDTLKLPESNRPVFFPSTGWKDSFLLITEPMLVDILWTPNSESRKILESHGIDLTMASHWVKQDYGRLIKTLFIGDRDQIRQDPCRQQKAYGKHSALMSTFGQYTDDKGSHTHGQQQLQSYLKAWFAHLAEKKKATPEMRATLSPPPLPMPPCSLDRFALSNSFTTNGKVLNLNAVDVRRRWNNKPIWINYLDKEFPTADSISERFQGQPVITVGVDPGEKISASFCALDPRHPRQVRNLSAKRKSLYQPVLKGRSKLEMRRSRQQTQMIQTEPNKVIRVEYPSIMDQESTLQKSYSNMEQLKANIEQELYVFRSLRDFYSSSATKKLDFDQRNAYKGEVDMAISGALKMAPRDQGLFVYGNAKFNTQKSLSTLHSSFKRQFANRAMSQGYNVVLADEYYTSTKCPDCTSGKDVRLAKPQPRSFVSTPQGSDSTLGPPPSSKTLTLNYLLYGT

SEQ ID NO: 2679 - protein, 201 aa, Podila minutissima
MVAVKAQQQANRHKETKYFDLVVKRKAMSQPMDSFINWQQEQKKVIIGRSTGKSITELETALPPLCGKGASFSEYIKEEFNKVANGLLQMVGGSIGRPCMEHQKVVIAIGLAKFSSMHGPPTLNSSFEAFFTNEAHSLSYLVVGVNEYYLLKWCPICNNFVSQTSEWHALYCHTCKHFRQRDTMVSDNMNIVIKGHLKDQQ

SEQ ID NO: 2680 - protein, 239 aa, Gamsiella multidivaricata
SIEQIESQLPPLRGPEASVTNYVARLEQVEDQLMEFYNGNNNRFKKNTWDMERAKHIEYQAIANSLLKIVGGSIGERCKSPVLIGVGLGDFRSSKRLSSLHGTFLSYFIPLARSLGYVVVGIEEYYTSKKCPNCEEFVAQVTIRQLFCPHCGKYYHRDVMAAQNMSNIVQGHLLEQKRPLYLQPKTADGRYPWIEPSTSDQGAVDGTSKSTGSTSARKKRSSPATPTSRKRPTKMAKEL

SEQ ID NO: 2681 - protein, 372 aa, Mortierella sp.
MSETISSLWSTLGSLSNRYYVLHGLPDTHHTDYGGEVLEQPTSQVITEATDTEATIAQPFQHSGLGVCSTSAESLDQAYLSERTLSGSSPQEATMEVMRFAKSNRITAKQVKEVGGVGKVTRAREYLLRSPENQMIPELHNEVGKNSVPKAHTVREVDSAQATRRSAAQPLRDFGACKKLKKGSHHKDIQLQRAWQKIAADERRRIQDFARGIRTGSRLGGHLKYGGKKVIETYALSVPVLMTDENMTSKVCLLCFAILRLVKELRLVNGIEKLVTINGAVQCDNPDCESVRTGYARRGRDSNACVNIALAGFTTVLSDDRQPLPPYRRSTRPKGATPSESQSLATGTTQTSSISTMEPFSTVASDAADKLV

SEQ ID NO: 2682 - protein, 256 aa, Mortierella sp.
MASDGDENADLLEGHGDFEHDEAFRSGEEPEGDDDEDEEQAEEDDEDEEENDDEDQQGAQEGDGMEQGGQDPLNDAGRIQGHLGYLRENNVRETLCGFYLSKWYLKKAWKMHEGQITSYDFGIKAIMRLAGQKSVNEGRKRKQDVITAVFAVGLASFNTQTGLPSKHGESERRFVTGVRSLGYDILGVHEYYSSAKCLRRDCNTFLEQIKKTRSKYCRQCQAYMDRDQVGSENIAIICQAQIRDQERPPKCKSQGN

SEQ ID NO: 2683 - protein, 208 aa, Mortierella sp.
MSVPPDQWSTRQTEMSVLRHQWDARGAYKAEFFAITDSLLGMVGGSIGRRRDSENKVVIAVGLGDFKSKVGLGSVHTSFASFFVQKCRSLGYIVVRVNEYYTSKKCPECKNFVAEVTTRRLYCPKCMTYMRQDVMAGNNIANVVQGHLLHQQRPLYLQPVDGNGHYPWMQAMSSSSSSSNSGGSSSNGGSSSSSNSNDDEKRNKTTIG

SEQ ID NO: 2684 - protein, 542 aa, Mortierella sp.
MSHPKKNARKWEACLAKNNAVRNALQDISKKENSFLNVRTMAQTDARSNKRLVLRAFENSKRRQKDQHNQRLRTTRSWPRLQQLRDTMFKNTPVKRSQIAVKALGSGVPQSVSTSISATVPASSSAATTSVARATAPTITAPRPAPQVSPVNGWCPGCNRHHIPKQTDAKVFRHVEKCPRYDRSKLLIVPVLFIGTAGTGVGSRIKGHSRRGGGKMRDQHRRYCPVGMTDEYRSSKTSRSRRLVNGEIKTVYVNGTVECVDPDCESFQCGYTIKSRDPHAAVGIAIAGASSHFEADRAVLASFTRGIKSATTKNTSTTLGSSCSQYPNGYNGRPQIYFGFTQALRLRSKANIMASHKIAKNGPADEIELSVAQALFDLENNVTDLKKELKPLQISSAKEVETGNGKKAIVIFVPVPQLKAFHKIQQRLTRELEKKFSDRHVVFVAQRRIMAKPTRTSRAKQMRPRSRTLTSVHEKLLEDLVYPTEITGKRTRVQTDQKRIIKVFLDAKDSTSLEYKLDTFCAVYRRLTGKEVVFEFPAHHAE

SEQ ID NO: 2685 - protein, 220 aa, Mortierella sp.
MPSLEKRLPDRQTIIGDVGPIEDIVVVGVDPGEKVSATFCMLDPKSPAQVSNLMVKRNALYGPVLGYRNRMDDIKRCKPGGSELPSIKEIEESLGDSSFTSLDHHISTLENFAGAFRILTEFYSSKTAKKFQWEKSKSMQAEKDLAFNGAMRMVPKGGDGKRRPALFIYGDGQFNTKTKLTTLHTTFKNYFFMKCPGKHVDLRSPQEGQQCVWKLDVSVG

SEQ ID NO: 2686 - protein, 1148 aa, Mortierella sp.
MGIEGVFRYLEDEKVETAPADKALIRTADIDVLSVFFSYIRSTHQRLKYQSFRSTAQPTTPGSTDTVMTRLIHALHNKLRGTFDKDEVTLHFDGLPTTQKSKARERRRAKCDQDIRSMYDQAQKLQEMINCNNYSRSQKRKIARSLRKVKSSWASARVIDKDTKDGLTSGLRDLGWRVCCCEGEADVCIGRRARQHPGELVAVSADSDILFHGVRTLYRWDSCRRVFTTYDVCELIKKLGVTEAQWVVAAIVTSNDYSTHIRGQSFRKNLALLRDCDADDEQGVLDQYCRMMSVRRDMFEPSTQVFIDKVETTMDDQKSNGDIDQTMKDLASRVTQYFQEFKAANKEGVLKGVSESGAAGAEIACQEGMVIVEEAMSKSEAIKSDPRNAKRRPSAYRTSGHDYRAKEFHEPAIDLNRDDATASRSTKKRKRRANSKGKKKKAKVSKEKRHKSKVLRTPASRRARQQEEENKDSDTIKKGRKRNPGNMIGDVLNSNFATVTMNMGTIRHRLQNGLEQNYQANNHLKLSQHIESTIEGLVKINTDLIRCGSLATLNYINEIMAAHPSIDPASGDVEIRCKLFKYIAGESHGFFKTLVKGLYHWNNDLKGKGESFDSASAAIRSLREMPGDKNAMMQRVMEHLNGAAPSTFLEQTGQVLGDMARCHFRAFIPELQKRIAVWNPEWAMTPEGHGFLSTIDSKGKSSVHDVVSLFWILNTRLPVSKRLVYVPMPAFKDNYCLITGEDKLITLESLETSTPGYKQAKEDVKKAIKEHVLALESTTRSGKYVITGTLQTDGHQLKVHAYSLAKRKKRDMNENEEEEDDQNTGSCSTKPLTAKTDQQDDAGASKTKKKMRYLTEAIPGAAALEQEFGDQEDYVVLAIDPGIKNSATAVVSDSLTQEKAWNLSLPKGCHTWNSLRYTKLLDRLKDKGTVRDLEAKILPLECTDPREIGTVQQFQELKCSFQDHAESVFKVENELREFYGSRVLKIARYRKEQGEKAEVDRAVRGMLRATHARATIDDRRAIVVIGDGDFHGKNGRPVKANGFISKLKAQAEGEGMLVCCVDEFRTSIFCCKCHQRMQTKGRSVICPDPTCGGHRSPDYDKAHNLNPRTGFQRDRDHNAGQNMANAALQWVKEFKWPEALDRRLAKEQ

SEQ ID NO: 2687 - protein, 399 aa, Mortierella sp.
MATNSPGKLLVYNVPDLITTLGLTRDKLTVLGIVSRNDYDSNIASLSPATNFKLVKNASGGVPSIPASTKTQILIQNAHKKDQASSPRGWMKEQKDKDTGEGSDSITAIKSSLPPIRGENPELSNYLTELGNVEDQLDCFYNGNNNYKSNKWDLERSKEYEYQKMTDQLLGMVGGSIGRKRDGNDKVVIAIGLGKFSCHSRLTSLHGSFLAYFVQKVRSLNYIVVGVNEYYTSKKCPVCEEFVGQVKIRRLYCARCQTHMHRDTMAGHNICNVVRGQLMNQTRLLYLQPIDKDGNYLDGKEYGRIIAQACHASTAVLHKTRDMTDTREYLADINSMHKVVLEVKNLPQLEELSSKLSELDVPHVTWREQPEDILTCLSTSPIRRDPKVKEAFKKCSLFR

SEQ ID NO: 2688 - protein, 401 aa, Mortierella sp.
NRTRVVVTWAEDPGVKTLSENVFLTVEGIQESVNRFHVLQDLDDDQAIVQPEPWTQEQREKARRQVQEMKIPTAHRITAKQIDEVSHGRRLRKTRERVLSEEQYAGAKDGIESTSKSPLATASTLDDVTAAVNARTPVINTIRSFNKDPRLIQQRRTTRHRTKMAWARLCSNLRKSATDYTIQNLTSQERGIASVDQSTGFCSGCNKFEVGKCASSGQYRHPTHCVRTVPEVRHVAFVGAAGTGIGSRFKGNFRLGGGRIREQHRQFGTVIITDEHMTSQRCCFCFTKTRPGRARRMVDGTQKIVNLHGVKECTNPACPAFRYGYTTRPRDSQACVCIGMAGYSALDLEKKDKDLPKLVTSPKEPIAPFRSFLRPHERQRTSLDPPVTASQRDPQRLPQGL

SEQ ID NO: 2689 - protein, 899 aa, Mortierella sp.
MHSKQDEKDIATAVDTFFKELKDPASRQTNSAAISNALKRRLGELTDTPRYILSNAEAAYRKAAPEPIARPSSNLRKDIANSTDPNPLAFWRKAVNTEFDAIWTSTVQAKEAKDVESKSKRRKGNRGKQTSNGDKAPVQDAIPDVIDPTATDGNTDEDEGDTWRTCTVSLHQVIHPSLGSDDYQTIVGLLKQGQEYTTNLVDTMYMIHKGTILQCIQEGTKEPNQRTLRRLKALTKVLIELPSPKSQFDMDHVKKSGFKGSNFTDDELHLVLKIANFLRRFVPRRWKGTNDKDYRQHTPHIVLDAPLVVISNAILRLFGRYQFTRRIAPMLRQATCMGCNSEPHNCSMCSVHRVLDITTLLVHGEISNVQNVVNPRHNKQMVFKGFFDTGKIDTICRKHGLQFGQRMIYVDRHTLHLSGPQVQDCANRHSVKSAYEIRRKATRGRPDVGRWRQEFSSSGLTREQIESKIEEESLEVDAKMMAREGPRNRVARLRRECSTGNSNAKNCEQESKMVMMSQLKVTQHCLRQEELLFNTLDSEWEGSKKELNYWNRMLTGAKIATWTLASRQCRSNVFLTMEGITESINRFHVLQDLDEEAIDEPKPWTPQQREEAREQVEKLKIPKAHRVTAQQVNEVSFGRRLRNTREQLLMEDRYIGAKTDVSLAAASTLEEVTAAFEARVPVINDIRNFNKDSSLIKLRRTTRHRTTTTWARLASNLRSKAVDYMIERLTPQERGVACVDSSTGFCSECKTYEVGKCRSSGHYHHPTHCVHTVSEVRYVGFIGSSGTGVGSRLKGNFRLGGQRIREQHKQFGTVIMTDEYMSSQRCCFCFRKTRPGQSRRIFDGTQKVVNLHGVKEYSNPTCPAFRIGYTTRPRDTQACVCIGMSGFSALNLGDRRGRT

SEQ ID NO: 2690 - protein, 1134 aa, Mortierella sp.
MAIEVTTPTPTVPSISFRTQARAQSCKRKVELLEEDCLKAFNRACTSEITSSIERCLKTPIKRAKNSTTEDPETIKTSLKDSLIERTSVPRGLLRQTTAIVREVSGINNLTSEQVQPRLGTKSENISKWRKHVEAHFEELWDRRGVALNKGPQQPDDYLDDKEDPATDEQDQSKDLRTASATLKGVLAPQMSQYAGEFVQIAQSRQSELTGVVREVSALVHKTILLIAGGELNSPVFDTSTVTKFDLMTALPSGFQPRTNVDQVLRIAPLPPGLQERLVESIKSKSKKDDLSTLLSQGHLQYLYSHFMGTLRGKGNVSERHPIWDLLTHPIQSKSDTESIPEPPRGLTMTINTCLRELAVNIDVMWSGSIYDKLLDYLLRVLLRLHLAPLREQRYWDNRQAAANKKRDNTSPTPKKARKIRKDRKAKIKRLCDELANASSPQHVSSICHQLSVVTTQEIRDTSSLWEGTPDEEYGPFDDESDDESDDDDALGGVGAVAPVNQQDPQGVKEPSRSRLRKLQGVLKMLLQSPAISQHVDRNWVKKSGPKENDFTFEECNVLAFLANLLGPYVPKLKLTEDGKTEDSLAHVALRAPLVVMANAILRLTGYGQFCRKICPQISAGVLHALPLSAPNIYEMFCSKWPNQFDVVDLQGNPITSVASITATPSNKDVMFSAFFNMDAIQGICQAHNIKFANRITFVDPLTIRILGEVIPHGPHRNGYPVTSEFENKRKDKKKRRGRDWKQEFQGLGISIVEAESNLETVSRQATENEKIVKTLRHDLSLLERDLSQVNKAHSDAEKLSKSTSQGMSLKDYPTYSQVKDARAPVQELRSKLIPAEADLKDSRRARYFWEKVCTAARKEGTISTRNNEGVKMTRPSGDRPVAEDNVETIDLSGLANRRMTYSGTDYGLKKMSVTVPMSHNAIITHLNRFHALGTLDPDDPPPKLEELRIPDPIIITAPQVNSISYATKASRNRERRLKQDRNSEVRTSLEELGNLQVPLRHATTMESIDEALATTRRVSETIQSFESSPANVKDGHTRALRTKRAWSKIAAHERSIIKNHEQVTSPPPTDPRSRNVIPIMLTGTAGTCIGSRIKGSAKRGGGKLREEHRKHAIVERDWPKQHGPSTAAQRPDD

SEQ ID NO: 2691 - protein, 1720 aa, Mortierella sp.
MKFLSRRLATLVAIASVTCLISMRSVLGQAAPDAVDNADPSSQDFDALNHGDKPHKHHHKKPHHKWPHKKPHHHKPPKVIIDREVNLVCDGFIIDKLKCPLRPIPLAMESAENQAPFDAMNNGGGIPVEQRYVGMSSPCSKDLPANCTAARAMAAAQAAEESTETVLNKRATEFEATNNGGKHHHHHHRHYRHHYQGKHHHVKHHHVKHHHVKHHHGKHRHGKHHHGKHRHGKHYHGKHHHGKNHHGKHHHVGGDRNRHPYKNLCVAIGDFCGSKLYGCDFDKTYYRCAAIGEPPFVNLVDAKVCGGNNEGESDCKCPGDGKTPVCDSQLPAACNADPTMVYHCLGGADSKPEVFKRCRPGTVCIANPGQGATCGFETCDCDGNQKYCSSQFLDRCGLNKNTVYSCVDGKLTERKACSDDQECVAVSNGAYCGSKDCKCPDDGTICGEIFPASCRLPATSLYTCKKGESPTVSEDCLPGYCTASVASISAAVVLRLWPKTSALTNALAEALACGSSFAPRCGLDPKTIYTCTGSGSKPTLGEQCENSCLVQAGSSICAKSDCTCPGTGSDPVCGHGLPASCHADANTICHCPGGKGSKPEVLFDCKPGTKCLKRPSPEGAVCGGVGCDCEDENEICSNQFDENCGYEKSTIYKCTPGGKPEKVKTCDSSKTCVSVSDGAGCGPNDCKCTEDGTTCGEIFPLSCRIKTIALYTCKKGEAPIFLKDCHPDYCSASKAQLAAAAVFSSTANDKCTDKCTCPGKGPVCGSTFKPDCNMGPSTLYNCDGIGGTPTPGEVCGQGGCTVTNGNDKCNPIDCTCPGTGNVPVCGSELPSSCNALPNTIYWCPGGSGDTPKVLSQCKPGTMCMKKPAPEGAVCGAPNCNCIGDGEVCSNQFPDECNLEPNTIYKCTSNDNPEKVKTCDATLACINLGDEAACGSPDCKCPEDGVSCGQIFPLSCNLKTTALYTCVKRADPVLKEDCYPNRCIASKSQLEAASIFLSTAADVCVDKCTCGSKGPACGSTFLPECKLDPSTLYNCEGNGKIPVAGEVCKEGGCTVHNGDDKCSTSQCTCPGTGLVPVCGAELPKECNAAANTIYQCPGGSGSQPEVLSVCLPGTMCIQKPEGAVCGGVDCNCLGDDEVCSNMFPDSCGYEKNAIYKCTPGGTPEKVENCDTTEAWSQANDVRSTLGGSLAVVPVPTVPNIAASASAPVAPATLPPGPSFSLDGVFTTSLTKIWEVDPMSPSPVVPAAPSRAPLFALDSMFKKSLSIQTSQSRLVGSDIYAAVLPAASESSLAHPPPLSATTQASQSYSVSRSTIPRCVPENCFTTSLSCKPHAQIIPPALGGDPLGKPTTLSPAEVQERVRRKRARRKRRKKEKAPHMPFMPSNAFKASVYHHTSAPIDEDPVEDDSKSRKPKTKRAQIYVAVPRTRRTTSKNKDDDGDGDDGDGDDDEADDGTGAGGGGGGNGIKRLTVASLIKGTLKGKFTETALNIGTLLVCLENGIRANQLDGTLDYKTIAKEVQVCIAQAVRVASEARRLVLLAHFCYVAKLIADNPDPLNPDHIRSCKDPRAFKIKTRLLKVATSATKHRGINKIIQAAGCVDRWEIGQVRPLFVVSDGDFRAKKGPTLHLGFVGLLKKVEARDMIIICADEYRTSVICCQCLTSGTLEQRAIKCTNCGQERHRDHNAAHNIAQATLQWLSLTRKPRQDEDEDGEENEEESVTNA

SEQ ID NO: 2692 - protein, 1132 aa, Mortierella sp.
MLIKNAYSNHPQDKTNTILEEHVIIWGSRDNLVFYVDGGQAVEKQHTTEIREAAREKASVKCARSLDVLEDRIDNNLKVRKSHFTNVRSSLASSFYWSFDDRQSFVTHMAQSGYMIRFCEAEADVAIAADCEPNDVVISGGSDMLAYASITMLWRPVSKSLFLVYDLPNLLRDIGLSRAQFTTLAIVSSNDYNRNIFQLRTIPLLSPWKEKRAQGVHSAVAYPSVTQSLQDCRITYILRSQDLSLALAGFHLNCPRRRSGCSSYSSGQGTPTIAKNEDPRNRPRYSFQQRTRKIRHSPPPRMERYTWNPHKASPESSVNHNTSTPAKSDAPKKRSPLTSRPVPTNKDKFVKALAWHHPLVTLEVGALDTNIKLVLASEPNLQQEVKQCVQEAAQLAAKIKRGAQRLIGQFIETIGDPRNFEATDRRILDHICERIKPKDQDDSNEQEVDTTDLGDNGNIQWQFLQSFMCYLYSRNYPKRLGVGEVANDFIDRLEKLKLYEPPRKRIATKVVMPLTPNFLVKSVATQLAAGLKRIYRNGSFDLYDKLKTKRDKGGLAETVEFRIREKDSSIENFVRLNKLSGNSRKISPVSSSQQPFISFSERELVAFFFKKDSLKKKLRDMMGLEYAALADVDNWIATKEPGFLIKRFLADVDPQGLTSRQRGKMGYRAAIRLLSLDDIRTHLQNLEDPSFDPNNYSRKGYILRGSVRTDGFRIHLMAFKIRELQMVRYRRVSEDRLPSRLTSTVGGVDYWLQEIRHIISTKEDLERLWPGTRPEAIKMLTLDAGQAYVIGAYAHLPFAAATTCPTDAPLSASLPGAVKPSPSQESAAARPTDASSSTPSTNIAGPGSFQDLDAARPADALSTSFQESTFVLPTETVPVTSLNLAVNQKAVYQPQFRFQRWLEGEKEAVPEGETKSIADIESALPPLRGDGSRVVKYTAELKGENRLLEFYNGDNNRYKRYQWDLRRARQEEYSAIANRLLSIVDGSIGRIKDKSDPVLIGARSLGYIVVGLNKFYTSKKCPICHEFVAQVTLRRLYCLECQVYHHRDVMAAHNIAQDGSYPWLMPTTTSTSTSTSASTTNGPSTPRKRAASTSTQGQGQPSTSNRPSSKRKRTASASNEALQRRGKAAKEE

SEQ ID NO: 2693 - protein, 1008 aa, Mortierella sp.
MDASVQNATPDEMLVETSGDIDADDEDQSCDSNVKEEQSDNTQVEEDQAVKGKELRTCTATLGQLLGDDRPNIERLLDTKQEALFDFKDEMGCAAFKVTLAVCQGLLHEDKRTLDLREVFPPFFQFRDKYFQESPVILAGAVTDDLCRYVTEGLRQGGRHTDALGMLRQGFLQYMAARVFGTKSITSATSEALHPTWDKCIAAIQDTADNTPGSSTSTSIANTTLDPPLLAHQAPTGLSTTLNALHREQITDISNLWEGGLYTKLRNSTLRYCLKLWLRLAAEQRYRNSRANYAQQKQEKLEKKADKKKELSHNTKNWKRRSIQLFDQLDHTIAKHHLESWTTPHIAKVLNLIDIHEQQRPIKPTASTTRLLTYVDKYTIRLTGYVNKDRAHPPVRSKYEEKRKKHKAHPSAIQWEQERQELGLSTVEAKNMAESKKKAVESKTKELNPLKKRLTSLEQALSKAVEVHEACGKDDTKERLRLYGFVQDARAAICEIRPPVLELERSIRTLKQETHYLNSYTRSDKTNNNSSNTTNNNNGSSNSNVQDVEQQRFSEPSFSEPAMQDFVESTSIDRIQGECTHINKQLGPSATDRGLSKMHVTVPVKWNTLLALRNRFDVLSDESAGESDPVEGVQDSMDEPSPSPSRKDLVQSIKFAEANVISARHMQQISGVQKATSRREKRLRQPKSEKVRDAHAALAGSSLHNTQTLEEIEAAQEVRRKERKHLRAFEMSAVAKKERYLVEMATKRAWAVVAADERRHIKGHINAPSPPLDILRTEYQEPNHSEEGSGAPSSGIQGSSNPSSNEPVQGSQQGTVNQDNGFCSDCSKHHLPDFSRTGLAYPTSCPSNELPFVPVLFVGTAGVCNGGRLGGHLKYGGNRVIEQHMCSSPVCMIDEQNTSKVCPFCFQHMRLARATKIVDGQRRSVRVNRAVECVNPSCLSFQLGYTKRARDSNASMNIALNGLLSSPRPTVKSFLLTKETSDQPSPPLMPLASILALKTLSLLQLRSW

SEQ ID NO: 2694 - protein, 1584 aa, Actinomortierella ambigua
MATRTTIVLAPVRAPVPPKSRGHQPDPGTDPPPNRIPFQQLIDLESPHWNNQPNQKHFQTRINQALLDCEQNDGESVQGTSDPLNDAFVDPELRDGRERTYHTVAGLLRHGLIVTQDDSRRDVSTFIKRHFLGETSEYRLQLDIHNEGTEEIMAVKCPPNTRLLFSHLASTLHAKIYIFSNRAAPRLYGSPEAKTACAFLHVVDSFLGTSEYLTLSFANHKTKRMLRRQSVTATTQQPRSAPPGYPAQYRETQRARHKASPFDHSDAAQNELIHSFEIAWRGGSGTPSEERLAEVKAQLTETLDAIASIFQEKRQARLKPNDRALALDDECLALLFWLNIFGDKFDDVWSGVYNNILLGAVTPTEQPSRPEAKDSDDDDDDDDDDNDGDGDDDRKKVETRTCTATLKQTLRPELRDNPVVLSRIVELLEQMQCAATNLEDEIYELVHKELLVLASGNMWSDNPGSFDLSTLLPPGFELGTPERTLSVAPLPDGLQDEVEAAIKSKSGSELVNLFSQNHLSKLAHHFSSSTMDGRLHIESVDGTSPSFWTRLAQKVFAASSCQPLQSRSGMSKTGEAHIRQCSTMINNLLHGSVYTKSLDYLLRFLLRAWLAPCREASNKERRSKHVGDKKALVQERLERRAGRLTPSHWRHAMRKLCDELADCDQVDSIAQTRRESAIRRRRRLMRDIAALSKKDPGQRFWDQHPIKPLDDSAHLDDFEARGEHDPPDGDDSDDDDSPELLQEDLDHKMLIDKTTEASVELLQVGLDHKMLIDKTTEASATSSPATMHAASESTPTTSPSVREPSRKQLQSLQVVLRTLIESPSPLAQYSLEDVKNAVYKDHNFAEAELEVVRDLANKLRPFCPRRCLNDSEDGYRQHSPNAALRAPIIVLANAVMRAMGHSDFTRRICPHIAAGDTHALHLGPQQLFETLCASSPRHFDVQNADNNPITNTTDVTADRRNKRCLMEAFFDMTKIDSICGRHGLKFNNRQTTTDDDPLRHPITSNYQSRCASNDGKWRRLWQEQERQGLTQEDVAQRIAEAKENADTIKKQLDASRRRFRQLQSQAKGAIQIFNEDKKNRNNFISMKEHQQDARRASKDVSRLVEARSNANKEAYFWRKIESAAKAATRLGKKTVAKKKKTVGPTTPSWKSPGSEDVPQHIDASPLLGSHGQYSSSGRKNVVVCWTEDPGVRVMSHNVPRTIEELQRSVNQFEALQNLATSAMDVDTEDDGNDLPGPNKTTTLEARSHSEVVAALKRAQAMKLPAATKVTAKHLNQVSFTTKFMKTRERALADPKNVAASNALKAVSTKEAALSSATTIAQIDKAAGIRRLAKDELRKFNDSRNLKKLRRTKRHRNSRALAKMASHVRDNATKHALNQQKPEPEHESMPSSVDQTTGYCSNCEEYEMQKVTSGCFQHPTSCVKHRPQVVHIGFVGDSGSGVGSRIGGHVRRGGGQLRAAHRQHAVVAITDEYLSSQRCPLCFERTRPARSRRKKRDGSIKTVLVKGSMECRNHDCSSFCCGYTTKPRDSQGSFNIGTNGYSLLTTKRPLDCFSRYEYQRLIAGAQTRAQLQASGAMDTPQWGYF

SEQ ID NO: 2695 - protein, 326 aa, Actinomortierella ambigua
MDTECEKRPRDKVYSLQDGPADPPGLFKWLLRPWCSRYIEYDIPTRLDKTGLSRAQYQALGVVSHTDCSFNLPRLGIATNIKIIKAISYNKDTASAILQRYYIDPKVVAAYAAHTSDNLHLSRPHSRAAAEKVYLDCQETPLSPYDRNNRLFRETLTQMRVSKVNDGESIGAMPPLHQDQYDCRPKGTRHRSRSSTSAGAWSQARGLGYIVVDVDEYHASRRCPRCKCSGSDKKDFVEYIGMRRAHCVRCGTWFHRDLLAASSMVEASHTYVTDLSRPEYLLPIAKHGRFVWNPWFGVELPPKVNPDSDRRQASPRDKKKSLGGIR

SEQ ID NO: 2696 - protein, 421 aa, Actinomortierella ambigua
MLSVRFKRPGYQPEVLPDRLITTIVGTCDPLTEVRNAFATKEDVDRRLGYSIEQADKVSYLGIDLGQTCVAGREPRIGGRSHNRHRGCKSNGRRNKRGFRGGRQQGSKGSKKKKKKKGKKDPSPGGMRHIELFGKQKAVSQPTLKHRSWMEAQKRRPLNQSAVQEGVHESTSIAPVSTIHQQTAGTPDPVETSIPSISTIESAVSPLRGANGCFSKHVDRNEDNKEVLDKFYNGNKFFFKRHKWHARRARQGVYYRLADGFLRMVGGSIGEKKDKDNPVVVRIGLGRFRSTSGLSSLHGTFEEFFHPKEVPPLAMTLWCETESLRRLYCSKCGKYRHRDVLAGHNICNILKSTVEQQERPLYLQPMNEDGSYVWMEKDGKNKDQQAISTSPSPNQAAPTSGKRHMEHDGDERANAKKQAIA

SEQ ID NO: 2697 - protein, 487 aa, Mortierella polycephala
MRKVDLVRVMQYKHPSETLDIGTVSANVKKALKDQPNLVPEVERCLQEAVHLANDLVNSPLVDFIEHIATPGMVEKSGREMLDLICPRVTNTNCDEVEEEEEDGSRTKNQVSLLQDCSQRLAIMFYEVPLEQMDFVQLSAFKLKELQSVRYRRLPETVLPPKITSTAGGVDYFLVEIRNVVKTKQDAGDLWGCEPEQIKILGLDLGQACILGASVLLPRHARLEGVKNVTMNEPVGQDSQMKVDVPCTKDKDGDVPIGEPCNAIVPTSAPAPVKAIYHNLAVKQKAKHKWDAQRAKDDEFRPIADHLLKLVGGLIGLKRDEANKVVIGAGLGKFSTKTRLSSLHESFQSYLAQKTRSLGYIAAGVNEYYTSKKCPMCEQFVGQVEIRRLYCPTCNYSMHRDVMAGHNICNAVRSHPVDQQRPLYIFNRSIWMGITLGCKMQGHTQKPKVAPAAVLTAIALWDKDKDETKGELVGASEPPPWRLTRLE

SEQ ID NO: 2698 - protein, 1410 aa, Chlamydomonas sp.
MGDDRREMTWHELVHELPPELLTNVLVAVGAWTLGGGVVHSATSVCRGWRAAITASGAAPLAALLVAGHGSRDRAMVRAARLGSTSVVTHLLGWHIEGHLQDGVPPRADCNGGQALLQAAEGGHTEVVRLLLGWPEAAPRADCQDSLALVQAAAEGRLEVVRLLLGWHEAAPRADCNEGEALVNAAERGHIDVVRLLLGWPEAAPRADCDEGIALVRAAERGHIDVVRLLLGWPEAAPRADCDEGAALVRAAGGGQIEVVRLLLGWHEHAPRADCLEGDPLLFAARGGHIEVVRLLLGWHEHAPRADCLKGWALVLAAGRGHIEVVRVLLGWPEAAPRADCNGGQALVMAAGGGHIEVVLLLLGWHEAAPRADCQEGRALAHAAEGGHDDVVLLLEGFGGDDDTDEVTDEVTDEVTDEVTDAVTDAVTDAVTDEVTDEVTDEVTDEVTDASTSAVPVKTSTVTSVVKCALAKTLDMPPDKCREFVTFVDKCVDSLSRMMRQASIGMLYYLTAMAERGEHIPNLMMEATNGCYWRKWLILDVKAIVSADDWEVISSSAVLDGDVDDDFEFVSRPSTYSAITFATAVKNNAWRPLVPRIARLTKAIVMEYGVGDEKKKLCSDLVSKIRGMRAPDVADLPMWASDHVLGVRDCLGMDGTSYMFDDYGKRLDFHDLFMFNFWMQKQFTSLKKKRLALSPVFSVHRQHIHLDTTSLVELACRMFPESKEVVAYKSIVSTALPEAQKKPIAPTRNEKRCVGCQQLGSSRHKCVGCTERRVVVQGAYDDSMVAYKKELPELRKKHKEKLTEDKKSDEYKSRHIASKAAICRSLFGRQMPGRTSSGWSFDGAITTDGVSVSLQFSKTVPETEKPASGTKKRPRDKVVVAETYDRHLPTSVSGAAGCSTIVAGNDPGRTTIATVAVLDENGKHHVWKLSRGQYYTDAGIKKQDRLKHQRDAALQPAWRNLGGDAANGEDNDEDEEAVDTSALRTASSIDVKAYAEKYAIVRRQWWEHALKRRESRDAFQRYIGKRSVLDRFWGGVKRGLEKLFPKADRRCIAYGSAYATMPSSGRGEVAVPTTGQGQDGVGSRADCMEGLALVHAAKGGHLEVVRLLLGWHEAAPRADCMEGLALVRAAKGGHLEVVRLLLTWHEAAPRADCLGGTALVEAAEGGHIEVVRLLLGWHEAAPRADCRGGMALVEAAGGGHIDIVRLLLGWPEAAPRADCHDGLALANAAEGGHLELVRLLLGWHEAAPRADCRGDLALLFAAMGGHVEVVRLLLGWHEAAPRADCGGGTALVEAARSGNIEVVRLLLGWHEAAPRADCRGGLALLYAAGWGHLEVVRLLLGWHEAAPRADCQEGQALVYAAERGHIEVVRLLLDWPEHAPRASCQNGQARVRAAERGHVEVVRLLEGFGG

SEQ ID NO: 2699 - protein, 528 aa, Chlamydomonas sp.
MSETVVKCSLKRLLVAPPDIKEAIVKAVEKRVVQCSIRTQNATVALNLLVRQLFDGCADPLIPEFWDTTFVRQLLLGTDGAHKPVAEITQLFKDNPLLAPIEERSLADSNIYTYAAKKLATNISNHLVINIQKVVKRYLYDGAGLTTADAVQAQFLIYGWDLTKKKKKDKKNEVVDEEAVKRVVADVRKQLGLADDQKIGTMWYKSKPNLAPMLRMFVFANRALERAGKKLFNILPICRFKAHFITIDKTSVVGILNDAKFGRGEKVTLEKLDWRAFLGADKLAGKNCTFTTTIDTDGLAINVHFTRPKNEGHSSEVEKPSLEGKRVLACDPGRSNIMYVVEKLDDGRFEPHKLTRRQYYAESGIFKANENSARWNKGVIDKLEKLSTASPKSVDLGAFSLYVNAIASVRDALWEEYLRKRWREQTFRLYGGKKRSFAKFFNGLKLTPDTVLAYGASKFASGGKGELSVPVSRAYKECRARVRTFNVCEFRTTAVHWRDDTVLQTVVKSSGDGGRPVPPSTGRGSSEN

SEQ ID NO: 2700 - protein, 492 aa, Chlamydomonas sp.
MRTQNATVVLNLLVRQLFDGCADPRIPEFWDTTFVRQLLLGTGGTIKPVAEITQLFKDNPHLAPIEGRSFADSNIYTYAAKKLATNISNHLVTNLSKVVKRYLYDGAGLTTADAVQAQFLIYGWDLTKKKKKEKKNEVVDEEAVARVVADVRKQLGLADDQKIGTMWYKSKPNLAPMLRMFVFANRALERAGKKLFNILPICRFKAHFITIDKTSVVGILNDADFGRGEKVTLEKLDWRAFLGADKLAGKNCTFTTTIDTDGLAINVHFTRPKNEGHSSEVEKPSLEGKRVLACDPGRSNIMYVVEKLDDGRFEPHKLTRRQYYAESGIFKANENSARWNKGVVKELKKLSTASPKSVNLGAFSLYVDAIASVRDALWEEYLCKRWREQTFRLYGGKKRSFAKFFNGLKLTPDTVLAYGASKFASGGKGELSVPVSRAYKECRARVRTFNVCEFRTTAVHWRDDTVLQTVVKSSGDGGRPVPPSTGRGSSEN

SEQ ID NO: 2701 - protein, 528 aa, Chlamydomonas sp.
MSETVVKCSLKRLLVAPPDIKEAIVKAVEKRVVQCSIRTQNATVALNLLVRQLFDGCADPLIPEFWDTTFVRQLLLGTDGAHKPVAEITQLFKDNPLLAPIEERSLADSNIYTYAAKKLATNISNHLVINLQKVVKRYLYDGAGLTTAGAVQAQFLIYGWDLTKKKKKEKKNEVVDEEAVARVVADVRKQLGLADDQKIGTMWYKSKPNLAPMLRMFVFANRALERAGKKLFNILPICRFKAHFITIDKTSVVGILNDAKFGRGEKVTLEKLDWRAFLGADKLAGKNCTFTTTIDTDGLAINVHFTRPKNEGHSSEVEKPSLEGKRVLACDPGRSNIMYVVEKLDDGRFEPHKLTRRQYYAESGIFKANENSARWNKGVVDELEKLSTASPKSVDLGAFSLYVDAIASVRDALWEEYLRKRWREQTFRLYGGKKRSFAKFFNGLKLTPDTVLAYGASKFASGGKGELSVPVSRAYKECRARVRTFNVCEFRTTAVHWRDDTVLQTVVKSSGDGGRPVPPSTGRGSSEN

SEQ ID NO: 2702 - protein, 492 aa, Chlamydomonas sp.
MRTQNATVALNLLVRQLFDGCADPHIPEFWNTTFVRQLLLGTGGTIKPVAEITQLFKDNPHLAPIEERSLADGNIYTYAAKKLATNISNHLVFNLQKVVKRYLYDGAGLTTADAVQAQFLIYGWDLTKKKKKEKKNEVVDEEAVARVVADVRKQLGLADDQKIGTMWYKSKPNLAPMLRMFVFANRALERAGKKLFNILPICRFKAHFITIDKTSVVGILNDADFGRGEKVTLEKLDWRAFLGADKLAGKNCTFTTTIDTDGLAINVHFTRPKNEGHSSEVEKPSLEGKRVLACDPGRSNIMYVVEKLDDGRFEPHKFTRRQYYAESGIFKANENSARWNKGVVKELKKLSTASPKSVDLGAFSLYVDAIVSVRDALWEEYLCKRWREQTLRLYGGKKRSFAKFFNGLKLTPDTVLAYGASKFASGGKGELSVPVSRAYKECRARVRTFNVCEFRTTAVHWRDDTVLQTVVKSSGDGGRPVPPSTGRGSSEN

SEQ ID NO: 2703 - protein, 767 aa, Chlamydomonas sp.
MCRKQYTNLMDDEDDEEDEHDGDDDEDDDDDESATPKTRTVTSVVKCALAKTLNMPTEERTRFVKTVDGLVGALSRMMRQASIGLLYHLTAKAERGERIPNLMKNATNGTYWRRWLRLDVEDVVSADDWSFINSSAVRDVDAECSFPGIDRPSNYSAITFATAVRNNAWVPLVPRVIRLTKAVVMRCATDSDEEKLCVSLVSKIRGIRAPDVAGLPDWASDHVLDVRTRLGMDGTSYLFDDYGKRRDFHDIFMFNYWMQQRFTVLDKPRLALSPVFSVHRQHVRLDKTTLVEIACRVFPGREEVVAHKSLVSRSLPGPPTAPTLNDKRCVGCQQLGKSRRMCVGCSERKVDVQAAYDESIVAYKAALPSLRATHDANLSSLKKSDVYRASKAAICRNLFVSSIPGRASSGWSFDGSITTNGVAVSLQFSKKVPKTEKPTSGTKKAPPVVAEEYDLRLNTAVSGVDGRLTIVAGNDPGRTNIATVAVLDENGKRHAWKLTRAQYYIHAGITKQNLRKERRDAALKPVWQDLGGSADDDTSALRTASSVDVASYVAKYEKVRPQWWSHALKRRESRDAFQRFIGKRSALDRFWVGVKRGLEALFPDAEKHIVAYGSAYATMASSGRGEVAVPTTGAYNACRRIFGASGVAVVDEFRSTAFEWETGKRKTAVYRKRDGVGVRAGAVTDSATAAARRENGSPIEVRGLRFSPERRLFLNRDAHAAVTIARLHVMELCGLGRPRPFARARASDVVATKTTTSANSDEGKAGL

SEQ ID NO: 2704 - protein, 264 aa, Geosiphon pyriformis
MTFPNSPTIAHSTFTISLTPGVNNIDIWVSVPIMTTEYGGGVNGIFMVNGAVSPAEDTQAERYYIFIKNKLIYFRKTNEWKFTWVYEIEKQVHETQVDRFIHAVSIDPGIHTPFTWYSPTKGIGKIGQQDIGRIIRICICMDNLISKKNKLIQSTSKRKKKKAKRLDKAIACMQRKIKHLQNEIHRSSFHSKAEELGIHVIIQNEAYTSKTCSWSGNIQNIGGSAIYKCRNCKTVTDRDENGAWGIFLRALILSGDHAGNSSNA

SEQ ID NO: 2705 - protein, 233 aa, Umbelopsis vinacea
MTIWGVDIGINDVFVAADGIAEEPHRYRKLSSKEYYHLSIVEPFDRNLRSKRLAFSTYRNKKRGIHEVCRRLTFGSKKYGRQCLPRHPHNSDQSAIRRDFWTPILLVDFLAEDNLQQYMIAFGKTSFGNMRDKKPGPVKTIFRHLCYLSRMKSNIFVVAMDEYLTSQICANCDRRTLKNVRESRNFDSKVWNRDQMASKNIKYIFEYMATHNNERPQQFRRPAGEPPPHNVEK

SEQ ID NO: 2706 - protein, 202 aa, Umbelopsis isabellina
MNSSKNYSDSDAGPLRSLETKGKQKANDEGLAAPSILVPSKPSLPTSSMIWRQAPRMHHVYHLLHLRRKLPAPSKRILDHLRSLHRKNVQVSVVIIDELMTSQVCAECHQRNLIHVKDRSVPYNRRGANIHAVLKCSSCSMMWNRDVMAAKDILYIFEYMALNSNKWPDLISANHQRTPGKTLAVEDLAVGWVVRVEEEADS

SEQ ID NO: 2707 - protein, 385 aa, Umbelopsis isabellina
MEQQLFIREPVPQTRATKGFVHRQLRETVDFRRLPRRFRSTLENHVRDSTNIDQSTIQHYDNHFFLENTRRPRTKASISRNEFRPQQFTDLRGSALSDKSFTGAIRTDGIALKFICERPSHATEATLTPVDIATEIDLNSATVWGLDPGLRDVFVACDGVGTGAGQSRQRHRFNEALRYIFRNFEAMKGYYTTGLKKLKYHNYRNKQKALTEMCKRLFTGSRKYQEGNLDIQQANLQKWKPLAPSDNAGEAERPTVVAFGSATLVGLRGNVPSPTKIFRKALLNYVKSTRRNLPCSRKYVVMIDEYFTSQICPRCYTRSTFNQCDNSNMKIHPVLNCRTCNTRWNRDHMARLNLRSILLYMAANNNNRPEEFRRDEAILILIWII

SEQ ID NO: 2708 - protein, 288 aa, Thamnidium elegans
GVLRTNGVDLEFICARPVPANSLSLTPSDVSLKVDLSSAAVWGVDPGLRDAFVAVDGNHQERHKIRTTTTAEYYQLAGFNKATITRRKIGSLNLFNAAAIYIFNNFLIKKQQTLSEISKRLITGSRKYDPTRHMVIEDSNKKWKQLSLGDGPEESNKPVVLAFGAAMFGNLRGNVPAPTKVVKDSLIKFARERNKKVPTYVVMIDEYLTSQICPRCQTRTTSNEKNSSGLKIHPVLKCSTCDTRWNRGHMASMNIRSVFLYIAQNNNNRPKVFRRTYSLILTYILYNI

SEQ ID NO: 2709 - protein, 216 aa, Thamnidium elegans
MKSIQIDTQAFWRLVNQSGIEGYKKVVKKKKVGPKEKLPADFQEDIENGCNIWGVDPGVNTIITSVDTHVIKIEVQMLYAAESTGVKTSTNNENTYSPPAPSDNLETPGKTIIAFGDGAFSGNLRGHKAAPVRLIKKALNKYCGNNLEICMVDEYLTSQILHTILKRQQTTCNIVWNRDIMTAYNILDIFLFAAKSNNQRLDAFKRQNTTSEQSSV

SEQ ID NO: 2710 - protein, 224 aa, Thamnidium elegans
MFTNMVRTDGYGIDFILAGPERQSNKLPNLDVNDFTPEGINERFHLWGVDPGQINIFTASDGHDTDPHQLRKYPTAEYYTRAGLKKTNLHILNYKNADLQFQEAEQRITTHKTANLERFLEYVHSVLNNLDILLQFYDHRFTALRFLNYIGRQRADAEMTCSNCSGNNTEDVRIDDVSLFGVLHCLNQSCNTLWQRDINSSRNMHSISWNVIMNHEVPSGFQRQ

SEQ ID NO: 2711 - protein, 1390 aa, Thamnidium elegans
MFGVYFAGVLFALGWWTFIDGLTILWNLPDRLIAPGIEDWAPGIVTTLGMIMQGFALMAGGLSGSVAVLVTKYIYNENNLDLLNTYLGITDVVQCSLIMFSTAVLCTAYFFLFFFVINRSTLKCIRDIVCGVDCDPEDLTNKIHEFMKSWRHRENKGYAFSNRKMAQDYIARVVLRRTKAGEDFKLTNRSSKCSRRKKRRLLRQQHQEELRPNEDFRRTVVAYGDASIRDTYKGNTPIPVKLVQRAVAGKAVIITVDEFRTSVTCCHCRQRLQDIVSPLYICNHRKKKHRSLGSGENMTESRPSLKCYDDENHILHRVSQCPERRLSGNRVNYPLKLCPQCPVNNRNRLISHTLSPYLFGLASSNYPIQYWNRDINAAANIRNLSNYQEVNKTKDCTNILGENTWLSDKFPKVITTVIEEHPKIVNGVVIPVDTTKPNPNNEEFDNLYLDMNGIIHPCCHPENKPAPATEDDMMIAIFEYMDRVVDMVRPRKLLYMAIDGVAPRAKMNQQRARRFRASQLAQIEHEAADRIANELAAIGQAHQLPAKKEHFDSNCITPEGEHKVMEFIRVERSRPEHNPNTNHVMYGLDADLIMLALGTHEPHFKVLREDVFVDNKNRNSCFKCKQPGHAVNQCKVSDEAIAEMKREEAKLAVPKPYVLLHVNVLREYLEHALKFNIPGIPWDLERAIDDWVFMCFFVGNDFLPHLPSLEIREGAISTLSLLWKSTMPMIGGYMTHNGEVDLKRVQVLVTELGKMEDEIFSERKKTEERRSQGAKRRRLENDRRARETKMFDPNGPNFGDMTAAPVNNPNAVMSNRDIVANRAELRMANLSAAAALKAELSGIPPPAAPSSEGTAGVKRKVDELEEEEEEDDEPEDAMYGIIEKDSEKDIAQAESDAKAILKRVDDEKKAKDEAARQREPDDEVRLWETGWKERYYKTKFDITLQERDAIRDIVKSYCEGLVWVFKYYYQGCVSWSWYYPYHYAPMASDFINIDTFDIKFDKNAPLKPFEQLMGVLPAASKMHLPKAFHNLMTDGESPIIDFYPTEFDVDMDGKKWEWQGVVKLPFINTERLLTAMNTVYDQLNEEEQHRNSEGPSILYVSEDHKVYNSISNVYTKRSANERMILDARLSDGLTGEIDKDPECIPRSTLRTPLPDFDLPDIANDKSISVSYYLPNTEGTQFSSQLLKGLKLENSLGYEDVQLATFEKIDTRQRYNSNRGWTPQINHMEDYREYNNRGRGRGGNDKHRNDPSRGYGGGYNHGYDDGSRFPGTQQYGGNQRRDYGGGGGGGYNNNNSYGQHQHNNNNYGQQSGGYNQPYYGYQQQQQPQQGYGGGGGYQQGGGYGQQQSYYNQQSGSGYGNNNRGRGGHRGGGGGNRGGGYGNNRGRGGGYY

SEQ ID NO: 2712 - protein, 273 aa, Thamnidium elegans
MIQAGLRDVFVAADGNHLERHRIRTITTAEYYQLAGFKKATITRGKIGRGDTEERAIISATPSLKASSLDLFNAAAIYIFNNFVNITLYYDRDLKFNKLKFRNYIKKQQTLSEISKRLITGSRKYDPTRHMVIEDSNKKWKQLSPGDGPKESNKPVVLAFGAAMFGNLKGNVPAPTKVVKDSLIKFARERNRKVPNYVVMVDEYLTSQICPRCQTRTTSNEKNSSGLKIHPVLKCSTCDTRWNRDHMASMNIRSVFLYMAQDNYNRPEAFRRT

SEQ ID NO: 2713 - protein, 364 aa, Thamnidium elegans
MVKLKERISHLTDDMKKKGCSVEEIKLAIKNYVTSPVTQLKLAVSPKDINQIPKEFLDQKAIQHVNSFIPSYPKNYKFKKVSIYYDAIANLVKHLKAYFKLAEICESYKFKLFQCLPLRNTLIPSYMTIDTIILNNQILKDSKRSKLDKSSIWGKVVNISNEALKDQGPNKSIEFRGTIMTDGVGELIVKQKFETSKSSISGPKINVVKEDFQNQKAKELKSTKFRKLHQRFKPTSIQECENKISQYSSSGVNADTYVEYLKVRTQVSPLLEEYYGNEDVEKNQRQDNLIPFRKMKLSSYINQIQADKRLSKNLRKKFGNDCILILGNWSACHTKFQEPIRGKGMRKMLRKERFQVYLLDEYKT

SEQ ID NO: 2714 - protein, 273 aa, Thamnidium elegans
MIQAGLRDVFVAADGNHLERHRIRTTTTAEYYQFSGFKKATITRGKIGRGNAEERAIISATPSLKTSSLDLFNAAAIYIFNNFANIALYYDRDLKFNKLKFRNCIKKQQTLSEISKRLITGSRKYDPTRHMVIEDSNKKWKQLSPRDGPEESNKPVVLAFGAAIFGNLRGNVPAPTKVVKDYLIKFARERNTKVPTYVVMVDEYLTSQICPRCQTRTTSNEKNSSSLKIHPVLKCSTCDTRWNRDHMASMNIRSVFLYMAQNNNNHPEAFRRT

SEQ ID NO: 2715 - protein, 273 aa, Thamnidium elegans
MKKQDIKLQRRNKNLENVNTGIYPGARDIVCAVDCNKDQLINKQTIKLHSRKFSNASYQEYSGMKWNNKIEFENRRIADMQNVYDQIETRNVFTILGMRQYMNSMTVLTQRDRVRRQLRENPNLTIQPIRDINDQWRTIVAYGDASLLGSYKGHDPIQSRMENVYYLNLSAIRQSMLQCNHRKIKHKDIIDPENGRPEKCYYLKCSSEDDDTILHRTSECFERQPSKYWNRDINAACNIRNIVTQYITANYNLDSRPEQLSRRRQDVAPNEES

SEQ ID NO: 2716 - protein, 300 aa, Thamnidium elegans
MQLQNNPEEIVRNFLFSGTDNGIAKMTEIVPLNLESFNYHLRLHNVYSPLADTQESTDDVKELPFNPLPKLLTVNAGDIDLSGENSFSKAITVQDTKRAYREQIVSREQLREFYGSRKRPSAKSKVEILGYKFRSHLFTQERKEMKDDKKHLIMFIGDSGTGAGSTIKGYRRYGGTWKQKIHDQSNTTCITNENKATQTCIYYLCPLYNTKQQVMMKREMIQKSINVAFICYNQACDSVRNNRNVQRFGYDHRFIRSIILLFNQTFPQSATILSQFNTNFKDKTYSFLTRSEFRARGDAS

SEQ ID NO: 2717 - protein, 223 aa, Thamnidium elegans
MKLPYEINLQIFNFLNRGKTDTCAIIFKDWSKPALQLYFKYVYVGEGNVEAVKKLVLGRQKLLPCTITQRIPELKKKTSTLFVKYAEALSKNTVHYKTKEVVDDKEEKYHKRKRSKIIIGDEEDEHRCGVTGVFWRTLKKCEAESSLIAAAIDYYLTSQICSGYNNRTLKDAGNKEKSSIICEACNKIWQRNVNAARNMLAVASSIFKNKDVPAAFKRATASN

SEQ ID NO: 2718 - protein, 372 aa, Thamnidium elegans
MSKAKPVFLPFDLFSKEGELISSLPSAIKDKQLYLDQFLILRVSRNIYRGTPKKKPGKTANHQQKIKKLEKTAEELNKQLQDRKNSFNLEEADCHIRNLKKERNSSSHEGQRNVMAAEIKIMKQRRWTDFKHIEILRREIKEARRKAYFFRITTLADNVQDVSQNHEASDDFIDSLLTNINDLKLSRTDYDLQTISVTVGVSLKMFNAHLNLYNEFNPEHPLERRTTELFTRRTKDRVAAKERRFVKGKSKKAIPMMAINNAGTGVGNCIKGYDRRGGKWLANLHNRYVPIIMTDEHMTSQLCLYCYFPIVHPRTLDNKRILGASRCLNPDCPAFKHGRATNNRDVMSAAAIGISAITKVLYNQNFPPLSKH

SEQ ID NO: 2719 - protein, 378 aa, Thamnidium elegans
MLNRSVTQLRPQITDILQSITQLLQQIRQIRTQFKNEITIIRGRLTQQHGVIVNVIIESRDTAYRVELGRLVEYLTDEERLLQAQLSTQVHIFIQNKQTHLAALRQYENQHRQTIETNPEGNQFFPKITNATFWSHVYRKVANDPNQLNTNIRFNQSIQRTFADFEISRKIPGTEQSSKCSRRKKRRLFRQQHQEELRPNEDVRRAVVAYGDASIRGTYKGNTPIPVKLVQRAVASKAVVITVDEFRTSVTCCYCRQRLQNIVSPLHTCNHRKKKHRSLGSGENMIESRSSFKCYDDENHILNRTSQCPERRLSGNRVNYRLKLCPQCPVNNGNRLYWNRDVNAAANIRSILVEYIRQGFNLDSRPVQLSRGQQDQGL

SEQ ID NO: 2720 - protein, 204 aa, Thamnidium elegans
MNPTNNNQTFETIMFDPKAKKADGRKRQVTDEPEGNTQPSTKKKSRGPKDEWTPARRLAVLKLKTYRLFIYNRKRRLELTKRRYCDKTTAIEGKFSGTKKPIMFIGGRGRGIRSSIKGHQRFGEFKKQNKHGQNTPTLITNEYNGSQTCLFCFNKLSHPVSAAADKISISKGTFICLNSNCPKAFKPMCRDKVSALISLIYPLV

SEQ ID NO: 2721 - protein, 200 aa, Thamnidium elegans
MKKKIERATITRGKIGRGDAEEKAIIFATPSLKTSSLDLFNAAAIYIFNNFANITLYYDRDLKFNKLKFRNYIKKQQTLSEISKRLITGSRKYDPTRHMVIEDSNKKWKQLSPGDEPEESNKPVVLAFGAAMFGNLKGNVPAPTKVVKDSLIKFSRERNKKVPTYVVMVDEYLTSQICPRCQTRTTLNEKKTALPRLKGI

SEQ ID NO: 2722 - protein, 225 aa, Thamnidium elegans
MPDIPIYKYTPLPALEVKITIPFDDYEAYIKKEPEVHGVKWVYKSYRCASGLMSKDIIYKSDSWPKYYQHHRAGTPRKRTRDNMENPPVQKELKKIDCKAKFQISFDPADPSDKTIIAISRRSLVILVDEFRTSVTCSRCHGTLEKKYTRQKEGEEHCKYLIYCLKVFPTCLDGKKIWHRDVNAAINIKDIMMDYINSQYDIKSRHPSLCRGTPPAVILPTATSS

SEQ ID NO: 2723 - protein, 250 aa, Thamnidium elegans
MFTNMIRTDGYGIDFILAGVDSGQINIFTASDGHDTDPHQLRKYSTAEYYTRAEFKKTNLHILNYKNADLQFQEAEQRITTHKTANLERFMEYVHSVLNNLDILLQFYYHRFTALRFLNYIGKQRAGAEMVNIFVNGGKKYLRREFKQTGRDEKRGNSKRRKKRRPVKKKGKGKAKLKSFESDNRIPLVALGSAVFPTSMKAIISSLARRLVTTLKKAEDEGLLVIVPVTEHIASNVSEHNLNTYFLQNI

SEQ ID NO: 2724 - protein, 449 aa, Thamnidium elegans
MVKLKERISHLTDDMRKKGCSVEEIKLAIKSDITGPVTQLKLAISSKNINQIPKDFLDQKAIQHVNNFISSYPKNYKFKKGSIYYDAIANPVKHLKAYFKLAEICESYKFKLFQCLPLRNTFIPSYMTIDTMILNNQILKDSKRSKLDKSSIWGKVINISNEALKDQGPNKSIKFRGTMITDGVGVSIVKQNFETSKSSTSGPKNNVVKEDFQYIKEISKEELLATKGKTVLIDPGRRDLLYCMHEDSTAKKKKLYRYTRNQKAKELKSAKFRKLRQRFKPTSIQECENKLSQYSWSTVHTDAYLEYLKVRSQVSPLLEEYYGNEDVEKNQRQDNLIPFIKMKLSSYINQIQADKRLSKNLRKKFGNDCILILGNWSACHMKFQEQIRGKGMRKMLRKEGFQIYLLDEYKTSSICPSCEHQLENFKECINPRPYRRSNNPTVKCHGLLR

SEQ ID NO: 2725 - protein, 1382 aa, Thamnidium elegans
MSEGSEGKTEIISVDEYLTSQTCNNCKKQSLNHISTTGSKRKLYDVLKCDSSFIGVSAVSQFITYVAYRRRELDIKLMYSQNILDMIYNYNKFRKTNLQKMIIIIFAVFALSLGFIPTLFTKLNRSTYIYSERNFVTLQKEGATWSTANMPVLDDFLQFTQVVEKPFPTTKKIMETYLKNNLNQNITRNPTGLWFLVDPKKSFEFTSDQYGSIDGFFTNVNASLSGSGSTLRTFTAFSSRASDTMPPTSSSLRGCSNDPTNLITNISAKAGFVIEAVHTYDYACYPMYDRSSAVYVINKIPNKLSMLSVNDNIYRSSQLNPGVTALGSFGVSLFNHNNTHMSMGIKKMASMTFFNYKAKMTSPHDCRLNNKFENATADFKNLPHNYMLCYLLDMMPPWNVPTPSIRVVQETRKYYEQNRAMNVVYTVQNGNTYEEGQSVMIDLNMFTVFNLKGQLADDKEHLIAYETKSYGATMNIFASIASMRARWTNNDFSDFTRVTTDVTSAVDTTPAWIVAVVLLCLLFLLPQFTRLLVRRDPLYARDFRTILITTLENESTSTNSLNKKIEAKRIDMIANPSIAEKIERTTAKASALKEVGPKYATSKKRACKDCGTLGHASMTNKVCHRHEEHLRELKKSRFVIKTSFKNTINLANNKVNASFCVAVQKVVVIAFAGMTIPPLTHTFLYDFASLIMNLGSKALPHVVENFNRFTEMLGDTYIPERFYSQVVTNIIRRYPALIHNHVADNYKKRSLRHFFTCLSSTNSEFRISCSTAHKRELAQQIFDSISNYISTSYKESMNLTEPQKAIITRLKNESARLMGPLPLTTANVGARPHLYLPWLYHVLQRMEQVDSIKEHVPEKKANIGFIHRKVKELVRLVDFPRKFQKTLENHVQEAINIRAGKPKLRRPNCNTYQRRTRQDLSVEKKASLDHFVQETRDSISTNTFRPENMQMRHIPINRLALAESWNCQYTKKKKKSITQLCWKAFDMTKIGFKSFDQLNNSDNRKEFTGALRTDGVDLYFICDRPVPANSLPLTPSDVSLKVDLSSATVWGVDPATITRGKIGRGDAEERAIISATPSLKTSSLDRVNAAAIYILNNFQTLSEISKCLITGNRKYDPTRHMVIEDSNKKWKQLSPGDGPVKSNKPVVLAFGAAMFGNLRGNVPASTKVVKDSLIKFARERNKKVPTYVVMVDEYLTSQICPRCQIRTTSNEKNSSGLKIHPVLKCSTCDTRWNRDHMTSKGQPRGLNAARKLRIHRRDQRWADKQYKKRALGTAFRSSPFGGSSHAKGIVLEKIGVEAKQPNSAIRKCVRVQLIKNGKKVTAFVPNDGCLNYVDENDEVLIAGFGRKGRAIGDIPGVRFKIVKVAGVSLLALYKEKKEKPRS

SEQ ID NO: 2726 - protein, 283 aa, Thamnidium elegans
MNREEIIKIPDETSPLVSNNEKNPVQFNEKSPVRSIEKSLIRLLFEALFELAGLPDVFVAADGNHLERHKIRTTTTAEYYQFAGFKKATITRGRIGRGDAEERAIISITSSLKTSSLDLFNTAAIYIFNNFQTLSEISKRLITGSRKYDPIRHMMIENSNMKWKQLFPGDGPEESNKPVVLAFGAVMFGNLRGNIPAPTKVVKDSLIKFAREQNKTVPTYVVMVNEYLTSQICPRCQTRTTSNEKNSSGLKIHPVLKCSTCDTRWNKDHMASMNIRSVFLYMA

SEQ ID NO: 2727 - protein, 985 aa, Mucor plumbeus
MRRRRKRQLDIYIPGKTTINPPASFGDDGQGCLQSKRSTSNDKTNYMNALEAQFNIRISNSIKQCKSQDYDKLYEALLNGTRLSKRVVINAAESINVGAASIESFLRNECKKTKKKSVEYWTDYVRKNFITTKLSISNIEASISSTGNIRVDDDDDDSNDDVDEDEDEDDEDTGEYEEGTQYRACSASLRSVLRSDLSQQVQSLFASTINDNMQSVSDYLSDFSNQVFKMILIFNEYNFVLENHAVSLVAHEGNKISQVLLEGYLEKDASVAKPLDSKYLEDEEFKANYHKMFQDPHLELIHSTFYGAKGAQDSSLKTYPLHKAIVDVLGHDEVNLYKDLSSHVTKMARQLYYTNLHNMWSDNTIVNKLLTRLLRFLLIIHLCPDQDNDFKANKAKHQDKGKKATRRVTNCRIPEERISLLRMTRNGRRRLFANEEKKRIKYLQKGKELSASLCQRRLDTYRQVLEREREERDSGRKEKLEKKRGREGDNDDDVEDALVRDDINTEKTKDTPRRRIGQLLQVTRTALFQKQTVTRSYFEMKLKNLDDKEFETIIKIVNFVKPYIPDKDNYHHFQYQLPFVLMANQVLRSIGYDGQVITSSYGLEFVNRIHILHGQKTIRIYGALDYIQQRQKKPEAINKPIAQDKDEDDTLNALNNRRSILETLFKERRKELDQFILTAKSVRASKRDWKNKVADRDKYYREAEMTKLKKRELMVGIRNVRQDLQSLKRQIYEYRNPSTPLTSTTSPNPFIINSKPCHKKVEECMLDTDMNLDDVVFSGTDNGIIKTTETVYFDINRFTFHLELYNRFQILEDAMNTYDTYNLECMKLPLSLTIGPKEINQGSGLASYTKSIVQKKKSKIEGHAVLDEEEKLSNYSLYQCQTVGELQEAISHHCNAREKLRSFYYSNSQCKQRRRLELKKRRFYDKLAADERKSSSAKRPIMMIGDRGYGIGSRIKKHQRFGGHWKESRHGLYTPTLITNEYNSS

SEQ ID NO: 2728 - protein, 376 aa, Mucor plumbeus
RPPLPRLFIISPSPSFRWKFVTISVNSLCCFTKDKLPRGYNAQLNLFYKYFDFKGLGFKSIDDLRPNGLNNVLFFNTIKSDGFAVDFLFERIRAAALKEEVERIYQSVFIDPDRKAVYTAVIGLDTSNHQIRQCSTKEYYNLTGPTKYSSRLQKLKYIKGLTSIETNIPIQKTYSSILYDRFIQYIIVHKDKLLALYGRQRAPEVIVNMLFNGDKKRNKKKINKTKRSKWRKMKKAAKKRNELLDRKARAKKKRNDNSISSTVKAHDITKYSRKRLVKLRGLRHGVTSMFYRTLKEREKESELLVVPIDEFRKSRICNICKTDTLYKASHTGGFGVLVCKTCKTLWQRDVNTFKNIMSIASSIWNQDGSPTAFKRV

SEQ ID NO: 2729 - protein, 557 aa, Mucor plumbeus
MKQEKKEAKQQKTNNTNAVFSNCKEVGHSSSRSPLLNNRKATNGTALPSDMIPAWDTFRIKYPTIIYKVNLASGNSQCISEAYTVVATSYLNNIVELFKAKVLRYICYILQNAFMTMSPDHVAKIAKEFCYQMVYQGNPVWPKNIQLSEGEQSRIKEACIPLSTHIDVQVTLKSLSASPEKFVRSLAYILPEYEREHLAHNPYDVRRLSLPRLFTISPSPSFRWKFVTIIVNSLCCFTKEKLPRGYNAQLDLFYKYFDFKGLGFKSIDDLRPNGLNNVLFSNTIKSDGFTVDFLFEKRRATALKEVKKDIENHDLVLEDFEYEEVERIYQPVFIDPGRKAVYTAAIGLDTSNHQIRQYSIKEYYNLTGSTKYSSRSQKLKDSKGLTSIETNIPTQKKLAVQLCMIDLSNISLSIKINYSLSMTKRKKWRKIKKAAKKSNERLDRKARAKKKINDNDVSSTVGAHDITKPNKWKPAKFEYDKSKVSLIVFGTGMVGKDSVKLRGLTHGVTGMFYRALKKREKKGKLLVVPIDEFKTSRICNICKTDTLYKASHTRSCL

SEQ ID NO: 2730 - protein, 745 aa, Mucor plumbeus
MYKSLILNKIQAVKASRGSGERPQSTCKDCKEIGHYNKKYYKCKLFKEDKADDVGTSKKRQTSAIKNVKREVKRQKVIADPNVRCINRKGTSHKTSRSPDCPRHILSKLEVMNQNLGTGFQSFARKLPFDTCVKERYKSVLKDRILSASEDVRQLLFRAQMFVNYFIILRSNENIPGCIYRQPFWYSICQLVNNRRVTNSNVLPLGMLDDWNNFRRQRPTIIYKVDLASGNSQCLSEACLQVSVTYLNTVVETFEQRVMSYLYYLVQNNYMSMKPDQVKLIVKEYCYQYVCRGEPKWPASVTLSDDLKLRIRNGCDSLRNHTTESISLKSLSASPGNYIRCFSYILSAYEEEHRNHSPFDVRRLPLPRLFSISPKPSCRCRFVNASVNALSCFVKESLPRGYENQLQMFHRVFDFTKLRFKDISQLRADSENTVLFNNLVRSDGFAVDFIFNRKKQESIIGGHDLTLEDFTYEEVEGVYRPVFIGPGQKAVFTAAVGLGDDHQVRRCSTKEYYDLTGSTKYSIKLQRLKVERGITPIETDMPTTKTCQATVYLTHTTYMLLHRHILFDFYGFQRVKDRFFLYQDRQKASQTMVNMLVNGSSKYDRKQRNRRRKKRKRKFMRRQNKNKKIHITTIAKRKWKPSKFRQDKTKVPLIVFGARMFDKDLVKLKGNQCGVTGILWRALKKREKGDFLVVTIDEFMTSRICNICHEDSLRKVDGVKGHSVLGCQNCKKLWQRDINATRICY

SEQ ID NO: 2731 - protein, 691 aa, Mucor plumbeus
MYYKEIIYAKIQSVKYQRNSKTIPTCVDCGLVGHYNKNYYKCSKYNPDTADSVGTSCKRNQSFEMKQEKKEAKQQKTNNTNVVCSNCKELEVFNNNLGKAHQSFTRKIPFRSCIRNNESIIATTSSSVNPQSAVTIKSRIISAYDIIPDCIFKQNFWYSICQLVNNRKATNGTALSSDIIPAWDTFRIKYPAIIYETMSPDHVAKVAKEFCYQMVCQGNPVWPKSIQLSEGEQSRIKEVCMPLSTHIDVQVTLKSLSASPGKFVRFLAYILSEYEREHLAHNPYDVRRLPLPRLFTISPSPSFRWKFVTISTNSLCCFTKEKLPRGYNAQLDLFYKYFDFKGLGFKSIDGLRPNGLNNVLLSNTIKSDGFTVDFLFEKRRATAPKEVKKDIENHDLVLEDFEYEEVERIYQPVFIDPGRKAVYTAVIGLDTSNHQIRQCSTKEYYNITGSTKYSSRLQKLKDSKGLTSIETNIPTQKTCSSILYDRFIQYIIIHKDKLFAFYGKDTAKDRFFLYQGRQRAPEIMVNMLLNGDKKYNKKKRNKTKRKKWRKMKKAAKKSNERLDRKARAKKKINDNDASGTVGIHDVTKSNKWKPSKFEYDKSKVPLIVFGAGMVGKDSIKLIGLRHGVTGMFYRTLKKRKKEGELLVVPIDEFKTSRICNICKADTLYKASHIVVLVFLSVKHVKHCGSEM

SEQ ID NO: 2732 - protein, 272 aa, Mucor plumbeus
MEDLAVFFVPPSSILTINSDDIYHRSGNKSFLKSLERKKKQTMKGQKALDAEEELSGSQLSEATSSALDQLTQPYFQQRGLIREFYYSYTITNERRSKELRRQKFLDQACSNERRFINQGQRGNTIAFVGDRGYSVGSHIKGFKKYGGKWKPQNHSRYISTINTNEYNTPQTCIYCFHKTTHTVHRVDNTLKTNNGTSVCTNPACILVKSGSSHKGRDAISSLEIGLSGLSYLALGVPFPPFNPSVGHHHTDFTNIATILFQFTMSSYFIHN

SEQ ID NO: 2733 - protein, 693 aa, Mucor plumbeus
MPFLKHVEYLKQKYAEKRSQLPKCKDCGIEGHEHKGSYLCSQYIKNTRKKKGPTKDDYETKIDKQKGKQMRLEQEKAGSSSSSSSAPICGSCKEPGHLNAKSKECLNYKATLSEMLQKDFGGSMEQFTRKLYLESVLRPSHKALFTDKVIKLSEFIRNVTFRAQIFVSSYIILNQDSDSLSAITQQNFWYSVSQLIMGQEVTNKKFLSNEIVFSFVAFRQTHPSILFTLKDHKITGYSDSLSAACVTLATTHLNHIVENFERRIVYFIQIKLKDVYKDMPKGFLYIMAREYCYEHLLGSNGNPKWPKQFDLVRIAHVNQITDIIQELKNRLLITPTTTNLTVSPTKFLSVLGYIISELESICDNCTDPLDKPRNFSLVPTPSLRWKYISINCRSLATIVKKKSGTTYKENIEQFYSTFDFKKFGFENLEELLSPESKVRFMCSMMTDGFGACFVFARCKPKKETDPNVFDLEDFQADEVKEHFLPCALDPGRRQIFTATVAHSPEELEIRRCSGKERACYAGTNRRATYVERLKTQQNVKTIETNLPTAKTVNNEKFQERIRYLLVHLPRLFQFYSYKSAPFRFNDYQGRQRANAEMANILINGGKKYNKMKRKNTIKNRKQRKKKHKDKKITKDKGALVKLKKPVKWLKKSTFKNSDAIPLIVFGDGMKNKDTVAIKGHTSGATGALKESFN

SEQ ID NO: 2734 - protein, 428 aa, Mucor plumbeus
MQISFFNIKRLIAVSSSHGLIFTNRIHILPGLKAVWLYGTLNLNQAFASDQDTKVKSAILAAEKKTLENLLKQQQKKQKEFFLNNSIRQLKKNGKLILIEGKNGTWKTYEARNLSPSSPVSESNKIIFTNDKPNHRKVESYKLHSNLDVCNLTFSGIDNGIVKVTETVAFDIHRFKCHPELYNRFNVLEDQDSDTTEGSISDEFVPSQFLSLPVSMKINPKSVNQGSGLANGNASDLGKAFERSSRSLYIIMDFYFSNANAKRRRRLELTKSRYYHKLAAQERAFTQSKAPIMFIGDRGHGVRSIIKDYQQFGGHWKEKIHGRYTSSLITNEHNSSQTFARDKVIKINNESFICLNNKCHNKYVVMSRDKLSALAIGLAGIAQLLFGGTFLCFNHQSAKEQELQFNNLALAFCTEIACRLALVESQTL

SEQ ID NO: 2735 - protein, 750 aa, Mucor plumbeus
MYKSLILNKIQAVKASRESGEQPQPTCKDCKEIGHYNKKYYKCKLFKEDKADDVGTSKKRQTSAIKNVKREAKRQKVIADPNVRCINCKGTGHKTSRSPGCPRHILSKLEVMNQNLGTGFQSFTRKLPFDASVKERYRSVLKDRILSASEDIRQLLFRAQMFVNYFIILHSNENIPGCIYRQPFWYSICHLVNNRRVTNSNVLPPGMLDDWSNFRRQHPTILYKVDLASGNSQCLSEACLQVSVTYSNAVVETFKQRVMSYLYYLVQNIYMSMKPDQVKLIVKEYCYQYVCRGEPKWPASVALSDDLKLRIRNGCDSLRNHTTESISLKSLSASPGNYIRCFSYILSAYEEEHRIILLLIFVNVSVNALSCFVKETLPRSYENQLQMFHRVFDFTKLRFKDISQLRADGENTVLFNNLVRSDGFAVDFIFNRKKQESIIGGHDLTLEDFTYEEVEGVYRPAFIDPGRKAVFTAAVGLGDDHQVRRCSIKEYYDLTGSTKYSIKLQRLKDERGITPIETDMPTTKTCQATVYLTYTTYMLLHRHTLFDFYGFQRAKDRFFLYQGRQKASQTMVNMLVNDSSKYDRKQRNRRRKKRKRKFMRRQNKNKKKIHITTIAKRKWKPSKLRQDKTKVPLIVFGAGMFGKDLVKLKGNQCGVTGILWRALKKREKEGDLLVITIDEYMTSRICNICHEDSLRKVDGVKGHSVLGCQNCKTLWQRDINAAKNILLISSLIWNGSGRPEIFSPKARDLL

SEQ ID NO: 2736 - protein, 226 aa, Mucor plumbeus
MMTDGFGACFVFARCKPKKETDPNVFDLEDFQADEVKEHFLPCALDPGRRQIFTATVAHSPKELEIRRCSSKERTCYADTNRRATYVERLKTQQNVKTIETNLPTAKTVNNEKFQERIRYLLVHLPRLFQFYSYKSAPFRFNDYQGRQRANAEMANILINGDAIPLIVFGDGMKNKDTVAIKGHTSGATGALQRELQLRSKTFGSVVVDINEFRTSKVSIVTVFKH

SEQ ID NO: 2737 - protein, 741 aa, Mucor plumbeus
MVYIPTTESIVPTYVDCGLVGNYNKNYYKCSKYNPDTADSVGTSCKRNQSFEMKQEKKEAKQQKTNNTNVVCSNCKEVGHSSSRSLLCKNHLSSKLEVFNNNLRKAHQSFTRKIPFRSCIRNNESIIATTSSSVNPQSATTINSRIISACEDVRQLIFRAQIFVNYYILMHKDDIIPDCIFKQNFWYSICQLVNNCKATNGTALPSDIIPAWDTFRIKYPAIIYKVNLASGNIELFEAKVLRYIRYILQNAFMTMSPDHVAKVAKEFCYQMVCQGNPVWPKSIQLSEDVQVTLKLLSASPGKFVRSLAYILSEYEREHLAHNPYDVRRLPLPRLFTISPSPSFQKLPRGYNAQLDLFYKYFDFKGLGFKSIDDLRPNGLNNVLFSNTIKSDGFTVDFLFEKRGATALKKVKKDIENHDLVLEDFEYEEVERIYQPVFIDPGRKAVYTAAIGLDTSNHQIRQCSTKEYYNLTGSTKYSSRLQKLKDCKGLTSIETNIPTQKTCSSVLYDRFIQYIIILKDKLFAFYGKDTAKDRFFLYQGRQRAPEIMVNMLLNGDKKYNKKKRNKTKRKKWRKMKKAAKKSNELLDRKARAKKKINDNDASGTVGTHDVTKSNKWKPSKFEYDKSKVPLIVFGTGMVGKDSVKLIGLRHGVTGMFYRTLKKREKEGELLVVPIDEFKTSRICNIFKTDTLYKASHTRGFGVLVCKTYKTLWQRDVNASKNMMSIASSIWNQDGRPTSFKRI

SEQ ID NO: 2738 - protein, 530 aa, Mucor plumbeus
MKIVYILSIKSIVSTCVDCGLVGHYNKNYYKCSKYNLDAADSVGTSCKRNQSFEMKQKKKETKQQKTSNTNAVCSSYKEVGHSSSLSPLCKNHLSSKLEVFNNNLGKAYQLFTRKLPFRSCICNDKSNIAATSSSVNPQSAATIKSRTISAYCIFKQNLWSSICQLVNYCKATNGTILPSDIIPAWDTFGIKYPAIIYKVHLASGNSQCMSEACTVVATSYLNNMVELFEAKVLHYIRYILQNAFMTISPANVAKIAKEFCYQMVCQGDPSVFINPGRKTVYTAAIGLDTSNHQIRQCSTKEYYNLNGLTKYLSRLQKLKDNKDLASIETNILTQKTCSSIFYDRFVQYIIIYKDKLFTFYDKNAAKDRFFLYQGRQRAPEIMVNMLLNRDKKYNKKKRNKTKRKKAKKKRNNNNVSSNVRAHDITKFNKWKSSKFEYDKSKVPLIVFGTAIVGKNLVKLRGLRHGVTGMFYRILKKREKEGQLLVVPIDEFKTYSICNICKTDTLHKASHARGFGVLNQDGRPTAFKRA

SEQ ID NO: 2739 - protein, 642 aa, Mucor plumbeus
MVYIPTTKSIVPTCVDCGLVGHYNKNYYKCSKYNPDTADSVGTSCKRNQSFEMKQEKKEAKQQKTNNTNAVCSNCKEVGHRSSRSPLLNNRKATNGPALPSDMIPAWDTFRIKYPVIIYKVNLASGNSQCRSEACTVVATSYLNNIVELFEAKVLRYIRYILQNAFMTMSPDHGNPVWPKNIQLSEGEQSRIKEVCTPLSTHIDIQVTLKSLSASPRKFVRSLAYILSEYKREHLAHNPYDVRRLPLPRLFTISPSPSFRWKFVTISVNFFIDDLRPNGLNNVLFSNTIKSDGFTVDFLFEKRGATALKEVKKDIENHDLVLEDFEYEEVERIYQPVFIDPGRKAVYTAAIGLDTSNHQIRQCSTKEYYNFTGSIKYSSRLQKLKDSKGLTSIETNILTQKICSSILYDRFIQYIIIHKDRLFAFYGKDTAKDRFFLYLGRRGAPEIMVNMLLNGDKKYNKKKRNKTKRKKWRKTKKAAKKGNERLDRKARAKKKISDNNVSSTVGAHDITKSNKWKPTKFEYDKYKVPLIVFGTGMVGKDSVKLRGLRHGVTGMFYRTLKKREKEGELLVVPIDEFKTSRICNICKTDTLYKASHTRGFGVLVCKTCKTLWQRDVNTSKNMMSIASSIWNQDGRPTAFKRV

SEQ ID NO: 2740 - protein, 393 aa, Mucor plumbeus
RLLITPTTTNLTASPTKFLSVLGYIISELESICDNCTDPLDKPRNFSLVPTPSLRWKYISINCRSLATIVKKKSGTTYKENIEQFYSTFDFKKFGFENLEELLSPESKVRFMCSMMTDGFGACFVFARCKPKKETDPNVFDLEDFQADEVKEHFLPCALDPGRRQIFTATVAHSPEELEIRRCSGKERACYAGTNRRATYVERLKTQQNVKTIETNLPTAKTVNNEKFQERIRYLLVHLPRLFQFYSYKSAPFRFNDYQGRQRANAEMANILINGGKKYNKMKRKNTIKNRKQRKKKHKDKKITKDKGALVKLKKPVKWLKKSTFKNSDAIPLIVFGDGMKNKDTVAIKGHTSGATGVLQRELQLRSKTFGSVVVDINEFRTSKVSIVTVFKH

SEQ ID NO: 2741 - protein, 222 aa, Mucor plumbeus
MVNLNRKTESIDTRFRSRVCSNERSFCSGTSGQDSLIMFIGDRETCVGSTLKGHLRYGGRWKPKLHAVSSLVKFTNEHKASQTCMYCFSPIMHPLKNIKIKGKTISKTINRAFLCLNSRCVSAKNHRTVQSSDKTSALAIAVSGLSYMIFNETLPVFNPYTSQPNTRIFLRPLLSVKETEIGTAAMLLYRLIEFGKYRLIVLLHLPNIVIIILARFKISNPA

SEQ ID NO: 2742 - protein, 489 aa, Mucor plumbeus
MAREYCYEHLLGSNGNPKWPKQFDLVRIAHVNQITDIIQELKNRLLITPTTTNLTASPTKFLSVLGYIISELESICDNCTDPLDKPRNFSLVPTPSLRWKYISINCRSLATIVKKKSGTTYKENIEQFYSTFDFKKFGFENLEELLSPESKVRFMCSMMTDGFGACFVFARCKPKKETDPNVFDLEDFQADEVKEHFLPCALDPGRRQIFTATVAHSPEELEIRRCSGKERACYAGTNRRATYVERLKTQQNVKTIETNLPTAKTVNNEKFQERIRYLLVHLPRLFQFYSYKSAPFRFNDYQGRQRANAEMANILINGGKKYNKMKRKNTIKNRKQRKKKHKDKKITKDKGALSTFKDSDSIPLIVFGDGMKNKDTVAIKGHTSGATGALQRELQLSLTNTRPLTPSAPNDMTTADCYARIDQFLNNNASIKDFKIEDDNHGMGMISTADSYSPKQAINMRLSQSTIGNYLINNGFQCTSNNTSIYTRK

SEQ ID NO: 2743 - protein, 228 aa, Mucor plumbeus
MVYHDLVLEDFEYEEVERIYQPVFIDPGRKAVYTAAIGLDTSLTSIETNIPTQKICISILYGRFIQYIIIHQDKSFTFYGRQRAPEIMVNMLLNGDKKSNKWKPSKFEYGKSKVPLIVFGTGMVGKDSVKLRGLRHGVTGMFYRTLKKREKEGELLVVPIDEFKTSRICNICKTDTLYKASHTRGFGVLVCKTCKTLWQQDVNASKNMMSIASSIWNQDGRPTSFKRI

SEQ ID NO: 2744 - protein, 719 aa, Mucor plumbeus
MMSVQARNDKLQQLRMSREAKRQKVIADPNVRCINCKGTGHKTSRSPDCPRHILSKLEVMNQNLGTGFQSFTRKLPFDTCIKERYRSVLKDRILSASEDARQLLFRAQMFVNYFIILHSNENIPGCIYRQPFWYSICHLVNNRRVTNSSVLPPGMLDDWNNFRRQHPTILYKVDLASGNSQCLSEACLQVSVTYSNAVVETFKQRVMSYLYYLVQNIYMSMKPDQVKLIVKEYCYQYVCRGEPKWPASVALSDDLKLRIRNGCDSLRNHTTESISLKSLSASPGNYIRCFSYILSAYEEEHRNHSPFDVRRLPLPRLFSISPKPPCRCRFVNVSVNALSCFVKESLPRSYDNQLQMFHSVFDFTKLRFKDISQLRADGENTVLFNNLVRSDGFAVDFIFNRKKQESIIDGHDLTLEDFTYEEVEGVYRPAFIDPGRKAVFTAAVGLGDDHQVRICSIKEYYDLTGFTKYSIKLQRLKDERGITPIETDMPTTKTCRATVYLTYTTYMLLHRHTLFDFYGFQRAKDRFFLYQGRQKASQTMVNMLINGSSKYDRNQRNRRRKKRKRKFMRRQNKNKKKIHITTIAKRKWKPSKFRQDKAKIPLIVFGAGMFGKDLVKLKGNQCGVTGILWRALKKREKEGDLLVVTIDEFMTSRICNICHEDSLRKVDGVKGHSVLGCQNCKTLWQRDINAAKNMLLISSLTWNGSGRPEIFSPKARDLL

SEQ ID NO: 2745 - protein, 1117 aa, Mucor plumbeus
MNALEAQFNIRLSNSIKQCKSQGYDKLYEAFLNGTRLPKGVVINAAESIDVGAASIESFLRNECKKTKKKSVEYWTDYVRKNFITTKLSISNIEAGTSSTGNIRVDDDDDDDDDNSNDDVDEEEEDNDEDTGEYEEGTQYRACSASLRPVLRSDLSQQVQSLFASTINDNMQSVSDYLSDFSNQVFKMILIFNEYNFVLENHAVSLVAHEGNKISQVLPEGYLEKDASVAKPLDSKCLEDEEFKANYDKMFQDPHLELIHSTFYGAKGTQDSSLKTYPLNKAIVDVLGHDEVNLYKDLSSHVTKMARQLYYTNLHNMWSDKTIVNKLLTRLLRFLLIIHLCPDQDNGFKANKAKHQDKGKKATRRVTNCRIPEERISLLRMVRNGRRRLFANEEKKRTKYLQKGKELSASLCQRRLDTYRQVLEREREERDSGRKEKLEKKRGREGDNDDDVEDALVRDDINTEKTKDTPRRRIGQLLQVTRSALFQKQTVTRSYFEMELKNLDDKEFETIIKIVNFVKPYIPDKDNYHHFQYQLPFVLMANQVLRSIGYDGQVVKLMPIIQPTALHSFLIDTTTLYALFCSTQCRQRMFILDFKGNRIKQGLALANKDAVFSAFFNINQLKKITSSYGLEFVNRIHILPGLKTIRIYGALDYIQQHQKKPEAINKPIAQDKDEDDTLNALKSRRSILETLFKERRKELDQFILTAKSVRASKRDWKNKVADRDKYYREAEMTKLKKRELMVGIRDVRQDLQSLKRQIYEYRNPSTPLTSTTSPNPFIINSKPCHQKVEECMLDTDMNLDDLVFSGTDNGIIKTTETVYFDINRFTFHLELYNRFQILEDAMDTDDTYNLECMKLPLSLTIGPKEINQGSGLASYTKSIVQKKKSTIEGHAVLDEEEKLSNYSLHQCQTVGELQEAISHHCNAREKLRSFYYSNSQCKQRRRLELKKRIFYDKLAADERKSSSAKRPIMMIGDRGYGIGSRIKKHQRFGGHWKESRHGHYTPTLITNEYNSSQTCLFCYSKLSHPISIVAGKIKTINGSFVCLNQKCPNAFEVVCRDQVSALAIGLAGVAQLLFGVTFPCFDEKSNYTNRIKFNDSALDFLYRKQRMGSPLDGGNTL

SEQ ID NO: 2746 - protein, 270 aa, Mucor plumbeus
MFHRVFDFTKLRFKDISQLRADGEKTVLFNNLVRSDGFAVDFIFNRKKQESIIGGHDLTLEDFTYEEVEGVYRPAFIDPGRKAVFTAAVGPGDDHQVRRCSTKEYYDLTGSTKYSIKLQRLKDERDILCLISMVSKEPRTGSFSTKVTKRHLKPWRKWKPSKFRQDKTKVPLIVFGAGMFGKDLVKLKGNQCGVTGILWRALKKREKEDLLVVTIDEFMTSRICNICHEDSLRKVDGVKGHSVLGCQNCKTLWQRDINAAKNMLLISSLI

SEQ ID NO: 2747 - protein, 1336 aa, Mucor circinatus
MSSSTTQKQPAAIIIEEGSVSLGKRKRQTTSKDDKEILRNLVKEVLQQKLSNIISDNIKKYNEEEMVVFLETKKTCPQGSLEMVSNLAKTNHNIHPTPKQISNGLASLGGTKQLWEQVKKDHSKRLYKEHKNKALSQQQQQQEEQQPPENNENEANSIGDDEDRLRMTSLVAIVSVLRDDIPNDLVYNSLKQAAMDATTAVSNVSALVRMTLLSLAHHNISIIERDDVQLKKEKSGFDITKILPKSFAIRNREPLDNINKIMVAPPNLSLKEQLDKLYKPNTRAKDLQELYTNVHLQFIQSHHLGNKKDNNNDTIHPLWGDLVFKKCDLQQQTWSETNIYAKAQRYLIRILLRIHLAPEREQRTIERAKAIIQKTKEEKQEQSSTSQPQQISRKQIKSKIQHECHQMAKHIRHGKLHEDDEHKYAMRVQSCIKRLDKLASILKDLEEGKSGIGTKAEKDKDIERVATNLGPGDLVEMWEGEIEEEEEEEEGQNVMEKGTTSTNIISSAGRGSRSKGKSVAPTPEEKVKEASATRIRKLEGLIKALLRNPKIARTGSVSDNEVLKASHDKSLKSDEIVVVKLITDQLLPYAPHSDSMCLLTQLPFILLANSILIAVGYHDHVQEISPIVAPHKIHTIPINPAIMYETLTPHKDGIPQGPFEVTPVGTDKAITSSYAARKNGDPMWWSFFDKEKVISLCNRHKLLFANRMVVRPDKTVSILGLIKDDHVPVVSEYETRQKKNCKKKKKKKRKGAYVAKEHIGKSLQELQQQLDHIEDMINKMTAARDILKTQFRETNEECNRTKTERLKSRGSIKRLLSQKLKGQVYAKRKKSHLLKLVQRYIKDWRSSKYNLNKAIENHGTIGDLSVDVPPTKPTPERMQHEDVTANIDISGLHLKKVAYGATDYGHVVLAQTIPLTNDDVQFHVHLYNQQQEYEQQQLEQIEDLVNLEKAEFIGDSEEKQEVDFFSSQLQQQQESDNNNNNNVQEQLQKHQLEETDQTLQQREQSDRHCFWVIQTCTDHDSIRLTDQPLSNQQIEQLRNKLTNEIKFTKKEYSIDDLKLSKPFSITHEQVDEESFNRKFNRRRSKKNKKVVAAEELLNKNSFNGIMEPSEILKRQKNRLSVKNTLRDFYYSPSAMNERRHQTVKNKLVYFKLARAEHRYVKKVAADKLYLKKKEVTVMMLIGLAGMGFNTFLKGRPRRGGKKFRGAHYHSTAVGLQNEHRSSQTCAFCFSPLELLPSNIVKNGKKKKTSHGALICTNPDCPAVKAGYTTFNRDSVGATGIGLAGTTTLLSPDSIPLPPYNPSPTTTTSSTTTSKFQLDEKFSLVSPSLRSYGMYIK

SEQ ID NO: 2748 - protein, 315 aa, Mucor circinatus
MRHHPDEDVVLPIQSVYDMLMQNPATVSSADQFRQYIYTLSAAHNDIHVRFNCHFYHRETLLKLFSARKSALENLANRLIGLDQPEDAPLPFFNSTSKEERKQHRRQFRRPRRPHPGYSFEDHTIVGYGDGRFKSSMKTYEPLPVETFRAVLARRTLVVLEDEYRTSVVCSYDDSRTRMFRAADGSVQVCREHRKRRIRRIHENGNNSRRQCWCLDDEKDNLVPTSQCDNAQDAVGFRRNVYALKFCDECDLLLDRDINGARNIGRILLAYIESNGDVNSRPLALSRGNNRRALVDVNDDEFDQDEEQQDIEVLE

SEQ ID NO: 2749 - protein, 882 aa, Mucor circinatus
MEKIKERVSVPDIENFVHNQPFKDALVNTTTAITNMWSRKRLTHDLRVLIRVLLRVRLRPEKFSRYIEYRTSKKKAKNDGDNDDAKSKNDQDSSNVKNDRTWYSKNKFICDELGEKLQSTDPNKQAIAMKLFQRLVVSNNPTDNTSTTVSVSNIDQGDDLEDIEDLDFDDDDEDEQEHTNLLVKSDENNSSSSPKATELQNEKKESTSRTIRSLVAVVTTLVKSSDTGHEIEASDVKKLVYSSSTIGDHELAAAAEVINLLRPYVPKSSKGQDPDCSMFTLAPLAFITITVLRAVGLPKQAWEMSHKAEDVIALPLSARALYELFSNYYTIYHRDETPITSHAEAGKNQKETIGGFFDIQIIDKICKKHHLQPLWSMKFVNRYTIQWLSYKVISSSNAASPTQSTDTKRRQQKKSLNDNEKEQLQEEISKVKTEVNDLRKELKPANKNHAEACKERMTRRVAHNNSWKRIKSLRAAGVLPDTELFEIKETQWNAVKDSKKKADECRDEAYKVSNELRCKNSQLYQLEKQLHGQSLPPLKPLVDKSLLKEFDLHDPKTFISSSDPGLVVTTCTIGTTSKQYLDVINNYKNLYTLLECEDTSYEMDIDAEEEGNMDVPGSSNIIVAPSQSSILSPASSSASLLSLPYLLKRVTNNTPQSMDSKTLSKKNRWKRERKKRKKEEISRDSLNRDQKTRSLLDKLAHKKLVAKIRREMVNGVKNAKVIHSFGAWKLRNSPIKGHRRRSSKKVQAAAKQCEHDKVIEVDEYLSSTVCPYCFQRLSNHIYRRNDKLVKVNGAKTCNNPHCPSRTTNSTTMTRDAIGAFNIGLITISSLLSTTGEPIFPFSRTSSKNIKYTRQDLDNIFNTAMPPSDGSVQHRHEVRLGSN

SEQ ID NO: 2750 - protein, 431 aa, Mucor circinatus
MGDFVKYTKDYIHHKLQRAETHQDILTINSTKKQQTLLFDALENNALETLKQDVARSVHSTEEASSFIVDLGKSAVIDLPNLVTIKRSKHATDLRKMFENDHQISRYTIRMLRTNGVCLQAVMTDWAHPRRKLQHRQFKYLPEIRKFAFRKCEELGQHDSNLLDEYEGVFGINLGETWTAGAFYLPTDTEHQPGVQHTIRRDELYGREPINRKWLENRNEQTSVHNIQRDLAKSGGSKTSNVDTKMSMRSEIDKACERIINMADASRQRAIEEGALSELSTRKNKFLIGMGLDRMDTGNRKGAKSGLAQQFADKLYDHAKARQEPVQIDLSRIDEYCSSKLCCHCFMEGEIMYVEYLRRSPAPSRQFYKDNLDNQGKEKVIRILVCENCHKKFHRDRSAGSVQASIATSSILEHGQRPQAVIRKSRRINSQ

SEQ ID NO: 2751 - protein, 1280 aa, Mucor circinatus
MSSSTTQKQPAAIIIEEGSLSLGKRKRQTTSKDDKEILRDLVKEVLQQKLSNIISDKIKKYNEEEMVVFLETKKTCPQGSLEMVSNLAKTNHNIHRTAKQISKALARLGGTKQLWEQVKKDHSKRLYKEHKDKDRLRMTSPVAIVSILRDDIPNDLVYNSLKQAAMDATTAVSNVSALVRMTLLSLAHHNISIIERDDVQLKKEKSGFDITKILPKSFAIRDREPLNNSNKIMVAHPNLSLKDQLNKLYKPNTRAKDLQEICTNVHLQYIQSHHLGNKKDNSNDTIHPLWSDLIFKKSNLPSTADGSSITTAAAIKEFNTNLQNMWSRTNIYAKSQRYLIRILLRVHLAPEREQKTTSKIQHECHQMAKHIRHGKLYKDDEHKYATRVQSCMKRLDKLASILKDLEAGKSAIDAKTEKDKNIDCVASNLGPGDLVEMWEDEIEEEEEEVVEEVEEGQNLMKKVKEASATRIRKLEGLIKALLRDPKINRTGNVSDNEVLKAFHDKSLKSDEVAVVKLITNQLLPYSPHSDSICLLTQLPFVLLANSILIAVGYHDHVQEISPIVSPHKIHAILINSAIMYETLTPHKDGIPQGPFEVTPVGTDDAITSSYAARKNGDPMWGSFFDKEKVVSLCNRHKLIFANRMVVRPDRTVSILGLIKDGYIPVVSEYETRQKKNRKKKKKKKNKGIHVAKEYVGKSLQQLQQQLDHIEDMINKMTAALDILKTQSREATEEWNRTKTERLKSRGTIKRLLSQKLKGQVYAKRKKSHLLKLARRYIKDWRSSKYYLNKAIENHGTTGDLPIDVPSTKPTPERMQHEDVTANIDVSGLNLKKVAYGATDYGHVVLAQTIPLTNDDVQFHVHLYNQQQEHQQQQFEQIEGLVNYEKAEIIDASEEKQEVDFISSQLQQQESDNNNNNIQKQLQEHQLKETDQTLQQRQQSDRHCFWAIRTCADHDSIRLTDQPLSNQQIEQLRNKLTNEIKFTKKEYYIDDLKLSKPFSITHEQVDEESFNRKFNRRRSKKNKKVVAAEELLNKNSFNGIMGPSEILKRQKNRLSVKNTLRDFYYSPSAMNERRHQTIRNNLVYSKLARAERHYVKKVAADKLHLKKKEVTVMMLIGLAGMGFNTFLKGRPRRGGKKFRGAHYHSTTVGLQNEHRSSQTCVFCFSPLKLLPSNIVKNGKKKKTSHGALVCTNPDCLAVKAGYTTFNRDSVGATGIGLAATTTSKFQLDEKFSLISPSLRSHGASQTSTVIHGPFKSNYIFPFPQFIPQESYKRQNYVNQRF

SEQ ID NO: 2752 - protein, 1647 aa, Mucor circinatus
MGVKNIHNTLKSKNVFNSNDNLKQYLDSNNVTHVFIDLCQSFFWVLRKRAVDLLKPQFENVAGGIVTDIISCCLNLYFNPVTSQPMPRSIVLAVDGESLPIKSETHNKRDQFATSKFREAQELYKSRGIKNKDFITAAKSAVRFTSEIKTAIIEILKKTYQTFDPLANFLPAIYYYQAPYESDGMIIKLASMLPSPQNQTAIISSDSDLLVYKGCLDVMRIMEIKWGAPSIGSIISTTKLCTKQGILQKLHLKHQDDSTFDMAEKRLMILASASGNDYAKNIYGISFAKLRTQMLNLMESEGKDGLGTHPDEMLASLLSIYNRVSDKTKFDMQCALYTYCVFTTGPPQQNDDRVPSSSSTTFELKEHFTTVLDKLRTTFYSTQRDTEQQQQDQQQLQLQHQQHQQQQQQQEQQQEHHHHHHHQETQRQKEAQKEEQNKEAQKEKEKEKEKEKEKGKQKESPSASESVHWQLRSFEGRSSSVRVAPLTSSGNCRLRLGSSAVESSSSVASSSDQGPEAQPYCSSAITSGSPREPALTNIPSNGKKAGRYIFIRDVQRIPMDATVPEYKGDLSKRQQRRTSPSAKRQKTKQKGKGKAINTQDNKNKNDDDDDDDGEEERLSTARTTAAIYHGPAKTIYYRKPGATEETKVVQISRTMKTWTCGLNSSVLAKACQRYAPFDRPSQQSQLVGQPSSSSSTIADAHEASTTAVSGIKNPKAQIVNPTAVHQGNLLTCVIYHEVSQLSLVRQIAMLIGNMIVRYALELNESSKTKVYRSFFSTSSVKIWKWIIYCATNYRPSGYDKNNSTVHYDRATIDQYNIQNLPTNPLAFVAYPGDEKTIKGLSYIMRENTELRSIILYVRQLWFSGYNDQNIPWLPSSWLRREVLDAIAEDIDIHFRQTLVSHFVDNFSKYITVRLKEQAQVALDWPSDDKFRRYVLRRWQKEPLDPTDHQVEKNLKDKGDVINNSVQNWIKSTWARIRRTGKKATMVLVDQELERKAKVPRGWTTEEGFSEYLTTQIWEIPLEVDARHSSMINIEKCKEASAALRKTTRKVQTDVDAFIKQEKNKWQQFVGRPIGTRASQVDINSNQAPVDLFDCFGMKRVNQPTAGSRRQRDANSDEASNQGQDDNDSQDEVGSTEHAYILTSILARILEDYPEKISFSICPTAPSKNVFIPLYGSYTRNILTHMGDFVKYTKDYIHHKLQRAETHQGILTINSTKKQQTLLFDALENNALETLKQDIARSVHSTEEALSFIVDLGKSAVIDLPNLVNIKRSKHATDLRKMLENERQIPRYTIRMLRTNGVCLQAVMTDWGRPRRKLQQRQFKYLPEIRKFAFRKCEELGQHDANLLDEYEGVFGIDLGETWTAGAFYLPTDTEHQPGVQHTIRRDELYGREPINRKWLENRNEQTSVHNIQCDLAKSGGSKTSNLAKLLTFIRTWQAEDRGFRLHDAHSSKAELHRSWDTKMSMRSEIDKACERIINMADASRQRAIEEDALSELSTRKNKFLIGMGLDGMDEGNRKGAKSGLAQQFADKLYDHAKARQDPVQIDLSRIDEYCSSKLCCHCFMEGEIMYVEYLRRPPAPSRQVNKDKLDNQGKEKVIRVLVCENCHKKFHRDGSAGNVQASIAASILEHGQRPQAVIRKSRRINSQ

SEQ ID NO: 2753 - protein, 717 aa, Mucor circinatus
MFEAEVQNLDDDDNNNDDDGDHTFEEELVYKESQKSSSAEQESLSIETSSSTVATSSLSIPSTPTTDVSRTTIRCLEAVITMMSMSSKIDQRVTANDVRKAIYSSTKIPEQACEVASCIIKFIRPFVPKKKNDNSDPNVTVFNLAPFVFLSNKILEAVKLDKQTIAMYPVLQEKQSLHLSARGIYEIFRESHEMYGSDEAVVRDRMHAGRHRLAVLSIFFNMTSIQRILEEHRLRFHLILEYVNKLQICWIGYRITKKQKSSSSSSSKVRNDDDDDDGDKEELQKEIKKLSQEVSRLASLYTKENKILASHVSERMVKSSPYNTLMKKMSREKKKPIENQDKQWLSNVEEEKNVLSKALKEARKKVDDQWLKVSSTHSNLREKRSYLYYLNKKNKNQTIPGLKKLLSTDDLKKFKILVSDPKGTCITGTDPGIVTTTTTTGKTLAEYYTDINRHIALYALPDTDIGTDTEDDDVVMEGVEETSSSSKNVSNITKLVKPVNNSPRWMNSITHSSKHARYRERKKRKKENVKSEKLERDRKTRELRTRKAHERLAAKIRTSFGSSKMSFFHVVGSWVPRNSPIKGHARRSSRKVVEALDKPQGDHVVKVDEFLSSTICPYCFARLTCQTYKRDGKIRISNGSKCCSNPLCPSRSKHWTTMNRDGVGSHNIGLNGVCGILAKDGLALPPLRRSAPQVPRKQENNLKKIFISQLHQLVQGN

SEQ ID NO: 2754 - protein, 271 aa, Mucor saturninus
MNKNIFQTEEQELKKSLGIDQIETNIPLPKTTSHDTYILYITYILQHIDTLFNFYGFRNTNSRWCNYIASQKSIEDAVNILLNGSTKYNKQRRKNKKKSKKRRRSKIVDSLKSKPKIIKREHKEKFEEGDRNKMPLIIFGDGLKNKSQTKFKGLRSGVTDKLYRQLKRREKLGELLLVDINEFKTSKTCNSCLSNDLKNMRCGADEKSSHIHQILICKRCNIFWNRDVMAAKNMLAISQSIWDGQGRPTVFKSLNATSNVVTSSHSSEKKV

SEQ ID NO: 2755 - protein, 438 aa, Mucor saturninus
MTFGFSFYYSNRYNLQFVGLKKSINKDMQKTPIINQEQPCLVIDNSQIEKEIKQPNDAIKIQKKEYAALGKSIQVEEWNRMNLGRSFRAKEKSNHPWDTKLYKQLKEKRSDCDNIYSQLRKLNSSLKDLRYRMFALNKARHRQSLPISTNSLQIPDKMKADLKNNRLLIQGVDPGIVTTAAISCVKSSTLFESLNRFQMLENHEPCTIPISNQKGYEYDYTANKINQAVLSNTHRLQREKKKKYDIEKNRLTRKIRLNTYHKKHYSATKRDIFSYHGWKQGSILFFVGNWSGKGAYIRGHTRRSMKPILNRFNSVANDHIAVVDEFKSTITCSSCFEVTTKQVVRVGEKRVKRIKGAVTCTNHNCPRRLSPTRRTTVNRDMNGTINIALIGFSCVVSNNSLPLPPFRRGIYNANKFNLSHHYQCASLATLESPVVPET

SEQ ID NO: 2756 - protein, 256 aa, Mucor saturninus
MNGVVNRQKQEIERKKSNNIEHIETRIPSPKTTGAENYKRHITYMFQHFEALVTFYDFQTARIRRSNYIGNQKATDHAINILINGSTKYNKNRRKNTRRNKGKRRKLNSRYTRDLSNTKQSKKGKQAARAFKKKFEEGDKSKMPMIIFGDGLKNKSHVQIKGLRHGVIDKLYRQLKRRENLGELLLLDIDEYNTSKTCNGCLVKNLENLKYGGHKIHQILNCNNCHIFWNRDVLASKSMFTIATPIWSGNGSPSVF

SEQ ID NO: 2757 - protein, 288 aa, Mucor saturninus
MFIIRIESLLPTGTNKKMFANMVRSDGFAVDFIFYKEKTYSEHINQVDLILDDFEFNEHEEHYLPITIDPGKKAFFTAFAGSSNDTSDFRKCSIKEYYHITESNIPTSKTPHESVYIEYVNYMLENIARIFSFYNHETAKDIFFLYQGRQRAPEQMVNMLLRDTKKYQTKTRTQGKKQTNFEKYKTKVPLIVFGNGMSRKDHVKIKNIRTGVTGGLFRKSKSKERTGNLLVVDIDEFLTSHAQNVRVELWVVLASPVIVFSFARRALNMMKIARSVWNGDGRPEPFRR

SEQ ID NO: 2758 - protein, 364 aa, Mucor saturninus
VEINAYNALRPVLDSYGTSYSFKKHSIYYDAKAQHENHFMAFVQLARLFETVGLSLFCMENKIKLDYWKQVVDPNAKPFKAQEENKLLRFYGTIQIDGVGVTVLKKRIDRQSSYTSIMKEADEKFKYISDLSTQEHKAVNGRCVAIDPGRRDLLFCVDKKSTVETSIKFRYTKHDQDKTRKFKKYRNILQAMKSNNSALHQAENFLAENQSSSLEMEGYRRFLERIGQNYAVLDNFYGYTTTSSQNPQFMLRKLRLAAYFNKQRADMQLINSLKQKFGKDAILVLGNWSAPNARYHGPIRGIGLRRLLLRNHLSLLLIDKFNMSRCCPSCHNMSLKKFKQIDNPRLYQRSNYPLTLCHGLLRCC

SEQ ID NO: 2759 - protein, 202 aa, Mucor saturninus
MQSVLWQYIYITNLRFFPQPQNFSNDRIVNPQFYAAYLEMMLSQKHISQRFDDDEKRRIIALGLEINRRPNQSDLNRKTLSTVLENLQLLPFRKMKFSLKMFYEQNDQKLVQNLKRKFGPDAVLVLGNWSAPNTKFQEPTRNKGLIQMLKKNGLTVYLIDEFKTFSHCPDCGDVLEQFKMIFNPRPFRRNTMPIVKCHGLLR

SEQ ID NO: 2760 - protein, 500 aa, Mucor saturninus
MRFSQHLRQSINVLLNVKQRKAEVKQALLEQGVDPKIIEDLIFQDVTQTAKNFKMAITTRPTNMTLLPQNSQVEINAYNALRPVSDSYGTSNSFKKRSIYYDAKAQPVNHFMAFVQLARLFETLGLSPFRCFPLRRSWFLGYVQIDSKILCQNILNIRWSNNIDKLDYGKQVVDLNAKPFKAQKENKLLRFCGTIQTDSVGVTVLKKRIDRQSSYTSTIKEADKKFKYISDLNTEEHKAVNETPIKFRYTKQDQDKTRKSKKYRNILQAMKSNNPAVYQAENVLAENQSSSLEMEVYRRFLERLGQNYTVLDNFYGYTTMSSQNPQFMLRKLRLAAYFNKQRADMQLINSLKQKFGKDAIFVLGNWSAPNALYHEPTRGIGLRRLLLRNHLSLLLIDEFNTSRCCPSCHILSLKKFKQIDNPRPYQRSNYSLTLCHGLLRCTNQTCMTKMQTQGFQYKLWNRDLAACLNMISIILNLRNWSNPRTICTSCPLKKRPQMGK

SEQ ID NO: 2761 - protein, 435 aa, Mucor saturninus
MCTINSSEFELSFVQPSRAHKNSSEFDLQDNTFERASTGTRSKLAREFRSSFRTLDPIYNNALETLRSVLTSHPVDYQFRGNSIYYDPKARLLVEHRRAFDELVISFIYIELPVFNCFPLRRSWARCYTTIDSKILCQNILGRRWTNRQDKIAIWRERLLKKLLEDVLRWILDEEICYSVCMKTQPQTIQTSFALPNQDNFEKIKKYRRIREAVKLARVAAAERLLINYDSLNRDEFEQYIANRSNRTDIIQYYVNFLTNHRTAHPLHRKLRLSAYIRRQQGNEDLISKLDIQFGVEAIYVMAGKRVCLIDEFRTSQCCPTCEIRSLETFRMVDNPRPHRRREDPRVIRHGLLRIVPRLWNCDMTACLNMVDIVRSFRAGNGIPPQGFDVERFPRTNGEKQEPKMNKQTLEMFVNVVTRIFQACYRRSTIDTLKW

SEQ ID NO: 2762 - protein, 313 aa, Mucor saturninus
MFSDEQKYISDSSEKMVQINPGKPQDTVQSGEKKKKDDNAKHFVLPRIFSLFPNPGLQWRFIKIDSQNVTGIFPGSKLKKEIDETLFSFTQRYFYDCFNFAKSKIRSIKDLKELPATNGKMFLKGMYTDGYTCRLLFCRRTEPSSLNKSIALELDDFNTEEVNTYFRPCTVDPGRKDVFVSYHGDNDMRRLSSKEYYNMGGLTQRHKQEQELKKSLGIDQIETNIPSSKPKINKREHKENFEEGDRNKMPLIIFGDGLKNKSQVKFKGLRSGVTDKLYRQLKRREKLGELLLVDINEFKTSKVSIVMYINTFD

SEQ ID NO: 2763 - protein, 761 aa, Mucor saturninus
MNQPAGENRGLKRKETFEAKKEKSVAKRNRSSASSSSSTLICKSCDTSGHSSARSKLCPNHNYTLQELIEKDIGAKYQRYTLSLPLKGFLNETDDDDDRLQKAVNKIQDLSSFLRLVLFKAQIFVNDYILQYPNNLSNEFFQQNFWHSLYRVVCKQLSIRDFQLKYANIHHLEDAWMELNNLEGVNLNVEKDGLKNYGQVLATACETTATCYNNYYIENFQKIICNYFIYMISKEFPDVKKSVIRKLVYEHVLDQVLSSDPVAVLNDDSIPPLSQETKNGLQAFINPLIVELKNRLPSFTITKATQNTAPFEPGKSQDTVQSGEKKKKDDKAKHFVLPRIFSLFPNPGLQWRFIKIDSQNVTGIFPGSKLKKEKDETLFCFTQRYFYDCFNFAKLKIRSLKDLKELPATNGKMFLNGMYTDGYTCRLLFCRRTEPPSLIKSIALELDDFNTEEVNTYFRPCTIDPGRKDVFVSYHGDNDVRRLSSKEYYNMGGVTQRHKQEQELKKSLGIDQIETNIPSPKTTSHDTYILYITYILQHIDTLFNFYGFGTTNCRWCNYIASQKNIEDAVNILLNGSTKYNKKRRKNKKSKKRRRSKIVDSLKSKPKIIKREHKEKFEKGDRNKMPLIIFRDGLKNKSQTKFKGLRSGVTDKLYRQLKRREKLGELLLVDINEFKTSKTCNSCFGNDLKNMRCSTDEKSSHIHQILICKRCNIFWNRDVMAAKNMLAISQSIWDGQGRPTVFKRLNTTSNVVTSSHSSEEKV

SEQ ID NO: 2764 - protein, 696 aa, Mucor saturninus
MDSDRSLSSTPGTPGSNMSTSSSLTPGDRIISVKSSIDGIGWDPERRERLEEYVVTVHNITTHAYSLSKCIFLRAIQEDENFDIRRCINRDFFAEVWLKLTRYARGRAGGRTAATRAFIDTYLDDYLEVTGFVPPDFRYGQQASLIEGAKIFTSYSNNVQMRLGSHLRQAVNHLLRIRQRKAELIAYRRREGLIDALIKSEVYREITEPATRFKELIARRLPQDFVLDGEQFGDPIYNNALETLRPVLTSYPVDYRFRGNSIYYDSKGRPVEHMRAFYELALSFIDIELPVFNCFPLRRSWTPCYTTIDSKILCQNILGRRWTNRQDKIALWREVINLNSDALKHQENGELQFRGTIQTDGVGVTVIKKRMDRESRYTARFAVVVESIQYISQEIAQETVGRCVTIDPGRRDLLFCVHENSTANNPNKFRFTKQYQDKFEKIKKYRRIREAVKPARVAAAERLLVNYDSLNRDEFEQYLENRSNMTGIIQNHYVNFRTNHRTAHPLHRKLRLSAYIRRQQGNEDLISKLDEQFGVEAVYVMGNWSSPNTRFHEPVRGLGFRRLLQKAGKRVYLIDEFRTSQCCPACERRSLETFRMVDNPRPHRRRANPRVIRHGLLRCTNQNCRAMTNNTNRIVPRLWNRDMAACLNMVDIVRSLRAGNGIPPRFRRGGAPQNQRRRARTQNEQANIRNVRQRRN

SEQ ID NO: 2765 - protein, 821 aa, Mucor saturninus
MRPRIYPDTEDFMNAKITAKLAKMGEETSTSTMNQPAGGNRGLKRKETFEAKKEKSVAKRNRSSASSSSSTLICKSCDTSGHSSARSKLCPNHNYTLQELIEKDIGAKNQRYTISLPLKGFLNETDDDDDRLQKAVNKIQDLSSFLRLVLFKAQIFVNDYILQYPNNLSNEFFQQNFWYSLCRVVCKQLSIRDLQLKYANIHHLEDAWMELNNLEGVNLNVEKDGLKNYGQVLATACETTATCYNNYYIENFQNIICNYFIYMICKEFPDIKRSVIRKLVYEHVLDQVLSSDPVAVLNDDILPPLSQETKNGLQTFINPLIVELKNRLPSFTITKATQNTAPFGILPALRHILSKYESIIAENSTLQKRHSETGKPQDTVQSGEKKKNDDKVKHFVLPRIFSLFPNPGLQWCFIKIDSQNVTGIFPGSKLKKEKDETLFCFTQRYFYDCFNFAKLKIRSLKDLKELSATNGKMFLNGMYTDGYTCRLLFCRRTEPSSLIKSIALELDDFNTEEVNTYFRPCTIDPGRKDVFVSYHGDNDVRRLSSKEYYNMGGVTQRHKQEQELKKSLGIDQIETNIPSPKTMSHDTYILYITYILQHIDTLFSFYGFRTTNSRWCNYIASQKSIEDAVNILLNGSTKYNKKRRKNKKKSKKRRRSKIVDSLKSKPKIIKREHKEKFEEGDRNKMPLIIFGDGLKNKSQTKFKGLRSGVTDKLYRQLKRREKLGELLLVDINEFKTSKTCNSCFSNDLKNMRCGTDEKSSHIHQILICKRCNIFWNRDVMAAKNMLAISQSIWDGQGRPTVFKRLNAASNVVTSSHSSEEK

SEQ ID NO: 2766 - protein, 1311 aa, Mucor saturninus
MKRKAQVDDERNVRQKPRPLLLEYSHGESSSTEGSSDGDVPLEFYCLDSNIASFTSSTSDNTRLSELLETAVSNFEVPFNDNKSRLRNYFFSHQLKIIPNAGQLAFNNNLTTDVVPTVQQLVKILNNGADNPFIIKSKKYDGKIVVPKGNLLLYACSRIYNCRIYLFSSRAKPKVIHPPSNSQLEKDNIPNIAVFKHCDSFSTEWFALRVCLKPGAHTKKPINVVNTIISPAAEKRQIGEKKPRQAYTKIGNDLDDEILRLLEEEVKFMYEKKWSSFKAKQKNKPNMIENFSESLSRKSLPTGAANIIQAKLEQKIKSNHFADFTESDIPPSGVWVQQKINRLKKQNKFTIEGFVNNFIANITEHQQSLELKAESSSSNSFSSLNSDQTDAEILIDTEDSAEKDYRTVSRSLKRVIHKDFHYNSFLSHMEELQKECSLCAHGLSQAAGLFTESVISGAIFPTKPESYFDYSCIGLTELTAHVGQEQIAILNRKEKEFLHKSNTFTYLGFWRILSNCVGGKSSSKSQHAVITFIKNNLEDQYKHNFVSNSTIAYACHQYYINFTNLWTFQKYMQDLKAVITLTIRANLCRQRFFSKSSTVSPKAPSPNRGSSVKKKTNRLFLMNELFDCLLIHNQHKKSGKLFVIEKLVEKLFQSADTATNVEKAVTGMNPPSLDVRMFSFEYESELEDEEDLVVTSSSNFDDVKAVTLDYAQKDLTAKEVRALSAVCIMLIQSWNTEKEVDADNIFEKLYCNSQESIPRTALLFCAKLVNGLIKMRCKKEEECLGSFFGMRKLRNSVVAFAKEHNTRNRMGIYSLHPTTQKKVSIRLDSKSLYLLFAKSYNIHKSENTYFTNYMNISTENDKRLIFANFFDISYVERILKEQKLHPTFSFIFSNKHSLQFLGIKNTLESSSKLSSDTRPEMEKAPKNNDSLDDHVNLKETIRSLNEEIKESKKRQAHLSRSLLPLEKSRMDQARNFRKEEKVKNKWNKDKYNELKETRAKCDKVYTELKSIRAAISNSQVEMYRLNKLFHKQPPPAIINKSSASDEDVACLAKGKIAVQGIDPGVVTTASFKGVTSSLLFESINRYTALKNIEPIKSVAKEKQISLDFTAKIVNHATFSTKHSQERQRRDKLDMNYLEKKKVFRKIRSKDNNIMWSFLGNWSGVTTYMIGHTRRSIKPIIAELQKIEKDKLMIVDEYKSTITCTSCFEPTTKQVLRRGESIKRIKGAVVCVNKNCPRRVYNKSTTSNRDQNGALNIALIGFSALVSDDGLTLPPFRRGVHDPNKFNLSENLMQARIAMQRSPGEPVTNFSL

SEQ ID NO: 2767 - protein, 304 aa, Mucor saturninus
REVINLNSDALKHQENGELQFRGTIQTDGVGVTVIKKRMDRESRHTARFAVVIEPTQYISQEIAQETVGRYVTINPGRRDLLFCVHKNSTVNNPNKICEAVKPATRVAAAERLLVNYDSLNRDEFEQYLANRRQQGNEVLISKLDEHFVVEAVYVMNNWSSPNTRFHEPVRDLGFGRLLQKAGKRVYLIDEFRTSQCCPACKRGSLETFWMVGNPRPHRRRANPRVIRHGLLRVMTNNTNRIVPRLLNRDMAACLNMVDIVRPLRAGNGIPPRFRRGEVPQNQRRRAITQNKQENIRNVLQRRN

SEQ ID NO: 2768 - protein, 996 aa, Mucor saturninus
MHKSENTYFKNYLDISTKNIERAEITSNLFFHNFKSARAELEEAPKNNDGLNDIANLKEAVRNLNVGIKESKAKQARLSRLLLPLEKLRMDQARNFRIEERGKDKWDEEKYNDLKEARANCDKIYSELKSVRATISNNQTEMYRLNKILHKKPQSADNINKEVISDEDIKSLAKGEIAVQGIDPGVVTTASFKGASISLLFERKGNNNVVWSFLGNWSGITTFMKGHTRRGLKPVITELQKTEKDKFMVVDEYKSNVTCTSCFETTTKQVVRRGNTIKRIKGAVVCVNKNCPRRMHNKSTTSNRDQNGALNIALIGFSALVSEDGLTVPPFRRGVNNPNQFNLPNNLMQARLAMQGSPGEPFKFSLFFVSMYYFNNNDNSSSEHHSQHNHDGPLFSQPLDPSTLSGPLADYDNIITDPLFDSNHNWDFYSQQHLDPQQEAILLNDPNFLRQHQLLHDQQKELHSRLLHDDERPEQVSNLTAMFEPIVVKIEQEEDQDKKSKRINHRRQQVVMKTTINDDDKVDHQRRFNELQARFRVNYARKPSVQQTSNNMKPASSKTPKQSLLPQQQALQDKPSLSLEPTTTTATVNAANHTTTTASATTAANAAVSVSSQVMTDEELSSSFPSRTMPIQIQRVPRLNSLQPFDAESHQKQLDNQLDKVDFDDITVSELKEMLRQRGKPATGKKAVLLQRLQEERDLSKGGRSAGSYGSTGSGGRLLSNRHSQPVPFSRSINIDTPQRPRSFQSSSPVMIHNPDISSPIHTISPSSPGASLHRSIANMHIGSPPAISRRYSPYSPRLSSSPKPVHHEYSSSVPLTMGESPNNNTLTTPNNTTNNNNNINSNNYNNNNMMLSSSYSVRSSCRYYNNPKTYKPFMSSALATPDREEDVNPFDSFYARGSGDAPIKEEDTSEFSNYYGDAGTRPVHEGEMHSFGPGEPVEGNMDWIDPTAFENILQQQVSHDQLLSNDQIMAMINTQQQAFDFRLDDSNFSHPYYHQ

SEQ ID NO: 2769 - protein, 803 aa, Mucor saturninus
MRPRIYPDTEEFIDAKITAKLAKMGDETSTSTMNQPVGGNRGLKRKETFEAEKEKSVAKRNRSTASSSSSTLICKSCDTSGHSSARSKLCPNHNYTLQKLIEKDIGAKYQRYTISLPLKGFLNETDDDDDRLQKAVNKIQDLSSFLRLVLFKAQIFVNDYILQYPNNLSNEFFQQNFWYSLCRVVCKQLSIKDFQLKYATIHYLEDAWMELNNLEGVNLNVEKDGLKNYGQVLATACETTGTCYNNYYIENFQNIICNYFNYMICKEFPDLKKSVIRKLVYEHVLNQVLSSDPVAVLNYDILPPLIQETKNGLQAFINPLIVELKNRLPSFTITKATQNTAPFGILPALRHILSKYESIIAENSTLQKRDSEPGKSQDTVQSGEKKKKDDNAKHFVLPKIFSLFPNPGLRWRFIKIDSQNVTGVFPGSKLKKEKDETLFSFTQRYFYDCFNFAKLKIRSLKDLKELPATHGKMFLNGMYTDELDDFNTEELKTYFRPCTVDPGRKDVFVSYHGDNDVRRLSSKEYCNMGGVTQRHKQEQELKKSLGIDQIETNIPSPKTTSHDAYILYITYILQHIDTLFNFYGFRTTNSRWCNYIASQKSIEDAVNILINGSTKYNKKRRKNKKKSKKRRRSRIVDSLKSKPKIIKREHKEKFEGGDRNKMPLIIFGDGLKNKSQTKFKGLRSGVMDKLYRQLKRREKLGELLLVNINEFKTSKVSILMYINTFDNDLKNMRCGTDEKSSHIHQILICKRCNIFWNRDVMAAKNMLAISQSIWDGQGRPTVFKRLNATSNVVTSSHSSEEKV

SEQ ID NO: 2770 - protein, 591 aa, Mucor saturninus
MTIKSSVNGVGWRPFYVSILKKLVQKVHIIVTHTYSFTRYIFIQELNLNLEEYAVQGFYKEVFISLLDAKVRNNDKLSSKVKKYRDMINKYKTSYFRDASLTPIKLANAQQIASYEATKIQTAYNNAVALQFGNKLRMVINRLIGLKHRISQLTSDLKKQGCSEEEIKAKVKSNIMEPATQLKLAISSRNINTVPKEFLDQKAMKHVMDIFSAYPETYKFKKDSIYYDAVVNPKKHLVAFCKLAEICESNKFKSFQSFPLRKTFIPSYITIDTMILNNHILQDSKRSKLDKTYIWGKVLNLSSKPFKGQGPNNSIQFRGTIMTDGIGISIVKQNFDTSKGGTGNIKTRLVDEEFKYIEQIPKDELLATTQKCVFIDPGRRDLLYCMHENSTINDKQIYRFTRNQKAKETKSTKLKKLRQQLKPNDIQECENRLSKCSPLTVKKEGFIEYLKIRAQVTSKMQAYYSNEDVEKDQRLPNMIPFRKLKLSSYINQVQSNKRLSKNLRKKFGDDCILILGNWSAAHVTFQEPIRGKGLRQMLRNEGFKVYLLDEFKTSSVCPSCDHKLENFKKCINPRPYRRSKNPTVKCHGLLR

SEQ ID NO: 2771 - protein, 617 aa, Mucor saturninus
MEKLFQTADTASDKENTMMVTKLSSVDADMSFFEDEDECEDEADLLVESNSDLNDDKSITLDNTQKDLTAKEVRALSTVCIMLIQSSTIGNEVDAKNIFEKLYLDTQESIPRAALDFCAKLVNGLRKIRCKKEEECLGSFFGMRKLRNLIVGYAKEHYKRNRMGVCSLYPISDKKISIRVDRVKSTLKNYSKLDIKARAELEEAPKNNDGLNDIVNVKEAVRNLNVGIKESKAKQARLSRLLLPLEKLRMDQARNFRIEERGKDKWDEKKYNDLKEARANCDKIYSELKSVRATISNNQTEMYRLNKILHKQPLPADNINKEVISDKDITSLAKGDIVVQGIDPGVVTTASFKGVSGSLLFESINRYTALKNLDPVESATNEKQVSLEFTAKMVNNATFSTKHRQERHRRENQKIQTDVSYLEKKRLTRKIRTKKFYQVFFSRHRKRLVTSEGKGNNNAVWSFLGNWSGITTFMKGHTRRSLKPVITELQKTEKDTFMVVDEYKSTVTCTSCFETTTKQVVRRGDTIKRIKGAVVCVNKDCPRRMHNKSTTSNRDQNGALNIALIGFSALVSEDGLTLPPFRRGVNNPNKFNLSNNLMQARLAMQGSPGEPVTNFSL

SEQ ID NO: 2772 - protein, 821 aa, Mucor saturninus
MRPRIYPDTEDFINAKITAKLAKMGEETSTSTMNQPAGGNRGLKRKETFEVKIEKSVAKRNRTTASSSSSTLICKSCDTSGHSSARSKLCPNHNYTLQELIEKDIGAKYQRYTISIPLKGFLNETDDDDDRLQKAVNKIQDLSSFLRLVLFKAQIFVNDYILQYPNNLSNEFFQQNFWYSLCRVVCKQLSIKDFQLKYATIHHLEDAWMELNNLEGVNLNVEKYGLKNYGQVLATACETTATCYNNYYIENFQNIICNYFIYMIFKEFPDVKISVIRKLVYEHVLDQVLSSDPVAVLNDDILPPLSQETKNGLQAFINPLIVELKNRLPSFSITKATQNTAPFGILPALRHILSKYESIIAENSTLQKRDSETGKPQDTVQSGEKKKNDDKAKHFVLPRIFSLFPNPGLQWRFIKIDSQNVTGIFPGSKLKKEKDETLFCFTQRYFYQCFNFAKLKIRSLKDLKELPATNGKMFLNGMYTDGYTCRLLFCRRTEPSSLIKSIALELDDFNTEEVNTYFRPCTIDPGRKDVFVSYHGDNDVRRLSSKEYYNMGGVTQRHKQEQELKKSLGIDQIETNIPSPKTTSHDTYILYITYILQHIDTLFNFYGFRTTNSRWCNYIASQKSIEDAVNILLNGSTKYNKQRRKNKKKSKKRRRSKIVDSLKSKPKIIKREHKEKFEEGDRNKMPLIIFGDGLKNKSQTKFKGLRSGVTDKLYRQLKRREKLGELLLVDINEFKTSKTCNSCFSNDLKNMRCGTDEKSSHIHQILICKRCNIFWNRDVMAAKNMLAISQSIWDGQGRPTVFKRLNATSNVVTSSHSSEEK

SEQ ID NO: 2773 - protein, 562 aa, Mucor saturninus
MRTPIYPEIEAFIQTKKLKKYESQQQETASETINKLSKRKKGVKRKDTPEEKKAKSDVTKARNVVPNTSNLVLKELIQQNLGSQNQRFTVSIPLKSFMPSVDENANNTAVEKIKSLFMFLQKVAYNAQLFVNFYILKQPNSLPNELLKQNFCEKQENTYAFLNPLILEIRIHILEKYESLIVETPLPVPVSQLQIIPQEQSDETDQRYAESPVNETALELQDFNSEEIDRYFRPCTVDPNSKDAFVSFHGNKDVRRLSSAKYYNMNGSANRLKLEQDRKIEQGVQTIETNIPSVKSAVADKYITHVKYMMQHKDTLFNFYNFQTARVKWCNYIGKQRALQDALNILINESKKYNKGRRKKTRKNKRKRSKTATKYQSSTPQASSRRGKRASRNHKEKFEEGDKSKIPLIFFGDGLKNKSHVKISGHRHGVSEMKYKQLKLREKLGKLLLLDIDEYKTSKNCNNCLESSLENLKHKSGTDNRSIHQIFFCKKCNIRWNRDVMATKNMYTIATSIWRGDGRPDVFKRQSATSNVVATPSPAMVKRCLQVSECLKVNFDSFEKKN

SEQ ID NO: 2774 - protein, 282 aa, Mucor saturninus
MLHSQSISVKPKSRFVVSNELRERLKKDRVLVQGIDPGIVTTASINCVKADTLFESINRFYMLENEVSDIQHSQVRDYSYVHTASKVNAAVLATNHRIRREKRQKEGKTEKPISLERSRVTRKIRTKRYHKKNCSRYRSGMFKSHVLDKLRSSLKRLECVEKDETFIVDEYKSTVNCSSCFEPTKKQIIRVGDHGRKRIKGAVTCTNEICPRRLSSRSSTINRDQNGAMNIALIGFCHLVSEDSLTLPPFRRSNNNSSKFHLSKNFQRTSLATLRSSGVPDN

SEQ ID NO: 2775 - protein, 789 aa, Mucor saturninus
MNQPAGGNRGLKRKETFEVKKEKSVAKRNRTTASSSSSTLICKSCDTSGHSSARSKLCPNHNYTLQELIEKDIGAKYQRYTISIPLKGFLNETDDDDDRLQKAVNKIQDLSSFLRLVLFKAQIFVNDYILQYPNNLSNEFFQQNFWYSLCRVVCKQLSIKDFQLKYATIHHLEDAWMELNNLEGVNLNVEKDGLKNYGQVLATACETTATCYNNYYIENFQNIICNYFIYMICKEFPDVKKSVIRKLVYEHVLDQVLSSDPVAVLNDDILPPLSQETKNGLQTFINPLIVELKNRLPSFTITKATQNTAPFGILPALRHILSKYESIIAENSTLQKRDSETGKPQDTVQSGEKKKKDDKAKHFVLPRIFSLFPNPGLQWRFIKIDSQNVTGIFPGSKLKKEKDETLFCFTQRYFYDCFNFAKLKIRSLKDLKELPATNGKMFLNGMYTDGYTCRLLFCRRTEPSSLIKSIALELDDFNTEEVNTYFRPCTIDPGRKDVFVSYHGDNDVRRLSSKEYYNMGGVTQRHKQEQELKKSLGIDQIETNIPSPKTTSHDTYILYITYILQHIDTLFNFYGFRTTNSRWCNYIASQKSIEDAVNILLNGSTKYNKKRRKNKKKSKKRRRSKIVDSLKSKPKIIKREHKEKFEEGDRNKMPLIIFGDGLKNKSQTKFKGLRSGVTDKLYRQLKRREKLGELLLVDINEFKTSKTCNSCFSNDLKNMRCGTDEKSSHIHQILICKRCNIFWNRDVMAAKNMLAISQSIWDGQGRPTVFKRLNATSNVVTSSHSSEEK

SEQ ID NO: 2776 - protein, 821 aa, Mucor saturninus
MRIPIYPDTEGFIKLKKQHLYEKLQQQEIEGIAVHNNFKGEAKEKKGIKRKDTAEEKHNKSAAKRARNSHLVIAAAISCKSCGESGHSSARMSIPLRSFFPTSDDDAFNNTLNKIKSLSMFLRNVIYRAQLFINYYILKYPADLPNEFFQQNFWYSLCRLINENMSIESFKQKYISHIPHLEEIWTELSGLEGVSMLVKKEGLTNYGQVLASACENVATCYNNFYTENFENIVSNYFIYMIRAEFQDLRMSYIKSIVYGHILEILFNVQPSTLPENIGSSVNKETQDKIRKFLNPLIVEIKNRLPPAPITKATLNKAPFDIMPVFRHILSKYESMIEANQEVTTSIQLPLTLPQQSDLLQQTEDSNQSRKRPKKKKSSIKNKISNAHKDKEKRFQPPRMFSLFPNPSFKWRFIKIDNQNLHGIFGRRIRQVQEETPFSFAQRSFFECFDFRKLKINSLAELQSLHEKGRMFLNSFYTDGYTCRVSFCRKKKPVSSLENVTLTLNNFNSEEVQQYFRPCTVDPNRKDVFTSYHGENDVRCLSSSEYYNMNGVINRQKQELERKKSNNIEHIETRIPSPKTTGADNYKRHITYMFQHFEALITFYDFQTARIRWSNYIGNQKATDHAINILINGSTKYNKNRRKNTRRNKGKRRKLNSRYTRDLSNTKQSKKGKQVARAFKEKFEEGDKSKMPMIIFGDGLKNKSHVRFKGLRHGVIDKLYKQLKRRENLGELLLLDIDEYNTSKTCNGCLVKNLENLKCGGHKIHQILNCNNCNIFWNRDVLASKNMFTIATSIWSGNGSPSVFQRQSATSNVVAAPSSVTA

SEQ ID NO: 2777 - protein, 344 aa, Mucor saturninus
MAITSRPTNMTLLPQNSQIEINAYNALRPVLDSYAQPENHFMAFVQLARLFETLGLSPFRCFLLRRSWSPVYVQIDSKILCQNILNIRWSNNIDKLDYWKQVVDLNGKLFKAQEESKLLRFCGTIQIDGVGVTVLKKRIDKQSSYTSTIKEADEKFKKSKKYRNIVQAMKSNNPAVYQAENILAENQSSSLEMEGYRRFLERLGQNYAILNNFCGYTTASSQNPQFMLRKLRLAAYFNKQGADMQLINSLKQTFGKDAIFVLGNWSAPNALYHEPIRGIGLRPLLLRNHLSLLLIDEFNTSRCCPSCHNLSLKKFKQIDNPRPYQRSNYHLTLCHGLLRQIYLL

SEQ ID NO: 2778 - protein, 821 aa, Mucor saturninus
MPRTPIYPEVEKFIILKKRAKLKKVKSDSAKESSTTQTPKRTSTKRKDSPNVIIAKKSTKRSRQASTSAAVFSSSKCSSCQEEGHNSSRSRQCNNYNLNISELLQIKLRPNYQRYTLSVPFDTFCFNTQNKTSSLKKIKDISSFIREVLFKAQLFVKFFILQHPTKLTNDFFEQNFWYTISRVIRGSSNEVRSILQAYKDKKKERPAGQNLDVAQLISSFAELSATMNGNLFVPESGLKNYGQSLSTACEIVATTYNNYYIENFENIICNYFIYALKTKYANAKVGSIKKLVFNHVYDQVFTHPQLSSIHVDILAFFDPDVGNNLTSFLDPLILEVKNRISTLPLSKESLNNEPFKILPVLRYILKKYDDIYNAQATQNEKIDSMKSPLPRRFSLFPNPSLHWRFIKIDSQNLSGIFPDAKQNKQPNESSFDHQQRCFYQMFDFKRLGIQNYENLQALPEQKERMFLNGLYTDGYTCRVLFARKVFPSPPEEKIRLELDDLSSEEVNKHFRPCTVDPGRRDPFVSYHGGSDIRRLSSSEYYNMGGNVTRMKEQQKHKHRLGIEKIETDIPSPKTASVEQFVSYITYMSQHMNTLFDFYDFETAQVKWLNYLSSQKAIQESVNILINGGKKYNKDKRKETRKNRKRRKKNRRPRTNPVERTLITAPKSKSKKNKACFEVGNNSKMPLVVFGDGLKNKDHVKLKGLRHGISNKIYSQLKLRERIGELLLVDINEFKTSKICNCCLQPNLENLKVSQDDHTKKIHQVLKCITCNIYWNRDVMASKNMFTIAHSIWNGNDRPTVFKRQTATSNVVASAHSSESTA

SEQ ID NO: 2779 - protein, 633 aa, Mucor saturninus
MLKTPVWPTNMVSSPALTEYLLALIMMFKVSSVHTPLTVSKISENPGIVITSLFKILRATEMSNVAQTVAAEEPQDSVSLPWVYNMLSITCENEVEDINKRRRSALARKIRNAINSTTPVALSKPSFLSEVNFNKVQENVLATRLQLAQSRIYLSDPETRDPDVIIPERKDCFIPENFSIHHSLKTFSMMPHYGLKRQYVTIDITTLRSLVNRSDIIKRIAIYDQSLDAYARDSTYFMSLFDLKKLGQSGSVTEMLNRRKVMMRNILCTDGRSADFLFTRPAVPKDNKDIRLEMNDFETWEMQDVLRLWGADPGVTDIFVASDGNGNDAHEIRSISTAEYYVKAGYKKNQVTTKSLKQEEGITTIETNIPTHRTSKLSTFEQHLQYYFTHLDTLLQFYDGRFTDLRFSNYRGQQRMDNELVNIFCSGGKKYNPDEKAHPCRNKADYKQRREKKKKKKNKKKMTLQVGKSSLSAPATAYTTVSVTTSGPSTETQNQKWKKAPFKNEKKVPLIALGNAVFNVTMKGKQSGMLHRLRKKMEEASADERLILVYTDEYLSSQMCSNPSCLLKTLENVRIPDVGKIHNLLTCNSCNKLWNRDTNAARNIYSIASFMQKNNNLRPSRFQRPATDPQSSI

SEQ ID NO: 2780 - protein, 244 aa, Mucor saturninus
MAILSHSSSRDIRNGCTVWGVDSGIIDLITAVDSSGDKERQRTTSLDEYYHLCGYNQATFQRYKHQSQNESVFQLISQLPSLKTTNSHDFLLASKKRFVDYDILCNYYNNDNWSSKLKFKTYIKKQIKAVEEICKRLVVGSKKYGRESKTGIKTATENTSIHYPNALQDAEKLLTSTVIAFGDATFYSSMRGNKAATVKLIKKKLQQMRGGTIQICFIDEYLTSQVCNVCKNRTLENVSTATPK

SEQ ID NO: 2781 - protein, 680 aa, Mucor saturninus
MDSDRSLSGTPGTPGSNMSTSSSLAPGDRIISVKSSIDGIGWDPERRERLEEYVVTVHNITTHAYSLSKYIFLRAIQEDENFDIRRCINRDFFAEVWLKLTRYARGRAGGRTAATRAFIDTYLDDYLEVTGFVPPDFRYGQQASLIEGAKIFTSYSNNVQMRLGSHLRQAVNHLLRIRQRKAELIAYRRREGLIDALIKSEVYREITEPATRFKELIARRLPQDFVLDGEQFGDPIYNNALETLRPVLTSYPVDYRFRGNSIYYDSKGRPVEHMRAFYELALSFIDIELPVFNCFPLRRSWTPCYTTIDSKILCQNILGRRWTNRQDKIALWREVINLNSDALKHQENGELQFRGTIQTDGVGVTVIKKRMDRESRYTARFAVVVESIQYISQEIAQETVGRCVTIDPGRRDLLFCVHENSTANNPNKFRFTKQYGDKFEKIKKYRRIREAVKPARVAAAERLLVNYDSLNRDEFEQYLENRSNMTDIIQNHYVNFRTNHRTAHPLHRKLRLFAYIRRQQGNEDLISKLDEQFGVEAVYVMGNWSSPNTRFHEPVRGLGFRRLLQKAGKRVYLIDEFRTSQCCPACERRSLETFRMVDNPRPHRRRANPRVIRHGLLRCTNQNCRAMTNNTNRIVPRLWNRDMAACLNMVDIVRSLRAGNGIPPRFRRGEAPQNQSKNPK

SEQ ID NO: 2782 - protein, 821 aa, Mucor saturninus
MPRTPIYPEVEKFIILKKRAKLEKVKSDSAKESSTTQTPKRTSTKRKDSPNVIIAKKSTKRSRQASTSAAAFSSSKCSSCQEEGHNSARSRQCKNYNLNISELLQIKLGPNYQRYTLSVPFDTFCFNTQNKTSSLKKIKDISSFIREVLFKAQLFVNFFILQHPTKLTNDFFEQNFWYTISRVIRGSSNEVRSILQAYKDKKKERPAGQNLDVAQLISSFAELSATMNGNLFVPENGLKNYGQSLSTACETVATTYNNYYIENFENIICNYFIYALKTKYANAKVGSIKKLVYNHVYDQVFTHPQLSSIPVDILAFFDPDVGNNLTSFLDPLILEVKNRISTLPLSKESLNNEPFKILPVLRYILKKYDDIYNAQATQNEKIDSMKSPLPRRFSLFPNPSLHWRFIKIDSQNLSGIFPDAKQNKQPNESSFDHQQRCFYQMFDFKRLGIQNYENLQALPEQKERMFLNGLYTDGYTCRVLFARKVLPSPPEEKIRLELDDLSSEEVNKHFRPCTVDPGRRDPFVSYHGGSDIRRLSSSEYYNMGGNVTRMKEQQKHKHRLGIEKIETNIPSPKTASVEQFVLYITYMSQHMNTLFDFYDFETAQVKWLNYLSSQKAIQESVNILINGGKKYNKDKRKKTRKNRKRRKKNRRPRTNPVERTLITAPKSKSKKNKACFEVGNNSKMPLVVFGDGLKNKDHVKFKGLRHGISNKIYSQLKLRERIGELLLVDINEFKTSKICNCCLQPNLENLKVSQDDHTKKIHQVLKCITCNIYWNRDVMASKNMFTIAHSIWNGNDRPTVFKRQTATSNVVASAHSSESTA

SEQ ID NO: 2783 - protein, 273 aa, Mucor saturninus
ENIDIDDQLVLNDLTFSGTDNGIVTITEISHFRLDRFKFHLNLQNRYSLLSDSKEGHDVGSLDENTLQYLNIPKIFKIKSSTIHYKGGAQKLRDGLRRAKASHDDTIVQEVEAELSQHSFAHADNVSDEQKKNETMNCDIVHTSTDFVLWRDKPSRPPNQVHKGHSIQSEINSRYTSVCVTNEHNTSQSYVFCFSKTSHVPHSPINGNYVIQTIDGTSMCYNLERISVHHGHSHKGRDTVSILVIGLTGLANLILETTFSPSHPNISHSNTDS

SEQ ID NO: 2784 - protein, 614 aa, Mucor saturninus
MELNNLEGVNLNVEKDGLKNYGQALATACETTATCYNNYYIENFQNIICNYFIYMICKEFPDVKKSVIRKLVYEHVLDQVLSSDPVAVLNDDILPPLSQETKNGLQTFINPLIVELKNRLPSFTITKATQNTAPFGILPALRHILSKYESIIAENSTLQKRDSETGKPQDTVQSGEKKKKDDKAKHFVLPRIFSLFPNPGLQWRFIKIDSQNVTGLFPGSKLKKEKDETLFCFTQRYFYECFNFAKLKIRSLEDLKELPAINGKMFLNGMYTDGYTCRLLFCRRTEPSSLIISIALELDDFNTEEVNTYFRPCTVDPGRKDVFVSYHGDNDVRRLSSKEYYNMGGVTQRHKQEQELKKSLGIDQIETNIPSPKTTSHDTYILYITYILQHIDTLFNFYGFRTTNSRWCNYIASQKSIEDAVNILLNGSTKYNKQRRKNKKKSKKRRRSKIVDSLKSKPKIIKREHKEKFEEGDRNKMPLIIFGDGLKNKSQTRFKGLRSGVTDKLYRQLKRREKLGELLLVDINEFKTSKTCNSCLSNDLKNMRCGTDEKSSHIHQILICKRCNIFWNRDVMAAKNMLAISQSIWDGQGRPTVFKRLNAASNVVTSSHSSEEKV

SEQ ID NO: 2785 - protein, 404 aa, Mucor saturninus
MEEKSSKFASKGYVYRKLKELPFTSAMNRRKFSSLLEETLQSINSSKAFVQGRKLSQLSPQQLFNFPKLGFRTRESLTTGKKTFNNVITTDGYSVSFLFTRLVKRSIALKSNPTDFVSDIRNGCTVWGVDPGIIDLITTVDSSEDKERQRTTSLDEYYHLCGYNRATFQRHKHQSQNESVFQLISQLPSLKTTNSYDFLLASKKRLVDYDILCNYYNSDNWSSKLIFKTYIKKQKAVEEICKRLVVGSKKYGRGSKTGVKTATENTSIHYPYAPQDAENPPTRTVIAFGDATFYGNMRGNKAAPVKLIKKKLQQMRGDTIQICFIDEYLTSQVCNVCKNRALENVSTAKSKRRVHSVLKCNNNSCNIVWNRDINAAKNIFDIIMFAAHNNNRRPPAFERPEQAT

SEQ ID NO: 2786 - protein, 451 aa, Mucor saturninus
MNMSAFIDTYLDDYLEVTIFVPPDFRYGQQVSLIEGEMIFTPYSNNVQMRLGSHLRQAVNYLLRIRQREAELIADRRREVLIDALIKSEVNREITEPATRFKELIARKLPQDFVLDGEQFGDPIYNNALEILRPVLTSYPVDYRFRGNSIYYDSKARPIACFAVVVESTQYISQEIAQENVGRCVTIDPGRRDLLFCVHENSTANNSNKFRFTKQYQDKFEKIKKYRRIREAVKPARVAAAERLLVNYDSLNRDEFEQYLENRKLRLSAYIRRQQGNEDLISKLDKQFGVEAVYVMSNWSASNTRFHEPVRGLGFRRLLQKAGKRVYLIDEFRTSQCCPDCERRSLETFRRVDNPRPHRRRANPRVIRHGLLRCTNQNCRAMTNNTNRIVPRLWNCNMAACLNRVDIVRSHRAGNVIPPRFRRGEFPQNQRRRARTQNEQANIRNIRQRRN

SEQ ID NO: 2787 - protein, 773 aa, Mucor saturninus
MPRTPIYPEVEKFIILKKRAKLEKVKSDSAKESSTTQTPKRTSTKRKDSPNVIVAKKSTKRSRQASTSAAAFSSSKCSSCQEEGHNSARSRQCKNYNLNISELLQIKLGPNYQRYTLSVPFDTFCFNTQNKTSSLKKIKDISSFIREVLFKAQLFVNFFILQHPTKLTNDFFEQNFWYTISRVIRGSSNEVRSILQAYKDKKKERPAGQNLDVAQLISSFAELSATMNGNLFVPENGLKNYGQSLSTACETVATTYNNYYIENFENIICNYFIYALKTKYANAKVGSIKKLVYNHVYDQVFTHPQLSSIPVDILAFFDPDVGNNLTSFLDPLILEVKNRISTLPLSKESLNNEPFKILPVLRYILKKYDDIYNAQATQNEKIDSMKSPLPRRFSLFPNPSLHWRFIKIDSQNLSGIFPDAKQNKQPNESSFDHQQRCFYQMFDFKRLGIQNYENLQALPEQKERMFLNGLYTDGYTCRVLFARKVLPSPPEEKIRLELDDLSSEEVNKHFRPCTVDPGRQDPFVSYHGGSDIRRLSSSEYYNMGGNVTRMKEQQKHKHRLGIEKIETDIPSPKTASAEQFVSYITYMSQHMNTLFDFYDFETAQVKWLNYLSSQKAIQESVNILINGGKKYNKDKRKKTRKNRKRRKKNRKPRTNPVERTLITAPKSKSYSKKNKACFEISISLRHRRLICNCCLQPNLENLKVSQDDHTKKIHQVLKCITCNIYWNRDVMASKNMFTIAHSIWNGNDRPTVFKRQTATSNVVASAHSSESTA

SEQ ID NO: 2788 - protein, 1151 aa, Mucor saturninus
MLFSTRSKPIQIYPNGNQDNTLRCFYILEHKDSYLGKCTYYALKAVGKPLSIEKNQADHSKDHFMAIKRQESEKKPRKEAHKLGKTLDDLILKLLAEETNKMYSKKWEKFSNKNGKHKSIEDFRSSLSSKQLPTGVIPIVKAKIEVMLRRNEIESMSAEDIPSSGMWLHRKVTSLKTQEKLSVERLINNYMEVLKDNYKEPAVEHEPEPINDEHESKPDGLTDFTKPEELIRTVGKTLKGVINKNFDYKILKDRLEQLQNSCHASIYGLSKALNALIHLIITGGLDSDINTHDVFRFKDVDFGNDGIGETEKDLVYLSEQSLKSLCDEKTFSYNGFWNIMSHCIGEKFPNKNTDILKAIIQQLNSNDAYHFTTTPALASACKQYFVNFENMWSHDQYRQDLRVCITLLLRINLARSRFFNKKKYEAKKIDDSKKSQVVSKKFKAKKSVTQKMEALFKLLIKFQGSKYRKMHCIAKILKNLFSSTDCTIPPCYDDRKSNDESPGVADAENKDEHEEDLQSSDDEDDDFVVSEDTIVLDNATINRDLTARETNALIAVVMMLCSSETIEGDVSPEYIKRQLYKDKQETIPQEALVLCSKVVNNLRRISLKKDAEASFINCYKMRYLRNVLVNFAGAKTKFKKRRYYPVIEEKRVSSVFVNYATLYTLFCKDYNIFNSEGDMYTSVHDIKETQDKQFVFKNFFDWCTVDRIMKEQKMTFGFSFYYSNQYDLQFVGSKKSINKDLQKTPIINQEQPCLVIDNGQIEKEIKQLNDAIKIQKKEYAALGKSIRVEEWNRMNLGRSFRAKEKSNHPWDTKLYKQLKEKRSDCDNIYSQLRKLNSSLKDLRYRMFALNKARHRQSLPISTNSLQIPDKIKADLKNNRLLIQGVDPGIVTTAAISCVKSSTLFESLNRFQMLENHEPCTVPISNQKGYEYDYTANKINQAVLSNTHRLQREKKKKYDIEKNRLTRKIRLNTYHKKHYSATRRDIFSYHGWKRGSILSFVGNWSGKGAYIRGHTRRSMKPILNRFNSVADDHIAVVDEFKSTITCSSCFEVTTKQVVRVGEKRVKRIKGAVTCTNHNCPRRLSPTRRTTVNRDMNGAINIALIGFSCVVSNNSLTLPPFRRGTYNANKFNLSHHYQCASLATLESPVVPET

SEQ ID NO: 2789 - protein, 821 aa, Mucor saturninus
MRIPIYPDTEGFIKLKKQHLYEKLQQQEKEGITVHNNFKGEAKEKKGIKRKDTAEEKHNKSAAKRARNSNLVIAAAISCKSCGESGHSSARMSIPLRSFFPTSDDDAFNNTLNKIKSLSMFLRNVIYRAQLFINYYILKYPADLPNEFFQQNFWYSLCRLINENMSIESFKQKYISHIPHLEEIWTELSGLEGVSMLVKKEGLTNYGQVLASACENVATCYNNFYTENFENIVSNYFIYMIRAEFQDLRMSYIKSIVYGHILEILFNVQPSTLPENIGSSVNKETQDKIRKFLNPLIVEIKNRLPPAPITKATLNKAPFDIMPVFRHILSKYESMIEANQEVTTSIQLPLTLPQQSDLLQQTEDSNQSRKRPKKKKSSIKNKISNAHKDKEKRFQPPRMFSLFPNPSFKWRFIKIDNQNLHGIFGRRIRQVQEETPFSFAQRSFFECFDFRKLKINSLAELQSLHEKGRMFLNSFYTDGYTCRVSFCRKKKPVSSLENVTLTLNNFNSEEVQQYFRPCTVDPNRKDVFTSYHGENDVRRLSSSEYYNMNGVINRQKQELERKKSNKIEHIETRIPSPKTTGADNYKRHITYMFQHFEALITFYDFQTARIRWSNYIGNQKATDHAINILINGSTKYNKNRRKNTRRNKGKRRKLNSRYTRDLSNTKQSKKGKQVARAFKEKFEEGDKSKMPMIIFGDGLKNKSHVRFKGLRHGVIDKLYKQLKRRENLGELLLLDIDEYNTSKTCNGCLVKNLENLKCGGHKIHQILNCNNCNIFWNRDVLASKNMFTIATSIWSGNGSPSVFQRQSATSNVVAAPSSVTA

SEQ ID NO: 2790 - protein, 206 aa, Mucor saturninus
MNISSDLKDVVSKLRLKDALESNRLAINGIDPGIHSTALANCTSAKTNVISIKRYSVLNGLIKAENVALEDDYKASVLDITPTFLHGASLYKNHRRKRESRTKKGITTHPKQLQKDRLTRKIRSDIFLKKMISNQRKQVKSKIIVNFVGNWGGDATKIKDIIRSSLKPVISRLKAVENDMTLTVDEYGLTIHCNSCFKKMRLQCHR

SEQ ID NO: 2791 - protein, 238 aa, Mucor saturninus
AAERLLVNYDSLNRDEFEQYLENRSNMTGIIQNHYVNFRTNHRTAHPLHRKLRLSAYIRRQQGNEDLISKLDEQFGVEAVYVMGNWSSPNTRFHEPVRGLGFRRLLPKAGKRVYLIDEFRTSQCCPACERRSLETFRMVDNPRPHRRRANPRVIRHGLLRCTNQNCRAMTNNTNRIVPRLWNRDMAACLNMVDIVRSLRAGNGIPPRFRRGEAPQNQRRRARPQNEQANIRNVRQRRN

SEQ ID NO: 2792 - protein, 922 aa, Mucor saturninus
MSLNDTYKNKSVREIIQMMKERKKRAIQAKEEGEEENKEEDNEGEYEEYAEDPGPSTPVKRRRQSRNRKYQELFEKKMEKQVGRLQKKSKVVAGDGAKKCKRCTEAGVYNEERAHTTTRSPLCPFHQTTKQEAITAALETKITSTFTRKIGLEASLTSNMDGEAKTIFCDNVLTLVNFMRETAIKSMLFANFYILKLLQKNKADDDWVLPMIFFSPVFFKSCQQLVCGRDMSSNNTMFDKADIIESFRQYKLLYPGGSQVSTDTGGIFYSSAQSSLATQSATIFSNHVVESFEKRMKSYFIFCLASFKFTKPEKVAVAEYLFNKCTMLKTPVWPTNMVSSPALTEYLLALIMMFKVSSVHTPLTVSKISENPGIVITSLFKILRATEMSNVAQTVAAEEPQDSVSLPWVYNMLSITCENEVEDINKRRRSALARKIRNAINSTTPVALSKPSFLSEVNFNKRPRCYYTERKDCFIPENFSIHHSCKTFSMMPHYGLKRQYVTIDIATLRSLVNRSDIIKRIAIYDQSLDAYARDSTYFMSLFYLKKLGQSGSVTEMLNRRKVMMRNILCTDGRSADFLFTRPAVPKDNEDIRLEMNDFETWEMQDVLRLWGADPGVTDIFVASDGNGNDAHEIRSISTAEYYVKAGYKKNHVTMKSLKQEEGITTIETNIPTHRTSKLSTFEQHLQYYFTHLDTLLQFYDGRFTDLRFSNYRGQQRMDNELVNIFCSGGKKYNPDKKAHPCRNKADYKQRREKKKKKKNKKKMTLQVGKSSLSAPATAYTTVSKWKKAPFKNEKKVPLIALGNAVFNVTMKGKQSGMLHRLRKKMEEASADERLILVYTDEYLSSQMCSNPSCLLKTLENVRIPDVGKIHNLLTCNSCNKLWNRDTNAARNIYSIASFMQKNNNLRPSRFQRPATDPQSSIS

SEQ ID NO: 2793 - protein, 565 aa, Mucor saturninus
MKENGSDEKAIKSAIQSKIYGPCNQISRAVARKEIPAVSILDDQSRKELNSVFSCYPKDYTFQKDSIYYDIAAKPENHFDAFFQLAKLVEAKTGKVFICFPLRTSFIPCYMTLDAKIIHFHILKNESLLQAGKKFKIWGSVVNFEKKAFKNQGVDKTLRFQGTLETDGVGVSIIKQNTDTSRKFFTTSVKRVVDDQEQYIEGLNQADLKPVLKTKTSTVKEKQTLIFTKNNRSKCSRHFRYLRNQNKPLVVQEAETTLSKTESKSTNLEKYIQYIKARSFVNDTLTDYYGNETLKPQEISYFPESEFSFRVDHKCNLYYGNIFISRICGFFPQPQNFSNDRIINPQFYAVYLEMMLSQKHISQRFDDDVKRRIIALGLEINRRPNQSDLNRKTFSTFLEKLQLLPFRKMKFSLKMFYEQNDQKLVQNLKRKFGPDAVLVLGNWSAPNTKFQEPTRNKGLIQMLKKNGLTVYLIDEFKTSSHCPDCGDVLEQFKMISNPRSFRRNTMPIVKCHGLLRCQNTACVTQGRKFWNRDQAAVLNFKHILFNLREVGERPALFSRKNEQTQ

SEQ ID NO: 2794 - protein, 669 aa, Mucor saturninus
MDSDRSLSDTLGTPGSNMSTSSSLAPGDRIISVKSSIDGIGWDPERRERLEEYVVTVHNITTHAYSLSKYIFLRAIQEDENFDIRRCINRDFFAEVWLKLTRYARGRAGGRTAATRAFIDTYLDDYLELTGFVPPDFRYGQQASLIEGAKIFTSYSNNVQMRLGSHLRQAVNHLLRIRQRKAELIAYRRRTYRRLPQDFVLDGEQFGDPINNALETLRPVLTSYPVDYRFRGNSIYYDSKARPVEHMRAFYELALSFIDIELPVFNCFPLRRSWIPCYTTIDSKILCQNILGRRWTNRQDKIALWREVINLNSDALKHQENGELQFRGTIQTDGVGVTVIKKRMDRESRYTARFAVVVESTQYISQELAQETVGRCVAIDSGRRDLLFCVHENSTANNPNKDEFEQYLENRFNMTGIIQYYVNFRTNHRTAHPLHRKLRLSAYIRRQQGNEDLVSKLDEQFGVEAVYVMGNWSSPNTRFHEPVRGLGFRRLLQKAGKRVYLIDEFRTSQCCPACECRSLETFRMVDNPRPHRRRANPRVIRHGLLRIVPRLWNRDMAACLNMVDIVRSLRAGNGIPPRFRRGEAPQNQREEQEPKMNKQTLEMFVNVATKIFQACYRRSTIDTLKWGSESARSYDNIKVKSKREAEIKYANPTLQLRAPWMSLRDPLNM

SEQ ID NO: 2795 - protein, 373 aa, Mucor saturninus
MKKLRNVIVLYASNCGYRISPKQLNLCNVSHYDDKEYESIHVTSKGLYKETDNSVRKFTSVASTSSNKKELFRNFFNVDYLLKRFKQQNLDPRTVNNQTTTLKSSFEKSKPHEATTQEKEDAKKLSDDIEADKAKLKNLSSTLKVLEIKRLQEASAFRKEEKKKNGWNTVLCRELKRVRTEFNSTYKEIVEIEATIRQNSTQLYELNKLVYNKRDDTMNISSDLEDVVSKLHLKDALESNRLAINGIDPGIHSTALRKQVKSKTVVNFVENWGGDATKIKGIIRSSLKPVTSRLKAVDEYGSTIHCNSCFKKMRLQCHRRDNMFKRIKGAVACYNTKCPARLQRHTTVNGDANGAKNIGLIGFSKLVSSDGTV

SEQ ID NO: 2796 - protein, 679 aa, Mucor saturninus
MFSDEQKYISDSSEKMIQPNRKETFEAKKEKSVAKRNRSTASSSSSTLICKSCDTSGHSSARSKLCPNHTYTLQELIEKDIDVDDDRLQKAVNKIQDLSSFLQLGLFKAQIFVNDYILQYHNNLSNEFFQQNFWYLLCRVVCKQLSIRDFQLKYANIHHLEDAWMGLDNLEGLNLNVEKDGLKNYGQVLATACETTATCYNNYYIENFQNIICNYFIYMICKEFPDVKKSVIRKLVYEHVLDQVLSSDPVAVLNDDILTPLSQGTKNGLQAFINPLIVELKNRLPSFTITKATQNTAPFGILPALRHILSKYESIIAENSTLQKHDSEPGKSQDTVQSGEKKKKDDNANHFVLPRIFSLFPNPGLRWRFIKIDSQNVTGILPGSKLKKEKDETLFSFTQRYFYDCFNFAKLNIRSLKDLKELPATNGKMFLNGMYTDGYTSRLLFCRRIKPSSLIKSIALELDDFNTEEDVSVSYHGDNDVRRLSSKEYYNMSGVTQRHKKEQELKKCLGIDQIETNIPSLKTTSHDTYILYITYILQHIDTLFNFYGFRTTNSRWCNYIASQKSIEDAVNILLNGSTKYNKKRRKNKKKSKKRRRSKIVDSLKSKPKIIKREHKEKFEEGNRNKMPLIIFGGGLKNKSQTKFKGLRSGVMDKLYRQLKRREKLGELLLVDINEFKTSK

SEQ ID NO: 2797 - protein, 1329 aa, Mucor saturninus
MKRKSQVDDKRSIHSHFLFTCQVLNINLLLLTDVRQKPVPLPLEYSHGKSSSTEGSSDGDVSLKFYCLNSNIASYTSSTSDNTRLSELLETAVSNFEVPFNDNKSRLRNYFFSHQLKIIPNAGQLAFNNNLATNVVPTVQQLVKILNNGADNPFIIKSKKYDEKIIVPKGNLLLYACGRIYNCRIYLFSSRSKPIVIHPPSNSQLDKTNVSNIAIFKYCDSFITEWFSLELRKKPGVYVKKPSNVVSTTTTLAAEKRQVGEKKPRQAYTKIGNDLDDEILCLLEEEVKFLYRKKWSSYQTKQKNKSNMIQKCSESLSRKSLPTGAATVIKAKLEQKIKSNQFDTFKEADIPASGLWVQQKINRLKQQGKFTVDGFINNFIAEITNQQSLESTSESSSRTSIPSFESENDTEICIANTDLIDVDYRTVSRSLKRVIHKDFDYNIFLQSMENLQNECTLSMHGMSQAIGSLSESIISGAIFSSKPKFYFDYSCTGLNDLEAHLRKTPIAILGPAEKEFLDDSGILAYLGFWSVLSYCVGGKLNLKNKHPAIEFIKSNLEARHMHDFVTTPTISYACRQYYTNFTNMWTYQKYMQDLKVVVTLIIRANLCKQRFFSKPSMVASKASSSKEFSSGKKKIKKLFIMNELFECLLKYNQHKKRGKLFVIKQLMEKLFQTADTASDKENTMMVTKLSSVDADMSFFEDEDECEDEADLLVESNSDLNDDKSITLDNTQKDLTAKEVRALSTVCIMLIQSSTIGNEVDAKNIFEKLYLDTQESIPRAALDFCAKLVNGLRKIRCKKEEECLGSFFGMRKLRNLIVGYAKEHYKRNRMGVCSLYPISDKKISIRVDSKSLYLLFAKSYNMYKSENTYFTNYLDISTENDKRLIFSNFFDISYLERILKEQKLHPTFSFIFSSRYSLQFLGVKSTLKSYSILDLKARAELEEAPKNNDGLNDIVNVKEAVRNLNVGIKESKAKQARLSRLLLPLEKLRMDQARNFRIEERGKDKWDEKKYNDLKEARANCDKIYSELKSVRATISNNQTEMYRLNKILHKQPLPADNINKEVISDKDITSLAKGEIAVQGIDPGVVTTASFKGVSGSLLFESINRYTALKNLDPVESATNEKQVSLEFTAKMVNNATFSTKHRQERHRRENQKIQTDVSYLEKKRLTRKIRTKKFYQVFFSRHRKRLVTSVGKGNNNAVWSFLGNWSGITTFMKGHTRRSLKPVITELQKTEKDKFMVVDEYKSTVTCTSCFETTTKQVVRRGDTIKRIKGAVVCVNKDCPRRMHNNSTTSNRDQNGALNIALIGFSALVSEDGLTLPPFRRGVHNPNK

SEQ ID NO: 2798 - protein, 874 aa, Mucor saturninus
MLKRNEVESMSAEDIPSSEPAVEHEPEPISDEHESKPDGLTDFTKPEDIIRTVGKTLKGVINKNFDYKTLKDRLEHLQNSCHASIYGLSKALNVLIYLIITGGLDSDSNTHNVFRFKDVDFGNDGIGETEKDLIYLSEQSLKSLCDEKTFSYNGFWNIMSHCIGEKFPNKNTEPMQQLNSNDAYHFTTTPALASACKQYFVNFENMWSHDQYRHDLRVCITLLLRINLARSRFFDKKKYEVKKIDDSKKSQVVSKKYKAKKSLAQKMEALFKLSINTDCTIPPYYDDIKSDDESPGVADAENKDEHEEDLQSSDDEDDDFVVSEDTIVLDNATINRDLTARETNALIAVVMMLCSSETIEGDVSPEYIKRQLYKDKQETIPQEALVLCSKVVNNLRGISLKKDAEASFINCYKVRYLRNVLVNFAGAKTKFKKGRFYPVIEKRVSSVFVNYATLYTLFCKDYNIFNSEGDTFTSVHDIKDTQDRQFVFKNFFDWCTVDRIMKELKMTFGFLFYYSNRYDLQFVGLEKSLNKDLQKTPIINQEQPYLVIDNSQIEKEIKQLNDAIKIQKKEYAALGKSIRVEEWNRMNLGKSFRAKEKSNHPWDTKLYKMFALNKARHRQSLPISTNPIQIPDKMKADVKNNRLLIQGVDPGIVTTAAISCVKSPTLFESLNRFQMLEIMSPNKINQAVLSNTHRLQREKKKKYGIEKNRLTRKIRLNTYHKKHYSVTRRDIFSYHGWKRGSILSFVGNWSGKGAYIRGHTRRSMKPILNRFNSVADDQIAVVDEFKSTITCSSCFDVTTKQVVRVGEKRVKRIKGAVTRTNHNCPRRLSPTRRTTVNRDMNGAINVALIGFSCVVSNNSLPLPPFRRGIYNANK

SEQ ID NO: 2799 - protein, 833 aa, Mucor saturninus
TRNDSSDDDFQPPILGRKRRSRENTPYIDSQKKFKGKGKAAEHEPDITSTIGIPDSTRNVVSDNLIDYSSDDFNESPPAIHTLRSHGGFKYGSEFTVAESSSSVSKRRPVASNRSPTPEVFITASESSTSVTARDSEKISKRVITVKTTAKNIWKPLYLQPLYDLVNTTNSLITHTFAFTKQLIAKHKEAYFQDANYTPPSLPNAQQIALYGCTKIQTAYHNNIKAHFGNRLRQFVNIILQKRERANNLRKEMKENGSDEKAIKSAIQSKIYGPCNQISRAVARKEIPTVSILDDQSRKELNSIFSCYPKDYTFQKDSIYYDIAAKPENHFDAFFQLAKLVKARTGKAFICFPLRTSFIPCYMTLDAKIIHFHILKNKSPLQVGKKFKIWGSVVNFEKKAFKNQGVDKTLRFQGTLETDGVGVSIIKQNTDTSRKFFTTSVKRVVDDQEQYIEGLNQADLKRTENKCVLIDPGRRDLLYCMKETSTVKEKQTLIFTKNNRSKCSRHFRYLRNQNKPLVVQEAETTLSKTESKSTNLEKYIQYIKARSSVNDTLTDYYGNVSLKPKEISYFPESEFSFRVDHKCNLYYDNIFISRICGFFPQPQNFSNDRIVNPQFYAVYLEMMLSQKHISQRFDDDEKRRIIALGLEINRRPNQSDLNRKTLSTVLEKLQLLPFRKMKFSLKMFYEQNDQKLVQNLKRKFGPDAVLVLGNWSAPNTKFQEPTRNKGLIQMLKKNGLTVYLIDEFKTSSHCPDCGDVLEQFKMISNPRPFRRNTMPIVKCHGLLRCQNTACVTQGRKFWNRDQAAVLNFKHILFNLREVGERPALFSRKNKQTQ

SEQ ID NO: 2800 - protein, 943 aa, Mucor saturninus
MMKERKKRAIQAKEEGEEENKEEDNEGEYEEYAEDPGPSTPVKRRRQSRNRKYQEFFEKRMEKQAGRLQKKSKVVAGDGAKKCKRCTEAGVYNEERAHTTTRSPLCPFHQTTKQEAITAALETKITSTFTRKIGLEASLTSNMDGEAKTIFCDNVLTLVNFMRETAIKSMLFANFYILKLLQKNKADDDWVLPMIFFSPVFFKSCQQLVCGRDMSSNNTMFDKADIIESFRQYKLLYPGGSQVSTDTGGIFYSSAQSSLATQSATIFSNHVVESFEKRMKSYFIFCLASFKFTKPEKVAVAEYLFNKCTMLKTPVWPTNMVSSPALTEYLLALIMMFKVSSVHTPLTVSKISENPGIVITSLFKILRATEMSNVAQTVAAEEPQDSVSLPWVYNMLSITCENEVEDINKRRRSALARKIRNAINSTAPVALSKPSFLSEVNFNKVQENVLATRLQLAQSRIYLSDPETRDPDVIIPERKDCFIPENFSIHHSRKTFSMMPHYGLNRQYVTIDIATLRILVNRSDIIKRIAIYDQSLDAYARDSTYFMSLFDLKKLGQSGSVTEMLNRRKVMMRNILCTDGRSADFLFTRPAVPKDNEDIKLEMNDFETWEMQDVLRLWGADPGVTDIFVASDGNGNDAHEIRSISTAEYYVKAGYKKNQVTMKSLKQEEGITTIETNIPTHRTSKLSTFEQHLQYYFTHLDTLLQFYDGRFTDLRFSNSRGQQRMDNELVNIFCSGGKKYNPDKKAHPRRNKADYKQRREKKKKKKNKKKMTLQVGKSSLSAPATAYTTVSVTTSGPSTETQNQKWKKAPFKNEKKVPLVALGNAVFNVTMKGKQSGTLHRLRKKMEEANVDERLILVYTDEYLSSQMCSNPSCLLKTLENVRIPDVGKIHNLLTCNSCNKLWNRDTNAARNIYSIASFMQKNNNLRPSRFQRPATDPQSSIS

SEQ ID NO: 2801 - protein, 452 aa, Phytophthora idaei
MTGYSELKQAMREQLVVNAGVIIREQFRKRLRAYVLIKFGKTGDDLTSEEEKASEKLVGQIMYACYNVEEADMLEALQMRDVIMPDGEEWSEKWIPWPDNIKKNGMEFYIRLIWEFQSVVKDRMEAVPNEKGVRALSLFPVSTYFTNLHIVINGTTLAGFLSRIRDRGQGNLMEDWNMPQMKISTASFKVMRWTVMRRAFAIGRFETRKEECHLTKTEFLQLPVEEKYEHASHLFANEIKTDRHLAGFNRFRAWNESQKRKFPDYKSVIEGIPSFKTSSYEKYPKRLDYFWQHAAFLLRFCLERPYLKWCFFQKRMARVAVDEIARRIVPTSGQGVEGGAAEARGGGFHGRVQDEQALLAVPPVTFQRAVPDPGLPQGRPETQEEEDEEKVLSRDWSRAEIKSKHCHVVLRCENEDCEARYWDRDVNAAINMLELLKSEVQGRGRMGPFRRS

SEQ ID NO: 2802 - protein, 289 aa, Phytophthora idaei
MLNSVGVANTRCELARRVAEAALVTSTRDLREEDAAREYLRLQAPRRRSRRKVRRPRRKNRKKGRSKLKLRRKRNFPKWIRRAKRARHRNNRDIVSVTTREYRHLAGFNRFHAWNESQKRKFSDYNSVIEGMPSFKTSSYEKYLKRLDYFWQHAAFLLRFCLERPYLKWRFFRKRMARVAVDEIARRIVPTVSRLTCVAYGDWSRRDGIKGHAPSPVKGLKEALRKRAMVVSMDEFRTSKICSQCHQSLSSVQYPTPVFPKGVQKPKRRKMKGKVLPRDWSRAEIKSKH

SEQ ID NO: 2803 - protein, 752 aa, Phytophthora idaei
MRRKRKYEDDQEVEIDLVADALAQLPSPSQGTTTAPPTYRLKETTKDINSSVICKLTRVCRLPWLVEEIKKVCVVMKQVQLEGWHLANLHVLRCLKEGDDEVPELTQMFFYRCCAATLGNIEKRDRPKDQTQYKSFHETCQRYWANRERETAYTSESMLNAGALITETAKLMEINALNVIALHFRRRLHQYIRFRYARNYKETKKLVNSCYRVRSEPELDGDGNPTGKTTKVWTEWDETEDPVELELRGWLKIVPWQSQIRANSAHFVHKLYDMLVWIEKYVAEHPNTKGARLYTLLPVATSFQAAYIKLNGSTLHGLFARIIHIPEVEDLLKNELDIVPTKKKTLGAQRPFTKPTFQKNRTEILRKVFDVEQFETRNRKFADEVKTNGYGASILLIRPVTTTLVTVIEKKEATRDKKSKAKTPEEIAEADSFAKDLFKLRADYSPDVLVGIDPGMRSLVTAVSIGHLPSRRRQKSQRGKHCRRRRGRRRKELVTEISTSEYKHLARMNDYRFYHENLKKREPWYAGVIRAMPSFKTSSYDVYLQRLQFFWKHLRFLLAFGSEQAFLRWRFTQDRAKMKALDTLAQRLVPKASKQVCIAYGDWSRRDKIKGHATGPVKGFVEALRKRATVVSMDEYRTSVTCSRCHKRLTQARLLTKVKRKEDGTDIRLKSQPSKKEAKEIAEMAKFRNPKLADKTIVLKYTRNVLRCTNSSCKANFWSRDVNAARNMLELLSSGLKGKHGARRLRAFRRSK

SEQ ID NO: 2804 - protein, 426 aa, Phytophthora idaei
MEDWNMPQVKISTASFKVMRWTVMRRAFAINRFETRKEECLLSKTEFLQLPVEEKYEHASHLFANEVKTDGYSASVLYYRPKHEELDGEDDYLVPEGYSPDVVIGLDPGMRSLCAAAREYLRLQAPRRRSRTKVRRPRRKNWKKGRSKRKLRRKRNFPKWIRCAKRAHHHNNRDIVSVTTREYRHLAGLNRFRALNDSQKRKFPDYKSVIEGMPSFKTSSYEKYLKRLDYFWQHAAFLLRFCLERPYLKWRFFQKRMARVAVDEIARRIVPTVSRLTCVAYGDWSRRDGIKGHAPSPVKGLKEALRKRAMVVSMDEFRMSKLCSQYHQSLSSMQYPTPVFPKAVQKPKRRKMKGKVLPRDWSRAEIKSKHCHVVLRCENENCEARYWDRDVNAAISMLELLKSEVQGRERRGAKWRINAKYCRVDF

SEQ ID NO: 2805 - protein, 471 aa, Bradysia odoriphaga
MKCVNCGNKNHDMFMSVRSLKKDGDASGNMMVNPVLAHYKFKRSIFITKTAVDVAKQLAETGQVVPSRPVPYKHEHKSKSPEQRQTNKGKFETAKQTTLIIIGNFKMRPDSPMKGHPRSALGQFHRELRRRCDMLVQDEHNTTKACYLCRNKLEIAQPPERFAQCRCTNACNRFHSKTQDPSHIFDCYRKAPNLPIKFQCSDRILKLSEPHPRHVNRKVVKDIDSSSTGSCISKQNPVSTRLEHLAAPIFRRIYTTRQKIESNRKVPESVKQNLNLHIQRSMYNIYSRLENVKFPHAMDLRRKPLRKSIKSSTQDSENRRVVFERLCQPQRKPRTESPVKLSVEKRPVSMEVIKRLSVPRKIKSAEQINYKVTSRPLQSEEYYEKLSQPRKILEEIINRETEQKLTSMKRTNEIAVPLSRLQRRKFMKGDNEMKFPVSKAALEYKASANIKKLAQPKTDPSESSGKSKKKK

SEQ ID NO: 2806 - protein, 409 aa, Phytophthora aleatoria
MVGREQIGRIVVTFNDRLLRFGYMLFEKMLNKSQKTWKRKNSRTSSPSLTFSLPDEMERKQESCDDSDESKHEKKVAPHSVMKIKLNPTPEQKKDLAEKYRGVSQKHSLAQYLPDYHLEVPEEVMNETYRDFTKALDSSLALYNSLKERDEKTSFPCLTFKSRKDNTTSVAIQARSVSSLVAGIFRIFPTNFGLKRDEGFKVREAIPEMNCSIRLKMTREAKFYTCIPRVKAFPEMQSNRVCAIDSGVRDIITLYDPGGLILGVTDCKDKIFQRCLSIDRLQSKLASEHRKRHRYRLKKLIYRMYQRIKCMVKDMHQKCSKWLSVNYDEVLLPKFATSEMTQKQKRISSKTSRAMLTWSHYKFKVMLADKMGRTGGRMIECTEPYTSKTWSRCGRINYTIKKQKTFQCP

SEQ ID NO: 2807 - protein, 272 aa, Phytophthora aleatoria
MSVRLQRLREGEYYINVPRLRTFPESKSNRVCAIDPGVVNFATVYDPDGRTFSVKDARSVLKRKFEAVDAMKSILALKDNACKERHQDKVRTKEKKGRKSSKSAEHRFRYRLRRRMRFTSRKASRCVNDMHQKLSCWLSENYHTVLLPSFQTQEMVRKHLKEVASDATPETASVEDNAAIDKRKMRSPTARALMAQAHFKFKQLLKYKMKRTGGRVVDCEEEYTSKTCSGCGTIKNNLGGDRVFRCASCHAVLDRDVSAAKNIFHKNMGLLA

SEQ ID NO: 2808 - protein, 306 aa, Carpediemonas membranifera
MTIERGVTALTPAMKRCLRVHVNWSATKNLTDEQVAEYERDHGDITKLRRVLSVKTDGVSVAVTVWVGREKYRGGRVADRPTYKKGSNNKRARLGQDDAEATPAPDIQALMGFDPGARSLGGYTIRRPDGQSVSGVLAKCGYTATPTLRVNMSAASFKTTSLEALKQSIRFVHENIVQIINEGTRKCFRRATFANHCLRLKHFARAGRQLLDDLGGRPPEPIHLEVAYGAALFGSADTPSCAPYRHFARALPGIMLRHNVVVTVTMVSEFRTSIVCPYCKAHFRRVVHTPHHALPESRVRGSSMAR

SEQ ID NO: 2809 - protein, 421 aa, Carpediemonas membranifera
MVAAFNTAHPPLPGDKLLAGPKLVPLVPMAPIRPGFMHVPCSLNVLNPAWLAQLGVDPEHHTTERMTREQLEALPPNIRRVLSVKTDGVAVDLTVQVGALPYVSRRASGNPTMKRKVRERLGVDDADARPAPDPDAHLMGFDPGARALGGFFIRHPDGTTSSGVVPKCGYTKTPSFAFDMTPASFKSTNLDSLQNSIRFVLLHEQEIFDAGMVKSFRRVRLTNHILRQKHFHRAGELLARTLGWTPRRLPRGIAPPRAAPTRLVVFYGSARFKTPRRVHPCAPYGRFAKSLPHIMRAVNITAEVRMTNEFRTSLVCPFCRARFRRTRYTRRTMRCHNPNCQGAPWYRQQRLNSDPTTTWLNLSHRDKTAAQNILDCGLMADAQYQASAFRNPRPPARLPNYNPNTPITANQPLVFASGQAN

SEQ ID NO: 2810 - protein, 511 aa, Carpediemonas membranifera
MRLWHDEFIIRLCTAFRAARQQCPREFDVWLGEYATSTKLSLVNALEGYCWRLAKIITRVDTALTQRDPDVPRDDITRLRTEQRAVKAIVDEHLAKISTPGRVDEGVLLTLPCVWRISAALGELTDMVAAFNTAHPPLPGDKPLAGPKLVPLVPMAPVRPGFMHALPPNIRRVLSVKTDGVAVDLTVQVGALPYVSRRASGNPTMKRKARERLGVDDADARPAPDPDAHLMGFDPGARALGGFFIRHPDGTTSSGVVPKCGYTKTPSFAFDMTPASFKSTNLDSLQNSVRFVLLHEQEIFDAGMVKSFRRVRLTNHILRQKHFHRAGEQLARTLGWTPRRLPRGIAPPRAAPTGLVVFYGSARFKTPRRVHPCAPYGRFATLLPHIMRAFNITAEVRMTNEFRTSLVCPFCRARFRRTRYTRRTMRCHNRNCQGAPWYRQQRLNSDPTTTTWLNLSHRDKTAAQNILDCGLMTDAQYQASAFRNPARLPNYDPNTLITANQPQVFASGQAN

SEQ ID NO: 2811 - protein, 328 aa, Carpediemonas membranifera
MQAAQYTPMPSKIYTAKASVNKAIGEINGGGDNNAPRRGNLEPGMRSFTQAKHTFTCLLACVSASAHALTPPRTVNLFDQEVLAQIGSSNKRARLGQDDTEATPAPDIQALMGFDPGARSLGGYTIRRPDGQSVSGVLAKCGYTATPSFRVNMSAASFKTTSLEALKQSIRFVHENIVQIINEGTRKCFRRATFANHCLRLKHFTRAGRQLLDDLGGRPPEPIHLEVAYGAALFCSAGTPSCAPYRHFARALPGIMLRHNVVVSVTIVSEFRTSIVCPYCKSHFRRVVHTHRTMLCQNPACEGAPWRVERLRRHPEQRVILLNLSHRD

SEQ ID NO: 2812 - protein, 312 aa, Carpediemonas membranifera
MSLRQPRLVPIVPMAPVRPGFMAYSETMGLLDENFCHRVGINPTLPHATKPLTEEQKRRYRDNPRSMGRLLSLSTDGVCVAVTIKRGFGRYRPQHDASMPVRKRARGREKERPRLGTNNAEAPPAPDPDAHLMGFDPGARSIGGYYIRHPDGTTSSGVLPKCGYTKTPSFGFDMTAASFKSTRLVSINNSIRFVLDNANDIFEAGMRKSFRRVRFANHILRQKHFARCGQQLAREFGRHHPIATPIRLKVFYGSSGFTTPAGMFIPCAPYRKFAREIVPLLKRTAPPSSALTATPPTSEFVRVMTSTFTHIV

SEQ ID NO: 2813 - protein, 364 aa, Carpediemonas membranifera
MGRLLSLSTDGVCVAVTVKRGGHYRPQHDASMPVRKRAKGREKERPRLGTNNADALPAPDPDAHLMGFDPGARSIGGYYIRHPDGTTSSGVLPKCGYTKTPSFGFDMTAASFKSTRLVSINNSIRFVLDNANDIFEAGMRKSFRRVRFANHILRQKHFALCGQQLAREFGWRRHHPIATPIRLKVFYGSSGFTTPAGMFIPCAPYRKFAREIVPLLKGYTIVDLNMANEDRTTVVCPHCHAPYKRVRPRDDQHVHPHRVMLCENPQCRGAQWRATVPDALNVDHRDKSAAETSCGVLLPRKMSSVALRSVAHRSRAFQHHSSIINWLTANIRLRTDDVVCQFGTLIVPFRPCLEVRTMCLYCAT

SEQ ID NO: 2814 - protein, 409 aa, Carpediemonas membranifera
MGRLLSLSTDGVCVAVTVKRGGHYRPQHDASMPVRKRAKGREKERPRLGTNNADALPAPDPDAHLMGFDPGARSIGGYYIRHPDGTTSSGVLPKCGYTKTPSFGFDMTAASFKSTRLVSINNSIRFVLDNANDIFEAGMRKSFRRVRFANHILRQKHFALCGQQLAREFGWRRHLPIATPIRLKVFYGSSGFTTPAGMFIPCAPYRKFAREIVPLLKRYTIVDLNMVNEDRTTVVCPHCHAPYKRVRPRDDQHVHPHRVMLCENPQCRGAQWRATVPDALNVDHRDKSAAETSCGVLLPRKMSSVALRSVAHRSRAFQHHSSIINWLTANIRLRTDDVVQFGTSIVPFRPCLEVRTMCLYCATQKFARRHGYSGEKRAICFPIQACTITRENRTHEFALQGGPEASKRG

SEQ ID NO: 2815 - protein, 583 aa, Carpediemonas membranifera
MPSKIYTVKASVNKAICEINGGGDNNAPRRGNLEPGMRSFTQAKYTFTCLLACVSASAHALTPPRMVNLFDQEVLKQIVSIAQQKVSKAKAADRCRWIGDLAMWRDPDITPLVQDFVTAYSYLGLCKPFDTWLGEYSTATRVRLSRASPGYLTRLRAGLERVRPLLHDQPGVRQDFLDTLGELDTEVAAIAADHDRYHPQMHASPEGQRVGRTGTVAEALVGVLSCVTRMSAAVTKLVTLTRAVNLELSQALPEPKLIPMAPVRPGFMTLERGVTALTPAMKRRLRVHVNWSATKNLTDEQVAEYERDHGDITKLRRVLSVKTDGVSVAVTVWVGREKYRGGSSNKRARLGQDDAEATPAPDIQALMGFDPGARSLGGYTATPSFRVNMSAASFKTTSLEALKQSIRFVHENIVQIINEGTRKCFRRATFANHCLRQKHFARAGRQLLDDLGGRPPEPIHLEVAYGAALFGSAGTPSCAPYRHFARALPGIMLRHNVVVTVTMVSEFRTSIVCPYCKAHFRRVVHTHRTMLCQNPACEGAPWRVERLRRHPEQRETYFSISLTEIRAPARTSFGAPSMQLQIR

SEQ ID NO: 2816 - protein, 539 aa, Carpediemonas membranifera
MVFIVACSWLIVSSYGVSPSLRAWFTRYANSVKLWLARTVKTYRDRLQGSLARLEEALAGVGSPAFFQQELAGVHAILGRVNPEILACLPSLFWAAHMGENDGLPVSEAAPRILSCVWAIADGVEKLSGLISHFNGEYSMSLRQPRLVPIVPMAPVRPGFMAYRETMGLLNENFCHRVGINPTLPHATNPLTEEQKRRYRDNPRSMGRLLSLSTDGVCVAVTVKRGGRYRPQHDASMPVRKRARGREKERPRLGENNADAPPAPDPDAHLMGFDPGARSIGGYYIKHPDGTSSGVLPKCGYTKTPSFGFDMTAASFKSTGLVSINNSIRFVLDNANDIFEAGMRKSFRRVRFANHILRQKHFARCGQQLAREFGRHHPIATPIRLKVFYGSSGFTTPAGMFIPCAPYRKFAREIVPHLKRYNIVVDLNMVNEDRTTVVCPHCHAPYKRVRPRDDQHVHPHRVMLCENPQCRGAQWRATVPDALNVDHRDKSAAENILWRSLATEDELGHSPFSRTLIPRLQTSFQYHQLANRHHSSADG

SEQ ID NO: 2817 - protein, 538 aa, Carpediemonas membranifera
MVFIVACSWLIVSSYGVSPSLRAWFTRYANSVKLWLARTVKTYRDRLQGSLARLEEALAGVGSPAFFQQELAGVHAILGRVNPEILACLPSLFWAAHMGENDGLPVSEAAPRILSCVWAIADGVEKLSGLISHFNGEYSMSLRQPRLVPIVPMAPVRPGFMAYRETMGLLNENFCHRVGINPTLPHATNPLTEEQKKTLPGQPQVNGPSAQPEHRWGLCGGDGKRGGRYRPQHDASMPVRKRARGREKERPRLGENNADAPPAPDPDAHLMGFDPGARSIGGYYIKHPDGTSSGVLPKCGYTKTPSFGFDMTAASFKSTGLVSINNSIRFVLDNANDIFEAGMRKSFRRVRFANHILRQKHFARCGQQLAREFGRHHSIATPIRLKVFYGSSGFTTPAGMFIPCAPYRKFAREIVPHLKRYNIVDLNMVNEDRTTVVCPHCHAPYKRVRPRDDQHVHPHRVMLCENPQCRGAQWRATVPDALNVDHRDKSAAENILWRSLATEDELGHSPFSRTLIPRLQTSFQYHQLANRHHSSADG

SEQ ID NO: 2818 - protein, 504 aa, Carpediemonas membranifera
MTSSSFASAPPSGQLVNSALASSTCGWANMPRAPSWLVNALEGYCWRLAKIITRVDTALTQRDPDVPRDDITRLRTEQRAVKAIVDEHLAKISTPGRVDEGVLLTLPCVWRISAALGELTDMVAAFNTAHPPLPGDKPLAGPKLVPLVPMAPVRPGFMHVPCSLNVLNPAWLAQLGVDPEHHATERMTREQLEALPPNIRRVLSVKTDGVAVDLTVQVGALPYVSRRASGNPTMKRKVRERLGVDDADARPAPDPDAHLMGFDPGARALGGFFIRHPDGTTSSGVVPKCGYTKTPSFAFDITPASFKSTNLDSLQNSIRFVLLHEQEIFDAGMVKSFHRVRLTNHILRQKHFHRAGEQLARTLGLTPRRLPRGIAPPRAAPTRLVVFYGSARFKTPRRVHPCAPYGRFAKALPHIMRAFNITAEVRMTNEFRTSLVCPFCRARFRRTRYTRRTMRCHNPNYQGAPWYRQQRLNSDPTTSTWLNLSHRDKTAAQNILDCGLMTDA

SEQ ID NO: 2819 - protein, 449 aa, Carpediemonas membranifera
MVFIVACSWLIVSSYGVSPSLRAWFTRYANSVKLWLARTVKTYRDRLQGSLARLEEALAGVGSPAFFQQELAGVHAILGRVNPVILACLPSLFWAAHMGENDGLPVSEAAPRILSCVWAIADGVEKLSGLISHFNGEYSMSLRQPRLVPIVPMAPVRPGFMAYGETMGLLNGNFCHRVGINPTRPHATKPLTEEQEEPYQNNPRSMGRLLSLSTDGVCVAVTIKRGFGHYRPQHDASMPVRKRAKGREKERPRLGTNNADAPPAPDPDAHLMGFDPGARSIGGYYIRHPDGSTSSGVLPKCGYTKTPSFGFDMTAASFKSTRLVSINNSIRFVLDNANDIFEAGMRKSFRQVRFANHILRQKHFARCGQQLAREFGWRRHHPIATPIRLKVFYGSSGFTTPAGMFIPCAPYRKFAREIVPLLKRYNIVVDLNMVNEDQVQFGTYTAQHD

SEQ ID NO: 2820 - protein, 360 aa, Carpediemonas membranifera
MGENDGLPVSEAAPRILSCVWAIADGVEKLSGLISHFNGEYSMSLRQPRLVPIVPMAPVRPGFMAYGETMGLLNGNFCHRVGINPTLPHATKPLTEEQEEPYQNNPRSMGRLLSLSTDGVCVAVTIKRGFGHYRPQHDASMPVRKRAKGREKERPRLGTNNADAPPAPDPDAHLMGFDPGARSIGGYYIRHPDGSTSSGVLPKCGYTKTPSFGFDMTAASFKSTRLVSINNSIRFVLDNANDIFEAGMRKSFRQVRFANHILRQKHFARCGQQLAREFGWRRHHPIATPIRLKVFYGSSGFTTPAGMFIPCAPYRKFAREIVPLLKRYNIVVDLNMVNEDQVQLGTLIVPFRPCLGVGNS

SEQ ID NO: 2821 - protein, 532 aa, Carpediemonas membranifera
MWRDPDITPLVRDFVTAYSYLGLCKPFDTWLGEYSTATRVWLSRASPGYLTRLRAGLERVRPLLHDRPGVRQDFLDTQGELDTELAAISADHGMHHRQMHALPEGQRVGRTDTVAEALVGVLSCVTRMSAAVTKLVTLTRAVNLELSQALPEPKLIPFVPMAPVRPGFMTIERGVTALTPAMKRRLRVHVNWSATKNLTDEQVDRYERDHGDSTKLRRVLFVKTDGVSVAVKVWVGREKYRGGRVADRLTYKKGSNNKRARLGQEDAEATPAPDIQALMGFDPGARSLGGYTIRRPDGQSVSGVLAKCGYTATLSFRMNMSAASFKTTSLEALKQSIRFVHENIVQIINEGTRKCFRRATFANHCMRLKHFARAGRQLLDDLGGRPPEPIHLKVAYGAALFGSAGTPSCAPYRHFARALPGIMLRHKVVVSVTMVSEFRTSIVCPYCKAHFRRVVHAYRTMLCQNPACEGAPWRVERLRRHPEQRDILLNLSHRDKSASENILWCTYDATSDQIEQSPFHYDSQRGALPHYH

SEQ ID NO: 2822 - protein, 620 aa, Carpediemonas membranifera
MPSKIYTVKASVNKAIGEINGGGDNNAPRRGNLEPGMRSFTQAKYTFTCLLACVSASAHALTLPRTVNLFDEEVLAQIVSIAQQKVSKAKAADRCRWIGDLAMWRDPDITPLVQDFVTAYSYIGLCKPFDTWLGEYSTATRVWLSRASPGYLTRLRAGLERVRPLLHDRPGVRQDFLDTQGELDTELAAISADHGMHHRQMHALPEGQRVGRTGTVAEALVGVLSCVTRMSAAVTKLVTLTRAVNLELSQALPEPKLVPFVPMAPVRPGFMTLERGVTALTPAMKRRLRVHVNWSATKNLTDEQVDRYERDHGDITKLRRVLFVKTDGVSVAVTVWVGREKYRGGRVADRPTYKKGSNNKRARLALMGFDPGARSLGGYTIRRPDGQSVSGVLAKCGYTATLSFRMNMSAASFKTTSLEALKQSIRFVHENIVQIINEGTRKCFRRATFANHCMRLKHFARAGRQLLDDLGGRPPEPIHLEVAYGAALFGSAGTPSCAPYRHFARALPGIMLRHNVVVSVTMVSEFRTSIVCPYCKAHFRRVVHTYRTMLCQNPACEGAPWRVERLRRHPEQREILLNLSHRDKSASENILWCTYDATSDQIEQSPFHYDSQRGALPHYH

SEQ ID NO: 2823 - protein, 405 aa, Carpediemonas membranifera
MSAAVTKLVTLTRAVNLELSQALPEPKLIPFVPMAPVRPGFMTIERGVTALTPAMKRRLRVHVNWSATKNLTDEQVAEYERDHGDITKLRRVLSVKTDGVSAAVKVWVGREKYRGGRVADRPTYKKGSSNKRARLGQDDAEATPAPDIQALMGFDPGARSLGGYTIRRPDGQSVSGVLAKCGYTATPSFRVNMSAESFKTTSLEALKQSIRFVHENIVQIINEGTRKCFRRATFANHCLRLKHFARAGRQLLDDLGGRPPEPIHLEVANGAALFGSAGTPSCAPYRHFARALPGIMLRHNVVVSVTMVSEFRTSIVCPYCKAHFRRVVHTHRTMRCQNPACEGAPWRVERLRRHPEQRDILLNLSHRDKSASENILWCTFDATSDQIEQSPFHYDSQRGALPRYH

SEQ ID NO: 2824 - protein, 638 aa, Carpediemonas membranifera
MNSRGLNRFSLTAHLSYTRRVADMRASAMIYTVKASVNKAIGEINGGGDKNAPRRGNLEPDMRSFTQAKYTFTCLLACVSASAHALTPPRTVNLFDQEVLKQIVSIAQQKVSKAKAADRCRWIGDLAMWRDPDITPLVQDFYSTATRVRLSRASPGYLTRLRAGLERVRPLLHDEGVRQDFLDTLGELDTEVAAISADHDMHHRQMHALPEEQRVGRTGTVAEALVGVLSCVTRMSAAVTKLVTLARAVNLEFSQALPEPKLIPFVPMAPAKPGFMTIERGVTALTPAMKRRLRVHVNWSATKNLTDEQVAEYERDHGDITKLRRVLSVKTDGVSVAVTVWVGREKYSGGRVADRPTYKKGSNKRARLGQDDAEATPAPDIQALMGFDPGARSLGGYTIRRPDGQSVSGVLAKCGYTATPSFRVNMSAASFKTTSLEALKQSIRFVHENIVQIINEGTRKCFRRATFANHCLRLKHFARAGRQLLDDLGGRPPEPIHLEVAYGAALFGSAGTPSCAPYRHFARALPGIMLRHNVVVSVNMVSEFRTSIVCPHCKAHFRRVVYIHRTMLCQNPACEGAPWRVERLRRHPEQRDTLLNLSHRDKSASENILWCTYDATSDQIEQSPFHYDSQRGALPRYH

SEQ ID NO: 2825 - protein, 272 aa, Carpediemonas membranifera
MGFDPGARSIGGYYIRHPDGTTSTGVLPKCGYTKTPSFGFDMTAASFKSTRLVSINNSIRFVLDNANDIFEAGMRKSFRRVRFANHILRQKHFARCGQQLAREFGWRRHHPIATPIRLKVFYGSSGFTTPAGMFIPCAPYRKFAREIVPLLKGYNIVVDLNMVNEDRTTVVCPHCHAPYKRVRPRDDQHVHPHRVMLCENPQCRGAQWRATVPDALNVDHRDKSAAENILWRSLATEDELGGSPFSRTSIPRLQTSFQYHQLANRQHSSTDG

SEQ ID NO: 2826 - protein, 240 aa, Carpediemonas membranifera
MTPASFKSTNLDSLQNSIRFVLLHEQEIFDAGMVKSFRRVRLTNHILRQKHFHRAGEQLARTLGWTPRRLPRSIAPPRAAPTRLVVFYGSARFKTPRRVHPCAPYGRFATLLPHIMRAFNITAEVRMTNEFRTSLVCPFCRARFRRTRYTRRTMRCHNPNCQGAPWYRQQRLNSDPTTTNWLNLSHRDKTAAQNILDCGLMTDAQYQASAFRNPARLPNYNPNTPITANQPLVFASGQAN

SEQ ID NO: 2827 - protein, 451 aa, Carpediemonas membranifera
MPLWHDEFIIRLCTALRAARQQCPREFDVWLGEYATSTKLWLVNALEGYCWRLAKIITRVDTALTQRDPDVPRDDITRLRTEQRAVKAIVDEHLAKISTPGRVDEGVLLTLPCVWRISAAPGELTDMVAAFNPAHPPLPGDKPLAGPKLVPMAPVRPGFMHVPCSLNVLNPAWLAQLGVDPEHHATERMTREQLEALPPNIRRVLSVKTDGVAVDLTVQVGALPYVSRRASGNPTMKRKARERLDPDAQVMGFDPGARALGGFFIRHPDGTTSSGVVPKCGYTKTPSFAFDMTPASFKSTNLDSLQNSVRFVLLHEQEIFDAGMVKSFRRVRLTNHILRQKHFHRAGEQLARTLGWTPRRLPRGIAPPRAAPTRLVVFYGSARFKTPRRVHPCAPYGRFATLLPHIMRAFNITAEVRMTNEFRTSLVCPFCRARFRRTRYTRRTMRCHNPN

SEQ ID NO: 2828 - protein, 386 aa, Carpediemonas membranifera
MHVPCSLNVLNPAWLAQLGVDPEHHATERMTREQLEALPPNIRRVLSVKTDGVAVDLTVQVGALPYVSRRASGNPTMKRKVRERLGVDDADARPAPDPDAHLMGFDPGARALGGFFIRHPDGTTSSGVVPKCGYTKTPSFVFDMTPASFKSTNLDSLQNSVRFVLLHEQEIFDAGMVKSFRRVRLTNHILRQKHFHRAAEQIARTLGWTPRRLPRGIAPPRAAPTRLVVFYGSARFKTPRRVHPCAPYGRFATLLPRIMRAFNITAEVRMTNEFRTSLVCPFCRARFRRTRYTRHTMRCHNPNCQGAPWYRQQRLNSDPTTTTWLNLSHRDKTAAHNIVDCGLMTDAQYQASAFRNPRPPARLPNYSPNTPITANQPLVFASGQAN

SEQ ID NO: 2829 - protein, 264 aa, Carpediemonas membranifera
MGFDPGARSIGGYYIRHPDGTTSSGVLPKCGYTKTPSFGFDMTAAPFKSTRLVSINNSIRFVLDNANDIFEAGMRKSFRRVRFANHILRQKHFARCGQQLAREFGRHHPIATPIRLKVFYGSSGFTTPAGMFIPCAPYRKFAREIVPLLKGYNIVVDLNMVNEDRTTVVCPHCHAPYKRVRPRDDQHVHPQRVMLCENPQCRGAQWRATVPDALNVDHRDKSAAENILWRSLATEDELSGSPFSRTLIPRLPTSFQYHQLANRT

SEQ ID NO: 2830 - protein, 612 aa, Carpediemonas membranifera
MPSKIYTVKASVNKAIGEINGGGDNNAPRRGNLEPGMRSFTQAKYTFTCLLACVSASAHALTPPRTVNLFDQEVLKQIVSIAQQKVSKAKAADRCRWIGDLAMWRDPDITPLVRDFREAYVGIAAPFQSWLGEYSTATRVWLSRASPGYLTRLRAGLERVRPLLHDQPGVRQDFLDTLGELDTEGQRVGRTDTVAEALVGVLSCVTRMSAAVTKLVTLTRAVNLELSQALPEPKLIPFVPMAPVRPGFMTLERGVTALTPAMKRRLRVHVNWSATKNLTDEQVAEYERDHGDITKLRRVLSVKTDGVSVAVTVWVGREKYRGGRVADRPTYKKGSNNKRARLGQDDAEATPAPDIQALMGFDPGARSLGGYTIRRPDGQSVSGVLAKCGYTATLSFRMNMSAASFKTTSLEALKQSIRFVHENIVQIINEGTRKCFRRASFANHCLRLKHFARAGRQLLDDLGGRPPEPNHLEVAYGAALFGSAGTPSCAPYRHFAQALPGIMLRHNVVVSVDMVSEFRTSIVCPYCKAHFRRVVHTHRTMLCQNPACEGAPWRVERLRRHPEQRDIHLNLSHRDKSASENILWCTFDATSDQIEQSPFHHDSQRGALPRYH

SEQ ID NO: 2831 - protein, 405 aa, Carpediemonas membranifera
MSAAVTKLVTLTRAVNLELSQALPEPKLIPFVPMAPVRPGFMTIEYGHISLTPAMKRRLRVYRDWSAKSNLTDEQDDRYERDHGDITKLRRVLSVKTDGVSVAVTVWVGREKYRGGRVADRPTYKKGNKNKRARLGQDDAEATPAPDIQALMGFDPGARSLGGYTIRRPGGQGVSGVLAKCGYTATPSFRVNMSAASFKTTSLEALKQSIRFVHENIVQIINEGTRKCFRRATFANHCLRLKHFARAGRQLLDDLGGRTPEPIHLKVAYGAALFGSAGTPSCAPYRHFARALPGIMLRHNVVVTVTMVSEFRTSIVCPYCKAHFRRVVHTYRTMLCQNPACEGAPWRVERLRRHPEQRDILLNLSHRDKSASENILWCTYDATSDQMEQSPFHYDSQRGALPRYH

SEQ ID NO: 2832 - protein, 450 aa, Carpediemonas membranifera
MSLRQPRLVPIVPMAPVRPGFMAYGETMGQLNENFCHRVGINPTLPHATKPLTEEQEEQYQNNPRSMGRLLSLSTDGVCVAVTVKRGGRYRPQHDASMPVRKRAKWREKERPRLGTNNAEAPPAPDPDAHLMGFDPGARSIGGYYIRHPDGTTSSGVLPKCGYTKTPSFGFDMTAASFKSTRLVSINNSIRFVLDNANDIFEAGMRKSFRRVRFANHILRQKHFALCGQQLAREFGWRGHHPIAPPIRLKVFYGSSGFTAPAGMFIPCAPYRKFAREIVPLLKRYSIVVDLNMVNEDRTTVVCPHCHAPYKRVRPRDDQHVHPHRVMLCENPQCRGAQWRATVPDALNVDHRDKSAAETSCGVLLPRKMSSVALRSVAHRSRAFQHHSSIINWLTANIRLRTDDVVQFGTLIVPFRPCLGGSNNVFILRNRSGTVGWDNYLQRGQPPRQR

SEQ ID NO: 2833 - protein, 265 aa, Carpediemonas membranifera
MGLLNDNFCHRVGINHALPHATKPLTEEQKRRYRDNPRSMGRLLSLSTDGVCVAVTIRRGFGHYRPQHDASMPVRKRAKWREKERPRLGTNNADAPPAPDPDAHLMGFDPGARSIGGYYIRHPDGTTSSGVLPKCGYTKTPSFGFDMTAASFKSTRLVSINNSIRFVLDNANDIFEAGMRKSFRRVRFANHILRQKHFARCGQQLAREFGRHHPIATPIRLKVFYGSSGFTTPAGMFIPCAPYRKFAREIVPLLKGITLSSILTW

SEQ ID NO: 2834 - protein, 358 aa, Carpediemonas membranifera
MVAAFNTAHPPLPGDKPLAGPKLVPLVPMAPVRPGFMHVPCSLNVLNPAWLAQLGVDPEHHATERMTREQLEALPPNIRRVLSVKTDGVAVDLTVQVGALPYVNRRASGNPTMKRKVRERLGVDDADARPAPDPDAHLMGFDPGARALGGFFIRHPDGTTSSGVVPKCGYTKTPSFAFDMTPASFKSTNLDSLQNSIRFVLLHEQEIFDAGMVKSFRRVRLTNHILRQKHFHRAGELLARTLGWTPRRLPRGIAPPRAAPTRLVVFYGSARFKTPRRVHPCAPYGRFAKSLPHIMRAFNITAEVRMTNEFRTSLVCPFCRARFRRTRYTRRTMRCHNPNCQGAPWYRQQRLNSNPTST

SEQ ID NO: 2835 - protein, 241 aa, Carpediemonas membranifera
MLMAHRIVVWSESQSPAWFTRYANSVKLWLARTVKTYRDRLQGSLARLEEALAGVGSPAFFQHFARCGQQLAREFGRHHPVATPIRLKVFYGSSGFTTPTGMFIPCAPYRKFAREIVPLLKRYNIVVDLNMVNEDRTTVVCPHCHAPYKRVRPRDDQHVHPHRVMLCENPQCRGAQWRATVPDALNVDHRDKSAAENILWRSLATEDELSGSPFSRTSIPRLPTSFQYHQLANRQHSSTDG

SEQ ID NO: 2836 - protein, 518 aa, Carpediemonas membranifera
MWRDPDITPLVRDFREAYVGIAFPFQSWLGEYSTATRVWLSRASPGYLTRLRAGLERVRPLLHDRPGVRQDCLDTIGELDTEVAAIAADHGMHHPQMHALPEGQRVGRTGTVAEALVGVLSCVTRMSAAVTKLVTLTRAVNLELSQALPEPKLVPFVPMAPVRPGFMTIEYGYMSLTPAMKRRLRVHQVDRYERDHGDITKLRRVLSVKTDGVSAAVTVWVGREKYRGGRVADRPTYKKGSNNKRARLGQDDAEATPAPDIQALMGFDPGARSLGGYTIRRPDGQSVSGVLAKCGYTATPSFRVNMSAASFKTTSLEALKQSIRFVHENIVQIINEGTRKCFRRATFANHCLRLKHFARAGRQLLDDLGGRPPEPIHLEVAYGAALFGSAGTPSCAPYRHFARALPGIMLRHNVVVTVTMVSEFRTSIVCPHCKAHFRRVVHTHRTMLCQNPACEGAPWRVERLRRHPEQRDTLLNLFHRDKSASENILWCTYDTTSDQIEQSPFHYDSQRGALPRYH

SEQ ID NO: 2837 - protein, 469 aa, Carpediemonas membranifera
MTSIYTVKFSISSILHNRRNVIPFIADFYAGLENKLCSFTKAKISTPGRVDEGVLLTLPCVWRISAALGELTDMVAAFNTAHPPLPGDKPLAGPKLVPLVPMAPIRPGFMHVPCSLNVLNPAWLAQLGVDPEHHATERMTREQLEALPPNIRRVLSVKTDGVAVDLTVQVGALPYVSRRASGNPTMKRKARERLVWMTRMLAPRQTPMPTSWVRPGCSGSGWILHPPPRWHHLRCGPETNLDSLQNSVRFVLLHEQEIFDAGMVKSFRRVRLTNHILRQKHFHRAGEQLARTLGWTPRRLPRGIAPPRAAPTRLVVFYGSARFKTPRRVHPCAPHGRFATLLAHIMRAFNITAEVRMTNEFRTSLVCPFCRARFRRTRYTRRTMRCHNPNCQGAPWYRQQRLNSDPTTTWLNLSHRDKTAAQNILDCGLMTDAQYQASAFRNPARLPNYNPNTPITANQPLVFASGQAN

SEQ ID NO: 2838 - protein, 210 aa, Carpediemonas membranifera
MGRLLSLSTDGVCVAVTVKRGGHYRPQHDASMPVRKRARGREKERPRLGTNNAEAPPAPDPDAHLMGFDPGARSIEGYYIRHPDGTTSSGVLPKCGYTKTPSFGFDMTAASFKSTRLVSINNSIRFVLDNANDIFEAGMRKSFRRVRFANHILRQKHFARCGQQLAREFGRHHPVATPIRLKVFYGSSGFSPRLLVCSFLARHIESSRER

SEQ ID NO: 2839 - protein, 508 aa, Carpediemonas membranifera
MCVVNVIGSFTAKRRASHDQHLYGATSTKLWLVKALEGYCWRLAKVITRVDTALTQRDPDVPRDDITRLRTEQRAVKAIVDEHLAKISTPGRVDEGVLLTLPCVWRISAALGELTDMVAAFNTAHPPLPGDKPLAGPKLVPLVPMAPVRPGFMHVPCSLNVLNPAWLAQLGVDPEHHATERMTREQLEALPPNIRRVLSVKTDGVAVDLTVQVGALSYVSRRASGNPTMKRKVRERLGVDDADARPAPDPNAHLMGFDPGARSLGGYTIRRPDGQSVSGVLAKCGYTATPSFRVNMSAASFKTTSLEALKQSIRFVHENIVQIINEGTRKCFRRATFANHCLRQKHFARAGRQLLDDLGGRPPEPIHLEVAYGAALFGSAGTPSCAPYRHFARALPGIMLRHNVVVIVTMVSEFRTSIVCPYCKAHFRRVVHTHRTMLCQNPACEGAPWRVERLRRHPEQRDILLNLSHRDKSASENILWCTFDATSDQIEQSPFHYDSQRGALPRYH

SEQ ID NO: 2840 - protein, 351 aa, Carpediemonas membranifera
MKRRLRVHVNWPANKNLTDEQVDRYERDHGDITKLRRVLSVRTDRVSVAVKVWVGREKYRGGRVADRPTYKKGSNNKRARLGQDDAEATPAPDIQARMGFDPGARSLDGYTIRRPDGQSVSGVLAKCGYTATPSFRVNMSAASFKTTSLEALKQSIRFVHENIVQIINEGTRKCFRRETFANHCLRLKHFARAGRQLLDDLGGRPPEPIHLEVAYGAALFGSAGTPSCAPYRHFARALPGIMLRHNVVVTVTMVSEFRTSIVCPYCKAHFRRVVHTHRTMLCQNPACEGAPWRVERLRRHPEQRDILLNLSHRDKSASENILWCTFDATSDQIEQSPFHYDSQRGALPRYH

SEQ ID NO: 2841 - protein, 327 aa, Carpediemonas membranifera
MVFIVGSYMSSSSMISCTPVVRNKMEIYTIKASIKQAFRQDYTEERRVGDYAAAKYLYSCLLARLTVECYAQRRQLPYMTPTSTKDCSLMYAAVIRVRPTRPSCSRSTLCRCGGRLPYLSINNSIRFVLDNANDIFEAGMRKSFRRVRFANHILRQKHFACCGQQLAREFGRHHPIATPIRLKVIYGSSGFTTPTGMFIPCAPYRKFAREIVPLLKRLDNIVVDLNMVNEDRTTVVCPHCHAPYKRVRPRDDQHVHPHRVMLCENPQCRGAQWRATVPDALNVDHRDKSAAENILWRSLATEDELSGSPFSRIDPTSSNIIPVSSIG

SEQ ID NO: 2842 - protein, 272 aa, Carpediemonas membranifera
MGFDPGARSIGGYYIRHPDGTTSSGVLPKCGYTKTPSFGFDMTAASFKSTRLVSINNSIRSVLDNANDIFEAGMRKSFRRVRFANHILRQKHFARCGQQLAREFGWLRHHPIATPIRLKAFYGSSGFTTPTGMFIPCAPYRKFAREIAPLLKRHNIVVDLNMVNEDRTTVVCPHCHAPYRRVRPRDDQHVHPHRVMLCEKPQCHGAQWRATVPDALNVDHRDKSAAKNILWRSLATEDELSGSPFSRTSIPRLQTSFQYHQLANRQHSSTDG

SEQ ID NO: 2843 - protein, 322 aa, Carpediemonas membranifera
MSAAVTKLVTLTRAVNLELSQALPEPKLVPFVPMAPVRPGFITIERGVTALTPAMKRRLRVHVDRYERDHGDITKLRRVLSVKTDGVSVAVTVWVGREKYRGGRVADRPTYKKGSSNKRARLGQDDAEATPAPDIQALMGFDPGARSLGGYTIRRPDRQSVSGVLAKCGYTATPSFRVNMSAAVVYGAALFGSAGTPSCAPYRHFARALPGIMLRHNVVVSVMMVSEFRTSIVCPYCKAHFRRVVHTHRTMLCQNPACEGAPWRVERLRRHPEQRDILLNLSHRDKSASENILWCTFDATSDQIEQSPFHYDSRRGALPRYH

SEQ ID NO: 2844 - protein, 213 aa, Carpediemonas membranifera
MSAASFKTTSLEALKQSIRSVHENIVQIINEGTRKCFRRETFANHCLRLKHFARAGRQLLDDLGGRPPEPIHLEVAYGAALFGSAGTPSCAPYRHFARALPGIMLRHNVVVTVTMVSEFRTSIVCPYCKAHFRRVVHTHRTMLCQNPACEGAPWRVERLRRHPEQRDILLNLSHRDKSASENILWCTFDATSDQIEQSPFHYDSQRGAHPHYH

SEQ ID NO: 2845 - protein, 530 aa, Carpediemonas membranifera
MWRETTTRDLVAQLEGRAESHGVSPSLRKWFTRYANSVKLWLARTVTTYRDRLQSTLARLEEALAGVGSPAFFQQELAGVHAILNMVNPEILACLPSLFWATHMGENDGLPVSQAAPRILSCVWAIADGVETLSGLISHFNGEYSMSLRQPRLVPIVPMAPVRPGFMAYGETMGLLNDNFCHRVGINPTLPHATRRLLSLSTDGVCVAVTVKRGGRYRPQHDASMPVRKRAKWREKERPRLGTNNADAPPAPDPDSHLMGFDPGARSIGGYYIRHPDGTTSSGVLPKCGYTKTPSFGFDMTAASFKSTRLVSINNSIRFVLDNANDIFEAGMRKSFRRVRFANHILRQKHFARCGQQLAREFGWRRHHPIATHIRLKVFYGSSGFTTPAGMFIPCAPYRKFAREIVPLLKGYNIVVDLNMVNEDRTTVVCPHCHAPYKRVRPRDDQHVHPHRVMLCEKPQCRGAQWRATVPDALNVDHRDKSAAENILWRSLATEDELSGSPFSRTLIPRLPTSFQYHQLANRQHSSTDG

SEQ ID NO: 2846 - protein, 280 aa, Carpediemonas membranifera
MDKLNNNKRARLGQDDAEATPAPDIQALMGFDPGARSLGGYTIRRPDGQSVSGVLAKCGYTATPSFRVNMSAASFKTTSLEALKQSIRFVHENIVQIINEGTRKCFRRATFANHCLRQKHFARAGRQLLDDLGGRPSEPIHLEVAYGAALFGSAGTPSCAPYRHFARALPGIMLRHNVVVTVTMVSEFRTSIVCPYCKAHFRRVVHTHRTMLCQNPACEGAPWRVERLRRHPEQRDILLNLSHRDKSASENIHWCTFDATSDQIEQSPFHSQRGALPRYH

SEQ ID NO: 2847 - protein, 509 aa, Carpediemonas membranifera
MTSIYTVKFSISSILHNRRNVIPFIADFYAGLENKLCSFTKAKYFHTCILSYIAACCHHANLSLPVHDQALHQAIVIVAYRRSGEYRNLAADSLVDRFLGAKKYAAVRQVVTSIAEMPLWHDEFIIRLCTALRAARQQCPREFDVWLGEYATSTKLWLVNALEGYCWRLAKIITRVDTALTQRDPDVPRDDITRLRTEQRALTDMVAAFNTAHPPLPGDKPLAGPKLVPLVPMAPVRPGFMHVPCSLNVLNPAWLAQLGVDPEHHATERMTREQLEALPPNIRRVLSVKTDGVAVDLTVQVGALPYVNRRASGNPTMKRKARERLGVDDADARPAPDPDAQVMGFDPGARALCGFFIRHPDGTTSSGVVPKCGYTKTPSFAFDMTPASFKSTNLDSLQNSIRFVLLHEQEIFDAGMVKSFRRVRLTNHILRQKHFHGAGEQLARTLGWTPRRLPRGIAPPRAAPTRLVVFYGSARFKTPRRVYPCAPYGRFATLLPHIMRAFNILLKGG

SEQ ID NO: 2848 - protein, 336 aa, Carpediemonas membranifera
MGRLLSLSTDGVCVAVTVKRGGHYRPQHDASMPVRKRARGREKERPRLGTNNADAPPAPDPDAHLMGFDPGARSIGWYYIKHPDGTSSGVLPKCGYTKTPSFGFDMTAASFKSTRLVSINNSIRFVLDNANDIFEAGMRKSFRRVRFANHILRQKHFARCGQQLAREFGWLRHHPIATPIRLKVFYGSSGFTTPAGMFIPCAPYRKFAREIVPLLKGYNIVVVLNMVNEDRTTVVCPHCHAPYKRVRPRDDQHVHPHRVMLCEKPQCRGAQWRATVPDALNVDHRDKSAAENILWRSLATEDELSGSPFSCTLIPRLPTSFQYHQLANRQHSSTDG

SEQ ID NO: 2849 - protein, 405 aa, Carpediemonas membranifera
MSAAVTKLVTLTRAVNLELSQALPEPKLIPFVPMAPVRPGFMTIEYDYMSLTPAMKRRLRVHVNWSATKNLTDEQVAEYERDHGDITKLRRVLSVKTDGVSVAVTVWVGREKYRGGRVADRPMYKKGSNNKRAQLGQDDAEATPAQDIQALMGFDPGARSLGGYTIRRPDGQSVSGVLAKCGYTATPSFRVNMSAASFKTTSLEALKQSIRFVHENIVQIINEGTRKCFRRATFANHRLRQKHFARAGRQLLDDLGGRPPEPIHLEVAYGAALFGSAGTPSCAPYRHFARALPGIMLRHNVVVIVTMVSEFRTSIVCPYCKAHFRRVVHTHRTMRCQNPACEGAPWRVERLRRHPEQRDILLNLSHRDKSASENILWCSFDATSDQIEQSPFHYDSQRGALPRYH

SEQ ID NO: 2850 - protein, 288 aa, Carpediemonas membranifera
MGLLNGNFCHRVGINPTLPHATKPLTEEQEEPYQNNPRSMGRLLSLSTDGVCVAVTIKRGFGRYRPQHDASMPVRKRARGREKERPRLGTNNAEAPPAPDPDAHLMGFDPGARSIGGYYIRHPDGTTSSGALPKCGYTKTPSFGFDMTAASFKSTRLVSINNSIRFVLDNANDIFEAGMRKSFRRVRFANHILRQKHFARCGQQLAREFGWLRHHPIATPIRLKVFYGSSGFTTPAGMFIPCAPYRKFAREIVPLLKGYNIVVDLNMVNEDRTTVFVRVMTSTFTHIV

SEQ ID NO: 2851 - protein, 572 aa, Carpediemonas membranifera
MPSKIYTVKASVNKAIGEINGGGDNNAPRRGNLEPGMRSFTQAKYTFTCLLACVSASAHALTPPRTVKLFDQEVLKQIVSIAQQKVSKAKAADRCRWIGDLAMWRDPDITPLVRDFREAYVGIAAPFQSWLGEYSTATRVWLSRASPGYLTRLRAGLERVRPLLHDQPGVRQDFLDTLGELDTEVAAIAADHDRYHPQMHALPEEQRVGRTGTVAEALVGVLSCVTRMSAAVTKLVTLTRAVNLELSQALPEPKLVPFVPMAPVRPGFMTLERGVTALTPAMKRRLRVHVNWSATKNLTDEQVAEYERDHGDITKLRRVLSVKTDGVSVAVTVWVGREKYRGGRVADRPTYKKGSNNKRAQLGQDDAEATPAQDIQALMGFDPGARSLGGYTIRRPDGQSVSGVLAKCGYTATPSFRVNMSAASFKTTSLEALKQSIRFVHENIVQIINEGTRKCFRRATFANHRLRLKHFARAGRQLLDDLGGRPPEPIHLEVAYGAALFGSAGTPSCAPYRHFARALTGIMFRHNVVMSVTMVSEFRTVPILQSTLQTCGVHTPHHALPESRVRGSSMAR

SEQ ID NO: 2852 - protein, 402 aa, Carpediemonas membranifera
MSLRQPRLVSIVPMAPVRPGFMAYGETMGQLNENFCHRVGINPTLPHATKPLTEEQEEPYQNNPRSMGRLLSLSTDGVCVAVTIRRGFGHYRPQHDASMPVRKRAKWREKERPRLGTNNADAPPAPDPDAHLMGFDPGARSIGGYYIRHPDGTTSSGVLPKCGYTKTPRFGFDMTAASFKSTRLVSINNSIRFVLDNANDIFEAGMRKSFRRVRFANHILRQKYFAHCGQQLAREFGRHHPIATSIRLKVFYGSSGFTTPAGMFIPCAPYRKFAREIVPLLKRYNIVVDLNMVNEDRTTVVCPHCHAPYKRVRPRDDQHVHPHRVMLCENPQCRGAQWRATVPDALNVDHRDKSAAENILWRSLATEDELSGSPFSRTSIPRLPTSFQHHQLANRQHSSTDG

SEQ ID NO: 2853 - protein, 254 aa, Carpediemonas membranifera
MGFDPGARSLGGYTIRRPDGQSVSGVLAKCGYTATPSFRVNMSAASFKTTSLEALKQSIRFVHKNIVQIINEGTRKCFRRETFANHCLRLKHFAQAGRQLLDDLGGRPPEPIHLEVAYGAALFGSAGTPSCAPYRHYARALPGIMFRHNVVVSVTMVSEFRTSIVCPYCKAHFRRVVHTHRTMLCQNPACEGAPWRVERLRRHPEQRDILLNLSHRNKSASENILWCTYDATSDQIEQSPFHYDSQRGALPRYH

SEQ ID NO: 2854 - protein, 625 aa, Carpediemonas membranifera
MQAAQYTPMPSKIYTVKASVNKAIGEINGGGDNNAPRRGNLEPGMRSFHVLFTQAKYTFTCLLACVSASAHALTPPRTVNLFDEEVLKQIVIAQQKVSKAKAADRCRWIGDLAMWRDPDITPLVRDFREAYVGIAFPFQSWLDEYSTATRVWLSRASPGYLTRLRAGLERVRPLLHDQPGVRQDFLDTLGELDTEVAAIAADHGMHHRQMHALPEEQRVGRTGTVAEALVGVLSCVTRMSAAVTSLVTLTRAVNLELSQALPEPKLVPFVPMAPVRPGFMTIERGVTALTPAMKRRLRVHRDHGDITKLRRVLSVKTDGVSVAVTVWVGREKYRGGRVADRPTYKKGSSNKRARLGQDDAEATPAPDIQARMGFDPGARSLGGYTIRRPDGQSVSGVLAKCGYTATPSFRVNMSAASFKTTSLEALKQSIRFVHENIVQIINEGTRKCFHRETFANHCLRLKHFARAGRQLLDDLGGRPPEPIHLEVAYGAALFGSAGTPSCAPYRHYARALPGIMFRHNVVVSVTMVSEFRTSIVCPYCKAHFRRVVHTHRTMLCQNPACEGAPWRVERLRRHPEQRDILLNLSHRNKSASENILWCTYDATSDQIEQSPFHYDSQRGALPRYH

SEQ ID NO: 2855 - protein, 270 aa, Carpediemonas membranifera
MGFDPGARSIGGYYIRHPDGTTSSGVLPKCGYTKTPSFGFDMTAAPFKSTRLVSINNSIRFVLDNANDIFEAGMRKSFRRVRFANHILRQKHFARCGQQLAREFGRHHPIATPIRLKVFYGSSGFTTPAGMFIPCAPYRKFAREIVPLLKGYNIVVDLNMVNEDRTTVVCPHCHAPYKRVRPRDDQHVHPHRVMLCENPQCRGAQWRATVPDALNVDHRDKSAAENILWRSLATEDELGGSPFSRTSIPRLPTSFQYHQLVNRQHSSTDG

SEQ ID NO: 2856 - protein, 532 aa, Carpediemonas membranifera
MWRDPDITPLVQDFVTAYSYIGLCKQFDTWLGEYSTSTRVWLSRASPGYLTRLRAGLERVRPLLHDQPGVRQDFLDTLGELDTEVAAIAADHGRYHPQIHALPEGQRVGRTGTVAEALVGVLSCVTRMSAAVTKLVTLTRAVNLELSQALPEPKLVPFVPMAPVKPGFMTLERGVTALTPAMKRRLRVHVNWSATKNLTDEQVAEYERDHGDITKLRRVLSVKTDGVSVAVTVWVGREKYRGGRVADRPTYKKGSNNKRARLGQDDAEATPAPDIQALMGFDPGARSLGGYTIRRPDGQSVSGVLAKCGYTATPSFRVNMSAASFKTTSLEALKQSIRFVHENIVQIINEGTRKCFRRATFANHCLRLKHFARAGRQLLDDLGGRPPEPIHLEVAYGAALFCSAGTPSCAPYRNFARALPGIMLWHNVVVSVTMVSEFRTSIVCPYRKAHFRRVVHTHRTMLCQNPACEGAPWRVERLRRHPEQRDILLNLSHRDKSASENILWCTFDATSDQIEQSPFHYDSQRGALPRYH

SEQ ID NO: 2857 - protein, 642 aa, Carpediemonas membranifera
MQAAQYTPMPSKIYTVKASVNKAIGEINGGGDNNAPRRGNLEPGMRSFAQAKDTFTCLLACVSASAHALTPPRTVNLFDQEVLKQIVSIAQQKVSKAKAADRCRWIGDLAMWRDPDITPLVQDFVTAYSYIGLCKQFDTWLGEYSTSTRVWLSRASPGYLTRLRAGLERVRPLLHDQPGVRQDFLDTRGELDTEVAAIAADHDRYHPQIHASPEGQRVGHTGTVAEALVGVLSCVTRMSAAVTKLVTLTRAVNLELSQALPEPKLVPFVPMAPVRPGFMTIDRGVTALTPAMKRRLRVHVNWSATKNLTDEQVAEYERDHGDITKLRRVLSVRTDGVSAVVTVWVGREKYRGGRVADRPTYKKGSNNKRARLGQDDAEATPAPDIQALMGFDPGARSLGGYTIRRPDGQSVSGVLAKCGYTATPSFRVNVSAASFKTTSLEALKQSIRFVHENIVQIINEGTRKCFRRATFANHCLRLKHFARAGRQLLDDLGGRPPEPIHLEVAYGAALFGSAGTPSCAPYRHFARALPGIMLWHNVVVSVTMVSEFRTSIVCPYCKAHFRRVVHTYRTMLCQNPACEGAPWRVERLRRHPEQRDILLNLSHRDKSASENILWCTFDATSDQIEQSPFHYDSQRGALPRYH

SEQ ID NO: 2858 - protein, 266 aa, Carpediemonas membranifera
MTPKLLLPRTFKLSWASTLVLGRWAATRSSAQTGRVYLSGVLAKCGYTATPTFRVNMSAASFKTTSLEALKQSIRFVHENIVQIINEGTRKCFRRATFANHCLRLKHFARAGRQLLDDLGGCPPEPIHLEVAYGAALFGSAGTPSCAPYRHFARALPGIMLRHNVVVSAHMVSEFLTAKHTSDVWCTHTAPCSARITRARELHGALNGYVGIPSRERHTSQSLSPRYERQREHPLVHLRCNFRSDRAISFPLRLPERCSSSLSLTS

SEQ ID NO: 2859 - protein, 319 aa, Carpediemonas membranifera
MIDAVLSVKTDGVSVAVTVWVGREKYRGGRVADRPTYKKGSSNKRAQLGQDDAEATPAPDSRTALMDFDPGARSLGGYTIRRPDGQSVSGVLAKCGYTATPSFRVNMSAASFKTTSLEALKQSIRFVHENIVQIINEGTRKCFRRATFANHRLRLKHFARAGRQLLDDLGGRPPEPIHLKVAYGAALFGSAGTPSCAPYRHFARALPGIMLRHNVVVSVTMVSEFRTSIVCPYCKAHFRRVVHTRRTMLCQNPACEGAPWRVERLRRHPEQRDTLLNLSHRDKSASENILWCTFDATSDQIEQSPFHYDSQRGALPRYH

SEQ ID NO: 2860 - protein, 319 aa, Carpediemonas membranifera
MRSFTQAKYTFTCLLACVSASAHALTPPRTVNLFDEEVLKQIVSIAQQKVSKAKAADRCRWIGDLAMRRDPDITPLVRDFREAYVGIAFPFQSWLGEYSTATRVWLSRASPGYLTRLRAGLERVRPLHENIVQIINEGTRKCFRRASFANHCLRLKHFARAGRQLLDDLGGRPPEPIHLEVAYGAALFGSAGTPSCAPYRHFARALPGIMLRHNVVVSVTMVSEFRTSIVCPYCKAHFRRVVHTHRTMLCQNPACEGAPWRVERLRRHPEQRDILLNLSHRDKSASENILWCTFDATPDQIEQSPFHYDSQRGALPRYH

SEQ ID NO: 2861 - protein, 439 aa, Carpediemonas membranifera
MHHRQMHASPEGQRVGRTGTVAEALVGVLSCVTRMSAAVTKLVTLTRAVNLELSQALPEPKLVPFVPMAPVRPGFMTIERGVTALTPAMKRRLRVHVNWSATKNLTDEQVDRYERDHGDITKLRRVLSVRTDGVSVAVTVWVGREKYSGGRVADRPTYKKGSSNKRARLGQDDAEATPAPDIQALMGFDPGARSLDGYTICRPDGQSVSGVLAKCGYTATPSFRVNMSAASFKTTSLEALKQSIRFVHENIVQIINEGTRKCFRRATFANHCLRQKHFARAGRQLLDDLGGRPPEPIHLEVAYGAALFGSAGTPSCAPYRHFARALPGIMLRHNVVVSVTMVSEFRTSIVCPYCKAHFRRVVYTHRTMLCQNPACEGAPWRVERLRRHPEQRDTLLNLSHRDKSASENILWCTYDATSDQIEQSPFHYDSQRGALPRYH

SEQ ID NO: 2862 - protein, 401 aa, Carpediemonas membranifera
MSLRQPRLVPIVPMAPVRPGFMAYSETMGLLNDNFCHRVGINPTLPHATKPLTEEQEEQYQNNPRSMCRLLSLSTDGVCVAVTVKRGGRYRPQHDASMPVRKRAKWREKERPRLGTNNAEAPPAPDPDAHLMGFDPGARSIGGYYIRHPDGTISSGVLPKCGYTKTPSFGFDMTAASFKSTRLVSINNSIRFVLDNANDIFEAGMRKSFRRVRFANHILRQKHFARCGQQLAREFGRHHPIATPIRLKVFYGSSGFTTPAGMFIPCAPYRKFAREIVPLLKGYNIVVDLNMVNEDRTTVVCPHCHAPYKRVRPRDDQHVHPHRVMLCENPQYRGAQWRATVPDALNVDHRDKSAAENILWRSLATEDELSGSPFSRTSIPRLPTSFQYHQLANRQHSSTDG

SEQ ID NO: 2863 - protein, 227 aa, Carpediemonas membranifera
MGFDPGARSLGGYTIRPDRQSVSGVLAKCGYTATPSFRVNMSVASFKTTSLEALKQSIRFVHENIVQIINEGTRKCFRRATFANHCLRLKHFARAGRQLLDDLGGRPPEPIHLEVAYGAALFGSAGTPSCAPYRHFARALPGIMLRHNVVVSVTMVSEFRTSIVCPHCKAHFRRVVHTHRTMLCQNPACEGAPWRVERLRRHPEQRDILLNLSHRDAKLSKHALQRA

SEQ ID NO: 2864 - protein, 216 aa, Carpediemonas membranifera
MGFDPGARSLGGYTIRRPDGQSVSGVLAKCGYTATPSFRVNMSAASFKTTSLEALKQSIRFVHEKKNIVQIINEGMRKCFRRATFANHRLRQKHFARAGRQLLDDLGGRPPEPIHLEVAYGAALFGSAGTPSCAPYRHFARALPGIMLRHNVVVSVNMVSEFRTSIVIPRARELHGALNGYVGIPSRETYFSISLTEIRAPARTSFGAPSMQLQIR

SEQ ID NO: 2865 - protein, 309 aa, Carpediemonas membranifera
MPVRKRAKGREKRRKERPRLGENNAEAPPAPDPDAHLMGFDPGARSIGGYYIRHPDGTTSSGVLPKCGYTKTPSFGFDMTAASFKSTRLVSINNSIRFVLDNANDIFEAGMRKSFRRVRFANHILRQKHFARCGQQLAREFGWRRHHPIATPIRLKVFYGSSRFTTPAGMFIPCAPYRKFAREVVPLLKGYNTVVDLNMVNEDRTTVVCPHCHAPYKRVRPRDDQHVHPHRVMLSENPQCRGAQWRATVPDALNVDHRDKSAAENILWRSLATEDELSGSPFSRTSIPRLQTSFQYHQLANRQHSSTDG

SEQ ID NO: 2866 - protein, 395 aa, Carpediemonas membranifera
MSLRQPRLVPIVPMAPVRPGFMAYGDTMGLLNDNFCHRVGINPTLPHATQPLTEEQKRRYRDNPRSMGRLLSLSTDGASAAIGHNMMRACLFESERKGGRKERPRLGENNAEAPSAPDPDAHLMGFDPGARSIGGYYIRHPDGTTSSGVLPKCGYTKTPSFGFDMTAASFKSTRLVSINNSIRFVLDNANDIFEAGMRKSFRRVRVANHILRQKHFARCGQQLAREFGWRRHHPIATPIRLKVFYGSSRFTTPAGMFIPCAPYRKFAREVVPILKRYNIVVDLNMVNEDRTTVVCPHCHAPYKRVRPRDDQHVHPHRVMLCENPQCRGAQWRATVPDALNVDHRDKSAAENILWRSLATEDELSGSPFSRTLIPRLPTSFQYHQLANRQHSSTDG

SEQ ID NO: 2867 - protein, 225 aa, Carpediemonas membranifera
MGFDPGARSLGGYTIRRPDGQSVSGVLAKCGYTATPSFRVNMSAASFKTTSLEALKQSIRFVHENIVQIINEGTRKCFRRATFANHCLRLKHFARAGRQLLDDLGGRPPEPIHLEVAYGAALFGSASTPSCAPYRHFARALPGIMLRHNVVVRVDMVSEFRTSIVCPYCKAHFRRVVYTHRIMLCQNPACEGAPWRVERLRRHPEQRDILLNLSHRDKSASKNIL

SEQ ID NO: 2868 - protein, 441 aa, Carpediemonas membranifera
MPLWHGEFIIRLCTALMAARQQCPREFDVWLGEYATSTKLWLVNALEGYCWRLAKIITRVDTALTQRDPDVPRDDITRLRTEQRAVKAIVDEHLAKISTPGRVDEGVLLTLPCVWRISAALGELTDMVAAFNTAHPPLPGDKPLAGPKLVPLVPMAPIRPGFMHVPCSLNVLNPAWLAPLGVDPEHHTTERMTREQLEALPPNIRRVLSVKTDGVAVDLTVQVGALPYVSRRASGNPTMKRKARERLGVDDADARPAPDPDAHLMGFDPGARALGGFFIRHQDGTTSSGVVPKCGYTKTPSFAFDMTPASFKSTNLNSLQNSIRFVLLHEQEIFDAGMVKSFRRVRLTNHILRQKHFHRAGEQLARTLGWTPRRLPRGIAPPRAAPTRLVVFYGSARFKTPRRVHPCAPYGRFAKSLAHIMRTFNITAEVRMTNEFRTSLV

SEQ ID NO: 2869 - protein, 537 aa, Carpediemonas membranifera
MPLWHGEFIIRLCTALMAARQQCPREFDVWLGEYATSTKLWLVNALEGYCWRLAKIITRVDTALTQRDPDVPRDDITRLRTEQRAVKAIVDEHLAKISTPGRVDEGVLLTLPCVWRISAALGELTDMVAAFNTAHPPLPGDKPLAGPKLVPLVPMAPIRPGFMHVPCSLNVLNPAWLAPLGVDPEHHTTERMTREQLEALPPNIRRVLSVKTDGVAVDLTVQVGALPYVSRRASGNPTMKRKARERLGVDDADARPAPDPDAHLMGFDPGARALGGFFIRHPDGTTSSGVVPKCGYTKTPSFAFDMTPASFKSTNLNSLQNSIRFVLLHEQEIFDAGMVKSFRRVRLTNHILRQKHFHRAGEQLARTLGWTPRRLPRGIAPPRAAPTRLVVFYRSARFKTPRRVHPCAPYGRFAKSLAHIMRTFNITAEVRMTNEFRTSLVCPFCRARFRRTRYTRRTMRCHNPNCQGAPWYRQQRLNSDPTTSTWLNLSHRDKTAAQNILDCSLMTDAQYNKPVLSEIQPVFPTITPIHQLRLTSR

SEQ ID NO: 2870 - protein, 606 aa, Carpediemonas membranifera
MPSKICTVKASVNKAIGEINGGGDNNAPRRGNLEPSMRSFTQAKYTFTCLLACVSASAHALTPPRTVNLFDQEVLAQIVSIAKGRESKAKAADRCRWIGDLAMWRDPDITPLVEDFREAYVGIAAPFQSWLGEYSTATRVWLSRASPGYLTRLRAGLERVRPLLHDQPGVRQDCLDTLGELDTEVAAIAADHDRYHPQMHASPEGQRVGRTGTVAEALVGVLSCVTRMSAAVTKLVTLTRAVNLELSQALPEPKLIPMAPVRPGFMTIEYGHMSLTPAMKRRLRTTEQVDRYERDHGDITKLRRVLSVKTDGVSVAVTVWVGREKYRGGRVADRPTYKKGSNNKRARLGQDDAEATPAQDIQARMGFDPGARSLGGYTIRRPDGQSVSGVLAKCGYTATPSFRVNMSAASFKTTSLEALKQSIRFVHENIVQIINEGTRKCFRRATFANHCLRLKHFARAGRQLLDDLGGRPPEPIHLEVAYGAALFGSAGTPSCAPYRHFARALPGIISEFRTSIVCPYCKSHFRRVVHTHRTMLCQNPACEGAPWRVERLRRHPEQRDILLNLSHRDKSASENIFWCIYDATSDQIEQSPFHYDSQRGALPRYH

SEQ ID NO: 2871 - protein, 346 aa, Carpediemonas membranifera
MRSFTQAKYTFTCLLACVSASAHALTPPRTVKLVPFVPMAPVKPGFMTIEYGYMSLTPAMKRRLRVHVNWSATKNLTTEQVDRYERDHGDITKLRRVLSVRTDGVSVAVTGSSNKRARLGQDDAEATPAPDIQALMGFDPGARSLGGYTIRRPDGQSVSGVLAKCGYTATPSFRVNMSAASFKTTSLEALKQSIRFVHENIVQIINKGTRKCFRRASFANHCLRQKHFARAGRQLLDDLGGRPPEPIHLEVAYGAALFGSAGTPSCAPYRHFARALPGIMLRHNVVVTVTMVSEFRTSIVCPYCKTHFRRVVHTHRTMLCQNPACEGAPWRVERHPEQRDILLSPR

SEQ ID NO: 2872 - protein, 431 aa, Carpediemonas membranifera
MPLWHDEFIIRLCTAFGAARLQCPGEFDVWLGEYATSTKLWLVNALEGYCWRLAKIITRVDTALTQRDPDVPRDDITRLRTEQRAVKAIVDEHLAKISTPGRVDEGVLLTLPCVWRISAALGELTDMVAAFNTAHPPLPGDKPLAGPKLVPLVPMAPVRPGFMHVPCSLNVLNPAWLAQLGVDPEHHATERMTREQLEALPPKIRRVLSVKTDGVAVDLTVQVGALPYVNRRASGNPTMKRKARERLGVDDADARPTPDPDAHLMGFDPGARALGGFFIRHPDGTTSSGVVPKCGYTKTPSFAFDMTPASCKSTNLDSLQNSIKFVLLHEQEIFDAGMVKSFRRVRLTNHILRQKYFHRAGEQLARTLGWTPRRLPRGIAPPRAAPTRLVVFYGSARFKTPRRVHPCAPYGRFAKSLPHIMRLSTTLLKCG

SEQ ID NO: 2873 - protein, 364 aa, Carpediemonas membranifera
MTLEYGYMSLTPAMKRRLRVHVNWSATKNLTDEQVAEYERDHGDITKLRRVLYVKTDGVSVAVTVWVGREKYRGGRVADRPTYKKGSSNKRTRLGQDDAEATPAPDIQALMGFDPGARSLGGYTIRRPDGQSVSGVLAKCGYTATLSFRMNMSAASFKTTSLEALKQSIRFVHENTVQIINEGTRKCFRRATFANHCLRLKHFARAGRQLLDDLGGRPPEPIHLEVVYGAALFGSAGTPSCAPYRHFARALPGIMLRHNVVVSVTMVSELRTSIVCPYCKAHFRRVVHTHRTMLCQNPACEGAPWRVERLRRHPEQRVILLNLSHRDKSASENILWCTFDATSDQIEQSPFHYDSQRGALPRYH

SEQ ID NO: 2874 - protein, 600 aa, Carpediemonas membranifera
MTSIYTVKFSISSVLHNRRNVIPFIADFYAGLENRLCSFTKAKYFHTCLLSYIAACCHHANLSLPVHDQALHQAIVIVAYRRSGEYRNLAADSLVDRFLGAKKYAAVRQVVTSIAEMPLWHDEFIIRLCTAFRAARQQCPREFDVWLGEYATSTKLSLVNALEGYCWRLAKIITRVDTALTQRDPDVPRDDITRLRTEQRAVKAIVDEHLAKISTPGRVDEGVLLTLPCVWRISAALGELTDMVAAFNTAHPPLPGDKPLAGPKLVPLVPMAPVRPGFMHVPCSLNVLNPAWLAQFGVDPEHHATERMTREQLEALPPNIRRVLSVKTDGVAVDLTVQVGALPYVNRRASGNPTMKRKARERLGVDDADAHPAPDPDAHLMGFDPGARALGGFFIRHPDGTTSSGVVPKCGYTKTPSFTFDMTPASFKSTNLDSLQNSIRFVLLHEQEIFDAGMVKSFRRVRLTNHILRPKHFHRAGEQLARTLGWTPRRLPRSIAPPRAAPTRLVVFYGSARFKTPRRVHPCAPYGRFAESLAHMRAFNITAEVRMTNEFRTSLVCPFCRARFRRTRYTRRTMRCHNPNCQGAPWYRQQRLNSDPTTTT

SEQ ID NO: 2875 - protein, 477 aa, Carpediemonas membranifera
MPSKIYTVKASVNKAIGEINGGGDNNAPRRGNLEPGMRSFTKAKYTFTCLLACVSASAHALTPPRTVNLFDEEVLKQIVSIAKGRETKAKAADRCRWIGDLAMWRDPDITPLVRDFVTAYSYLGLCKPFDTWLGEYSTATRVWLSRASPGYLTRLRAGLERVRPLLHDRPGVRQDFLDTLGELETEVAAIAADHGRYHPQMHASPEGQRVGRTGTVAEALVGVLSCTDGVSVAVTVWVGREKYRGGRVADRPTYKKGSSNKRARLGQDDAEATPAPDIQALMGFDPGARLLGGYTIRRPDGQSVSGVLAKCGYTATPSFRVNMSAASFKTTSLEALKQSIRFVHENIVQIINEGTRKCFRRATFANHCLRLKHFARAGRKLLDDLGGRPPEPIHLEVAYGAALFGSAGTPSCAPYRHFARALPGIMLRHNVVVSVTMVSEFRTSIVCPYCKAHFRRVVHTPHHALPESRVRGSSMAR

SEQ ID NO: 2876 - protein, 364 aa, Carpediemonas membranifera
MTIERGVTALTPAMKRRLRVYRDWSAKSNLTDEQVDRYERDHGDITKLRRVLSVKTDGVSVAVTVWVGREKYRGGRVADRPTYKKGSSNKRARLGQDDAEATPAPDIQALMGFDPGARSLGGYTIRRPDGQSVSGVLAKCGYTATPSFRVNMSAASFKTTSLEALKQSIRFVHENIVQIINEGTRKCFRRETFANHCLRLKHFARAGRQLLDDLGGRPPEPIHLEVAYGAALFGSAGTPSCAPYRHFARALPGIMFRHNVVVSVTMVSEFRTSIVCPYCKAHFRRVVHTHRAMLCQNPACEGAPWRVERLRRHPEQRDILLNLSHRDKSASENILWCTFDATSDQIEQSPFHYDSQRGALPRYH

SEQ ID NO: 2877 - protein, 206 aa, Carpediemonas membranifera
MTPRLLLPRTFKLSWASTLVLGRWAATRSAAQTGRVSYTATPSFRVNMSAASFKTTSLEALKQSIRFVHENIVQNINEGTRKCFRRATFANHCLRQKHFARAGRQLLDDLGGRPLEPIHLEVAYGAALFCSAGTPSCAPYRHFARALPGIMLRHNVVVTVTMVSEFRTSIVCPYCKAHFRRVVHTHRTMLCQNPACEGGWTSSMAR

SEQ ID NO: 2878 - protein, 473 aa, Carpediemonas membranifera
MEIYTIKASIKQAFRQNYTEERRVGDYAAAKYLYSCLLARLAVECYAQRRQLPLHDADFHNGLLTHVRGGQPGQAYAAIVQSLDTLPMWRETTTQDLVAQLKGRLALLGVSPSLRKWFIRYANSVKLWLARTVTTYRDRLQGTLARLEEALAGVGSPAFFEQELAGVHAILNMVNPEILACLPSLFWATHMGENDGLPVSQAAPRILSCVWAIADGVETLSGLISHFNGEYSMSLRQPRLVPIVPMAPVRPGFMAYGDTMGLLNDNFCHRVGINHALPHATNPLTEEQKRRYRDNPRSMGRLREFGWRRHHPIPTPIRLKAFYGSSGFTTPAGMFIPCAPYRKFAREIVPLLKRYNIVVDLNMVNEDRTTVVCPHCHAPYKRVRPRDDQHVHPHRVMLCENPQCRGAQWRATVPDALNVDHRDKSAAENILWRSLATEDELSGSPFSRTSIPRLPTSFQYHQLANRHHSSADG

SEQ ID NO: 2879 - protein, 254 aa, Carpediemonas membranifera
MGFDPGARSLGGYTIRRPDGQSVSGVLAKCGYTATPTFRVNMSAASFKTTSLEALKQSIRFVHENIVQIINEGMRKCFRRASFANHCLRLKHFARAGRQLLDDLGGRPPEPIHLEVAYGAALFGSAGTPSCAPYRHFARALPGIMLRHNVVVTVTMVSEFRISIMCPYCKAHFRRVVHTQRTMLCQNPACEGAPWRVERLRRHPEQRDILLNLSHRDKSASENILWCTYDATSDQIEQSPFHYDSQRGALPRYH

SEQ ID NO: 2880 - protein, 351 aa, Carpediemonas membranifera
MRSAGNSPYMTPTSTTDCSLMYAAVIRVRPTRPLCSRYRPQHDASMPVRKRAKWREKERPRLGTNSAEAPPAPDPDAHLMGFDPGARSIGGYYIRHPDGTTSSGVLPKCGYTKTPSFGFDMTAASFKSTRLVSINNSIRFVLDNANDIFEAGMRKSFRRVRFANHILRQKHFARCGQQLAREFGWRGHHPIATPIRLKAFYGSSGFTTPAGMFIPCAPYRKFAREIVPLLKRYNIVVDLNMVNGDRTTVVCPHCHAPYKRVRPRDDQHVHPHRVMLCEKPQCRGAQWRATVPDALNVDHRDKSAAENILWRSLATEDELSGSPFSRTSIPRLPTSFQYHQLANRHHSSADG

SEQ ID NO: 2881 - protein, 280 aa, Carpediemonas membranifera
MHTSSAHLMGFDPGARSIGGYYIRHPDGTTSSGVLPKCGYTKTPSFGYDMTAASFKSTRLVSINNSIRFVLDNANDIFEAGMRKSFRRVRFANHILRQKHFARCGQQLAREFGWLRHHPITTPIRLKVFYGSSGFTKPAGMFIPCASYRKFAREIVPLLKGYNIVVDLNMVNEDRTTVVCPHCHAPYKRVRPRDDQHVHPHRVMLCENPQCRGAQWRATVPDALNVDRRDKSAAENILWRSLATEDELSGSPFSRTSIPRLPTSFQHHQLANRQHSSTDG

SEQ ID NO: 2882 - protein, 336 aa, Carpediemonas membranifera
MVAAFNPAHPPLPGDKPLAGPKLVPMAPVRPGFMHVPCSLNVLNPAWLAQLGVDPEHHATERMTREQLEALPPNIRRVLSVKTDGVAVDLTVQVGALPYVSRRASGNPTMKRKARERLGVDDADARPAPDPDAQVMGFDPGARALGGFFIRHPDGTTSSGVVPKCGYTKTPSFAFDMTPASFKSTNLDSLQNSIRFVLLHEQEIFDAGMVKSFRRVRLTNHILRQKHFHRAGEQLARTLGWTPRRLPRGIAPPRAAPTRLVVFYGSARFKTPRRVHPCAPYGRFATLLTHIMRAFNITAEVRMTNEFRTSLVCPFCRARFRRTRYTRRTMRCHNPN

SEQ ID NO: 2883 - protein, 220 aa, Carpediemonas membranifera
MNSRGLNRFSLTAHLSYTRRVADMRASSMVRATVLGGILVLAPAEEVPFRPCLGGRTLLPSFASVLVCYALICRPLPASEAHVVVGSAGTPSCAPYRHFARALPGIMFRHNVVVSVTMVSEFRTSIVCPYCKAHFRRVVHTHRTMLCQNPACEGAPWRVERLRRHPEQRDILLNLSRRDKSASENILWCTFDATSDQIEQSPFHYDYDEVLFLAIINLLS

SEQ ID NO: 2884 - protein, 365 aa, Carpediemonas membranifera
MRSFTQAKYTFTCLLACVSASAHALTPPRTVNLFDQEALAQIVSIAQQKVSKAKAADRCRWIGDLAMWRDPDITPLVQDFREAFKKGSNNKRARLGQDDAEATPAPDIQALMGFDPGARSLGGYTIRRPDGQSVSGVLAKCGYTATPSFRVNMSAASFKTTSLEALKQSIRFVHENIVQIINEGTRKCIRRASFANHRLRQKHFARAGRQLLDDLGGSPPEPSHLEVAYGAALFDSAGTPSCAPYRHFARALPGIMLRHNVVVTVTMVSEFRTSIVCPYCKAHFRRVVHTHRTTLCQNPACEGAPWPVERLRRHPEQRDMLLNLSHRDKSASENILWCTFDVTSDQIEQSPFHYDSQRGALPRYH

SEQ ID NO: 2885 - protein, 369 aa, Carpediemonas membranifera
MWREPTTQDLVAQLEGRAESHGVSPSLRKWFIRYANSVKLWLARTVTTYRDRLQGTLARLEEALAGVGSPAFFEQELAGVHAILNMVNPEILACLPSLFWATHMGENDGLPVSQAAPRILSCVWAIADGVEEQKRRYRDNPRSMGRLLSLSTDGVCVAVTIKRGFGRYRPQHDASMPVRKRAKGREKERPRLGTNNAEAPPAPDPDAHLMGFDPGARSIRGYYIRHPDGTTSSGVLPKCGYTKTPSFGFDMTAASFKSTRLVSINNSIRFVLDNANDIFEAGMRKSFRRVRFANHILRQKHFARCGQQLAREFGRHHPIATPIRLKVFYGSSGFTTPAGMFIPCAPYRKFAREIVPLLKGYNTVVDQHG

SEQ ID NO: 2886 - protein, 421 aa, Carpediemonas membranifera
MVAAFNTAHPPLPGDKPLAGPKLVPLVPMAPVRPGFMYVPCSLNVLSPAWLAQLGVDPEHHATERMTREQLEALPPNIRRVLSVKTDGVAVDLTVQVGALPYVNRRASGNPTMKRKARERLGVDDADARPAPDPDAQVMGFDPGARALGGFFIRHPDGTTSSGVVPKCGYTKTPSFAFDMTPASFKSTNLDSLQNSIRFVLLHEQEIFDAGMVKSFRRVRLTNHILRQKHFHRAGEQLARTLGWTPRRLPRGIAPPRAAPTRLVVFYGSARFKTPRRVHPCAPYGRFATLLPHIMRAFNITAEVRMTDEFRTSLVCPLCRARFRRTRYTRRTMRCHNPNCQGAPWYRQQRLNSNPTSTWLNLSHRDKTAAQNILDCGLMTDAQYQASAFRNPRPPARLPNYNPNTPITANQPLVFASGQAN

SEQ ID NO: 2887 - protein, 621 aa, Carpediemonas membranifera
MQAAQYTPMPSKIYTVKASVNKAIGEINGGGDNNAPRRGNLEPGMRSFTQAKYTFTCLLACVSASAHALTPPRTVNLFDQVLAQIVSIAQQKVSKAKAADRCRWIGDLAMWRDPDITPLVRDLVTAYSYLGLCKPFDTWLGEYSTATRVWLSRASPGYLTRLRAGLERVRPLLHDQPGVRQDFLDTLGELDTEGQRVGRTGTVAEALVGVLSCVTRMSAAVTKLVTLTRAVNLELSQALPEPKLIPFVPMAPVRPGFMTLERGVTALTPAMKRRLRVHVNWSATKNLTDEQVDRYERDHGDITKLRRVLSVKTDGVSVAVTVWVGREKYRGGRVADRPTYKKGSSNKRARLGQDDAEATPAPDIQALMGFDPGARSLGGYTIRRPDGQSVSGVLAKCGYTVTPSFRVNMSAASFKTTSLEALKQSIRFVHENIVQIINEGTRKCFRRATFANHCLRLKHFARAGRQLLDDLGGRPQEPIHLEVAYGAALFGSAGTPSCAPYRHFARALPGIMLRHNVVVTVTMVSEFRTSIVCPYCKAHFRRVVHTHRTMLCQNPACEGAPWRVERLRRHPEQRDILLNLSHRDKSASENILWCTFDATSDQIEQSPFHYDSQRGALPHYH

SEQ ID NO: 2888 - protein, 234 aa, Carpediemonas membranifera
MGFDPGARSLGGYTIRRPDGQSVSGVLAKCGYTVTPSFRVNMSAASFKTTSLEALKQSIRFVHENIVQIINEGTRKCFRRATFANHCLRLKHFARAGRQLLDDLGGRPQEPIHLEVAYGAALFGSAGTPSCPPYRHFARALPGIMLRHNVVVTVTMVSEFRTSIVWPYCKAHFRRVVHTAPCSARIPRARELHGALNGYVGIPSRETYFSISLTEIRAPARTSFGAPSMQLQIR

SEQ ID NO: 2889 - protein, 483 aa, Carpediemonas membranifera
MNSRGLNRFSLTAHLSYTRRVADMRASSMVRATVLGGILVLAPAEEVPFRPCLGGRTLLSSFASVLVCYALALPEGQRVGRTGTVAEALVGVLSCVTRMSAAVTKLVTLTRAVNLELSQALPEPKLIPFVTMAPVRPGFMTLERGVTALTPAMKRRLRVHVNWSATKNLTDEQVAEYERDHGDITKLRRVLSVKTDGVSVAVTVWVGREKYRGGRVADRPTYKKGSSNKRARLGQDDAEATPAPDIQALMGFDPGARSLGGYTIRRPDGQSVSGVLAKCGYTATPSFRVNMSAASFKTTSLEALKQSIRFVHENIVQIINEGTRKCFRRATFANHCLRLKHFARAGRQLLDDLGGRPRSPFTSKSRMGLHCSVPPALPPCPPYRHFARALPGIMLRHNVVVTVTMVSEFRTSIVCPYCKAHFRRVVHTAPCSARIPRARELHGALNGYVGIPSRETYFSISLTEIRAPARTSFGAPSMQLQIR

SEQ ID NO: 2890 - protein, 292 aa, Carpediemonas membranifera
MVFIVGSYMSSSSSMTSCTPVVRNKMEIYTIKASIKQAFRQNYTEERRVGDYAAAKNLDSCLLARLAVECYAQRRQLPLHDADFHKGLITHLRGGQPGQAYAAIVQSLDTLPMWREPTTQDLVAQLEGRAESHGVSPSLRKWFIRYANSVKLWFIPCAPYRKFAREIVPLLKRYNIVVDLNMVNEDHTTVVCPHCHAPYKRVRPRDDQHVHPHRVMLCENPQCRGAQWRATVPDALNVDHRDKSAAENILWRSLATEDEHSGSPFSRTSIPRLPTSFQYHQLANRQHSSTDG

SEQ ID NO: 2891 - protein, 441 aa, Carpediemonas membranifera
MHHRQMHASPEGQRVGRTGTVAEALVGVLSCVTRMSAAVTKLVTLTRAVNLELSQALPEPKLVPFVPMAPVRPGFMTIERGVTALTPAMKRRLRVHVNWSATKNLTDEQVDRYERDHGDITKLRRVLSVKTDGVSAAVTVWVGREKYRGGRVADRPTYKKGSSNKRARLGQDDAEATPAPDIQALMGFDLGARSLGGYTIRRPDGQSVSGVLAKCGYTATPTFRVNMSVASFKTTSLEALKQSIRFVHENIVQIINEGTRKCFCRATFANHCLRLKHFARAGRQLLDDLGGRPPEPIHLEVAYGAALFGSAGTPSCAPYRHFARALPGIMLRHNVVVSVTMVSEFRTSIVWPYCKAHFRRVVHTHRTMLCQNPACEGAPWRVERLRRHPEQRDILLNLSHRDKSASENILWCTFDATSDQIEQSPFHYDSQRGASSLSLTC

SEQ ID NO: 2892 - protein, 511 aa, Carpediemonas membranifera
MWRDPDITPLVQDFVTAYSYIGLCKQFDTWLGEYSTSTRVWLSRASPGYLTRLRAGLERVRPLLHDQPGVRQDFLDTLGELDTEVAAIAADHDRYHPQMHALPEEQRVGRTGTVAEALVGVLSCVTRMIAAVTKLVTLTRAVNLELSQALPEPKLVPFVPMAPVKPGFMTLERGVTALTPAMKRRLRVHVNWSATKNLTDEQVAEYERDHGDITKLRRVLSVRTDGVSVAVTGSNNKRARLGQDDAEATPAPDIQALMGFDPGARSLGGYTIRRPDRQSVSGVLAKCGYTATPSFRVNMSAASFKKTSLEALKQSIRFVHENIVQIFNEGTRKCFRRATFANHCLRLKHFARAGRQLLDDLGGRPPEPIHLEVAYGAALFGSAGTPSCAPYRHFARALPGIMLRHNVVVSVDMVSEFRTSIVCPYCKAHFRRVVRTHRTMLCQNPACEGAPWRVERLRRHPEQRDILLNLSHRDKSASENILWCSFDATSDQIEQSPFHYDSQRGALPRYH

SEQ ID NO: 2893 - protein, 229 aa, Carpediemonas membranifera
MTAASFKSTRLVSINNSMRFVLDNANDIFEAGMRKSFRLVRFANHILRQKHFARCGQQLAREFGRHHPIATPIRLKVFYGSSGFTTPAGMFIPCAPYRKFAREIVPLLKGYNIVVDLNMVNEDRTTVVCPHCHAPYKRVRPRDDQHVHPHRVMLCENPQCRGAQWRATVPDALNVDHRDKSAAENILWRSLATEDELSGSPFSRTSIPRLPTSFQYHQLANRQHSSTDG

SEQ ID NO: 2894 - protein, 293 aa, Carpediemonas membranifera
MPSKIYTVKASVNKAIGEINDGGDNNAPRRGRGNLEPGMRSFTQAKYTFTCLLAYVSASVHALTPPRTVNLFDEEVLKQIAIAQQKVSKAKAADRAISELVGRVLHSHPGLTLARVTRVPDPSSCWIRTGASVQLLDDLGGRPPEPNHLEVAYGAALFGSAGTPSCAPYRHFAQALPGIMLRHNVVVSVTMVSEFRTSIVCPYCKAHFRRVVHTPRTMLCQNPACEGAPWRVERLRRHPEQRDILLNLSHRDKSASENIIWCTFDATSDQIEQSPFHYDSQRVLFLAIINVLS

SEQ ID NO: 2895 - protein, 478 aa, Dreissena polymorpha
MKRKREDLTLWDAANVHKHKSMWYWWEYIRRKDMVNYEKTDCDVIQLLQSASVKKQKTQSDKFLTSFSVGIRPTKHQKRVLNEMLRVSNYTYNWCLWLVNEKGIRPHQFELQKIVCKTNANDVDPQYRIENDDWFFNNRMTSVKTTSCKNFYTSYKAAKSLKSKLKRPMSVSNIVQGSFCVPKLFIRNLSSKDVSIDNINMLNRYICMIPENFEKRSKPKERFLKLAKPITKIPPFDHDVKIVKRADGMFILNIPCDPKYTRRNASNDTIDKRVCGIDPGGRTFATVYDPIDCCVFQVGIKEDKQYVISKLHNKIDHAQMHLRKAQNKKQQQAARERIVSLKKTHLKLKTFVDDIHLKLSSHLVKEYQFVALGKINVAPLVKKKHLSKRAKRDLLYWQHYRFRQRLTHRTTNTECILDVQNEAYTSKTCGVCGTINKNLEKSETFYCDNCKYNTHRDVNGARNILLKSLRMFPFVNSQ

SEQ ID NO: 2896 - protein, 468 aa, Dreissena polymorpha
MKRKRENFTLWDAANVHKHKSMWYWWEHIRRKDMVNHEKTDCDVIQLLQSASVKKQKTQSDKFLTSFSVGIRPTKHQKRVLNEMLRVSNYTYNWCLWLVDEKGQRPHLFELQKIVCKTTANDVDPYYRMENDDWFFNNKMSTIKLTSCKNFCTSYKSAKSLKSKLKRPMSVSNIIQGSFCVQKLFIRRLSDKDVSIDNTQMQNRYICMMPDNFEKRSNPKERFLKLAKPITKIPPIDHDVKIVKRADGMFIMNIPCDPKYTRRNASNNTIEKRVCGIDPGGRTFATVYDPIDCCVFQVGIKEDKQYVISKLHNKIDHAHMHLTKAQNKKQQQAARERIVSLKKTHLKLKTFVDDIHLKLSSHLVKEYEYVALGKINVAQLVKTDRPKPLSPRAKRDLLYWQHYRFRQRLTHRTTNTECILDVQNEAYTSKTCGVCGTINKNLEKSETFYCDNCKYNTHRDVNGARNIC

SEQ ID NO: 2897 - protein, 480 aa, Dreissena polymorpha
MKRKREDLTLWDAANVHKHKSMWYWWEYIRRKDMVNHEKTDCDVIQLLQSASVKKQKTQSDKFLTSFSVGIRPTKHQKRVLNEMLRVSNYTYNWCLWLVNEKGIRPHQFELQKIVCKTNANDVDPQYRMENDDWFFNNKMTSVKTTSCKNFYTSYKAAKSLKSKLKRPMSVSNIVQGSFCVPKVLLRHLSGKDVSTDNSNMLNRYVCMMPDNFEKRSKPKERFLKLAKRITNIPPINHDVNIVKRADGMFVLNIPCDPKYTRRNASNDTIDKRVCGIDPGGRTFATVYDPIDCNVFQVGIEEDKQYVISKLHNKIDHAHMHLTKAQNKKQQQAARERIVSLKKVHLKLKTFVEDIHLKLSSHLVKEYQYVALGKINVAPMVKKKHLSKRAKRDLLYWQHYRFRQRLINRTTNTGCVLDVQDEAYTSKTCGMCSTINESLEKSETFNCDNCKYNTHRDVNGARNILLKSLSMFPFEKQQQY

SEQ ID NO: 2898 - protein, 482 aa, Dreissena polymorpha
MKRKREDLTLWDAAHVHKHKSMWYWWEYIRRKDMVNHEKTDCDVIQLLQSASVKKQKTQSDKFFTSFSVGIRPTKHQKRVLNEMLRVSNYTYNWCLWLVNEKGIEPHQFELQKIVCKTNANDVDPQYRMENDDWFFNNKMTSVKTTSCKNFYTSYKAAKSLKSKLKRPMSVSNIVQGSFCVPKLFVRNLSSKDVSIDNINMLNRYICMIPENFEKRSKPKERFLKLAKPITKIPPFDHDVKIVKRADGMFILNIPCDPKYTRRNASNDTIDKRVCGIDPGGRTFATVYDPIDCSVFQVGIEEDKQYVISKLHNKIYHAHKHLTKAQNKKQQQAASERIVSLKKTHLKLKTFVDDIHLKLSSHLVKEYEYVALGKINVAQLVKTDRPKPLSPRAKRDLLYWQHYRFRQRLTHRTTNTECILDVQNEAYTSKTCGVCGTINKNLEKSETFFCDQCKYNTHRDVNGARNILLKSLRMFPFEKQQQ

SEQ ID NO: 2899 - protein, 479 aa, Dreissena polymorpha
MKRKREDLTLWDAANVHKHKSMWYWWDYIRRKDLINHEKTDCDVIQLLQSASVKKQKTQSDKILTSFSVGLRPTKHQKQVLNEMLRVSNYTYNWCLWLVNEKGLKPHLFELQKIVCKTNASDVDPQYRIENDDWFFNNKMTRVKGTSCKNFCTSYKSAKALKSKLKRPMPISNIIQGSFGVPKLYIRLLSSKDVCTHNTNMQKRYICMIPDNFEKRSNPKERFLKLAKPITKIPPIEHDVKIVKRADGMFIMNIPCDPKYTRRNASNDTIDKRVCGIDPGGRTFATVYDPIDCSVFQVGIEEDKQYVISKLHNKIDHAHMHLTKAQNKKQQQAARERIVSLKKTHLKLKTFVEDIHLKLSSHLVKEYQYVALGKINVAPMVKKKHLSKRAKRDLLYWQHYRFRQRLINRTTNTGCVLDVQDEAYTSKTCGMCSTINENLKKSETFYCDQCKYNTHRDVNGARNILLKSLRMFPFEKQQQ

SEQ ID NO: 2900 - protein, 479 aa, Dreissena polymorpha
MKRKREDLTLWDAANVHKHKSMWYWWEYIRRKDLINHEKTDCDVIQLLQSASVKKQKTHSDDFLTSFSVGIRPTKHQKQVLNEMLRVSNYTYNWCLWLVNEKGLRPHQFELQKIVCKTNARDVDPQYRMENDDWFFNNKMTRVKGTSCKNFCTSYKSAKALKSKLKRPMPISNIIEGSFGVPNLYIRLLSSKDVCTHETNMQNRYICMMPDNFEKRSNPKERFLKLAKRITNIPPINHDVKIVKRADGMFIMNIPCDPKYTRRNASNDTIEKRVCGIDPGGRTFATVYDPIDCCVFQVGIKEDKQYVISKLHNKIDHAHMHLTKAQNKKQQQAARERIVSLKKTHLKLKTFVEDIHLKLSSHLVKEYHYVALGKINVAPMVKKKHLSKRAKRDLLYWQHYRFRQRLTHRTTNTDCIFEVQNEAYTSKTCGVCGKINENLEKSETFYCDQCKYNTHRDVNGARNILLKSLNMFPFEKKQQ

SEQ ID NO: 2901 - protein, 479 aa, Dreissena polymorpha
MKRKREDLTLWDAANVHKHKSMWYWWEYIRRKDLINHEKTDCDVIQLLQSASVKKQKTQSDKFLTSFSVGIRPTKHQKQVLNEMLRVSNYTYNWCLWLVNEKGLKPHQFELQKIVCKTNARDVDPQYRMANDDWFFNNKMTRVKGTSCKNFCTSYKSAKALKSKLKRPMPISNIIEGSFGVPNLYIRLLSSKDVCTHETNMQNRYICMMPDNFEKRSNPKERFLKLAKRITNIPPINHDVKIVKRADGMFIMNIPCDPKYTRRNASNDTIEKRVCGIDPGGRTFATVYDPIDCCVFQVGIKEDKQYVISKLHNKIDHAHMHLTKAQNKKQQQAARERIVSLKKTHLKLKTFVEDIHLKLSSHLVKEYHYVALGKINVAPMVKKKHLSKRAKRDLLYWQHYRFRQRLTHRTTNTECIFEVQNEAYTSMTCGVCGKLNKNLEKSETFYCDSCNYNTHRDVNGARNILLKSLNMFPFEKKQQ

SEQ ID NO: 2902 - protein, 352 aa, Dreissena polymorpha
MANDDWFFNNKMTSIKTTSCKNFFTSYKAAKSLKSKLKRPMCVSNIIQGSFCVRKEFIRHLSGKDVSTDNMLNRYICMMPDNFEKRSKPKERFLKLAKPITNIPPINHDVKIVKRADGMFIMNIPCDPKYTRRNASNDTIEKRVCGIDPGGRTFATVYDPIDCCVFQVGIKEDKQYVISKLHNKIDHAHKHLTKAQNKKQQQAASERIVSLKKTHLKLKTFVEDIHLKLSSHLVKEYQYVALGKINVAQLVKTDRPKPLSKRAKRDLLSWQHYRFRQRLTHRTTNTDCILEVQNEANTSKTCGVCGEKDDNLGKSETYYCIKCEYNTHRDVNGARNILLKSLHMFPFKKHQK

SEQ ID NO: 2903 - protein, 478 aa, Dreissena polymorpha
MKRKREHFTLWDAANVHKHKSMWYWWAYIRRKDMVNHEKTDCDVMQLLQSASVKKQKTQSDKFLTSFSVGLRPTKHQKQVLNEMLRVSNYTYNWCLWLVNEKGLKPHLFELQKVVCKTNASDVDPYYRMENDNWFFNNKMSTIKLTSCKNFCTSYKSAKSLKSKLKRPMSVSNIIQGSFCVQKLFIRRLSDKDVSIDNTQMQNRYICMMPDNFEKRSNPKERFLKLAKPITKIPPIDHDVKIVKRADGMFIMNIPCDPKYTRRNASNDTIEKRVCGIDPGGRTFATVYDPIDCCVFQVGIKEDKQYVISKLHNKIDHAHMHLTKAQNKKQQQAARERIVSLKKTHLKLKTFVEDIHLKLSSHLVKEYQYVALGKINVAPLVKKKHLSKRAKRDVLYWQHYRFRQRLTNRATNTECILEVQNEAYTSKTCGVCGTINKNLEKSETFYCDNCKYNTHRDVNGARNILLKSLRMFPFVNSQ

SEQ ID NO: 2904 - protein, 442 aa, Dreissena polymorpha
MVNHEKTDCDVIQLLQSASVKKQKTQSDKFLTSFSVGIRPTKHQKRVLNEMLRVSNYTYNWCLWLVNEKGIRPHQFELQKIVCKTNASDVDPQYRMANDDWFFNNKMTSIKTTSCKNFFTSYKAAKSLKSKLKRPMCVSNIIQGSFCVRKEFIRHLSGKDVSTDNMLNRYICMMPDNFEKRSKPKERFLKLAKPITNIPPINHDVKIVKRADGMFIMNIPCDPKYTRRNASNDTIEKRVCGIDPGGRTFATVYDPIDCCVFQVGIKEDKQYVISKLHNKIDHAHKHLTKAQNKKQQQAASERIVSLKKTHLKLKTFVEDIHLKLSSHLVKEYQYVALGKINVAQLVKTDRPKPLSKRAKRDLLSWQHYRFRQRLTHRTTNTDCILEVQNEANTSKTCGVCGEKDDNLGKSETYYCIKCEYNTHRDVNGARNILLKSLHMFPF

SEQ ID NO: 2905 - protein, 483 aa, Dreissena polymorpha
MKRKREHFTLWDAANVHKHKSMWYWWAYIRRKDMVNHEKTDCDVIQLLQSASVKKQKTQSDKFLTSFSVGLRPTKHQKQVLNEMLRVSNYTYNWCLWLVNEKGLKPHLFELQKVVCKTNASDVDPYYRMENDDWFFNNKMSTIKLTSCKNFCTSYKSAKSLKSKLKRPMSVSNIIQGSFCVQKLFIRRLSDKDVSIDNTQMQNRYICMMPDNFEKRSNPKERFLKLAKPITKIPPIDHDVKIVKRADGMFIMNIPCDPKYTRRNASNDTIEKRVCGIDPGGRTFATVYDPIDCCVFQVGIKEDKQYVISKLHNKIDHAHMHLTKAQNKKQQQAARERIVSLKKTHLKLKTFVDDIHLKLSSHLVKEYEYVALGKINVAQLVKTDRPKPLSPRAKRDLLYWQHYRFRQRLTHRTTNTECILDVQNEAYTSKTCGVCGTINKNLEKSETFYCDNCKYNTHRDVNGARNILLKSLRMFPFEKQQQY

SEQ ID NO: 2906 - protein, 282 aa, Dreissena polymorpha
MLNRYICMIPDNFEKRSKPKERFLKLAKPITKIPPIDHDVKIVKRADGMFIMNIPCDPKYTRRNASNDTIDKRVCGIDPGGRTFATVYDPIDCSVFQVGIEEDKQYVISKLHNKIYHAHKHLTKAQNKKQQQAASERIVSLKKTHLKLKTFVEDIHLKLSSHLVKEYQYVALGKINVAQLVKTDRPKPLSKRAKRDLLSWQHYRFRQRLTHRTTNTDCILEVQNEANTSKTCGVCGEKDDNLGKSETYYCIKCEYNTHRDVNGARNILLKSLSMFPFEKKQQ

SEQ ID NO: 2907 - protein, 477 aa, Dreissena polymorpha
MKRKREDLTVWDAANVHKHKSMWYWWEYIRRKDLINHEQTDCDAIQLLQSASVKQQKTQSDKFLTSFSVGLRPTKHQKQVLNEMLRVSNYTYNWCLWLVNEKGLRPHQFELQKIVCKTNARDVDPQYRMENDDWFFNNKMTRVKGTSCKKFCTSYKSAKALKSKLKRPMPISNIIEGSFGVPNLYIRLLSSKDVCTHETNMQNRYICMIPDNFEKRSNPKERFLKLAKSITKIPPIDHDVNIVKRADGMFIMNIPCDPKYTRRNASNDTIEKRVCGIDPGGRTFATVYDPIDCCVFQVGIKEDKQYVISKLHNKIDHANMHLTKAQHKKQQKAAQERIVSLKKIHFKLKTFVDDIHLKLSSHLVKEYKYVALGKINVAPLVKKKHLSKRAKRDLLYWQHYRFRQRLTHRTTNTECILDVQNEAYTSKTCGVCSTINENLEKSETFYCDQCKYNTHRDVNGARNILLKSLRMFPFENQ

SEQ ID NO: 2908 - protein, 482 aa, Dreissena polymorpha
MKRKREQLTLWDAANVHKHKSMWYWWQSIRRKDLVNHDKTACDVMELLQSASHKKQNTQSDKFLTSFSVGIRPTKHQKRVLNEMLRVSNYTYNWCLWLVNEKGLKPLQFTLQKIVCKTNAGDVDPQYRIENDEWFFNNKMSTIKLTSCKNFCTSYKSAKSLKSKLKRPMSVSNIVQGSFCVQKVLLRHLSGKDVFTNNANMQNQYICMMPDNFEKRSNPKERFLKLAKRITKIPPIDHDVKIVKRANGTFVLNIPCDPTYTRRNTSNDTIEKRVCGIDPGGRTFATVYDPIDCSVFQVGIEEDKQYVMSKLHNKINHAHKHLTKAQNKQQQQAAQERIVSLKKIHFKLKTFVDDIHLKLSSHLVKEYQYVALGKINVAQLVKTDRPKPLSPRSKRDLLNWQHFRFRQRLTHRTTNTDCILEVQNEAYTSMTCGVCGKIKKNLEKSETFYCDQCKYNTHRDVNGARNILLKSLHMFPFEKQQQ

SEQ ID NO: 2909 - protein, 482 aa, Dreissena polymorpha
MKRKREDLTLWDAAHVHKHKSMWYWWEYIRRKDMVNHEKTDCDVIQLLQSASVKKQKTQSDKFFTSFSVGIRPTKHQKRVLNEMLRVSNYTYNWCLWLVNEKGIGPHQFELQKIVCKTNANDVDPQYRMENDDWFFNNRMTSVKTTSCKNFYTSYKAAKSLKSKLKRPMSVSNIVQGSFCVPKLFIRNLSSKDVSIDNINMLNRYICMIPENFEKRSKPKERFLKLAKPITKIPPFDHDVKIVKRADGMFILNIPCDPKYTRRNASNDTIDKRVCGIDPGGRTFATVYDPIDCSVFQVGIEEDKQYVISKLHNKIYHAHKHLTKAQNKKQQQAASERIVSLKKTHLKLKTFVDDIHLKLSSHLVKEYEYVALGKINVAQLVKTDRPKPLSPRAKRDLLYWQHYRFRQRLTHRTTNTECILDVQNEAYTSKTCGVCGTINKNLEKSETFFCDQCKYNTHRDVNGARNILLKSLRMFPFEKQQQ

SEQ ID NO: 2910 - protein, 482 aa, Dreissena polymorpha
MKRKREHFTLWDAANVHKHKSMWYWWAYIRRKDMVNHEKTDCDVMELLQSASVKKQKTQSDKFLTSFSVGLRPTKHQKQVLNEMLRVSNYTYNWCLWLVNEKGLKPHLFELQKVVCKTNASDVDPYYRMENDDWFFNNKMSTIKLTSCKNFCTSYKSAKSLKSKLKRPMSVSNIIQGSFCVQKLFIRRLSDKDVSIDNTQMQNRYICMMPDNFEKRSKPKERFLKLAKPITKIPPIDHDVKIVKRADGMFIMNIPCDLKYTRRNASNDTIDKRVCGIDPGGRTFATVYDPIDCSVFQVGIKEDKQYVIRKLHNKIDHAHMHLTKAQNKKQQQAARERIVSLKKTHLKLKTFVDDIHLKLSSHLVKEYQYVALGKINVAQLVKTDRPKPLSKRAKRDLLSWQHYRFRQRLTHRTTNTDCILEVQNEANTSKTCGVCGEKDDNLGKSETYYCIKCEYNTHRDVNGARNILLKSLHMFPFVNSQQ

SEQ ID NO: 2911 - protein, 479 aa, Dreissena polymorpha
MKRKREDLTLWDAAHVHKHKSMWYWWEYIRRKDMVNHEKTDCDVIQLLQSASVKKQKTQSDKFLTSFSVGIRPTKHQKRVLNEMLRVSNYTYNWCLWLVNEKGIGPHQFELQKIVCKTNANDVDPQYRMENDDWFFNNRMTSVKTTSCKNFYTSYKAAKSLKSKLKRPMSVSNIVQGSFCVPKLFIRNLSSKDVSIDNINMLNRYICMIPENFEKRSKPKERFLKLAKPITKIPPFDHDVKIVKRANGTFVMNIPCDPKYTRRNASNDTIDKRVCGIDPGGRTFATVYDPIDCCVFQVGIKEDKQYVISKLHNKIDHAHMHLTKAQNKKQQQAASERIVSLKKTHLKLKTFVEDIHLKLSSHLVKEYQYVALGKINVAPLVKKKHLSKRAKRDLLYWQHYRFRQRLTHRTTNTDCIFEVQNEAYTSMTCGVCGKLNKNLEKSETFYCDSCNYNTHRDVNGARNILLKSLNMFPFEKKQQ

SEQ ID NO: 2912 - protein, 482 aa, Dreissena polymorpha
MKRKREQLTLWDAANVHKHKSMWYWWQSIRRKDLVNHDKTACDVMELLQSASHKKQNTQSDKFLTSFSVGIRPTKHQKRVLNEMLRVSNYTYNWCLWLVNEKGLKPLQFTLQKIVCKTNAGDVDPQYRIENDEWFFNNKMSTIKLTSCKNFCTSYKSAKSLKSKLKRPMSVSNIVQGSFCVQKVLLRHLSGKDVFTNNANMQNQYICMMPDNFEKRSNPKERFLKLAKRITKIPPIDHDVKIVKRANGTFVLNIPCDPTYTRRNTSNDTIEKRVCGIDPGGRTFATVYDPIDCSVFQVGIEEDKQYVMSKLHNKINHAHKHLTKAQNKQQQQAAQERIVSLQKIHFKLKTFVDDIHLKLSSHLVKEYQYVALGKINVAQLVKTDRPKPLSPRSKRDLLNWQHFRFRQRLTHRTTNTDCILEVQNEAYTSITCGVCGKIKKNLEKSETFYCDQCKYNTHRDVNGARNILLKSLHMFPFEKQQQ

SEQ ID NO: 2913 - protein, 482 aa, Dreissena polymorpha
MKRKRENFTLWDAANVHKHKSMWYWWEHIRRKDMVNHEKTDCDVIQLLQSASVKKQKTQSDKFLTSFSVGIRPTKHQKRVLNEMLRVSNYTYNWCLWLVDEKGQRPHLFELQKIVCKTTANDVDPYYRMENDDWFFNNKMSTIKLTSCKNFCTSYKSAKSLKSKLKRPMSVSNIIQGSFCVQKLFIRRLSDKDVSIDNTQMQNRYICMMPDNFEKRSNPKERFLKLAKPITKIPPIDHDVKIVKRADGMFIMNIPCDPKYTRRNASNNTIEKRVCGIDPGGRTFATVYDPIDCCVFQVGIKEDKQYVISKLHNKIDHAHMHLTKAQNKKQQQAARERIVSLKKTHLKLKTFVDDIHLKLSSHLVKEYEYVALGKINVAQLVKTDRPKPLSPRAKRDLLYWQHYRFRQRLTHRTTNTECILDVQNEAYTSKTCGVCGTINKNLEKSETFYCDNCKYNTHRDVNGARNILLKSLRMFPFVNSQL

SEQ ID NO: 2914 - protein, 480 aa, Dreissena polymorpha
MKRKRENFTLWDAANVHKHKSMWYWWEHIRRKDMVNHEKTDCDVIQLLQSASVKKQKTQSDKILTSFSVGLRPTKHQKQVLNEMLRVSNYTYNWCLWLVDEKGQRPHLFELQKIVCKTTANDVDPYYRMENDDWFFNNKMSNIKLTSCKNFCTSYKSAKSLKSKLIRPMSVSNIIQGSFCVQKVLLRHLSDKDVSTDNMLNRYICMMPDNFEKRSKPKERFLKLAKPITKIPPIDHDVKIVKRADGMFIMNIPCDSKYTRRNASNDTIEKRVCGIDPGGRTFATVYDPIDCCVFQVGIKEDKQYVIRKLHDKIDHAHKHLTKAQKKKQQKAAQERIVSLKKIHFKLKTFVDDIHLKLSSHLVKEYKYVALGKINVAQLVKTDRPKPLSKRAKRDLLSWQHYRFRQRLTHRTTNTDCILEVQNEANTSKTCGVCGEKDDNLGKSETYYCIKCEYNTHRDVNGARNILLKSLHMFPFVNSQQ

SEQ ID NO: 2915 - protein, 252 aa, Phytophthora ramorum
MSSPLSTRRQRNQHRKRNNKDSTGGIGSLDKQRFWCRNLRKRETRYRELLAAIPSFKTADYDVYVDRLQCFLQSSGFLLSFTAQHSFRKWRFLTYGMKMKALRVLAKRLVPLRSAQVCVAFGDWSCQDGLRGNLHGPVKAFRKALERRATAVVMDEFRTSKPCSGCHERLHQARLLTKVKDEDTKEVKFVLKGNRNVLHCKNSHCKAHFWNRDVNAARNILELLKRKLLGLGRLAAFKRWRLGRKHDWDGDP

SEQ ID NO: 2916 - protein, 286 aa, Phytophthora ramorum
MILRCAKNHNSTPTLVLLCYVVHLRSVVAIAGTNNVFSSGNVFPTFNSPATQPTPQAQQQGQHRRHWKRKRKRENRHGQRIVEIEYYHSAKLDKQRFWCRNLRKRETRYRELLAAIPSFKTADYDVYVDRLQCFLQSSGFLLSFTAQHSFRKWRFLTYGMKMKALRVLAKRLVPLRSAQVCVAFGDWSCQDGLRGNLHGPVKAFRKALERRATAVPMDEFRTSKLCSGCHERLHQARLLTKVKDEDTKEVKFVLKGNRNVLHCKNSHCKAHFWNRDVNAARNILEL

SEQ ID NO: 2917 - protein, 526 aa, Coccomyxa sp.
MGASHSNEAAHWEDIRHAENLEKERRKRLEEENLALQHRQRELEREKATLDLEVRQLHPTHLLKTSDAILEVKREMFVESDSHINVAVVGLSGTGKSTLINRLRKVPDNLPDSDGVACSVHIERPKGVITADIDPGEDEEPDVRTEDEREEHFVKQTRQLDRALREADISDDIQRRICIDPGGDVMAFGVLDHDSKEEPAVVRCPSAEYRDRAGFPAVLRKRRNWVRSSGVEELMTHAPSGKLVDLRGLREHIRYHLGVLERVLDHFGAARQRRLAFTSHVSKARAMDSMALRIAPRGVKTLVVYGAADFSHAMKGRAAVPYKRLKACVAALEDVTLVEVGECNTSRLCSRCHEELEGVRSEVMERERIVKRGIHAVKVCRHCSTTWNRDLNAARNIRHVFERIRESGVRPEVFRPRRRAMTTAEEGLRSRSLGGLTHPRGIKGQQHGFDADSTVVIKQLYKSFKEQPEFIEFVYRRFTDPGLVASVPDPDKRYTRAMELWKQRKGDASLDTVDVKRHIISMALHA

SEQ ID NO: 2918 - protein, 633 aa, Coccomyxa sp.
MRRPKKPPKDPQLRLQEQCLVYAKNKLFKEKVVREKAVRQDVKERALTNTNSTFTVVKTTWRALGRRAVRLLDLETALSEVNKTIAEAYLLANVHVVRLCTAGIPLCKLDQSFFHQCLSAVSVSKRRKPEAKDFELRMSVRLYRSWRPEGYVPPVSTHLATGFQQQASQQMATNMRNSTVANFYRRFKRYLKVRYSLDGKQAYEALQSIRAVEYEDEDPLVKRYRDLLPPKPEKGRLEDNPELVMPLQHLFLRTFEAAQSDQQTDRPPRLFSLVPTKQGFECSHIKICANGLYSLLKRNGIKHLPKDADTFRPVADAYWRRFFHISKFETANRIFAGEILTDGKGVSIVLRRPKAEACTSGAAIDPNAFGEVWGLDPGRREMFVASNDAQKVQRVTTRQFYHDAKYRESNAKIKGWQDRAPDILQAIRNMPSKKHSHLQGLQAYVGYLLPKLDTLMRWHMRKGFRDLKFKRYVFAKKALAAICLDLTREAGQNTLVGFGDWSNQDSVGIIKKSPAGPVKRLENVLRRHCRVVSVDEHLTSKLHSCCHHRMKQMYQKRMCRDGVMRSVKVHSVLHCDNNGCHGMTVNRDVNASRNILHILRATAGGGPRPETFHRSRTKYSEAPATSGLPLNGQ

SEQ ID NO: 2919 - protein, 344 aa, Sphagnum fallax
MEPDKHGYTFDHMVETDGVSISILLVRKEFVGKKVRKPRVGPPPPEQYINELTDYTKVVDKKLVAIDPNMSDLLYCVDGPDADKTIYHYTQDTRRKDTYVKKHRDYLQTRKHEVIDDKRVVEWEVELSAYNKKTTDFAAFETYVAKKNEMNVRLAPFYQDYTFRRMKMLSFIGRQRTEAKMIQEFKEKFGSGEEVVVAIGDWEQRQHRKFKEPTKGKGFRTLLRKASYDVYLVDEFRTSCRCSHCEEHGECKTFLECENPRPYRTGRILRHGLVRCKTCQRLWNRDTNASSNIWRVADSAINGLPRPEHLRRTVQANYMVGSDASSPRRRTRRGPSPLHKHGKV

SEQ ID NO: 2920 - protein, 238 aa, Mortierella claussenii
MTSSSGKKAPMVYQNLVAKQKAVYQPTFEFRKWLEENRRIVPEGANLSVGDIESNMPALRGEGTDFASYAAYQEVHQQQLEYFYGRRYHKHNWDSRRAKEFEYAALTDQLLRMVGGRIGEQRKNENKVAIGIGLGQFSSNSKLSSLHGSFSRYFIRKARSQGYIVIGVNEFYTSKRCHDCNNIVCEVELRRLCCRHCETYFHRNVMAGHHITNVVQGHLLHLEQPHYLQPVDERGNLI

SEQ ID NO: 2921 - protein, 208 aa, Mortierella claussenii
MPLDGSITISSIEFGLPHLCGPAASIKDYVDRLQDVEVHLNSFYGNVVMKKHKWNARKARDHEDKLIANRLLKQVGGSLGAKRDEKNKVIIGVGLGKFSTKTRLSSLHESFQSFFVQKAKSLGYIVVGVNEYYTSKKCPHREKFVGKVDIRRLYCSECKTYMHRDVMAGHNICNAIRGHLVNQVRPLYLQPMDKDGKYPWMQAAAPSV

SEQ ID NO: 2922 - protein, 297 aa, Mortierella claussenii
MTATALDPARPNVRAFTTIRRSFLYGPYVKYRHLLEKRKAEAGIDLIESSIPPMTLSGIDTYIDYLHKDGEWNRLRDFYHHKWYLRKSWDVKKAQVSAYDYGIDSIFQLAGGSNGNSRNHEMTRRVVFAIGLGSFNTRTGLPSKHSEFEKRFIIRARHQGYQVVGVHEYYTSAKCPRPTCNEFLQNTENRSKYCHGCRAYFDRDIVGSENIARKERLVKFSLTPVQEGNHHTFPGLGQPRSPSISSDHKDIEIHQADRELISGQVVIRQPGSNQFVGTRRHGTMAKREKVVKLFQDV

SEQ ID NO: 2923 - protein, 1222 aa, Mortierella claussenii
MGIQGLYAELKKQGMPPVPAALNDFSGSRLEIDLLGSFRSKIFSLLTDKYSPYKATQVGYTMANIISTLLQPIDQTQCRIHIDGAHNTEKVQEHNKRQQELTRQLGKLDQALHKMELRSDQGKWTSKATMVEIEKVMVQVFVLTDADKIQLGQGLGAKFQVCHCTTEADICIAKALRNSPDPDNHIVVSGDSDLLVHQHVPRVLRPIPRSAAFALYTKSQAAEKLALLGQEHLTLLGIVQKNDYSPNIFGLGMATNLRIIREIPLGSWDWMVHRYLAEAGKYTQEPLVPNRFDSSKRIFVDHVDTPVQSGYMASSLSSSSAPAPISTPSANDAFHLAPRWKPNQFRPVFESEESMFRGRTSNVNNRRPHSPPLRRGPKFTPRTPEQPKEEVKKKKKGALPRKPKGGGDDRKLHPATKHDRDMRRRFQTKTLTVGSIRANVQRSLALQSAGAATAGESASAVASASTSSSASASTTASASSSAPVISTTADAQLIAQRLLSCVQVINKIQIHAYEAIALDIATLIGPPGSGPEGDDDRPGPSSHTPLTARQKEKQRAEEPQSQIPTTAGPKNKKRALAEPQVQDPSSSRKSKRQAKGVKSHPEDPEDSDEPGDPDEPGDPNSTQRLQDLEDILESDTFYYSLLTLLCSGKLGAMSRYERVQHAAPRTMATRSTPAGHRMTMDTPHALRAYNLYKETSGFVPFANQVGFKMFPSTVARLAMRMVKHAIRAHYYSAQFGEDEQRPEDKNAIEYFFERNRRERMFADFPKAKLTPSFVYLSEADIVHILYSGDASTVTAVKRVIEFSSAVLAEIAVDHCKGHLVQQLFFRTDAPGRLNGYHRKVSLQSDRHVNSKLKLRGTICTNGLQLNLLAYDTTAPRRRSTQAPASQDDDDLADLLDMEDIDFNLNEAFLGSEEEDEDEESEEEDEPMEDVAMGGSQSSDVEMGSATGSDQGEEEEEVTQQGASSDQPFDYRKINWKRGSKMLPNVEVVFANAANCPPIGTTPVIALDPGEINTVTATKIDPSRPGERHSIKITRKYLYRPYAQFRRLLEAQKKKAGIDTIETLIPPMTLEGIVAYLQYMSSSEDQSAEGRKSMRTRISEFYNQRWYLRKTWDMRKAQKCAIDLGVKVLLRMAGANESDKVPATGSESEEGSQSEEGSQPEAHSAPAVFAVGLGSFNTRTGLPSKHGVFLKTFIIKAGSCLPHLSMLTMFAVAEDTRRSDHAF

SEQ ID NO: 2924 - protein, 723 aa, Chloropicon primus
MARSGKRRKKKEKQGSGSTSSTRRSHSGESHAQGASKSGQESPTTERPLRRFWNQGLQLLYSLCLLPIADDPASAGEGSSTPRKKRGRKRKEKPLDDPASAFEEGSSTPRKKRGGKRKGKPPEAASSAGESSSSSGKPRKKPRKKGKKKNKKKGKKKKNKRGKKAGKQPGGLADDSVKKTWFSSIKRELEEVKCPKTGWRSCLNLPEDSVVSVEALQSPAKRKRGQKLKTSKLLSERTVIRTRKLRMRLNPEQAKCLCNWMGAARFTYNKCLEAVKKERFPLVWTVLLDRFVTAKPRGPEVFEGLEKELKEIQCSPRPWTKQEAELFAAREKRLESQIGGRAFRIQVGKDRDYVSGAFVNQKHPWLKDTPCAIRQAAVRSLIKAWDSNIAKQEAMKERGEEKGHRFVLKYRQRQQPSSWTIEIDARELKNVETIERPNTRHKDDTKHNKRRKWTKLEVFKKKMAGGPLYLTEEIPGGKIEGAVKITRNRLGQFHMHIPIATPWDRLPPLKPENKRKVVALDPGVRTFQTSYSPQEGVGEYAKGERGFARLFNLCWRIDEIISERKDPKVKLPYLDRRDLKRQQYACMEKLRGLTNELHKKVANDLCRRFDTILLPEFKSQDMVKKNNNGRRRVIRKKTARTLLTLRHYAFRTFLASKVLLHGSELAIVTEEYTSKTCGKCGHIKDNLGGAEVYKCQKCGFKCGRDVNGARNVLLKHLRQPKSV

SEQ ID NO: 2925 - protein, 722 aa, Chloropicon primus
MARSGKRRKKKEKQGSGSTSSTRRSHSGESHAQGASKSGQESPTTEPLRRFWNQGLQLLYSLCLLPIADDPASAGEGSSTPRKKRGRKRKEKPLDDPASAFEEGSSTPRKKRGGKRKGKPPEAASSAGESSSSSGKPRKKPRKKGKKKNKKKGKKKKNKRGKKAGKQPGGLADDSVKKTWFSSIKRELEEVKCPKTGWRSCLNLPEDSVVSVETLQSPAKRKRGQKLKTSKLLSERTVIRTRKLRMRLNPEQAKCLCNWMGAARFTYNKCLEAVKKEGFPLVWTVLLDRFVTAKPRRPEVFEGLEKELKEIQCSPRPWTKQEAELFAAREKRLESQIGGRRFRAEVAKDRDYVSGAFVNQKHPWLKDTPCAIRQAAVRSLIKAWDSNIAKQEAMKERGEEKGHRFVLKYRQRQQPSSWTIEIDARELKNVETIERPNTRHKDDTKHNKRRKWTKLEVFKKKMAGGPLYLTEEIPGGKIEGAVKITRNRLGQFHMHIPIATPWDRLPPLKPENKRKVVALDPGVRTFQTSYSPQEGVGEYAKGERGFARLFNLCWRIDEIISERKDPKVKLPYLDRRDLKRQQYACMEKIRGLTNELHKKVANDLCRRFDTILLPEFKSQDMVKKNNNGRRRVIRKKTARTLLTLRHYAFRTFLASKVLLHGSELAIVTEEYTSKTCGRCGHIKDNLGGAEVYKCQKCGFKCGRDVNGARNVLLKHLRQPKSV

SEQ ID NO: 2926 - protein, 722 aa, Chloropicon primus
MARSGKRRKKKEKQGSGSTSSTRRSHSGESHAQGASKSGQESPTTEPLRRFWNQGLAWLYALCLLPIADDPASAGEGSSTPRKKRGGKRKGKPLDDPASAFEEGSSTPRKKRGGKRKGKPPEADASAGESSSSSGKPRKKPRKKGKKKNKKKGKKKKNKRGKKAGKQPGGLADDSVKKTWFSSIKRELEEVKCPKTGWRSCLNLPEDSVVSVETLQSPAKRKREQKLKTSKLLSERTVIRTRKLRMRLNPEQAKCLCNWMGAARFTYNKCLEAVKKEGFPLVWTVLLDRFVTAKPRRPEVFEGLEKELKEIQCSPRPWTKQEAELFAAREKRLESQIGGRRFRAEVAKDRDYVSGAFVNQKHPWLKETPCAIRQAAVRSLIKAWDSNTAKQEAMKERGEKKGHRFVLKYRQRQQPSSWTIEIDARELKNVETIERPRTRHKDDTKHKKRRKWTKLEVFKKKMAGGPLYLTEEIPGGKIEGAVKITRNRLGQFHMHIPIATPWDRLPPLKPENKRKVVALDPGVRTFQTSYSPQEGVGEYATGERGFARLFNLCWRIDEIISERKDPKVKLPYLDRRDLKRQQYACMEKLRGLTNELHKKVANDLCRRFDTILLPEFKSQDMVKKNNNGRRRVIRKKTARTLLTLRHYAFRTFLASKVLLHGSELAIVTEEYTSKTCGRCGHIKDNLGGAEVYKCQKCGFKCGRDVNGARNVLLKHLRQPKSV

SEQ ID NO: 2927 - protein, 722 aa, Chloropicon primus
MARSGKRRKKKEKQGSGSTSSTRRSHSGESHAQGASKSGQESPTTEPLRRFWNQGLAWLYALCLLPIADDPASAGEGSSTPRKKRGGKRKGKPLDDPASAFEEGSSTPRKKRGGKRKGRPPEADASAGESSSSSGKPRKKPRKKGKKKNKKKGKKKKNKRGKKAGKQPGGLADDSVKKTWFSSIKRELVEVKCPKTGWRSCLNLPEDSVVSVETLQSPAKRKREQKLKTSKLLSERTVMRTRKLRMRLNPEQARTLCNWMGAARFTYNKCLEAVKKEGFPLVWTVLLDRFVTAKPRRPEVFEGLEKELKEIQCSPRPWTKQEAELFAAREKRLESQIGGRAFRIQVGKDRDYVSGAFVNQKHPWLKETPCAIRQAAVRSLIKAWDSNTAKQEAMKERGEEKGHRFVLKYRQRQQPSSWTIEIDARELKNVETIERPNTRHKDDTKHKKRRKWTKLEVFKKKMAGGPLYLTEEIPGGKIEGAVKITRNRLGQFHMHIPIATPWDRLPPLKPENKRKVVALDPGVRTFQTSYSPQEGVGEYAKGERGFARLFNLCWRIDEIISERKDPKVKLPYLDRRDLKRQQYACMEKIRGLTNELHKKVANDLCRRFDTILLPEFKSQDMVKKNNNGRRRVIRKKTARTLLTLRHYAFRTFLASKVLLHGSELAIVTEEYTSKTCGRCGHIKDNLGGAEVYKCQKCGFKCGRDVNGARNVLLKHLRQPKSV

SEQ ID NO: 2928 - protein, 723 aa, Chloropicon primus
MARSGKRRKKKEKQGSGSTSSTRRSHSGESHAQGASKSGQESPTTERPLLRFWNQALKWLYEKCMLPIADDPASAGEGSSTPRKKRGGKRKEKPLDDPASAFEEGSSTPRKKRGGKRKGRPPEADASAGESSSSSGKPRKKPRKKGKKKNKKKGKKKKNKRGKKAGKQPGGLADDSVKKTWFSSMKRELEEVKCPKTGWRSCLNLPEDSVVSVETLQSPAKRKRGQKLKTSKLLSERTVIRTRKLRMRLNPEQAKCLCNWMGAARFTYNKCLEAVKKEGFPLVWTVLLDRFVTAKPRRPEVFEGLEKELKEIQCSPRPWTKQEAELFAAREKRLESQIGGRRFRAEVAKDRDYVSGAFVNQKHPWLKDTPCAIRQAAVRSLIKAWDSNIAKQEAMKERGEEKGHRFVLKYRQRQQPSSWTIEIDARELKNVETIERPNTRHKDDTKHNKRRKWTKLEVFKKKMAGGPLYLTEEIPGGKIEGAVKITRNRLGQFHMHIPIATPWDRLPPLKPEKKRKVVALDPGVRTFQTSYSPQEGVGEYAKGERGFARLFHLCRRIDEIISERKDPKVKLPYLDRRDLKRQQYACMEKLRGLTNELHKKVANDLCRRFDTILLPEFKSQDMVKKNNNGRRRVIRKKTARTLLTLRHYAFRTFLASKVLLHGSELAIVTEEYTSKTCGRCGHIKKNLGGAEVYKCQKCGFKCGRDVNGARNVLLKHLRQPKSV

SEQ ID NO: 2929 - protein, 723 aa, Chloropicon primus
MARSGKRRKKKEKQGSGSTSSTRRSHSGESHAQGASKSGQESPTTERPLLPFWNQGLQLLYALCLLPPADDPASAGEGSSTPRKKRGGKRKGKPLDDPASAFEEGSSTPRKKRGGKRKGKRPEADASAGESSSSSGKPRKKPRKKGKKKNKKKGKKKKNKRGKKAGKQPGGLADDSVKKTWFSSIKRELVEVKCPKTGWRSCLNLPEDSVVSVETLQSPAKRKREQKLKTSKLLSERTVIRTRKVRMRLNPEQAQCLCNWMGAARFTYNKCLEAVKKEDFPLVWTVLLDRFVTAKPRRPEVFEGLEKELKEIQCSPRPWTKQEAELFAAREKRLESQIGGRAFRLQVAKDRDYVSGAFVNQKHPWLKETPCAIRQAAVRSLIKAWDSNTAKQEAMKERGEKKGHRFVLKYRQRQQPSSWTIEIDARELKNVETIERPNTRHKDDTKHKKRRKWTKLEVFKKKMAGGPLYLTEEIPGGKIEGAVKITRNRLGQFHMHIPIATPWDRLPPLKPENKRKVVALDPGVRTFQTSYSPQEGVGEYAKGERGFARLFNLCWRIDEIISERKDPKVKLPYLDRRDLKRQQYACMEKLRGLTNELHKKVANDLCRRFDTILLPEFKSQDMVKKNNNGRRRVIRKKTARTLLTLRHYAFRTFLASKVLLHGSELAIVTEEYTSKTCGRCGHIKKNLGGAEVYKCQKCGFKCGRDVNGARNVLLKHLRQPKSV

SEQ ID NO: 2930 - protein, 723 aa, Chloropicon primus
MARSGKRRKKKEKQGSGSTSSTRRSHSGESHAQGASKSGQESPTTERPLLRFWNQGLAWLYALCLLPNADDPASAGEGSSTPRKKRGGKRKEKPLDDPASAFEEGSSTPRKKRGGKRKGKPPEADASAGESSSSSGKPRKKPRKKGKKKNKKKGKKKGNKRGKKAGKQPGGLADDSVKKTWFSSIKRELEEVKCPKTGWRSCLNLPEDSVVSVETLQSPAKRKREQKLKTSKLLSERTVIRTRKLRMRLNPEQAKCLCNWMGAARFTYNKCLEAVKKEDFPLVWTVLLDRFVTAKPRRPEVFEGLEKELKEIQCSPRPWTKQEAELFAAREKRLESQIGGRAFRIQVGKDRDYVSGAFVNQKHPWLKETPCAIRQAAVRSLIKAWDSNTAKQEAMKERGEKKGHRFVLKYRQRQQPSSWTIEIDARELKNVETIERPNTRHKDDTKHKKRRKWTKLEVFKKKMAGGPLYLTEEIPGGKIEGAVKITRNRLGQFHMHIPIATPWDRLPPLKPENKRKVVALDPGVRTFQTSYSPQEGVGEYATGERGFARLFNLCWRIDEIISERKDPKVKLPYLDRRDLKRQQYACMEKLRGLTNELHKKVANDLCRRFDTILLPEFKSQDMVKKNNNGRRRVIRKKTARTLLTLRHYAFRTFLASKVLLHGSELAIVTEEYTSKTCGRCGHIKDNLGGAEVYKCQKCGFKCGRDVNGARNVLLKHLRQPKSV

SEQ ID NO: 2931 - protein, 722 aa, Chloropicon primus
MARSGKRRKKKEKQGSGSTSSTRRSHSGESHAQGASKSGQESPTTEPLRRFWNQGLAWLYALCLLPIADDPASAGEGSSTPRKKRGGKRKGKPLDDPASAFEEGSSTPRKKRGGKRKGRPPEADASAGESSSSSGKPRKKPRKKGKKKNKKKGKKKKNKRGKKAGKQPGGLADDSVKKTWFSSIKRELEEVKCPKTGWRSCLNLPEDSVVSVETLQPPAKRKRGQKLKTSKLLSERTVIRTRKLRMRVNPEQARTLCNWMGAARFTYNKCLEAVKKEGFPLVWTVLLDRFVTAKPRRPEVFEGLEKELKEIQCSPRPWTKQEAELFAAREKRLESQIGGRAFRIQVAKDRDYVSGAFVNQKHPWLKETPCAIRQAAVRSLIKAWDSNTAKQEAMKERGEKKGHRFVLKYRQRQQPSSWTIEIDARDLKNVETIERPNTRHKDDTKHNKRRKWTKLEVFKKKMAGGPLYLTEEIPGGKIEGAVKITRNRLGQFHMHIPIATPWDRLPPLKPENKRKVVALDPGVRTFQTSYSPQEGVGEYATGERGFARLFNLCWRIDEIISERKDPKVKLPYLDRRDLKRQQYACMEKLRGLTNELHKKVANDLCRRFDTILLPEFKSQDMVKKNNNGRRRVIRKKTARTLLTLRHYAFRTFLASKVLLHGSELAIVTEEYTSKTCGKCGHIKDNLGGAEVYKCQKCGFKCGRDVNGARNVLLKHLRQPKSV

SEQ ID NO: 2932 - protein, 751 aa, Chloropicon primus
MARSGKRRKKKEKQGSGSTSSTRRSHSGESHAQGASKSGQESPTTEPLRRFWNQGLAWLYALCLLPIADDPASAGEGSSTPRKKRGGKRKEKPLDDPASAFEEGSSTPRKKRGGKRKRKGKPPEAASSAGESSSSSGKPRKKPRKKGKKKNKKKGKKKKNKRGKKAGKQPGGLAGDSVKKTWFSSMKRELEEVKCPKTGWRSCLNLPEDSVVSVETLQPPAKRKRGQKLKTSKLLSERTVIRTRKLRMRLNPEQAKCLCNWMGAARFTYNKCLEAVKKERFPLVWTVLLDRFVTAKPRGPEVFEGLKKELKEIQCSPRPWTKQEAELFAARENRLESQIGGRAFRLQVAKDRDYVSGAFVNQQHPWLKETPCAIRQAAVRSLIKAWDSNIAKQEAMKERGEEKGHRFVLKYRQRQQPSSWTIEIDARELKNVETIERPNTRHKDDTKHKKRRKWTKLEVFKEKMAGGPLYLTEEIPGGKIEGAVKITRNRLGQFHMHIPIATPWDRLPPLKPENKRKVVALDPGVRTFQTSYSPQEGVGEYATGERGFARLFNLCWRIDGIISEREDPKVKLPYLDRRDLKRQQYACMEKLRGLTNELHKKVANDLCRRFDTILLPEFKSQDMVKKNNNGRRRVIRKKTARTLLTLRHYAFRTFLASKVLLHGSELAIVTEEYTSKTCGRCGHIKDNLGGAEVYKCQKCGFKCGRDIEIEECRRPRRSTAQGIKLLIKDFAYHPAFKRWDDSFTSIPFKPA

SEQ ID NO: 2933 - protein, 722 aa, Chloropicon primus
MARSGKRRKKKEKQGSGSTSSTRRSHSGESHAQGASKSGQESPTTEPLRRFWNQGLAWLYALCLLPIADDPASAGEGSSTPRKKRGGKRKEKPLDDPASAFEEGSSTPRKKRGGKRKGKRPEADASAGESSSSSGKPRKKPRKKGKKKNKKKGKKKKNKRGKKAGKQPGGLADDSVKKTWFSSIKRELVEVKCPKTGWRSCLNLPEDSVVSVETLQSPAKRKREQKLKTSKLLSERTVIRTRKLRMRLNPEQAKCLCNWMGAARFTYNKCLEAVKKEGFPLVWTVLLDRFVTAKPRRPEVFEGLEKELKEIQCSPRPWTKQEAELFAAREKRLESQIGGRRFRAEVAKDRDYVSGAFVNQKHPWLKDTPCAIRQAAVRSLIKAWDSNIAKQEAMKERGEEKGHRFVLKYRQRQQPSSWTIEIDARELKNVETIERPNTRHKDDTKHNKRRKWTKLEVFKKKMAGGPLYLTEEIPGGKIEGAVKITRNRLGQFHMHIPIATPWDRLPPLKPENKRKVVALDPGVRTFQTSYSPQEGVGEYATGERGFARLFNLCWRIDEIISERKDPKVKLPYLDRRDLKRQQYACMEKIRGLTNELHKKVANDLCRRFDTILLPEFKSQDMVKKNNNGRRRVIRKKTARTLLTLRHYAFRTFLASKVLLHGSELAIVTEEYTSKTCGRCGHIKDNLGGAEVYKCQKCGFKCGRDVNGARNVLLKHLRQPKSV

SEQ ID NO: 2934 - protein, 618 aa, Chloropicon primus
MARSGKRRKKKEKQGSGSTSSTRRSHSGESHAQGASKSGQESPTTERPLLRFWNQGLAWLYALCLLPIADDPASAGEGSSSSGKPRKKPRKKGKKKNKKKGKKKKNKRGKKAGKQPGGLADDSVKNTWFSSIKRELEEVKCPKTGWRSCLNLPEDSVVSVETLQSPAKRKRGQKLKTSKLLSERTVIRTRKLRMRLNPEQAKCLCNWMGAARFTYNKRQSFSRPERRDSRAKLEADDFASEVAKDRDYVSGAFVNQKHPWLKETPCAIRQAAVRSLIKAWDSNTAKQEAMKERGEKKGHRFVLKYRQRQQPSSWTIEIDARELKNVETIERPRTRHKDDTKHKKRRKWTKLEVFKEKMAGGPLYLTEEIPGGKIEGAVKITRNRLGQFHMHIPIATPWDRLPPLKPENKRKVVALDPGVRTFQTSYSPQEGVGEYATGERGFARLFNLCWRIDEIISERKDPKVKLPYLDRRDLKRQQYACMEKLRGLTNELHKKVANDLCRRFDTILLPEFKSQDMVKKNNNGRRRVIRKKTARTLLTLRHYAFRTFLASKVLLHGSELAIVTEEYTSKTCGRCGHIKKNLGGAEVYKCQKCGFKCGRDVNGARNVLLKHLRQPKSV

SEQ ID NO: 2935 - protein, 723 aa, Chloropicon primus
MARSGKRRKKKEKQGSGSTSSTRRSHSGESHAQGASKSGQESPTTERPLLRFWNQGLAWLYALCLLPIADDPASAGEGSSTPRKKRGGKRKETPLDDPASAFEEGSSTPRKKRGGKRKGRPPEADASAGESSSSSGKPRKKPRKKGKKKNKKKGKKKKNKRGKKAGKQPGGLADDSVKKTWFSSIKRELEEVKCPKTGWRSCLNLPEDSVVSVETLQSPAKRKRGQKLKTSKLLSERTVIRTRKLRMRLNPEQAKCLCNWMGAARFTYNKCLEAVKKEGFPLVWTVLLDRFVTAKPRRPEVFEGLEKELKEIQCSPRPWTKQEAELFAAREKRLESQIGGRAFRIQVAKDRDYVSGAFVNQEHPWLKDTPCAIRQAAVRSLIKAWDSNTAKQEAMKERGEEKGHRFVLKYRQRQQPSSWTIEIDARELKNVETIERPNTRHKDDTKHNKRRKWTKLEVFKKKMAGGPLYLTEEIPGGKIEGAVKITRNRLGQFHMHIPIATPWDRLPPLKPENKRKVVALDPGVRTFQTSYSPQEGVGEYAKGERGFARLFNLCWRIDEIISERKDPKVKLPYLDRRDLKRQQYACMEKLRGLTNELHKKVANDLCRRFDTILLPEFKSQDMVKKNNNGRRRVIRKKTARTLLTLRHYAFRTFLASKVLLHGSELAIVTEEYTSKTCGRCGHIKKNLGGAEVYKCQKCGFKCGRDVNGARNVLLKHLRQPKSV

SEQ ID NO: 2936 - protein, 566 aa, Chloropicon primus
MVTELNQLRAEREGGPVADIQLLKRRFWRCVPAMDRVSIGHYLRTVSHTPNSRESTSEEWTLLQASMAELVQAATAAETSLRLPSRALLSHVITEAEQVLRTNWSNFLKYGTFNHMKQYLRAKYQLNKSQAAALRAALLSESQPRSPDLVQHYHNELALVQGFGVADFMHGTDNVLDPAEQERNMVVFRYMMLKTVEASDLPIKRFTLVPVCRVQYPMINVSRSCLELWGYDGGRGWEKIFTKKVNNIAKKGHTNGRTKAFARHFRTDGLSVVVVVEEVILARPDNNYIGQGERCATKPSQFDPRNTVGVDPGRIFVVYANILERGRKRTFSLHLSAYRDRCGFTKRNILAHQWLSRAPNNLQQKLNDRAISLKLTSVDRLQAAIGTRLTFLSNAIDFFGQRRWRRKGLETFGRKQRTMEFIASKLFPTASHIVFYGAANFPSGIRGRPPGPCIGLKRFLVTKTTPGRFFFVDEYNTSKMCAACSQKNISTALRRVHKSDRSRGNGPPSKKGRPQYGVLSCPKCSMEVPRDDNGSDNILAIASAFLHAQNWSVPREIWPPALRRPL

SEQ ID NO: 2937 - protein, 722 aa, Chloropicon primus
MARSGKRRKKKEKQGSGSTSSTRRSHSGESHAQGASKSGQESPTTEPLRRFWNQALKWLYEKCMLPIADDPASAGEGSSTPRKKRGGKRKEKPLDDPASAFEEGSSTPRKKRGGERKGKQPEADASAGESSSSSGKPRKKPRKKGKKKNKKKGKKKKNKRGKKAGKQPGGLADDSVKKTWFSSMKRELEEVKCPKTGWRSCLNLPEDSVVSVETLQSPAKRKREQKLKTSKLLSERTVIRTRKLRMRLNPEQARTLCNWMGAARFTYNKCLEAVKKERFPLVWTVLLDRFVTAKPRRPEVFEGLEKELKEIQCSPRPWTKQEAELFAAREKRLESQIGGRAFRIQVGKDRDYVSGAFVNQKHPWLKETPCAIRQAAVRSLIKAWDSNTAKQEAMKERGEKKGHRFVLKYRQRQQPSSWTIEIDARELKNVETIERPNTRHKDDTKHKKRRKWTKLEVFKEKMAGGPLYLTEEIPGGKIEGAVKITRNRLGQFHMHIPIATPWDRLPPLKPENKRKVVALDPGVRTFQTSYSPQEGVGEYATGERGFARLFNLCWRIDEIISERKDPKVKLPYLDRRDLKRQQYACMEKLRGLTNELHKKVANDLCRRFDTILLPEFKSQDMAKKNNNGRRRVIRKKTARTLLTLRHYAFRTFLASKVLLHGSELAIVTEEYTSKTCGRCGHIKKNLGGAEVYKCQKCGFKCGRDVNGARNVLLKHLRQPKSV

SEQ ID NO: 2938 - protein, 746 aa, Chloropicon primus
MARSGKRRKKKEKQGSGSTSSTRRSHSGESHAQGASKSGQESPTTERPLRRFWNQGLALLYALCMLPIADDPASAGEGSSTPRKKRGGKRKETPLDDPASAFEEGSSTPRKKRGGKRKETPLDDPASAFEEGSSTPRKKRGGKRKGKPPEAASSAGESSSSSGKPRKKPRKKGKKKNKKKGKKKKNKRGKKAGKQPGGLADDSVKKTWFSSMKRELEEVKCPKTGWRSCLNLPEDSVVSVETLQPPAKRKREQKLKTSKLLSERTVIRTRKLRMRLDPEQARTLCNWMGAARFTYNKCLEAVKKEGFPLVWNVLLDRFVTAKPRGPEVFEGLEKELKEIQCSPKRRTKQEAAREKRLVSLIGGRRFRAEVAKDRDYVSGAFVNQKHPWLKDTPCAIRQAAVRSLIKAWDSNTAKQEAMKERGEKKGHRFVLKYRQRQQPSSWTIEINARDLKNVETIERPNTRHKDDTKHKKRRKWTKLEVFKEKMAGGPLYLTEEIPGGKIEGAVKITRNRLGQFHMHIPIATPWDRLPPLKPENKRKVVALDPGVRTFQTSYSPQEGVGEYAKGERGFARLFNLCWRIDKIISERKDPKVKLPYLDRRDLKRQQYACMEKLRGLTNELHKKVANDLCRRFDTILLPEFKSQDMVKKNNNGRRRVIRKKTARTLLTLRHYAFRTFLASKVLLHGSELAIVTEEYTSKTCGRCGHIKDNLGGAEVYKCQKCGFKCGRDVNGARNVLLKHLRQPKSV

SEQ ID NO: 2939 - protein, 572 aa, Chloropicon primus
MVTELNQLRAEREGGPVADIQLLKRVWRCVPAMDRVSIGHYLRTVSHTPNSREPTSQEPTSQEWRLLQASMAALVQAATAAETSLRLRLPSRALLSHVITEAALVLRTNWSNFLKYGTFNHMKQYLRAKYQLNKSEAAALRAALLSESQPRRPDLVQHYHNELALVQGFGVADFMHGTDNVLDPAEQERNMVVFRYMMLKTVEASDLPIKRFTLVPVCRVQYPMINVSRSCLKLWGYDGGRGWEKIFTKKVNNIAKKGHTNGRTKAFARHFRTDGLSVVVVVEEVILARPDNNYIGQGERCATKPSQFDPRNTVGVDPGRIFVVYANILERGRKRTFSLHLSAYRDRCGFTKRNILAHQWLSRAPNNLQQRLNDRAISLKLTSVDRLQAAIGTRLTFLSNAIDFLGQRRWRRKGLETFGRKQRTMEFIASKLFPTASHIVFYGAANFPSGIRGRPPGPCIGLKRFLVTKTTPGRFFFVDEYNTSKMCAACSQKNISTALRRVHKSDRSRGNGPPSKKGRPQYGVLSCPKCSMEVPRDDNGSDNILAIASAFLHAQNWSVPREIWPPALRRPL

SEQ ID NO: 2940 - protein, 696 aa, Chloropicon primus
MARSGKRRKKKEKQGSGSTSSTRRSHSGESHAQGASKSGQESPTTERPLLRFWNQALKWLYALCLLPTADDPASAGEGSSTPRKKRGGKRKGKPPEADASAGESSSSSGKPRKKPRKKGKKKNKKKGKKKKNKRGKKAGKQPGGLADDSVKNTWFSSIKRELEEVKCPKTGWRSCLNVPEDSVVSVETLQPPAKRKREQKLKTSKLLSERTVIRTRKLRMRLNPEQARTLCNWMGAARFTYNKCLEAVKKEGFPLVWTVLLDRFVTAKPRRPEVFEGLEKELKEIQCSPRPWTKQEAELFAAREKRLESQIGGRAFRLQVAKDRDYVSGAFVNQEHPWLKETPCAIRQAAVRSLIKAWDSNTAKQEAMKERGEEKGHRFVLKYRQRQQPSSWTIEINARDLKNVETIERPRTRHKDDTKHKKRRKWTKLEVFKEKMAGGPLYLTEEIPGGKIEGAVKITRNRLGQFHMHIPIATPWDRLPPLKPENKRKVVALDPGVRTFQTSYSPQEGVGEYAKGERGFARLFNLCRRIDEIISERKDPKVKLPYLDRRDLKRQQYACMEKIRGLTNELHKKVANDLCRRFDTILLPEFKSQDMVKKNNNGRRRVIRKKTARTLLTLRHYVFRTYLASKVLLHGSELAIVTEEYTSKTCGRCGHIKKNLGGAEVYKCQKCGFKCGRDVNGARNVLLKHLRQPKSV

SEQ ID NO: 2941 - protein, 635 aa, Chloropicon primus
MARSGKRRKKKEKQGSGSTSSTRRSHSGESHAQGASKSGQESPTTERPLLPFWNQGLQLLYALCLLPPADDPASAGKPRKKPRKKGKKKNKKKGKKKKNKRGKKAGKQPGGLADDSVKKTWFSSIKRELVEVKCPKTGWRSCLNLPEDSVVSVETLQSPAKRKREQKLKTSKLLSERTVIRTRKVRMRLNPEQAQCLCNWMGAARFTYNKCLEAVKKEGFPLVWTVLLDRFVTAKPRRPEVFEGLEKELKEIQCSPRPWTKQEAELFAAREKRLESQIGGRRFRAEVAKDRDYVSGAFVNQKHPWLKETPCAIRQAAVRSLIKAWDSNTAKQEAMKERGEKKGHRFVLKYRQRQQPSSWTIEIDARELKNVETIERPRTRHKDDNKHKKRRKWTKLEVFKEKMAGGPLYLTEEIPGGKIEGAPENKRKVVALDPGVRTFQTSYSPQEGVGEYATGERGFARLFNLCWRIDEIISERKDPKVKLPYLDRRDLKRQQYACMEKLRGLTNELHKKVANDLCRRFDTILLPEFKSQDMVKKNNNGRRRVIRKKTARTLLTLRHYAFRTFLASKVLLHGSELAIVTEEYTSKTCGRCGHIKKNLGGAEVYKCQKCGFKCGRDVNGARNVLLKHLRQPKSV

SEQ ID NO: 2942 - protein, 564 aa, Chloropicon primus
MARSGKRRKKKEKQGSGSTSSTRRSHSGESHAQGASKSGQESPTTERPLLPFWNQGLQLLYALCLLPPADDPASAEVKCPKTGWRSCLNLPEDSVVSVETLQSPAKRKRGQKLKTSKLLSERTVIRTRKLRMRLNPEQAKCLCNWMGAARFTYNKCLEAVKKERFPLVWTVLLDRFVTAKPRGPEVFEGLEKELKEIQCSPRPWTKQEAELFAAREKRLESQIGGRAFRIQVGKDRDYVSGAFVNQKHPWLKDTPQPSSWTIEIDARELKNVETIERPNTRHKDDTKHNKRRKWTKLEVFKKKMAGGPLYLTEEIPGGKIEGAVKITRNRLGQFHMHIPIATPWDRLPPLKPENKRKVVALDPGVRTFQTSYSPQEGVGEYAKGERGFARLFNLCWRIDEIISERKDPKVKLPYLDRRDLKRQQYACMEKLRGLTNELHKKVANDLCRRFDTILLPEFKSQDMVKKNNNGRRRVIRKKTARTLLTLRHYAFRTFLASKVLLHGSELAIVTEEYTSKTCGRCGHIKDNLGGAEVYKCQKCGFKCGRDVNGARNVLLKHLRQPKSV

SEQ ID NO: 2943 - protein, 722 aa, Chloropicon primus
MARSGKRRKKKEKQGSGSTSSTRRSHSGESHAQGASKSGQESPTTEPLRRFWNQALKWLYEKCMLPIADDPASAGEGSSTPRKKRGGKRKEKPLDDPASAFEEGSSTPRKKRGGKRKGKPPEAASSAGESSSSSGKPRKKPRKKGKKKNKKKGKKKKNKRGKKAGKQPGGLADDSVKKTWFSSMKRELEEVKCPKTGWRSCLNLPEDSVVSVETLQPPAKRKRGQKLKTSKLLSERTVIRTRKLRMRLNPEQAKCLCNWMGAARFTYNKCLEAVKKERFPLVWTVLLDRFVTAKPRGPEVFEGLEKELKEIQCSPRPWTKQEAELFAAREKRLESQIGGRRFRAEVAKDRDYVSGAFVNQKHPWLKDTPCAIRQAAVRSLIKAWDSNIAKQEAMKERGEEKGHRFVLKYRQRQQPSSWTIEIDARELKNVETIERPNTRHKDDTKHKKRRKWTKLEVFKEKMAGGPLYLTEEIPGGKIEGAVKITRNRLGQFHMHIPIATPWDRLPPLKPENKRKVVALDPGVRTFQTSYSPQEGVGEYATGERGFARLFNLCWRIDEIISEREDPKVKLPYLDRRDLKRQQYACMEKLRGLTNELHKKVANDLCRRFDTILLPEFKSQDMVKKNNNGRRRVIRKKTARTLLTLRHYAFRTFLASKVLLHGSELAIVTEEYTSKTCGKCGHIKDNLGGAEVYKCQKCGFKCGRDVNGARNVLLKHLRQPKSV

SEQ ID NO: 2944 - protein, 658 aa, Chloropicon primus
MARSGKRRKKKEKQGSGSTSSTRRSHSGESHAQGASKSGQESPTTERPLLPFWNQGLQLLYALCLLPTADDPASAGEGSSSSGKPRKKPRKKGKKKNKKKGKKKKNKRGKKAGKQPGGLADDSVKKTWFSSIKRELEEVKCPKTGWRSCLNLPEDSVVSVETLQPPAKRKRGQKLKTSKLLSERTVIRTRKLRMRLNPEQARTLCNWMGAARGRAFRIQVGKDRDYVSGAFVNQKHPWLKETPCAIRQAAVRSLIKAWDSNTAKQEAMKERGEKKGHRFVLKYRQRQQPSSWTIEIDARELKNVETIERPNTRHKDDTKHKKRRKWTKLEVFKKKMAGGPLYLTEEIPGGKIEGAVKITRNRLGQFHMHIPIATPWDRLPPLKPENKRKVVALDPGVRTFQTSYSPQEGVGEYAKGERGFARLFNLCWRIDEIISERKDPKVKLPYLDRRDLKRQQYACMEKIRGLTNELHKKVANDLCRRFDTILLPEFKSQDMVKKNNNGRRRVIRKKTARTLLTLRHYAFRTFLASKVLLHGSELAIVTEEYTSKTCGRCGHIKDNLGGAEVYKCQKCGFKCGRDVNGARNVLLKHLLTGADAVEYYYHLYDSDLMHLAAFQGSKQVLQWLRSQDPPCPWIPNRCRIVAKHRNHQRVIEWINANS

SEQ ID NO: 2945 - protein, 815 aa, Chloropicon primus
MARSGKRRKKKEKQGSGSTSSTRRSHSGESHAQGASKSGQESPTTERPLRRFWNQALKWLYEKCMLPIADDPASAGEGSSTPRKKRGAEGEAAGRPRLCFRGGFEHASQEAGEAAARQKEEGQKLKTSKVLSERTVIRTRKLRMRLNPEQAKCLCNWMGAARFTYNKCLEAVKKERFPLVWTVLLDRFVTAKPRGPEVFEGLKKELKEIQCSPRPWTKQEAELFAAREKRLESQIGGRAFRTEVAKDRDYVSGAFVNQKHPWLKDTPCAIRQAAVRSLIKAWDSNIAKQEAMKERGEEKGHRFVLKYRQRQQPSSWTIEIDARELKNVETIERPNTRHKDDTKHNKRRKWTKLEVFKKKMAGGPLYLTEEIPGGKIEGAVKITRNRLGQFHMHIPIATPWDRLPPLKPENKRKVVALDPGVRTFQTSYSPQEGVGEYATGERGFARLFHLCRRIDEIISEREDPKVKLPYLDRRDLKRQQYACMEKLRGLTNELHKKVANDLCRRFDTILLPEFKSQDMVKKNNNGRRRVIRKKTARTLLTLRHYAFRTFLASKVLLHGSELAIVTEEYTSKTCGRCGHIKKNLGGAEVYKCQKCGFKCGRDVNGARNVLLKHLLWKRELVRWLGSEVYVKLGVSDIEGVGVIAIRDIPKGTNPFTSCNEGLLRRETMVTLTETEVREVSRRAGSTAVLELIKSFFAPLTEECNRTGMEREATTASGDLLYGVNATGTNTLDVSWYLNHSDRPNIQFVECAEENGFNTYVAKDTIRQGTELTVDYREMGKVYHQHATAAGPRRSEEDTIKRATTDDDDSLEKEKK

SEQ ID NO: 2946 - protein, 484 aa, Chloropicon primus
MRTRKLRMRLNPEQARTLCNWMGAARFTYNKCLEAVKKEGFPLVWTVLLDRFVTAKPRRPEVFEGLEKELKEIQCSPRPWTKQEAELFAARENRLESLIGGRAFRTEVAKDRDYVSGAFVNQKHPWLKDTPCAIRQAAVRSLIKAWDSNIAKQEAMKERGEEKGHRFVLKYRQRQQPSSWTIEIDARELKNVETIERPNTRHKDDTKHKKRRKWTKLEVFKEKMAGGPLYLTEEIPGGKIEGAVKITRNRLGQFHMHIPIATPWDRLPPLKPENKRKVVALDPGVRTFQTSYSPQEGVGEYAKGERGFARLFNLCWRIDEIISERKDPKVKLPYLDRRDLKRQQYACMEKLRGLTNELHKKVANDLCRRFDTILLPEFKSQDMVKKNNNGRRRVIRKKTARTLLTLRHYAFRTFLASKVLLHGSELAIVTEEYTSKTCGKCGHIKDNLGGAEVYKCQKCGFKCGRDVNGARNVLLKHLRQPKSV

SEQ ID NO: 2947 - protein, 723 aa, Chloropicon primus
MARSGKRRKKKEKQGSGSTSSTRRSHSGESHAQGASKSGQESPTTERPLLRFWNQGLAWLYALCLLPPADDPASAGEGSSTPRKKRGGKRKGKPLDDPASAFEEGSSTPRKKRGGKRKGKPPEADASAGESSSSSGKPRKKPRKKGKKKNKKKGKKKGNKRGKKAGKQPGGLADDSVKKTWFSSIKRELEEVKCPKTGWRSCLNLPEDSVVSVETLQPPAKRKRGQKLKTSKLLSERTVIRTRKLRMRLNPEQAKCLCNWMGAARFTYNKCLEAVKKEGFPLVWTVLLDRFVTAKPRRPEVFEGLEKELKEIQCSPRPWTKQEAELFAAREKRLESQIGGRAFRIQVGKDRDYVSGAFVNQKHPWLKETPCAIRQAAVRSLIKAWDSNTAKQEAMKERGEKKGHRFVLKYRQRQQPSSWTIEIDARELKNVETIERPNTRHKDDTKHKKRRKWTKLEVFKKKMAGGPLYLTEEIPGGKIEGAVKITRNRLGQFHMHIPIATPWDRLPPLKPENKRKVVALDPGVRTFQTSYSPQEGVGEYAKGERGFARLFNLCWRIDEIISERKDPKVKLPYLDRRDLKRQQYACMEKIRGLTNELHKKVANDLCRRFDTILLPEFKSQDMVKKNNNGRRRVIGKKTARTLLTLRHYAFRTFLASKVLLHGSELAIVTEEYTSKTCGRCGHIKKNLGGAEVYKCQKCGFKCGRDVNGARNVLLKHLRQPKSV

SEQ ID NO: 2948 - protein, 723 aa, Chloropicon primus
MARSGKRRKKKEKQGSGSTSSTRRSHSGESHAQGASKSGQESPTTERPLLPFWNQGLQLLYALCLLPTADDPASAGEGSSTPRKKRGGKRKEKPLDDPASAFEEGSSTPRKKRGGKRKGKPPEADASAGESSSSSGKPRKKPRKKGKKKNKKKGKKKKNKRGKKAGKQPGGLADDSVKKTWFSSIKRELEEVKCPKTGWRSCLNLPEDSVVSVETLQSPAKRKREQKLKTSKLLSERTVIRTRKLRMRLNPEQAKCLCNWMGAARFTYNKCLEAVKKEGFPLVWTVLLDRFVTAKPRRPEVFEGLEKELKEIQCSPRPWTKQEAELFAAREKRLESQIGGRRFRAEVAKGRDYVSGAFVNQEHPWLKETPCAIGQAAVRSLIKAWDSNIAKQEAMKERGEEKGHRFVLKYRQRQQPSSWTIEIDARELKNVETIERPRTRHKDDTKHKKRRKWTKLEVFKKKMAGGPLYLTEEVPGGKIEGAVKITRNRLGQFHMHIPIATPWDRLPPLKPENKRKVVALDPGVRTFQTSYSPQEGVGEYAKGERGFARLFNLCWRIDEIISERKDPKVKLPYLDRRDLKRQQYACMEKIRGLTNELHKKVANDLCRRFDTILLPEFKSQDMVKKNNNGRRRVIRKKTARTLLTLRHYAFRTFLASKVLLHGSELAIVTEEYTSKTCGRCGHIKKNLGGAEVYKCQKCGFKCGRDVNGARNVLLKHLRQPKSV

SEQ ID NO: 2949 - protein, 477 aa, Chloropicon primus
MRLNPEQAKCLCNWMGAARFTYNKCLEAVKKEGFPLVWTVLLDRFVTAKPRRPEVFEGLEKELKEIQCSPRPWTKQEAELFAAREKRLESQIGGRRFRAEVAKDRDYVSGAFVNQEHPWLKETPCAIRQAAVRSLIKAWDSNIAKQEAMKERGEEKGHRFVLKYRQRQQPSSWTIEIDARELKNVETIERPRTRHKDDTKHKKRRKWTKLEVFKKKMAGGPLYLTEEIPGGKIEGAVKITRNRLGQFHMHIPIATPWDRLPPLKPENKRKVVALDPGVRTFQTSYSPQEGVGEYAKGERGFARLFNLCWRIDEIISERKDPKVKLPYLDRRDLKRQQYACMEKIRGLTNELHKKVANDLCRRFDTILLPEFKSQDMVKKNNNGRRRVIRKKTARTLLTLRHYAFRTFLASKVLLHGSELAIVTEEYTSKTCGRCGHIKDNLGGAEVYKCQKCGFKCGRDDNGARNILLKHLRQPKSV

SEQ ID NO: 2950 - protein, 697 aa, Chloropicon primus
MARSGKRRKKKEKQGSGSTSSTRRSHSGESHAQGASKSGQESPTTERPLRRFWNQGLQLLYSLCLLPIADDPASAGEGSSTPRKKRGRKRKEKPLDDPASAFEEGSSTPRKKRGGKRKRKGKPPEAASSAGESSSSSGKPRKKPRKKGKKKNKKKGKKKKNKRGKKAGKQPGGLADDSVKKTWFSSIKRELEEVKCPKTGWRSCLNLPEDSVVSVETLQSPAKRKRGQKLKTSKLLSERTVIRTRKLRMRLNPEQAKCLCNWMGAARFTYNKCLEAVKKEGFPLVWTVLLDRFVTAKPRRPEVFEGLEKELKEIQCSPRPWTKQEAELFAAREKRLESQIGGRRFRAEVAKDRDYVSGAFVNQKHPWLKDTPCAIRQAAVRSLIKAWDSNIAKQEAMKERGEEKGHRFVLKYRQRQQPSSWTIEIDARELKNVETIERPNTRHKDDTKHNKRRKWTKLEVFKKKMAGGPLYLTEEIPGGKIEGAPENKRKVVALDPGVRTFQTSYSPQEGVGEYATGERGFARLFNLCWRIDEIISERKDPKVKLPYLDRRDLKRQQYACMEKLRGLTNELHKKVANDLCRRFDTILLPEFKSQDMVKKNNNGRRRVIRKKTARTLLTLRHYAFRTFLASKVLLHGSELAIVTEEYTSKTCGRCGHIKDNLGGAEVYKCQKCGFKCGRDVNGARNVLLKHLRQPKSV

SEQ ID NO: 2951 - protein, 477 aa, Chloropicon primus
MRLNPEQAKCLCNWMGAARFTYNKCLEAVKKEGFPLVWTVLLDRFVTAKPRRPEVFEGLEKELKEIQCSPRPWTKQEAELFAAREKRLESQIGGRRFRAEVAKDRDYVSGAFVNQKHPWLKDTPCAIRQAAVRSLIKAWDSNIAKQEAMKERGEEKGHRFVLKYRQRQQPSSWTIEIDARELKNVETIERPNTRHKDDTKHNKRRKWTKLEVFKKKMAGGPLYLTEEIPGGKIEGAVKITRNRLGQFHMHIPIATPWDRLPPLKPENKRKVVALDPGVRTFQTSYSPQEGVGEYATGERGFARLFNLCWRIDEIISERKDPKVKLPYLDRRDLKRQQYACMEKLRGLTNELHKKVANDLCRRFDTILLPEFKSQDMVKKNNNGRRRVIRKKTARTLLTLRHYAFRTFLASKVLLHGSELAIVTEEYTSKTCGRCGHIKDNLGGAEVYKCQKCGFKCGRDVNGARNVLLKHLRQPKSV

SEQ ID NO: 2952 - protein, 695 aa, Chloropicon primus
MARSGKRRKKKEKQGSGSTSSTRRSHSGESHAQGASKSGQESPTTEPLRRFWNQGLAWLYALCLLPIADDPASAGEGSSTPRKKRGGKRKGRPPEADASAGESSSSSGKPRKKPRKKGKKKNKKKGKKKKNKRGKKAGKQPGGLADDSVKKTWFSSIKRELVEVKCPKTGWRSCLNLPEDSVVSVETLQSPAKRKREQKLKTSKLLSERTVMRTRKLRMRLNPEQARTLCNWMGAARFTYNKCLEAVKKEGFPLVWTVLLDRFVTAKPRGPEVFEGLEKELKEIQCSPRPWTKQEAELFAAREKRLESQIGGRRFRAEVAKDRDYVSGAFVNQKHPWLKETPCAIRQAAVRSLIKAWDSNTAKQEAMKERGEEKGHRFVLKYRQRQQPSSWTIEINARDLKNVETIERPRTRHKDDTKHKKRRKWTKLEVFKEKMAGGPLYLTEEIPGGKIEGAVKITRNRLGQFHMHIPIATPWDRLPPLKPENKRKVVALDPGVRTFQTSYSPQEGVGEYATGERGFARLFNLCWRIDEIISERKDPKVKLPYLDRRDLKRQQYACMEKLRGLTNELHKKVANDLCRRFDTILLPEFKSQDMAKKNNNGRRRVIRKKTARTLLTLRHYAFRTFLASKVLLHGSELAIVTEEYTSKTCGRCGHIKDNLGGAEVYKCQKCGFKCGRDVNGARNVLLKHLRQPKSV

SEQ ID NO: 2953 - protein, 723 aa, Chloropicon primus
MARSGKRRKKKEKQGSGSTSSTRRSHSGESHAQGASKSGQESPTTKRPLRRFWNQGLQLLYSLCLLPIADDPASAGEGSSTPRKKRGGKRKEKPLDDPASAFEEGSSTPRKKRGGKRKGKPPEAASSAGESSSSSGKPRKKPRKKGKKKNKKKGKKKKNKRGKKAGKQPGGLADDSVKKTWFSSIKRELEEVKCPKTGWRSCLNLPEDSVVSVETLQSPAKRKRGQKLKTSKLLSERTVIRTRKLRMRLNPEQAKCLCNWMGAARFTYNKCLEAVKKEGFPLVWTVLLDRFVTAKPRRPEVFEGLEKELKEIQCSPRPWTKQEAELFAAREKRLESQIGGRRFRAEVAKDRDYVSGAFVNQKHPWLKETPCAIRQAAVRSLIKAWDSNTAKQEAMKERGEKKGHRFVLKYRQRQQPSSWTIEIDARELKNVETIERPRTRHKDDNKHKKRRKWTKLEVFKEKMAGGPLYLTEEIPGGKIEGAVKITRNRLGQFHMHIPIATPWDRLPPLKPENKRKVVALDPGVRTFQTSYSPQEGVGEYATGERGFARLFNLCWRIDEIISERKDPKVKLPYLDRRDLKRQQYACMEKLRGLTNELHKKVANDLCRRFDTILLPEFKSQDMVKKNNNGRRRVIRKKTARTLLTLRHYAFRTFLASKVLLHGSELAIVTEEYTSKTCGRCGHIKKNLGGAEVYKCQKCGFKCGRDVNGARNVLLKHLRQPKSV

SEQ ID NO: 2954 - protein, 698 aa, Chloropicon primus
MARSGKRRKKKEKQGSGSTSSTRRSHSGESHAQGASKSGQESPTTERPLRRFWNQGLQLLYSLCLLPIADDPASAGEGSSTPRKKRGGKRKEKGKPPEAASSAGESSSSSGKPRKKPRKKGKKKNKKKGKKKKNKRGKKAGKQPGGLADDSVKKTWFSSMKRELEEVKCPKTGWRSCLNLPEDSVVSVETLQPPAKRKRGQKLKTSKLLSERTVIRTRKLRMRLNPEQAKCLCNWMGAARFTYNKCLEAVKKERFPLVWTVLLDRFVTAKPRGPEVFQGLKKELKEIQCSPRPWTKQEAELFAARENRLESQIGGRAFRIQVGKDRDYVSGAFVNQKHPWLKDTPCAIRQAAVRSLIKAWDSNTAKQEAMKERGEEKGHRFVLKYRQRQQPSSWTIEIDARELKNVETIERPNTRHKDDTKHKKRRKWTKLEVFKKKMAGGPLYLTEEIPGGKIEGAVKITRNRLGQFHMHIPIATPWDRLPPLKPENKRKVVALDPGVRTFQTSYSPQEGVGEYATGERGFARLFNLCWRIDGIISERKDPKVKLPYLDRRDLKRQQYACMEKLRGLTNELHKKVANDLCRRFDTILLPEFKSQDMVKKNNNGRRRVIRKKTARTLLTLRHYAFRTFLASKVLLHGSELAIVTEEYTSKTCGRCGHIKDNLGGAEVYKCQKCGFKCGRDVNGARNVLLKHLRQPKSV

SEQ ID NO: 2955 - protein, 662 aa, Chloropicon primus
MARSGKRRKKKEKQGSGSTSSTRRSHSGESHAQGASKSGQESPTTEPLRRFWNQGLAWLYALCLLPIADDPASAGKPRKKPRKKGKKKNKKKGKKKKNKRGKKAGKQPGGLADDSVKKTWFSSIKRELEEVKCPKTGWRSCLNLPEDSVVSVETLQSPAKRKRGQKLKTSKLLPERTVIRTRKLRMRLNPEQAKCLCNWMGAARFTYNKCLEAVKKEGFPLVWTVLLDRFVTAKPRRPEVFEGLEKELKEIQCSPRPWTKQEAELFAAREKRLESQIGGRRFRAEVAKDRDYVSGAFVNQKHPWLKDTPCAIRQAAVRSLIKAWDSNTAKQEAMKERGEEKGHRFVLKYRQRQQPSSWTIEIDARELKNVETIERPNTRHKDDTKHKKRRKWTKLEVFKKKMAGGPLYLTEEIPGGKIEGAVKITRNRLGQFHMHIPIATPWDRLPPLKPENKRKVVALDPGVRTFQTSYSPQEGVGEYATGERGFARLFNLCWRIDEIISERKDPKVKLPYLDRRDLKRQQYACMEKLRGLTNELHKKVANDLCRRFDTILLPEFKSQDMVKKNNNGRRRVIRKKTARTLLTLRHYAFRTFLASKVLLHGSELAIVTEEYTSKTCGKCGHIKDNLGGAEVYKCQKCGFKCGRDVNGARNVLLKHLRQPKSV

SEQ ID NO: 2956 - protein, 331 aa, Chlorella vulgaris
MGKRFVASRNIEEPWLKQCPQVIRSCAIRDLKAAFDSNFAKRKINPNHTFDVKFKAKKDDVTAVRIERVNGAFKVLDDGKHVSFFPKSLKPMGVDPRALQGIELKHDITLTKDRLGRFTLHVPYRRENQAAQEPDTWCAIDPGVRTFATVFSPTDACKIGDGAATRLAKLCAHLDKLTSDTTKASGLQRRRRMKKAQVRVRNRIVHLVDELHWQAASFLCKHYTDILLPVFETKKMACRLSRKIGSKTARSMLTLSHYKFRMRLIHKAAEHGCRVHLCTEEYTSKTCTRCGALKHNLGGAKVYRCPVCMLRIDRDIAGGRNIFLKNAVALD

SEQ ID NO: 2957 - protein, 320 aa, Chlorella vulgaris
MRKYAVKDATQAFVTNFAKKRKNSGHSFRVGFKTKKHSTKVLKLEAAKMGVKIVDGRPRLVVGDARQRQLGREGISFDRRGEALVRDTKDPVLQIDDLGRFWLITVCTRQPETQGQRTQGVVALDPGVRTFQTTYSPDGTSYKLGDTASNRVYRLLLVRDKYIGLAHMRGPSRRVRRSYGKKAAKIMARIQHIVDELHWKTARFLAQGWSEILIPVFGTAAMSKKYQASRAKRRCIGRKTTRQMLHLRHYTFRQRLHHVAKLTGTVVREVTEEYTSKTCGNCGEIKANLGGAKTYRCQECGVCLDRDGNGARNIFIKSVL

SEQ ID NO: 2958 - protein, 1367 aa, Chlorella vulgaris
MSDEEQAWEDESSEAKRARKGKAAMTDEDYRRAEEEEERAAQERDAMALLVGGLHVSPEEARQLMDADTAASAYYETATVMAQRQGRRQPMEHTAAEEEAGPSNAPHRRLSQAAHRQGRRQQQLSPAQQTPPQPRTYCEVAASQGQATPPPPVRQAARSASKKQATRAQKLQAGGGRRVAQPTGQAAPRPGPQPSRGQHDSINKQIASDAILAQYFTALDDLPPPDETTSESADLTQSPQEEQSDPLEPAEDVEQAAAAAAPAARRKDRRSKTQRKNQNKRLRKQKAREEARQDDLVLEEAYKQASSNSDRTASEEEEEGGAGGQQAADTDRPVFVAPGRGQAAPSEAAAAAAKGKSRNKRKRKKKASSNSDRTASEEEEEGGAGGQQADPQALAPPKQKRQKKQAKLKQEGAELFTIKTGLGSIIRLSVLWRAIEAAVVDMTQVCVETWNGLLILVARSCWAQQPQQPHDLEDLDDELQQLLQQPLPLMDQKFILSVMIALTGTRMPARANTIAPSAFVQKVLEHFYKPRNFWKRLRGWITMKIRQLESWHHQQLSCKKRKLLVDAVQKSIWNNVAFASPAAVAADHRALSDDVGALVAHVRQARVGLLPVKEHLYSEWHKFFPWLHTMLQDIEEHNRATRQRIVIARTALNTAKGVVEDLEAKLHAAQHDQPGQAAPRHKKRKQKQDPPTPKGRLRNVLRKPRALDPPPPQQGAHPPLAAQQVQQERQMHRPPMMPTPSWQHNASSARLTKHRNKANHSTWKQQRSRQWHYKDRKKAATAAAGSGVGEDEPAALAGHQPAAFVGNAPAGTSAARIATGPAAARDPRTPAQLKQALKEARKTVAALLEDLVKLRKTLAKTFKLVPSAALTPHFVPITPEIARARVNAFLEEEKELEEADKGLAQGKDKKRRSRTYQKYPRLDRPANITKAEWRKMLRQRRMPLLWETYFDLSGLRTAHHEPQAFLMTNGVQAHVQVKRKSQPARSLAVIADELKRHPERGEELERQLQEKRRELLKGKQWVAVDPGKRAWITAVSRSDNKSHHVAHQCTTKHHYQQTGSIKRRMRMERDLAAAPNGLQHWQSHLQRQDTANPVALETRLANLTTRLREVLVFYDAFKQRKWKWAAVVQRQRVLANEARRLCGGLPKHEYATVIPTREHLTSQSCPRCRLGWGRGQRSYSVRRCDKCQTYWDRDVAAAKNILQAARADVAGVARPRHLRRKPPPQPAPAAQHQPPPVQADDYAEDVVVWPAHLYDEQAPMEEMHGLEGGLGAMEVEFAPGWGVQELAAAAPWADPFYVLAALAGCLSDPEAEAADLNTRLLQRFSEAFGYWNADKRHAVATALAPLIVHRAYHHLVPNLKSYLGEVP

SEQ ID NO: 2959 - protein, 557 aa, Chlorella vulgaris
MAGPSSTPSHTYTRTGSGNGRCGSDGGGGGGGGSGNGNATESGGDTQEKLERQQADAQAEANSKLRKKQQEKGDQKKMKQRGQQRRRPLLPKEVRAVLRELRQQIKERTHKMFTPIPVGSLTLSHITVEPHVLQFIDPIARVSKLSKDDAFKARFDFSSVIPEGSSWSFSGMTTNGVEACVHMQRAARPPPPPPPSLDDMPAYDTSGVVVCWGADPGRISMFTAVSHVDCKMWHDVRQLSTGKYYQAVGFTQHQRWLQQQLASSEITAAGGTGLQAWQSHMPTANTSSADDLCKRIRHMSEGLRPTIVHYSSMQHLHWKLMLYGNKRRMLLSLVRQMTGGRRKDQVLVGFGNGTGGWRGPIKGHRMPPIKEFRQLLGRFATVVLVPESYTSKRCPCCEGLLKRTSTHAVNRCPECCYWDRDVAAAKNFLNVLLSHMAGQGRPAYLQKAANPPRAKKQSAAKAPAPAAANAVAPPRGPKPAPHGLPDHIGPGFFCPDALAPAVATVDASLGGPQQQAPHGMPAATALPLPAAEPAAAPSGSGQAGAGGEVDGSMMELD

SEQ ID NO: 2960 - protein, 378 aa, Cichorium endivia
MLRRQAYKFRIEPTGEQQRKLRQFAGACRFVFNKALAVQQVNREEGGKYIGYVAMAKYLTAWRNGDETPWLKDAPVHPLQHALKDLDRAYQNFFAQRADFPRFKKRGQRDSFRYPRSQTDQARPGKFTHQPAQAGLAALSQQQAGAGHGEERQREPQRRALETVLQPLNSFKRHQHRLAKAQRQMSHKTKFSNNWKKAKARVQRINRQIADARNDYLHKATHAISQSHALVCVEDLKVGNMSRSAKGTVEQPGQSVRQKSGLNRAILDQGWGEFRRQLDYKAQWAGGWLVAVPPQQTSQQCPECGHTHAGNRQTQALFLCLACGHSDNADRVGSRNIRERGLKTLEGQGHAPIACEVNGAVWPSAAGTRRSEEAAFAA

SEQ ID NO: 2961 - protein, 699 aa, Cichorium endivia
MTSIVLSNVARSAQELPRRGPDRGHHVYPFYDGHLAHKYRSLVRPEQANQLSHESINTFDPTEMALSRCWTYAMVTDFAATAGQQKRWPFTHTTVLDCSSDYFPTDQGRLPVEDLGDEVVQAILQAADVGPAFPSAGSGAADPLAPVAGQVPSSAANALALAPLARQAPSSVVTAEPTPMDLDDPPAPPGPTPSAAAAAPPPRPPPTPTQPTPPSSQTLVNKPEMTNTRTAVYRIYAPTELKDRIRTFRRRTRLVKNEAVRLVNMATSPSHEHLNERRLYTLLANNGSAFSRKHPELLRCPVHARRQVILEAIAQRKSIITRYDNLPGGRRRPLPSICPPTKQTDKRFGFSVAFPNTTGKIEALYDVTGTEVTGLKLVMPAVTIGGTRYSEVRARICLRGERQRLRLLELCRWSRANAFKLPREWRVRCGADGRWYLHVSYELVDPKRFNADQQAEKKRRGITVLNGAIKVKSIDPGARTPFTVYTSEGETIEIGGQDDRARLRELRLAADRIQSRINEMKRLNRRPSSRVSREMRKRRFARPARERSELHKRWRRIMADSKNLVKEVHCRTAHFLALSSNIVVMPRMEVLGMVRRRRSRLKISTKRELLTWSHSAFVNRLAIKCHDIAYDARFPHKAGHPTLLLVQPEAYTSKTCPACGRLNDSLGSRTDFHCPHQNCTYTAGRDHNGAFNMIIKAIR

SEQ ID NO: 2962 - protein, 759 aa, Amoeboaphelidium protococcarum
MVYEITRKCKLNTALNLDAFDKSALIAFVKTCSTSLSSAQRFLYICLNVWQEEGTQLPDLSHQQYVASMLEFLCNPQFPHDRQSFHTQLLGDAIGPAVLEQLHHASLAGPNPNLYEFGARRVMQAVRWHLTTTLFVYQKRILQAQLEPFGITGRKLTLYIALLNALKFDNPSEAFQFDHPELLLLDRSVKVSISAEYDADDQEHQEVADAELVSQIYDQMDWDEDLVWFTKVHRSFLLDIVTSSYEPPEPRREYVMQRRSPRNLEKKVGVHRQVRARSRQQLSMKSRAGPAFDSLMGQQSLVQYMGYLRDETKGLEVPSFSIFPMGTDVPRYVQVDRRVLHYSGIQSLSDCSVKSIINLKKTRLRKIAVDVDEVTLLSDGYGCSIAVKVKDRPWQYANVKSDLESNRQSDVSGKLFGAVYLTDAKKLAERMEGAQVFGVDPGKKNPMVWTKDRDPVLAANRSLAQQKYRRTGHITAGHWRKLTLEKQYEAAASRIKPVSINVYENDLAQVSSKRQYLNVLMANFPQVVDFYSSSFHRSWRFRRYCATQSGYDNVMNHMLHGRETPQAAVVHDHRRRKRARRRKKKQRKKHERMVDPAAPTKPPVIAYGNAGVMHVKKNPPVPVRGFAYHLSRRGLVVSIPEYQTTKLCSCCHHGLRLEKVGVYDCHHTKRRRRVPEKSHPVLCCFDASGSFLQVSSNCPDRQQKQVESRLSVCSNCQVLGQPYFVDRDVNASLNMLLIVVYFAETRRRPDWNRRAGRRT

SEQ ID NO: 2963 - protein, 639 aa, Amoeboaphelidium protococcarum
MEQFTSVKLKFADVWKGDVDTRLALEKLHADSIQFRVVASMFVQYYIVLRCNNSGVYEKFQRRVRDGRTGEAIDLTFMHFNDSMMDRIMRPFSGAGGKLEFLDSALEYIEINKALREFAVQVLEQTDFEPLDNQLLSLSYREIAKEFYKNLKTYVKVNFSLHLANFFISHLKVDCQFDNFYMKSLVKKLVDQAKRDFHRRVVSLELLAKVYVGDLYNNHGHLKRITDETFDEFLVVMFCLQKHLEELKDSSMVPIKILQLIPQYKVKAAHIFLTNQMFSNQQQHPLLAQEEWIQSCFNTDSFKQQFAGSITTDLYSVSFLVYSHGVAAPLAAEAQVALEYFLDEQDAEDADEDDVDADELEIEEEDVEQDLQEDVPHVDWSFLNDESFSNLRRDTNTVFGAIDPGINKAIQMAFFSHMNGNISPLDEFCLLNSRRQLKFATESDLGQHQATRRTPPLISLPIGVTNKTSDLVSLQQYCVTYLQLSSVAIVRVLSGDARKIQFEYWEHRRAVLQNAVKRLLGLEQLDETRRYQFIIFFGRGGEFGFAGFGRKRVPPLVQLRYILNKYATVVVTPEPWTSSRCCACHSFGTRYRRPQDKFVCMRDPNHQMNGDSNAAVNILYIGLYMMMHGGTFPQHFINQ

SEQ ID NO: 2964 - protein, 696 aa, Amoeboaphelidium protococcarum
MADPPIEVADIGGALPPRKRQREVNCKACGRDDHKRSSSKLCPNYVPRAKNAAKPQDNMGIPVAEAYVAVPIGLNVFCKIDAVKHEISDLVSRCTDLKVEACRLLLSFVLNHLVYNPDTPMPDIRFGANGQMRNFFSSLIANPRRRDLLNRNTCNWAALNEFIEAHYVPRRPADLFWCDMRGYSNMVTALASAHNDDCARHISTNLPSRLKQWLRHKFRKHLGFCLEEDDVCTLAVYVLALINPPEDIEEMPPYPAEIIDNCGNGELVVYYMDYYETRARQYILCNLPMDKASLQNNWHLYLKSMWRILRTFESNHQMYEEEYLLNNEGPLLNVYALLPLNGFTQKHILITSNVLKEICVAANLPDVRQMDVHALWSQCFKLNKVSTTGNQRRRFGYSITSDGVGCSASVLRPAYPAPPASRYGFAFDGTGYQPLDVNNETRVIGIDVNRGVLLAASCGPDDRIADVPTDQTPFADGTHELVYTTARWREENGEKFGEKKKAAWNEIAPEVVNAMAQIPSAKSTSFLGIIQHLQYVLQHRDAFTGFYRPEMWRKLRRKLFSKRQRAYDNLARMLTLRQDGQFDHNTIIAYGAGNFDTASPGYPATPNKRLFYELKKRCRVRLVPEYRTSQRCSNCESELGQSRVWRIKHCPNNNCLAIWHRDVNAARNIRYIFLARNRDGGERPVPFRYDPPRPQQ

SEQ ID NO: 2965 - protein, 772 aa, Amoeboaphelidium protococcarum
MAKKVTRKCKLNSVLNLDDGDKEILISQIQLSSVHLTFASRLIYLCLNVWNEAGKALPELSHQQYFASMLEYLCNSAFHRDNDHTRMLSETIAPEVRQRLRHESLIGPNPNLYVFQARKIIQAISWHLTETIWVYQKKVIKAQMEAFNVKGRRLTVFLQLLNSLLTEEAVNTMEHFGGEYLEIDPATQIYLPPDYDAGEDEETIAQQDAAIRDELLQLLQVEEVRHLVSLHRHHLLDIVTTSFQDKAPRKRYSKRKQESSRQLKGSIGFKRQKSGKLKQRDTHHTYMPSRAHHAFQNQEGQKVLVQYLMYLRQTLKELGLSSFKIFPTGTDVPRHISFDNRVLAQWGFGQYHLGDQSEEKEEHVQKQEEEKQCILKLKYLGLQQRMANSQDVSISSDGFACSISVSGQGGKAYANEAKDLERKARNTDVSQVDVGAFALENCRNLAQRLDGTRLIGIDPGKKNVLVWGDEANVEGATTLKDAKREFKDTGRISSGYWQRLALTTEYEAHLQYNKPAEITLMEQEMAQSNNSQQYLGVYIRYFEDVYAFYSQSFHRNWRFRRFCATKSAFGNVINMMHGRPKPPVPKINDRHRGRAAKKRKRELRKSHGTLLPPDKPPVIALGDAGVKHVRGNPPVPVRKFAFELSRRALVVITPEYHTNKQHSICHADLHWEHEVVLKCRDKKVKKILPGRHRAQTVCIKADGPEILSHECPDRFNRRVQSRFGVCQNCQNTGSDVFVDRDVNAYRSMAQIVRHYAIHGYRPQWNCRAERRA

SEQ ID NO: 2966 - protein, 695 aa, Amoeboaphelidium protococcarum
MEYRTITAKDNLDSVFAGTDEELNLLKQTILDNHYLRFLGSTAVYHYAMDFLHGHTDWAVDKQYPQLDAHVLSSFFKEFAQGFRRQNRSPISSRFINIHEEIVGVAEKIQFGRGRDFQFIHQNVWHDYELAATNHLSSNLMKVLKRVVVHFLHCDASVLDRYSVKKLSTYLISQISLGLYIVNEDQEDGYDLSPDLLACLKKHKNVLDGDMHLFHEFISPYIDDVRRIREQLRLRDDYNAAYNVVRRVKVYDKLWYVYLPLFFRCNQYLEQQDLKFCSLLPIPSKSVCFFKLYSSGLQVLYPGKSFEDLFQIPHQQYGQLHGISTDSHTVQFLFECGHQALAPVVVQCRRVVLNPGHELRDAERRRLELQVQNIYVDEDEDEDEDEDEDEDDDDLHNEEADVDAADGQAQDQRRYSCQQIWYDFPNISLEGKKKAAVDPGLNNYVSIFRPADFQQNQYWDAIEFDYAEKHVISKQRFNELGITEELARKIAEHTQQAQQLRAGLKSYDFDRFQMMLQERYRLFDDELSYYSQEHVLELRLQRIFARRRAYLDVVKKILGVQVLHTSARDQFAVYYGDFVHSTRSLKGQFALQRLVQILNEYAMVFIVPELMTSRLCYECARSGDESFVRRKKDSSECPRCGKQYHADLLGGANIYSLSEQLQRSGGLVPPMNMPTKFIPIAREYGHRIQLARCAD

SEQ ID NO: 2967 - protein, 236 aa, Amoeboaphelidium protococcarum
MATSVGIRATDEHNALQNLVASSPQDLESVMLATDDYYHELHGRSRPYDRERAKDLWAQPRYCFTLEDCLLKSKDAAAKTNQRMPSHLDLSIQKYKFTILKVEKRLMMDKAAQLLGLANFSHQQKDKTIIFWGTGGTSRYGRRYLRGHHFHPPIQKLLACLRQLGRIIVTHEKGTSKHCYHDLQPVKRRRSGKLDEVTCHHCNQTINGDVLGGANILRVGLTMSTNGGNFPMEQTR

SEQ ID NO: 2968 - protein, 759 aa, Amoeboaphelidium protococcarum
MVYEITRKCKLNTALNLDAFDKSALIAFVKTCSTSLSSAQRFLYICLNVWQEEGTQLPDLSHQQYVASMLEFLCNPQFPHDRQSFHTQLLGDAIGPAVLEQLHHASLAGPNPNLYEFGARRVMQAVRWHLTTTLFVYQKRILQAQLEPFGITGRKLTLYIALLNALKFDNPSEAFQFDHPELLLLDRSVKVSISAEYDADDQEHQEVADAELVSQIYDQMDWDEDLVWFTKVHRSFLLDIVTSSYEPPEPRREYVMQRRSSRNLAKKVGVHRQVRARSRQQLSMKSRAGPAFDSLMGQQSLLLYMEYLRDETKVLDVPTFSIFPMGTDVPRYVQVDKRVLRYSGIQSLSGCSVKSIINLKKTRLRKIAADVDEFTLLSDGYGCSIAVNVKEKPWQYANVKSDLESNRKTDVSGKLFGAVYLTDAKNLTERMEGAQVFGVDPGKKNPMVWTKDRDPVLAANRSLAQQKYRRSGHITAGHWRKLTLEKQYEAAASRIKPVSINVYENDLAQVSSKRQYLNVLIANFPQVVDFYSSSFHRSWRFRRYCATQSGYDNVMNHMLHGRETPQAAVVHDHRRRKRARRRKKKQRKKHERMVNPAAPTKPPVIAYGNAGVMHVKKNPPVPVRGFAYHLSRRGLVVSIPEYHTTKLCSCCHHGLRLEKVGVYDCHHTKRRRRVPEKSHPVLCCFDASGSFLQVSSNCPDRQQKQVESRLSVCSNCQVLGQPYFVDRDVNASLNMLLIVVYFAETRRRPDWNRRAGRRT

SEQ ID NO: 2969 - protein, 759 aa, Amoeboaphelidium protococcarum
MVYEITRKCKLNTALNLDAFDKSALIAFVKTCSTSLSSAQRFLYICLNVWQEEGTQLPDLSHQQYVASMLEFLCNPQFPHDRQSFHTQLLGDAIGPAVLEQLHHASLAGPNPNLYEFGARRVMQAVRWHLTTTLFVYQKRILQAQLEPFGITGRKLTLYIALLNALKFDNPSEAFQFDHPELLLLDRSVKVSISAEYDADDQEHQEVADAELVSQIYDQMDWDEDLVWFTKVHRSFLLDIVTSSYEPPEPRREYVMQRRSPRNLEKKVGVHRQVRARSRQQLSMKSRAGPAFDSLMGQQSLVQYMGYLRDETKGLEVPSFSIFPMGTDVPRYVQVDRRVLHYSGIQSLSDCSVKSIINLKKTRLRKIAVDVDEVTLLSDGYGCSIAVKVKDRPWQYANVKSDLESNRQSDVSGKLFGAVYLTDAKKLAERMEGAQVFGVDPGKKNPMVWTKDRDPVLAANRSLAQQKYRRTGHITAGHWRKLTLEKQYEAAASRIKPVSINVYENDLAQVSSKRQYLNVLMANFPQVVDFYSSSFHRSWRFRRYCATQSGYDNVMNHMLHGRETPQAAVVHDHRRRKRARRRKKKQRKKHERMVDPAAPTKPPVIAYGNAGVMHVKKNPPVPVRGFAYHLSRRGLVVSIPEYHTTKLCSCCHHGLRLEKVGVYDCHHTKRRRRVPEKSHPVLCCFDASGSFLQVSSNCPDRQQKQVESRLSVCSNCQVLGQPYFVDRDVNASLNMLLIVVYFAETRRRPDWNRRAGRRT

SEQ ID NO: 2970 - protein, 428 aa, Amoeboaphelidium protococcarum
MNFDCLPMGTEQPRYIKVDKSVLVLAIGKLELAVDDRQSLLAKNRAKDIINLKSVRLHRKAADLDEVILSTDGFGCSITIELNKEFPPYSNTREDLLVKKSKSVDLSQMRVGAVALTNCKQLGSRVQGANVIGVDPAAAHRQLRQTGRLTAKHWPRLSQVKSKAEYLQIYLEMHEHVWHYYCAPFHRQWRLRKFCARQSAFDNVANSMVHNRETPSAPLKDDYYRRYAAHWRKKRLRQSFGRMLDPTVPAGDRPKPPVIAYGNAAVQPVKKTSHVPVRGFAYKLSRCALLVMVLEPNTSKLHAPCHQEMHMQNVDVMRCHHRNKKVKIDGHCRPVFCCVAEGEDGQLIVLHAAGQCPDRERKVVQSRLGVCQNCQVEGVTVFVHLDVNAGVNLQEVVVYYAEHWEDKARRKFRPEWNKRAVGRIRDIQ

SEQ ID NO: 2971 - protein, 772 aa, Amoeboaphelidium protococcarum
MAKKVTRKCKLNSVLNLDDGDKEILISQIQLSSVHLTFASRLIYLCLNVWNEAGKALPELSHQQYFASMLEYLCNSAFHRDNDHTRMLSETIAPQVRQRLRHESLIGPNPNLYVFQARKIIQAISWHLTETIWVYQKKVIKAQMEAFNVKGRRLTVFLQLLNSLLTEEAVNTMEHFGGEYLEIDPATQIHLPPDYDAGEDQETIAQQDAAIKDELLQLLQVEEVRHLVSLHRHHLLDIVTTSFQDKAPRKRYSKRKYESSRQLKGSIGFKRQKSGKLKQRDTHHTYMPSRAHHAFQNQEGQKVLVQYLMYLRQTLKELGLSSFKIFPTGTDVPRHISFDNRVLAQWGFGQYHLGDQSEEKEEHVQTQEEEKQCILKLKYLGLQQRMANSQDVSISSDGFACSVSVSGQGGKAYANEAKDLERKARNTDVSQVDVGAFALENCRNLAQRLDGTRLIGIDPGKKNVLVWGDEANVEGANTQKEAKREFKDTGRISSGYWQRLALTTEFEAHLQYSKPAEITLMEQEMAQSNNSQKYLGVYIRHFEDVYAFYSKSFHRNWRFRRFCATKSAFGNVINMMHGRPKPPVPKINDLHRGRAAKKRKRELRKSHGTLLPPDKPPVIALGDAGVKHVRGNPPVPVRKFAFELSRRALVVITPEYHTSKQHSICHADLHWEHEVVLKCRDKKVKKILPGRHRAQTVCIKADGPEILSHECPDRFNRRVQSRFGVCQNCQNTGSDVIVDRDVNAYRSMAQIVRHYAIHGCRPQWNCRAERRA

SEQ ID NO: 2972 - protein, 804 aa, Amoeboaphelidium protococcarum
MVYETTRKCTLRQALNMNQASKKELISWLRVASEHLSSASRLVYIALNVWHERGDKMPDLSHQQAFANMLEFLVNSQFNVARHHPETVTHIDKLAESVGAAAMARLKHPSLEGPNPNLYEYQSRHMIAAVKWHLTQTLFDYQKRVLKVQLEPFGITGGKLVVFLILLNTVMTEGKSLAKEHLDASFLDIDPDTPVQLSADDDLSSEGEEVNSTQQLKQDVLDIIGNNEPLQALIQVHREFLLDILFTSYQKREPRQRRQHVRNPNPRSLSVLKVARKSREVKSKKPVAPNKKVATNMAGRAGNAFENLHGQNVLLKYMEYLQLTANNLEIKSFDCLPMGTDQPRYIKVDKRILVSAIGKLELAVNDRQSLLAKNYAKDFVNLKSVKLGQKGKALQEISLSTDGFGCSITVALNKECPPYANTREDLLVKKSRSVDVSQMRVGAVALTNCKQLGSRVQGANVIGVDPGKINVMVWTAGPVLAAESEAAAHRQLRQTGRLTAKHWRKLTLESQFDSAERQFKSYYPEVLQFEARLSQVKSKAEYLQIYLEMHEHVWHYYCAPFHRQWRLRKFCARQSAFDNVANSLVHNREMPSAPLKDDYYRRYAAHRRKKRLRQSFGRMLDPTVPAGDRPKPPVIAYGNAAVQHVKKTSPVPVRGFAYKLSRCALVVMVPEPNTSKLHAPCHQEMHMQNVGVMRCHHRHKKRRIDGHRRPVFCCVAEGEDGQLNVLHAAGQCPDRERKVVQSRLGVCQNCQVEGVTVFVDRDVNAGVNMREVVVYYAEHWEDKARRNFRPEWNYRAVGRIRNIQ

SEQ ID NO: 2973 - protein, 675 aa, Amoeboaphelidium protococcarum
MADPPIEVADIGGALPPRKRQREVNCKACGRDDHKRSSSKLCPNYVPRAKNAAKPQDNMGIPVAEAYVAVPIGLNVFCKIDAVKHEISDLVSRCTDLKVEACRLLLSFVLNHLVYNPDTPMPDIRFGANGQMRNFFSSLIANPRRRDLLNRNTCNWAALNEFIEAHYVPRRPADLFWCDMRGYSNMVTALASVHNDDCARHISTNLPSRLKQWLRHKFRKHLGFCLEEDDVCTLAVYVLALIDPPEDIEEMPPYPAEIIDNCGDGELVVYYMDYYETRARQYILCNLPMDKASLQNNWHLYLKSMWRILRTFENNHQMYEEEYLLNNEGPLLNVYALLPLNGFTQKHILITSNVLKEICVAANLPDVRQMDVHALWSQCFKLNKVSTTGNQRRRFGYSITSDGVGCSASVLRPAYPAPPASRYGFAFDGTGYQALDVNNETRVIGIDVNRGVLLAASCGPDDRIADVPTDQTPFADGTHELVYTTARWREENGESLIPSAKSTSFLGIIQHLQYVLQHRDAFTGFYRPEMWRKLRRKLFSKRQRAYDNLARMLTLRQDGQFDHNTIIAYGAGNFDTASPGHPATPNKRLFYELKKRCRVRLVPEYRTSQRCSNCEFELGQSRVWRIKHCPNNNCLAIWHRDVNAARNIRYIFLARNRDDGERPVPFRYDPPRPQQ

SEQ ID NO: 2974 - protein, 802 aa, Amoeboaphelidium protococcarum
MPSNTARKCTLNQALDLNPAEKKDFVAWARSTSVSLSFASRMVYLALNVWHEQKAKLPDLSHQQEYATMLEHCCNRILSRSRKRKTAEHTGALTDLFTQDLLDIVHQEDLARANPNLYNFQARKMEAAIRWHLTETMFVYQKRVLGKQLETYGITGKKLIIFQQLMNALVLDSEEHAHEHLDNRYLSIDPTTSVSAPSEEDLGRTDEEQQHHQRLKDEILEMIAGNQDVQLIVEHHRQYLLDIVTCSYNPKAKRRRYSRREKNPRQLSGAVGIPAQVRHPSESKKKQSNRHQMNMANRAGPAFGNVEGQKDLLQYMSYLQQLSKDLKVKQFDMFPTSSDVPSYFQIDMNVLQHSGLKRMKQAKSVRSIINFKKVGLRKYNDQIKGDNQAGNEDVTFTTDGYGCSVVVEVENRAWTYANKKEDLLTKHHRKDVSKLMYGAVALADCDNLNERLQNCESFGVDPGQENPLVCSTDTVVDNQTSMSGAKRQFRQSPHLTGVHWRKLTLEKQYEAAEARLKPAAIKEFERLASEIESKVEYVALYKRYFAEIFEYYSRAFHRVWRLRKFMARQSAYDRVLNHILNGRDKPSVPKVNDAARTKQSANFQRLQRARYGKMLDPTVPVGKRPKPPVIGYGNAGVKHMKKHPPVPVRGFAYKMSRRALVVMIPEYCTTKLHANCHHELHMHDMSVNRCNHTKKLRMPPDRDRVDDRGVVKLRRPVFCCINEEGQQLHAASNCPDRERKLVKSRLGICQNCRVQDAAVFVDRDVNASCGMKQVLVFYAENHRRPDWNQRRVVGRTQTIQGV

SEQ ID NO: 2975 - protein, 486 aa, Amoeboaphelidium protococcarum
MPSRAHHAFQNQEGQKVLVQYLMYLRQTLKELGLSSFKIFPTGTDVPRHISFDNRVLAQWGFGQYRLGDQPEEKEEHVQSHEEEKQCILKLKYLGLQQRMANSQDVSISSDGFACSVSVSDQGGKAYANEAKDLERKARNTDVSQVDVGAFALENCRNLAQRLDGTRLIGIDPGKKNVLVWGDEANVEGATTLKEAKREFKDTGRISSGYWQRLALTTEYEAHLLHIKPAEITLMEQEMAQSNSSQQYLDVYIRHFEDVYAFYSKSFHRNWRFRRFCATKSAFGNVINMMHGRPKPPVPKINDQHRGRAAKKRKRELRKSHGTLLPPAKPPVIALGDAGVKHVRGNPPVPVRKFAFELSRRALVVITPEFHTSKQHSICHADLHWEHEVVLKCRDKKVKKILPGRHRAQTVCIKADGPEIPSHECPDRFNRRVQSRFGVCQNCQNTGSDLFVDRDVNAYRSMAQIVRHYAIHGYRPQWNCRAERRA

SEQ ID NO: 2976 - protein, 1090 aa, Amoeboaphelidium protococcarum
MATSALGSQFKIMVDFNGTFYRHLRRIYNHSKNPLEASIHLVKTALPLNWMVMVQGEARPIKDIVTLVFEGEQTCEKSQTSLKRVNARLKQILKLRNCLENLPVDKKELIKAGYNVEVACGEADVHIAKCKDPVVAVSFDSDLFMHKNVLVAAKPAFDCGLMKFFVLDRKVVCDKLNLTNSAWVALAVVSGNDYSDNVKGFGFGRNLKIIRKLMEAGHSDVKSIVSQYQNVMEVGPIFCQALRVFDSNQESLIIQSLEGDPNYKKNSLDNLFKPVEDEVFVSMGTLEWIRREISARSLTAAHRQYHEVYALLNLYSKWHESVLQLKSVKLDAYQEWKIQSRQVGKSREEVSYLSLQERWKGYNRFLPLYKKEFVDDRQSGTSVQSGGRYMFQEVEWNRKSKSEIPQPKKQTPKFVRDIESHEERQEESDDTTQSDDIEVAPRKKRRVQSSQTARRGNYRASSSVTRDKCDARSGGQKRINTEETLLMKKLKSAHSMSTLEVGSLRKCLSKGSLSQQLQKQLAATIQTVVRDINLLKRMAQLGVQWFIGIILEQYPDEISLLDDICYSDTPGQGGRKFWQGVIRFLRNGRSNASQKGAAVLKFGQLLGQQMNIMNGLERKFDRTLNITQIVDQLAIQLDSEFASQVIGRVELLAAQVLEHDPELRSRIEEIDKMPSVFQKFQSLNDLLPKERQYGYPLSSPQDCYVTFTENSMMILLQSSIINNPQMEQERKQELLRDLQCYYSEGGLVKQKGHTLRECYGIKLKKGLRLLSQYMPEACDTTRKILSNTFITNGKVLKVHLIDIRRKQQVRRLAGSQSEGLLEAAQRKRLSKVTMQVSETVNVQPDKLSEYWICCLDIGERYTAGVVAVKGQGESRIIRALALKSSAVNEPGRKFRKYHQGRPSDISKLERSMCRGEEESMECYWERYIDIYQQLRSYYSSEIRQKRHWDFKKAQRAEFDRATNAILKMVDASVFQKSNGRVVFGIGNAQFDSKQTIHLSFQRHFVQKVKSLGYPVVFLNEYLTSQKAPCCGCVCESFGMRIKYCRKCHKFYHRDIMAAENLTQVLICLICDEPRPKYLCSKNQSRFQESE

SEQ ID NO: 2977 - protein, 488 aa, Amoeboaphelidium protococcarum
MTGRSGNAFANLHGQNVLLNYMEYLQFAAQNLENKSFNCLPMGTDRSRYIKVDKIVILTAVDKLRLPDNDRQSLRNKINLKDFINIKSVRLHNKLGILKNLVCLPMALAVLLQVSSSVDVSQMLVGAVTLTNCKELGSLVQGANVIGVDPGKINVMVWTAGPVLAAKSEAAAHRQLRQTARLTAKHWRRLTLESQFDSAERQFKSYYPEVLQFEARLSQVKSKAEYLQIYLEMHEHVWHYYCAPFHRQWHLRKFCVTQSAFDNVANSIVHNREMPSAPLKDDYYRRYAAHRRKKRPCQSFGRIMDPTVPAGDRPKPPVIAYGNAAVQHIKKTSHVPVRGFAYKLSRCALVVMVPEPNTSKLHAPCPQEMHMQNVGVMRCHHRHKKRRIDGHCRPVFCCVAEGEDGQLNVLHAVGQCPDRERKVVQSRLGVCQNCQVEVVTVFVDRDVNAGVNMREVVVYYSEHWEDKARRKFRPEWNYRAVGRIRDIQ

SEQ ID NO: 2978 - protein, 772 aa, Amoeboaphelidium protococcarum
MAKKVTRKCKLNSVLNLDDGDKEILISQIQLSSVHLTFASRLIYLCLNVWNEAGKALPELSHQQYFASMLEYLCNSAFHRDNDHTRMLSETIAPEVRQRLRHESLIGPNPNLYVFQARKIIQAISWHLTETIWVYYKKVIKAQMETFNVKGRRLTVFLQLLNSLLTEEAVNTMEHFGGEYLEIDPATQIHLPPDYDAGEDQETIAQQDAAIKDELLQLLQVEEVRHLVSLHRHYLLDIVTTSFQDKAPRKRYSKRKQESSRQLKGSIGFKRQKSGKLKQRDTHHTYMPSRAHHAFQNQEGQKVLVQHLMYLRQTLKELGLSSFKIFPTGTDVPRHISFDNRVLAQWGFGQYRLGDQPEEKEEHVQSHEEEKQCILKLKYLGLQQRMANSQDVSISSDGFACSVSVSDQGGKAYASEAKDLERKARNTDVSQVDVGAFALENCRNLAQRLDGTRLIGIDPGKKNVLVWGDEANVEGATTQKEAKREFKETGRISSGYWQRLALTTEYEAHLQYNKPAEITLMEQEMAQSNNSQQYLGVYIRYFEDVYAFYSQSFHRNWRFRRFCATKSAFGNVINMMHGRPKPPVPKINDRHRGRAAKKRKRELRKSHGTLLPPDKPPVIALGDAGVKHVRGNPPVPVRKFAFELSRRALVVITPEYHTSKQHSICHADLHWEHEVVLKCRDKKVKKILPGRHRAQTVCIKADGPEILSHECPDRFNRRVQSRFGVCQNCQNTGSDVFVDRDVNAYRSMAQIVRHYAIHGYRPQWNCRAERRA

SEQ ID NO: 2979 - protein, 802 aa, Amoeboaphelidium protococcarum
MPSNTARKCTLNQALDLNPAEKKDFVAWARSTSVSLSFASRMVYLALNVWHEQKAKLPDLSHQQEYATMLEHCCNRILSRSRKRKTAEHTGALTDLFTQDLLDIVHQEDLARANPNLYNFQARKMEAAIRWHLTETMFVYQKRVLGKQLETYGITGKKLIIFQQLMNALVLDSEAHAHEHLDNRYLSIDPTTSVSAPSEEDLGRTDEEQQHHQRLKDEILEMIAGNQDVQLIVEHHRQYLLDIVTCSYNPKAKRRRYSRREKNPRQLSGAVGIPAQVRHPSESKKKQSNRHQMNMANRAGPAFGNVEGQKDLLQYMSYLQQLSKDLKVKQFDMFPTSSDVPSYFQIDMNVLQHSGLKRMKQAKSVRSIINFKKVGLRKYNDQIKGDNQAGNEDVTFTTDGYGCSVVVEVENRAWTYANKKEDLLTKHHRKDVSKLMYGAVALADCDNLNERLQNCESFGVDPGQENPLVCSTDTVVDNQTSMSGAKRQFRQSPHLTGVHWRKLTLEKQYEAAEAKLKPAAIKEFERLASEIESKVEYVALYKRYFAEIFEYYSRAFHRVWRLRKFMARQSAYDRVLNHILNGRDKPSVPKVNDAARTKQSANFQRLQRARYGKMLDPTVPVGKRPKPPVIGYGNAGVKHMKKHPPVPVRGFAYKMSRRALVVMIPEYCTTKLHANCHHELHMHDMSVNRCNHTKKLRMPPDRDRVDDRGVVKLRRPVFCCINEEGQQLHAASNCPDRERKLVKSRLGICQNCRVQDAAVFVDRDVNASCGMKQVLVFYAENHRRPDWNQRRVVGRTQTIQGV

SEQ ID NO: 2980 - protein, 719 aa, Amoeboaphelidium protococcarum
MSMRTIVAKSPLSELLKNEYTVQGDNAPINMSLLEYLQLIVKNNHQINSLATASILHYAINYLSSTKDDHQRRFYPELDLKVVRDFFKAFARYRKRSNPSVVVSEFLSQQQAQLLENQDYQIDCPNGEFFCNIYDKAAQTYELACQMHISVNLVKALKRVIAHKIVSSAPSLIIRFDASRLVSVLMGCIGRCKFLDYQNYVALHACLKKAAAQSSNDFGQLNNLMKPYIKIARLIKKELESKDGINFDFESVLSNVKRFKSFWFVFLPLFYQCCDYLNQSGCKSFVLLPVVSNKLSLVSITELGLRQSVMHNKSFADIFKDIPKYSKAELFGIRTDGYQVQYIYQCNDDFQARTIEEARCVEAVPTPAAGDNHPQVEEDGVLEDLAVLNYVFDLYEDDDGEDVLVVQGHNRDQQQAIEQVEALAWVNDMNLEQLDLEDFQLLQRKRSCQSIVYEIPGQKVEYHGKKELAVDAGIRNYVAVCRPRDNYQDLDCSQIPINKYHHFVLSQSQYLQMVGGEQFQAEYREFSLQARQFSKAFQTVDLCKLRMELQKYFGQFAARLVFYSDLALLKLSLDQYLYQQDALLLMVQKALNEEKLNPERREEFLVYYGSFISGQLGVNGRYALKRYAQLLNVYARVIIMPELMTSTVCYECVRKGVETFVVRNKDAAYCPICQKVYHADVLGSVDIFFLARFIITHEGHVHPAFIPRKFIPVVQQPLN

SEQ ID NO: 2981 - protein, 438 aa, Amoeboaphelidium protococcarum
MGSTWRFNTFYTDLYSVSVPCHAKSKEDASGQQIAPQPAQSSSSTSQAREPALAPGIEIQGTQADEPEDLVTFELPPGKRRLRSDTSSNSQKRQRKSLQQMYRQEDDCPGDPTDQEFTEGQQELVIPLGDDWLWEEDDQNEISDQLEDLLDEVPDNEEEIDDAAEQEQGRDYRWLNNPALPQIDISDSDVTFVGVDLGVAFMATSCIIKASPGNDALQVLQSSDKNAIPFFMLNSEESRARIRAELSQQDRELSEDVFAEPKYCFSLEMCKRKSANATVVTNERMPQYLDFSVQKAKYTKFLIRRDVLREYAARLVGLNSFEDSRKKQIVVFWGSSGIQKLGRVFLPGGRYHPACKQLLQYVVQQIATVYVSHEKGTSNHCSDCVQRVVIRRTAERDVVTCGNCHLEINGDVNAAINIIKIVLTMATNHGMFPMQFTL

SEQ ID NO: 2982 - protein, 696 aa, Amoeboaphelidium protococcarum
MADPPIEVADIGGALPPRKRQREVNCKACGRDDHKRSSSKLCPNYVPRAKNAAKPQDNMGIPVAEAQVAVPIGLNVFCKIDAVKHEISDLVSRCTDLKVEACRLLLSFVLNHLVYNPDTPMPDIRFGANGQMRNFFSSLIANPRRRDLLNRNTCNWAALNEFIEAHYVPRRPADLFWCDMRGYSNMVTALASAHNDDCARHISTNLPSRLKQWLRHKFRKHLGFCLEEDDVCTVAVYVLALINPPEDIEEMPPYPAEIIDNCGNGELVVYYMDYYETRARQYILCNLPMDKASLQNNWHLYLKSMWRILRTFENNHQMYEEEYLLNNEGPLLNVYALLPLNGFTQKHILITSNVLKEICVAANLPDVRQMDVHALWSQCFKLNKVSTTGNQRRRFGYSITSDGVGCSASVLRPAYPAPPASRYGFAFDGTGYQPLDVNNETRVIGIDVNRGVLLAASCGPDDRIADVPTDQTPFADGTHELVYTTARWREENGEKFGEKKKAAWNEIAPEVVNAMAQIPSAKSTSFLGIIQHLQYVLQHRDAFTGFYRPEKWRKLRRKLFSQRQRAYDNLARMLTLRQDGQFDHNTIIAYGAGNFDTASPGYPATPNKRLFYELKKRCRVRLVPEYRTSQRCSNCESELGQSRVWRIKHCPNNNCLAIWHRDVNAARNIRYIFLARNRDDGERPVPFRYDPPRPQQ

SEQ ID NO: 2983 - protein, 772 aa, Amoeboaphelidium protococcarum
MAKKVTRKCKLNSVLNLDDGDKEILISQIQLSSVHLTFASRLIYLCLNVWNEAGKTLPELSHQQYFASMLEYLCNSAFHRDNDHTRMLSETIAPQVRQRLRHESLIGPNPNLYVFQARKIIQAISWHLTETIWVYQKKVIKAQMEAFNVKGRRLTVFLQLLNSLLTEEAVNTMEHFGGEYLEIDPATQIHLPPDYDAGEDEETIAQQDAAIKDELLQLLQVVEVRHLVSLHRHHLLDIVTTSFQDKAPRKRYSKRKQESSRQLKGSIGFKRQKSGKLKQRDTHHTYMPSRAHHAFQNQEGQKVLVQYLMYLRQTLKELGLSSFKIFPTGTDVPRHISFDNRVLAQWGFGQYRLGDQPEEKEEHVQSHEEEKQCILKLKYLGLQQRMASSQDVSISSDGFACSVSVSDQGGKAYANEAKDLERKARNTDVSQVDVGAFALENCRNLAQRLDGTRLIGIDPGKKNVLVWGDEANVEGATTLKEAKREFKDTGRISSGYWQRLALTTEYEAHLQYNKPAEITLMEQEMAQSNNSQQYLGVYIRYFEDVYAFYSQSFHRNWRFRRFCATKSAFGNVINMMHGRPKPPVPKINDRHRGRAAKKRKRELRKSHGTLLPPDKPPVIALGDAGVKHVRGNPPVPVRKFAFELSRRALVVITPEYHTSKQHSICHADLYWEHEVVLKCRDKKVKKILPGRHRAQTVCIKADGPEILSHECPDRFNRRVQSRFGVCQNCQNTGSDVFVDRDVNAYRSMAQIVRHYAIHGYRPQWNCRAERRA

SEQ ID NO: 2984 - protein, 696 aa, Amoeboaphelidium protococcarum
MADPPIEVADIGGALPPRKRQREVNCKACGRDDHKRSSSKLCPNYVPRAKNAAKPQDNMGIPVAEAYVAVPIGLNVFCKIDAVKHEISDLVSRCTDLKVEACRLLLSFVLNHLVYNPDTPMPDIRFGANGQMRNFFSSLIANPRRRDLLNRNTCNWAALNEFIEAHYVPRRPADLFWCDMRGYSNMVTALASAHNDDCARHISTNLPSRLKQWLRHKFRKHLGFCLEEDDVCTLAVYVLALINPPEDIEEMPPYPAEIIDNCGNGELVVYYMDYYETRARQYILCNLPMDKASLQNNWHLYLKSMWRILRTFESNHQMYEEEYLLNNEGPLLNVYALLPLNGFTQKHILITSNVLKEICVAANLPDVRQMDVHALWSQCFKLNKVSTTGNQRRRFGYSITSDGVGCSASVLRPAYPAPPASRYGFAFDGTGYQPLDVNNETRVIGIDVNRGVLLAASCGPDERIADVPTDQTPFADGTHELVYTTARWREENGEKFGEKKKAAWNEIAPEVVNAMAQIPSAKSTSFLGIIQHLQYVLQHRDAFTGFYRPEMWRKLRRKLFSKRQRAYDNLARMLTLRQDGQFDHNTIIAYGAGNFDTASPGYPATPNKRLFYELKKRCRVRLVPEYRTSQRCSNCESELGQSRVWRIKHCPNNNCLAIWHRDVNAARNIRYIFLARNRDGGERPVPFRYDPPRPQQ

SEQ ID NO: 2985 - protein, 696 aa, Amoeboaphelidium protococcarum
MADPPIEVADIGGALPPRKRQREVNCKACGRDDHKRSSSKLCPNYVPRAKNAAKPQDNMGIPVAEAQVAVPIGLNVFCKIDAVKHEISDLVSRCTDLKVETCRLLLSFVLNHLVYNPDTPMPDIRFGANGQMRNFFSSLIANPRRRDLLNRNTCNWAALNEFIEAHYVPRRPADLFWCDMRGYSNMVTALASAHNDDCARHISTNLPSRLKQWLRHKFRKHLGFCLEEDDVCTLAVYVLALIDPPEDIEEMPPYPAEIIDNCGDGELVVYYMDYYETRARQYILCNLPMDKASLQNNWHLYLKSMWRILRTFENNHQMYEEEYLLNNEGPLLNVYALLPLNGFTQKHILITSNVLKEICVAANLPDVRQMDVHALWSQCFKLNKVSTTGNQRRRFGYSITSDGVGCSASVLRPAYPAPPASRYGFAFDGTGYQPLDVNNETRVIGIDVNRGVLLAASCGLDDRIADVPTDQTPFADGTHELVYTTARWREENGEKFGEKKKAEWNEIAPEVVNAMAQIPSAKSTSFLGIIQHLQYVLQHRDAFTGFYRPEMWRKLRRKLFSKRQRAYDNLARMLTLRQDGQFDHNTIIAYGAGNFDTASPGYPATPNKRLFYELKKRCRVRLVPEYRTSQRCSNCEFELGQSRVWRIKHCSNNNCLAIWHRDVNAARNIRYIFLARNRDGGERPVPFRYDPPRPQQ

SEQ ID NO: 2986 - protein, 672 aa, Amoeboaphelidium protococcarum
MVDNFVCIKERFNDYWIGGDELRQRLTRLHKDSIVVRVVSSLFIKYYLVSRLQQSDAYNQMLQIFQQGEGVVQLDTQFLHLSQNSIETMMRPFRGSPNDNGLDYNITGPDYPGVNTKLREFVQRVIIPSQLEIPRNDLMAHVLPQIASEYFTHLQNHVQANFLKILSCFVGYLLRVECQYDALDRNKLVKEMVRLLQKHENVDVSWQFLYRCVPADTPLAQKQLLRQRVLSIQQKARWLLRQMYNDFGALRRVTNENFDQYLVLAYCMLRHVEDLAHQSAQTASLPFLLPQFSIAPHHIKLTDAMFRRCNEEPVLRRRGWASEVFNTRSFQDKFTGHILTDMHSVSFIIRAGNHREAIGEGQLQQFLIEENIAAGDNFLEVFEDGDENLVDENGVEVPQEEHQPALQPNRLDNPDFTRLPQAWGTKYLAIDPGIRVAVALAGFEYQMPDQIPQDQSPLDQFNELNQLRELQVLRVRNLGQHDVAFASPPVLGLPAGVTRRTVNLERIVQYCQAYLSQTLAAVDLVLQGERRETRFQSWQRRRDQLLDVVKTVLGVHVLEEATRDKYVVFFGAAAEHAFAGFGRRRLPPLVEFRRLLNRYAIVALTPEPYSSQRCSLCNCLGTRHPRPHDQFVCIGNKNHQRNGDTNAAANILYIGLHMMMMNGQFPRHFLNI

SEQ ID NO: 2987 - protein, 473 aa, Amoeboaphelidium protococcarum
MFNICPDIKLSPFHITLNKTIASRTQLFGDNGQKSENNFESSFKFSALDKKYKRYKEFYTDLYSASVPFQIKADDKTTKASSQSNPELKSSQKSSQKQSSSLQLSPGISVTSMNPADLEPEDFETFQPLRAKRKQGDEAQPLEWKKPRKSLAQKYAQSQDCPDDPIDDPEEVEAGIEEVDSIIAGEEDPLADEDFEDALDEREEESDGEEYELAPSVAGKTDYSWLNNPKFPQIDIADPMSSIVKAKDGADALQVLEATPKNSIQSVMLKTSDFRAAVRDKLSQQDRQLSEYVYAEPRYCFNSEMAKRKAANAAVVTHQRMPLYINRSVQRAKYTRHLLRRTLLQERAARLLGLKSYSNSQKDKIIVFWGTGGMKKFKNRYLPGRKCHPASKELLHYVQMIATVYVTHEKGTSVHCSNCEQRVVRRRTADQDIVTCAHCHLVINGDVNSAINILKIGLTMATNIGRFPMQFTL

SEQ ID NO: 2988 - protein, 1119 aa, Amoeboaphelidium protococcarum
MATSALGSQFKIMVDFNGTFYRHLRRIYNRSKNPLEAGIHLVKTALPLNQMVMVQGEARPIKDIVTLVFEGEQTCEKSQTSLKRVNARLKQILKLRNCLENLPVDKKVSKAKWCMIGKLERSTWHFKADDASNLQQELKIAGYNVEVACGEADVHIAKCKDPVVAVSFDSDLFMHKNVLVAAKPTFDCGLLKFFVLDRKVVCDKLNLTNSAWVALAVVSGNDYSDNVKGFGFGRNLKIIRKLMEAGHSDVKSIVSQYQSVMEVGPIFCQALRVFDSNQESLIVQSLEGDPNYKKNSLDNLFKPVEDEVFVSMGTLEWIRREISASSLTAAHRQYHEVYALLNLYSKWHESVLQLKSVKLDAYQEWKIQSRQVGKSREEVSYLSLQERWKGYNRFLPLYKKEFVDDRQSGTSVQSGGRYMFQEVEWNRKSKSEIPQPKKQTPKFIRDIESHEERQEESDDTTQSDDIEVAPRKKRRVQSSQTARRGNYRASSSVTRDKCDARSSGQKRINTEETLLMKKLKSAHSMSTLEVGSLRKCLSKGSLSQQLQKQLAATIQTVVRDINLLKRMAQLGVQWFIGIILEQYSDEISLLDDICYSDTPGQGGRKFWQGVIRFLRNGRSNASQKGAAVLKFGQLLGQQMNIMNGLERKFDRTLNITQIVDQLAIQLDSEFASQVIGRVELLAAQVLEHDPELRSRIEEIDKMPSVFQKFQSLNDLLPKERQYGYPLSSPQDCYVTFTENSMMMLLQSSIINNPQMEQERKQELLRDLQCYYSEGGLVKQKGHTLRECYGIKLKKGLRLLSQYMPEACDTTRKILSNTFITNGKVLKVHLIDIRRKQQVRRLAGSQSEGLLEAAQRKRLSKVTMQVSDTVKVQPDKLSEYWICCLDIGERYTAGIVAVKGQGESRIIRALALKSSAVNEPGRKFRKYHQGRPSNITQLERSMYRGEEESMECYWERYIDIYQQLRSYYSSEIRQKRHWDFKKAQRAEFDRATNAILKMVDASVFQKSNGQVVFGIGNAQFDSKQTIHLSFQRHFVQKVKSLGYPVVFLNEYLTSQKAPCCGCVCESFGMRIKYCRNCHKFYHRDIMAAENLTQVLICLICDEPRPKYLCSKNQSRSQESE

SEQ ID NO: 2989 - protein, 885 aa, Amoeboaphelidium protococcarum
MTMATKDTLLTLLGEMGLFELAKNLATIPFQSIYEYSVNDWIEFGAILLQAKAIYNHLHASPQLDYHNVAAVELVGINVWPLLESLPKAEVLGSVLNSPLPFSLYDSSQDVLPGILNDQHSANAVCCSELGHICGGILTMYKQLPSATASEDCWHYVYDNLITAPLKMVSKCRGIEIDTQRNSIDITGTTKRLQRPDYLVIMDNHLLVMKGEHKSALVNIRTSTEELVQKMSSGWSVLTYGSLDYIIGFATAGSQIQFFAITKAHQLVPLSKILDLRIIDQCAQIIKIAVNLVRVFEVFSKYWPPKWANFSVQAYQSVNRSDGVVLEFGDCDLVKKTSGLSLEKLQRLAEIHECLRSIPGDAQSLHMIRVYNLKVYSTTIRAHLGPLGFQIVPKDLGELVEAIHSVLRALSIWHSLGWCHGDIRWSNIVYVPTSVENGFWMLIDFDHSRKPGTTYVNWNFHPATKLGQKLIPLHDLIQVGNLMSERLHAVDKAPELLELMQLLCDVENRAWTYANKKEDLLTKHHRKDVSKLMYGAVALADCDNLNERLQNCESFGVDPGQENPLVCSTETEVDNQTSMSGAKRQFQQSPHLTGVHWRKLTVEKQYEAAESRLKPDAIKEFERLASEMESKVEYVALYKRYFAEIFEYYNRAFSQSLAFKEVFGTAICGNDAARTKQSVNFQRLQRARYGKMLDPTVPVGKRPKPPVIGYGNAGVKHMKKHPPVPVRGFAYKMSQHALVVMIPEYCTTKLHANCHHELHMHDMSVNRCNHTKKLRMPPDRDRVDDRGVVKLRRPVFWCINQKGQQLHDASNCPNREQKLVQSRIGICQNCRVQDEPVFVDRDVNASCGMKQVLVFYADNHKRPNWNQRRVVGHTQTIQGFDASFS

SEQ ID NO: 2990 - protein, 772 aa, Amoeboaphelidium protococcarum
MAKKVTRKCKLNSVLNLDDGDKEILISQIQLSSVHLTFASRLIYLCLNAWNEAGKALPELSHQQYFASMLEYLCNSAFHRDNDHTRMLSETIAPEVRQRLRHESLIGPNPNLYVFQARKIIQAISWHLTETIWVYQKKVIKAQMEAFNVKGRRLTVFLQLLNSLLTEEAVNTMEHFGGEYLEIDPATQIHLPPDYDAGEDQETIAQQDAAIKDELLQLLQVEEVRHLVSLHRHHLLDIVTTSFQDRAPRKRYSKRKQESSRQLKGLIGFKRQKSGKLKQRDTHHTYMPSRAHHAFQNQEGQKVLVQYLMYLRQTLKELGLSSFKIFPTGTDVPRHISFDNRVLAHWGFGQYRLGDQPEEKEEHVQTQEEEKQCILKLKYLGLQQRMANSQDVSISSDGFACSVSVSDQGGKAYANEAKDLERKARNTDVSQVDVGAFALENCRNLAQRLDGTRLIGIDPGKKNVLVWGDEANVEGAPTLKEAKREFKDTGRISSGYWQRLALTTEFEAHLQYNKPAEITLMEQDMAQSNNSQQYLGVYIRYFEDVYAFYSQSFHRNWRFRRFCATKSAFGNVINMMHGRPKPPVPKINDRHRGRAAKKRKRELRKSHGTLLPPDKPPVIALGDAGVKHVRGNPPVPVRKFAFELSRRALVVITPEYHTSKQHSICHADLHWEHEVVLKCRDKKVKKILPGRHRAQTVCIKADGPEILSHECPDRFNRRVQSRFGVCQNCQNTGSDVFVDRDVNAYRSMAQIVRHYAIHGYRPQWNCRAERRA

SEQ ID NO: 2991 - protein, 662 aa, Amoeboaphelidium protococcarum
MTVQFYALSYLCGDSGLTRSRSSPMLDSKVIRDIFHLFVYGHKRKKESGVSIEVSKLLLTVFDQNQFKSLQVEYPSGSDFKYLFASAADQFGVACQNHIISNLRKTLKRVVAYHLKIAGLGAVFKLSDLVNLALRRLNRLEKFAGNDGSSDELQKVVKKNREFNADSIAMLDDVLQEYFEEVMDIKGQLEADLTLGTVQYPLTVSKFKSSWFVYLRLFLKCIRQLACVHLKYPKLLPFPAKKLHMVPFTKSGLDCLLQQSQFQKLLHIPTLTTKYKATLTSFSTNFKNLSFKYEVQKDVTSDLIYAKCISVVPNISCSNQSTIGNDYIAAYQDFSSEDEAESMEVDDDDDGNLDEIDDLIEDVEDQNDAGEDEDQDSDTEEGNKRRSVQSCQAIRYFIMSTEDAKSTIKHKVELSADLGINQLIAVFRPNDLQQCLPKEQIQFDKAYRYTLKGEQYLQMIGGQELAQRQQSFNQCCQQFAFHYFPDSSIFANQMQACCRSLDQQIELYSSDQALQLKFDQQELKRQAILGMVSKFLGITGALKSQDRDSYGVYIGDFYKKGEVNHRFSLKSFVKVLNQYAVVYIVPELRTSSLCYECLRKQIISFVVRRKNIADCPKCNRRYDADQLGAANTFFLTRSIITDKAGSIPKAFIPSKYIPKVDE

SEQ ID NO: 2992 - protein, 737 aa, Amoeboaphelidium occidentale
MKKKRKLPDHDEDYDPVVEDDFDSEPMGEPEEKEEEDMTPIPMTSIVTRKTGLNSLIPNEILRTKIRDMVDTMNFIRYHGSRLLNLYVVQMCSEGHDLGLLTCGYGGILRHFFVAVCNNAGHPRTTRLDDNVAPLAEIYRSRAFEYGIEFSLSTGISSTLNSIVASYETNLMNYITTTTVGRVRSALLEENNELPELPDILEKFAKKHDRARIMRALRTVHRILVAETVEKKLSLEKEFLKEYWYKFFHLQYHILKHFTKYSEADAQARLEENRRGKGLRVYTMVPLADVKTSHVFFDGSGLSEVVHRAFEEESFVGPPNHSRDLNATKRKALFTGKKSRVPLWNWAVKLKCVKHKNLDFNYSFTTDGVSVSVHFEKAGFKERLNDKGFLWNNHEKYSPIGIENRVVVGVEPGRIDLVVCSDGSRKSFGCSGKEWQEIAGFRYQRWRQKSWLEKNDNIQTIVKDMPSAKVTKVEVYLTYLNYILRHYTALSNFYGSLRWRQLRRKTDMKKTKAFDIVKSFGCSGKEWQEIAGFRYQRWRQKSWLEKNDNIQTIVKDMPSAKVTKVEEYLTYLNYILRHYTALADFYGSQRWRQLRRKTEIKKTKAFDIVCRRIAGNNFERVVAYGSGGFSSCSRGHAPLPVKGLFKALKQRNALVRLVWEHRTSKLCCQCEGELPEGKRWQVRICKTCKIHWNRDFNAANNIRKILIHMEENSGDRPYNFLTKKQQKSKGNDFIVGG

SEQ ID NO: 2993 - protein, 639 aa, Amoeboaphelidium occidentale
MRVYENEMPKTFTTEEFLGMSMVEHSGVAVDVGDSSGIGPSAGGKKRKEPEGGKRCKCGSTEHQRISNKNCPLNKPRLKLQYRDTELPEKTVTTTTGLNSELRIAPLKDIIMDAVACCNDIQVEVSRLLNGYVIWMIEENRPILDLRFSDGIMREFYQAVCSIDAVKNPHQHKVVSTPSINEYMDEVYSRCRPDHLAWNDATKLTQLISNMAKMHSTNCQNHVFTNRLKWIKKCADDSNQVVTVAMNEITRTEEDEGFYAIPLNIIEAVTPELLKTFVNNYKQDAQNRLENGIHGRGLRLFSLTPISTFKQKFIIIDTDALHDLMTSENIGIVVPRDQVVFRVNAMEWWRRAFNVDKLTTATKRFGFSVSTNGVEYHQHNIKQFERSEINDWGYNYEGEFIPLEINGQTRVVALDSGRNSLYVAVSGNTAADVLECSNSRWQEISVTRYSTKKANTWITADRDRHMEITLTPTPCCYNTDDYITHLLHVLEYRDEFLGLYRAMRWRRLRWKTRIKRQKAYDTLYKELAAGAEDVVIAHGGRGFIHNSRGHPPTPNKHLFLELKRRTRCRLVPEFRTSKLCSLCDNELVQSEVWSIKSCNNNNCWTRWNRDVNGARNIRRVFLHMNANGGEKPEAFRRGN

SEQ ID NO: 2994 - protein, 1219 aa, Amoeboaphelidium occidentale
MGGNPAFWKAVKAARQFYDSASGLSRCQWLQSQITFTQVVCIVDVSVIMRTILPLNPKLAVDLFEGTRDNVTKSLRSLSAKVKDYVEQFIPKEYSIVYVLEKPGVGFSKLKTQKRSSQRASRINNGIRKLYLSSGDFKKRQGRRLIAKHLSLNSEMVQCLALGLNGYVANHYESDSLIIALARSHRAAGFFTIAVSSDADLIALSDSNTIDVLLTPQKKFFSILKKEDALKTLQCNQVVLAYSYLLAGCDNYKQVRFRKGFNFWRAHLIKNDISSYEAFTLNCSCYMCSITEVLNEFNVDLPALSILLLKTVANEGFETALKFSFVNAQKDDGSFVRPGLRLKILSHYESAALLDSQSVTEIESHAKSKTAKGKERKAVAERRASNAIAFQSEIKVIAGLESRSPINEPAMKETQETPKVKLCARKPNETKQEDYHHKAMFQSLSLRCGDWNHLLRTELRQLHDIASLRTQNSSDSSESTSFNFAIYVEKYFQFYRSILNESRMKFHSLLLADISGLASWKHFSQMLQGVVDRAVNFLTNDLKKYCMESLFNSAGIRQVLILELWSYKSLFLTGIFRVLEQDFKDQLIALFPQCSAECSGIIAGLLVSLLFGAPSKEHKDDEDLEDSQENAETNDTSWFYRVLVQLRPVCVEDKTIILWFLEHTWSKQELMIKFMPESLRPLVANGKRQFQENIRDDNYLLILQFFHHYNLKCGRVVQLMGLQPSTAASFTLLNTYILAQLICGYQNFLHSAGVDNKAVFGFLEPENMSASSALVTGANNYSFAVPPELLKPDSRKHPGKSKRIKQSYSSFIDRIKFRYQHWCRFPDFVWFLAFPGLYEDVLLNGTNKNLFFLHSAQVREGSIHVLCTDTRRHTARSKADEYAAEDTGGGYHFRHFLKYKNGNEDNILDFHSIVGVVDEPDKLHRGLASYHNCANGTPNFRGLIYLDHNIEHFAVGSKAAKDLLDNHIIISIDFGILSEISAVFIDGKFNSEGTLEGRFTKLQFSNGAKYQNSGYLKFTGDYAAINEKSLEHSTALSVATKRTNDASEYEKFSELYKVHGKAILEENTRPEMIKLKNELEKNKQRQLFEIVNVLVAHAEALRGTKTGVPLIVAGNPTFSPTVKGQRSVAPKSLLRWLSKFFTVLVVDEYNTSKNCPMCFEPLDKYGNEGTRMWKCKDCKTSTGHDLIVNKDVSAAINMANIAVHYFLTGERHPSFSRQV

SEQ ID NO: 2995 - protein, 1563 aa, Amoeboaphelidium occidentale
MSAPPPPPPPAAPKAPSVSAAASKPPAASQDKGALLKQIQKGAKLKKAETNDRSAPIVDAPKASPAASSGGGGGSRPGAGGGSSGPTPQLGGLFAGGMPKLRPAGGNAVGGGKVNADTSVKPSTITPMPSKAPAAQSSFRPPMIPKPNDSVSNASAKPLGKPPSKVPPPVPAVSNATPSIGKNGPPLPGRRPSEIAALKSPTSSGPPPVPSIPKPTKSPTSSNENISGSVFVSEKIVVPKRGSVSAKLAPPVPGRPRSISTGSSEKINTSAGKLPPAVPNRPPQGNSRTNEKINDNDGSQKVSSPGQLRKQPPVPGGSVTKPATLGRSPSIPLSSGPLSDDMDDGRYKFKPDSELPPPHAFTPSIKVYYSGAVTGSKYNIDSLLGIKANSPGSARRPQPSVPGRAPPPPPPRRAFAKKHQLYSETVNLQEFKEMFKGYKVYVDLYGSFFDLIRYYALDERYRAFAKCSNEIFDGMDVIFVLDGARSAEKHEAHLARETQRDLRMQSFSHNLNSVDPQSRVSTSVWKRLDKLRASCFRLMKYHTNCISEAFEKENLSFVQAPYEADVAIARLLSPSNSDKMSNTIIISNDSDLLFYGHPIVGKSFFKNKLDCLSLHFTLFREQIALKKIGISRECWRALAVVTGNDYVSNLRGFGIARCLKEFQKINENGACTAEEMVETFEQSHDKKGHFQIASAVFLNYQETSCAVCVESLQEQMFKDCCSQLQLLKENYGAARAANRQTTQGRSLQELKHLKVPSQNNRYSPMVHIHFGPYKVKSVGLNKLRNLSITPAATLNSSVSIKPRPYNKSKKRKGKKKNKRARYLKSAMFTRSVPSENPHGAHKLSQATLNIKMLKQKYQMKTWELGTLKSQVKKSSLDATIQNTILKRLQNVVKLVNKASQAAIIIADLFFQNVQNNLIVENELLFGVGGGCKVWYNLISFLLSPEKRGRKGRKLFQKMKKFVEDNELGLNLTEEELEYVSFCSGNTLQAQSKLMDSIVARHFVGSAPLLAQSVMKNSPFQTDQVEVLLNALMSAVEQKGTLPGSLESLKSMKDHGVNLDLIENINNTEMMTSHCSTSKMKLRPRKRKLEESADETKPEPTIPQFDPTRLETYSVVRWFFLLNDMLPVSQRYRSFPNYQPSFFPLSLTEDCLLGIIGTKDSRLWFADFLDPLKAGPLMKRDKTGELLQLSFGLKSAKYRKYRLIGQKDLGERFVLNTSFETDGFSLSIHVIDTKYRKLKKNPPPPVVSRDRAYIKGKDIIMGLDMGQAYTVGAVSWLPDGSKKNLAVNKKALGEPYYLHRNWLNKTKMKDENKPVRDAENCGLSRNSDETITIYFNRMMERYSVWANFYNSHAIRKRTFEYHCAKQREMDRVFNALISMVGLKPHQKVKKKQRIYVGIGTGDFDATGSLHTSFLEYFVRKARPLGITILGVDEYFTSQKCVRCHEFTESLSMRAKKCSKCNVVFHRDILAADNMCAALSAILQNGERPEYLCKPPDDKSDDDNDEQDDGLNKKDRNGRNPKEKKKKKPKDKESGQSTSSEYALENAAKKKSASYVLGSARVIVQ

SEQ ID NO: 2996 - protein, 799 aa, Amoeboaphelidium occidentale
TVSCGLRGLVQNKKLLPVLQEVVERINTILFHGSRLLNFYLIRQLSEGRDLVLLTTGLNGKLRHFFTALLTSRQINYDQDVLAAAAGYRAITDAHNIDFGSTAGITSLLNNAVANYEVTLMNSVTTTIHGRILRWLRHMLEVHCSVCFRNKKRGTAGAKYIISYLAWQANERADKPEFPLLLDKFLARNDHLRVVVLAALLTAWVELYSISYALGYSLSKDYIKENWYKYFPLLFHILSYFNEHSIADAQDRFLERRRGKGLRTFTLAPVTKMRNGFILVDTTSLGEILAFAYARGRNRVPKSFPAKKGIIQRNQTKLRNPGKYWKDVLKIDKLSNSSKTFGFSIKTDGVSARVHFKKTCYTTDVGKDVCFRNKKRETAGAKYIISYLAWQANERADKPEFPLLLDKFLARNDHLRVVVLAALLTARDYIKENWYKYFPLLFHILSYFNEHSIADAQGRLLERRRGKGLRTFTLAPLTKMRNGFILVDTTSLGDILAFAYARGRNRVPKSFPAKKGIIQRNQTMLRNPGKYWKDVLKIDKLSNSSKTFGFSIKTDGVSARVHFKKTCYTTDVGKDGFKTFGDKEYVQLNVENKRVVGLDPGRKDMFTTQDGSKKSYHCSGKEWRVISGAKSSKKQRDLWVSKRDDIQTINSGMPSAKVCTVQKFSQYLGVVLENCSRLFDFYGSLKWRQLRRKTDIRRQKAYDVLCKRIAGEKLDSVVAYGSAKFSASSRGSPPIPTTHLYKKLLEKKVCVRLVWEHRTSVVCSVCHSDLPKGQKWRVKICPFCKIYWNRDVNEAANIR

SEQ ID NO: 2997 - protein, 542 aa, Amoeboaphelidium occidentale
MALHFIGSSTVLAAKVKEICPEKGQEVDKLINMIDQTILNKGKKQKKNVEVEIDTTGQSSSKTNDEPVSNVVVRDNASSAKKTTKKRKRDETEKDEEEVTNEVLYKAGDLDTYSIVRLFTAMNEMLPATERFKSFPQYSPTHGSLDLTEDLLLSIIGMEDSKKYLAGFLVKNGKITHFKLNHDCKGMVLQSVFGLRSKDYRSYCFIGNQDMRKRFVLMTSFSTDGFSLLVNVIDKHAKKVKNETGPPMAAKEPEFNKSTDIILGLDLGQTYTVGAVSWLPDGSKKIVAVKKTALGELGRLYRNWLNKTTMDDQNKLLRDAENSVVEQGTDEPDEMYFNRIMERDSTLSQFYNSHAVRKRSFEYNCAMQREMDRVFNALISMVGLKPNQKVKGNKRIYVGVGTGEFDSNGSFHTSFLKYFVRKAKPMGLTILGVDEYFTSQKCVRCHDFTESLSMRAKQCPKCKVVFHRDILAADNMCAALSAMLEKGERPEYLCKPPDDETEEATEEPVQDVKKGSIKGRNPKEKDKDKQEGLRRSSRQKKR

SEQ ID NO: 2998 - protein, 1047 aa, Amoeboaphelidium occidentale
MEADVDLMVVDEDVMDIDNDVGVLESTEKNSLWDLFTKYLNNNYSDVDIFTDILVVPLHEGGTVPLLPYDIEDLAINEDVTNGTETYSIKVGVNTGLCLENRELAGVKAALEEISQRVSIVRFWATRFINYVALYYLENNLGIPNLSRSADGMLRKCFTIVASDGIIQNSKDSKKAINGRFLAALYRGFAEHSGLNSDNISSLKGFSQLLAGVSRQYEANAKTHVKMNFPKKLKRWIMWKLECILPAVFKANTRSGYAADYIISCVKYVQKILKTEPKFPEKLHKSIKKATKFDHALFFKSLAAVSRVTNDALFLLGPLSLDSKKMKIHFCDYLGVMHQIQKDFYNNFQSNAASRKEERRTGKGLRLFNLFPMTKARCGNVLYSTDGYYELLKYAKNQNNLFQEEDFPVSLAKFKAEGVKEYWFKRCINVQYFESLGSYRKFGFSFSQMVKFGFSFYSDGVTLCPTMIRPKTFTLTDDYGFVDESRTKFLKHDLNDVEVVGVDPGRKDLFYSVLGDKKDVASLSVQQWCWLRGDYHFRNKQKKWLKERNEVQQADKSILTSKVPTVDGFIDFARSCVARFNVAFDFYGAVRWRKLKWNLYIRRQKANKQKKWLKERNEVQQADKSMLTSNVPTVDSFIDFARSCVARFNVAFDFYGAVRWRKLKWNLYIRRQKAYDFACKKLKFGKKLKNIVVAYGDGSFSGSSRGYAPVPTKQLYIQMKIRMKQRIVKVDEFRTSKLCYHCEGEFEQQREWRLKYCPNCKVWWHRDINASLNIRKLYLHQNQHNGARPQAFSRSIRKNDPEETAQKNSDFMGGFAPMTVETPSVSAYKAAQDGQLNVLRTLLPENPNLIRSKDEDGRTLLHHAVKHSSVVELLLEQDRCDVEAKDEAGWTPLHIAASTNQEMTVKLLIAKDADVNATNDSGVTPLCYACSKGYKNIVTILLDNGADALLRDKFGRSVFHRAVLKGQLSILKLLFEKVKSASVNQPDADNNTLLHLAVEEENGEIVKFLLLEKHADATYKNKEGKSVSEVASKTFLPYFQRLLENAI

SEQ ID NO: 2999 - protein, 855 aa, Amoeboaphelidium occidentale
IAQELLECLVVAVEKKGELSELEGSSGARTEINDTKTPARTSGSMKLRSRKRKLGEYAEDTKPEPKIPEFDPSKLETYSVVRLFFAMNNLLPVSQRYKYMPKYQPSLFPLSLTEDCLLGITGIRDSRLWFKDFLDPKKDGPLMKRDRTGYKKYRKYRLIGQKDLGERFVLNTSFETDGFSLSIHVIDTNKKYRKYRTIGQKDSGERLVLMTSFATDGFSLSVNVIDTRCRKVKHTPPPPVVSRDLAYRKDKDIIMGMDLGQAFTVGAVSWLPNGSKNNLAVKKKALGEPYTLYRNWLNKTKMKDENKPDFLDPKKDGPLMKRDRTGELLQLIFGLKSKKYRKYRLIGRKDLVYQFTLSIQTVSWLPNGSKNNLAVKKKALGEPYTLYRNWLNKTKMKDENKPVRDAENCGLSRNSDETITIYFNRMMKRYSVLANFFNSHAIRKRTFEYHCAKQREMDRVFNALISMVGLKPHQKVKKKQRIYVGIGTGDFDATGSLHTSFLEYFVRKARPLGITILGVDEYFTSQKCVRCHEFTESLDRAYIKGKDIIMGLDMGQAYTVVAVSWLPDGSKKNLAVNKKALGEPYYLHRNWLNKTKMKDENKPVRDAENCGLSRNSDETITIYFNRMMERYSVLANFYNSHAIRKRTFEYHCAKQREMDRVFNALISMVGLKPHQKVKKKQRIYVGIGTGDFDATGSLHTSFLEYFVRKARPLGITILGVDEYFTSQKCVRCHEFTESLSMRAKKCSKCNVVFHRDILAADNMCAALSAILEKGERPEYLCKPPDDKSDDDNNDGGQDDGLNKKDRNGRNPKEKKKKKPKDKESGQSTSSEYALENAAKKKSASYVLGSVRVIVQ

SEQ ID NO: 3000 - protein, 678 aa, Amoeboaphelidium occidentale
PAAGKRKANSASPVYKCGISDHKRTSHGLCPLNKKKKVVETFGSNVPGAVKDVLKIPALNAEHAEARGASGPHLLNDVDSPLGAETKTPCKSGSTEHQKISHKSGTLFRGAIKERFKVGDEEESFCTVKMGLNQFLACSLEDNEKQALTDVVNDAVQRLTDLSCEASRMLNGYSDGIMCQVFQAVQQKTLKAPYTFKSQKNELLKTYMNDVYSKIRDPKMAYCDASGLASIVNSIAKEYATNALNHIQMNIVRFTRQYVDFILSREVGYELGRKNYNQVKQFILAELERNSSDSNLKRFPFESLMFTKKKLVKRPQSEHDPLFTSLIKIWDSARNVLRCRNLTKSVVKKEWWLCIPYIFQMLKVVRAKYKEVPSRRFGYHITTDGVQVGISVLKPLNEAKVNEWGLDDEVVFHPLPTNSETQIVAIDPGRRNLYDAVAGDEDSRETRITRQKAYDVVPKELTDGDSNCIVAYGASKFNCLSKGHAPTPNKHRVVELRKRCRTRLVSEYRTSQVCANCNSQLEAVYIKYQTKDHKKKKKSKQKLRKKKLCWGLKKCINHSAEGIPYNFRCLTLWNRDLNAARNIRFMFLYRNANKNEMPDEFRKKKEGETKSNEQADISEACNSNQDSSQPQAADRVTAQAEAAAKTKKTVAITYDGVCRVPGKRLVNTEHQRELVLNN

SEQ ID NO: 3001 - protein, 1047 aa, Amoeboaphelidium occidentale
MNVIFYLDGARSKQKHNTHTLRHTARQFKVQQLNNLVDGLKPLQKSCFRITKDHTEALRTSFESIELKTVISNYEADVAIAKIISDMNDDKRNSVVVVSGDSDLIIHNAPLVARPCFNNKTQILKCLNISSFGLIALGILSGNDYCENIKGFGLSKVHQFIISCDADKTMTTKEIINAFTQIHGVCNHFDIAYNVFVNHKEEQCLLCITHTVQEHYEKILFKVDEFKKLYENWKAEQKAAYEIRSLEQLKHLVLNGQRTRFSPLVNAEYGRYKTKLLNKTKISSITGPEANAKDPEETSPPSNPSKRKSKRKAYPKKPRNGKTKKTPRRKKSNMATRSTKSDKPRKTAVHTQATKDMQGLKKQYETKTWKLGTLKACLRRSSLPEDFKSTLLDRIQGVVALINRATYAAVIITELYYKQSTASKDTDDEFLIDVGGGKQYWGNLIAFLVKPCDFGKNGPRLYQKVRKFMDDNKLKFTLTEAESKYVEFIYCKLLHYHGTSVDRIMALHFIGSSTVLAAKVLEVCPEKAKKVEKLMEMVDQTILNKGKKNKKNVEVEIDISGQSSSNITDQLVPNVVLKLSTTGAKKLSKKRKRDEAEKDEEKVKNEVLYKPGVFETYSLVRSFATMNEMLPQCERFKAFPQYSPSHSSVDLTEDFLLSIIGKEDSKEYLADYLVKNGEKTNFKLNHDCNGMVLQHVFGLRSRGYRSYSLIGNQDTQKRFVLMTSFSTDGFNLLVNVIDKHAKKVKHETGPPMAAKDLRFNKSTDIILGLDLGQTYTVGAVSWLPDGSKKILAVKKTALGEPGRLHRNWLNKTKMKDEHKILRDAENSVVGQVTEESDEIYFTRIMERYSTISLFYNSHAVRKRSFEYQCAMQREMDSVFYALISMVGLKPNQKVKGNKRIYVGVGTGDFDSTGSFHTSFLKYFVRKAKPMGLTILGVDEYFTSQKCVRCHDFTESLSMRAKQCPKCKVVFHRDILAADNMCAALSAMLEKGERPEYLCKPPDDETEEATEEPVQDVKKSSIKGRNPKEKDKKDKQEGLRRSSRHKKR

SEQ ID NO: 3002 - protein, 1144 aa, Amoeboaphelidium occidentale
MGIKGFSAFAKKHNLFSQCLKAVEFKKDYKDFEILVDLYGSFYNLCVNYATKNDFRELAYCMKSLFEGLNVTFFIDGARSLEKHETHVIRDAKSKSKLSSLSNLASHLDPNKKLKKSKWKQINILSKSCFRFTRTHAETIKNMFESVSLKVIIADFEADVAIAKHVSTMDENKKTHLMVISNDSDLLIHDIPLLARPRFSNKFDIHSMYLQMEMRSNVLKRLKLTSNGMIALGILSGNDYCQNLRGYRINKVHEFIISIDADKTKDVIFIVNEFEQCTGKVGHFCSAKEIFLAHSEHQCMQCLTDSNQTEYEESLSLIKDYYKKHNDLKDEKKATFTIRSKQELKHLLLEGQRNRFSPLVNSTYGRYKPKVLDTTKLSSTVEAEADVKDLEQTKPLRNTSKTQSTRKANPKKPRKGKKKKAPRRKKSNMATRSIMSDKPRKKAEHTQATKDMQSLKKQYETKTWKLGTLKACLKRSSLPEEFKSTLLDRIQGVVALINWATYAAVIITELYYKQSTASKDTDNEFLIEVGGGSQYWGNLIAYLIDPTKLGKKGPRLYQKVRNFMDSHELKFTIAEAESKYVEFIYCKLLHYHGTSVDRIMALHFIGSSTVLAAKVKEICPETAQEVDKLMEMKNVEVEIDISGQSSSKNSDQPVPNVVSKRSTTGAKNTSKKRKRDEIDKDEEDVKKEVHFKPGMLETYSLVRLFTTMNEMLPQSDRFKSFPQYSPSHSSLDLTEDFLLSIIGIEDSKEYLADYLVKNGEKTNFKLNHDCKGMVLQHVFGLRSRGYRSFSLIGNQDTQKRFVLMTSFSTDGFNLLVNVIDKHAKKVEHETGPPMAAKDLRFNKSTDSILGLDLGQTYTVGAVSWLPDGSKKILAVKKTALGEPGRLHRNWLNKTKMEDRHKTLRDAENSVVGQGAEESDLNYFNRIMERYSIISQFYNSHAVRKRSFEYHCAMQREMDRVFNALISMVGLKPNQKVKGNKRIYVGVGTGDFDSTGSFHTSFLKYFVRKAKPMGLTILGVDEYFTSQKCVRCHDFTDSLSMRAKQCPKCKVVFHRDILAADNMCAALSAMLEKGERPEYLCKPPDDETEEATEEPVQDVKKSSIKGRNPKEKDKKDKQEGLRRSSRQEKALENAATKKKANCHGI

SEQ ID NO: 3003 - protein, 317 aa, Amoeboaphelidium occidentale
MVTLTPTARCFTTVSYIEHLSHVLELRDELLGFYREMSWRRLRWKTRIKRQKAYDTLFTELTGGLDNVVIAYGGGKFSHNSRGHPPTPNKHLILELKRRTKCRLVPEFRTSKLCSKCDAELVQYDIWSIRSYNNNNCWTRWNRDINGARNIRRVFLHMNANEHLSHVLELRDELLGFYGEMRWRRLRWKTRIKRQKAYDILFTELTGGLEDVVIAYGGGKFSHNSKGHPPTPNKHFFLELKRRTKCRLVPEFRTSKLCSKCDNELVQSNIWSIKSCNNNNCWTRWNRDVNGARNIRRVFLHMNANGGEKPEAFRRGN

SEQ ID NO: 3004 - protein, 391 aa, Amoeboaphelidium occidentale
RVVPKNRSFSYSISTDGISLHLNLKKQTSKSESTIDEFGYKTDGSKEYSPVDLKYRTVVGIDPNRKDLFMAYDGKHKFQVTGKEWRQMAGITAAKKKRENWLKKRNDIVNANSNVPTSKFGYKTDDSKEYVPVDLKDRTVVGIDPNRKDLFMAYDGKQKFQVTGKEWRHMSGITAAKKKRENWLKKRNDIVNANSNVPTSKVSHVSDLHNHFFYLFAHLNLWFDFYGSRQWRQLRKRSSIKRQQALDLIVNRIIGKAERKWYLGHKGVNAKHSRSYNNVFVAFGGSQFSSTSRGHHPIPRRSLINALKQRKIPMRLVDEFRTSMLCCKCKEPLPKRGMWHVKRYDNCNIFWNRDVNAAVNIREVFISVNASKGVRPGKFSRSYKFCSSTKA

SEQ ID NO: 3005 - protein, 578 aa, Amoeboaphelidium occidentale
MRNVDASYEYATSTIKVGLLKNVKPQDFLMKLKRYVERINLIRIHSSNLFNLYLIDMLAAGKIIGLVTTGKDGILCNFFVAGDLERKVNDYASMLKQVGLELPNGDGLSQSIVHLAGEYETRCKTFVSTTLLIRITRWLQFLLETALPEVFMSMARSKSAAGYLIAMLIYEMSDDPKKQEPTLAKKVVENCKKYSSIGLMGIALEQVYGGLRAFTLAHIYHNRNGYVNIDTSCLFEVYQFGKEDRRDWVFPFDKDLIEKEKTTQQYFMDTAEARWGETIEMKPWLRPDDFGFNRVNNKKVYVPIDLKDTVVIGLDPGRKDLFDAYDENGSFGCSGGEWRQLSGIEFSAKKRKFWLSKRTDIGKINADLPFSKVATVLEFKQYLSYFAEIFNTLMSFYGSHRWRLLRRKCDIHKQWAYDHLIKRIKRRGKKVFVAFGGGKFSSCSRGHAPIPKVGFYKALKQRNIPCRYVWEYNTSKICAKCFTVLPKGRKWLLKICSKITCGRYWNRDVNAAKNMKFVFTFMNNNNGENPEQFKPKQQKQEQNNNNKTEVTEGRKSAQDHNRGHVTNVTSDVDGVTVA

SEQ ID NO: 3006 - protein, 1744 aa, Amoeboaphelidium occidentale
MDLDLNMRVDENEMPKTFTTDGFLSMSMVEYSGVAVDVGDLGGIGPSAGGKKRKEPEGGKRCKCGITEHQKISNKECPLYKPRLKLVDQPFDRTERTVTTSTGLNSVLRIAPLNDIIMDANRPIPDLRFSDGIMREFYQAVCSIDALRNPHQHKIVSTPSINEYMAEVYSRCRPDNLAWNDATKLAQLISNMARMHSTNCQNHVVTNLLKWIKKWLIWKLGKQLRAFLSADDFNEDGVDLDLNMRVDENEMPKTFYTDEFLSMNLVEHSGVEVDVGNSSGIRPSVGGKKRKEPEGGKRCKCGSTEHQRISNKNCPLIYEHKNTFHLLRVEDGVDLDLNMRVDENEMPKTFYTDEFLSMNLVEHSGVEVDVGNSSGIRPSVGGKKRKEPEGGKRCKCGSTERQRISNKNCPLYKPRLKLLYRDTELPEKTVTTITGLNSHSGVEVDVGNSSGIRPSVGGKKRKEPEGGKRCKCGSTEHQRISNKNYTELPEKPVTTTTGLNSVLRNAPLNDIIMDAVARCTDIQVEVSRLLNGYVIWMIEENRPIPDLRFSDGIMTEFYQAVYSIDAVRNPHQHKIVSTPSINEYMDEIYSRCRPDHLAWNDATKLTQLISNMARMHSKNCQNYVVTNLLKWIKIWLILKLGKQLRAFLSADDFNQVVTVAMNEITRTKENEEFYAIPLNIIEAVTPEQLNLIYDRINHYYEKLTIILNNQPLDEDSIKGSWWTYLKPISRLLNTFVNNYEQDAQNRLENGIHGRGLRLFSLTPISTFKQKFILIDTDALHDLMTSENIGIVVPRDKVVFRVHAMEWWRRAFNKWLIWKRGKQLRAFLCADDFNEVVTVAMNEITRTEEDEGFYAIPLNIIEAVTPEQLNLIYDRINHYYEKLRITLNNQPLDEDSLKASWWTYLKPMSRLLKTFVNNYKQDAQNRLENGIHGRGLRLFSLTPIKDEGFYAIPLNIIEAVTPEQLNLIYDRINHYYEKLRITLNNQPLDEDSLKASWWTYLKPMSRLLKTFVNNYKQDAQNRLENGIHGRGLRLFSLTPISTFKQKFILIDTDALHDLMTSENIGIVNRPIPDLRFSDGIMREFYQAVCSIDALRNPHQHKIVSTPSINEYMDEIYSSCRPDHLAWNDATKLAQLSSNMARMHSTNYQNHVVTNLLKWIKKWLIWKLGKQLRAFLSADDFNEVITVAMNEITRTEEDEGFYAIPLNIIEAVTPEQLNLIYDRINHYYEKMRIILNNQPLDEDSLKASWWTYLKPMSRLLKTFVITVAMNDITRTEEDEGFYAIPLNIIEAVTPEQLNLIYDRINHYYEKLRIILNNQPLNEDSLKASWWTYLKPMSRLLKTFVKNYEQDAQNRLENGIHGRGLRLFSLTPISAFKQKFILIDTDALHDLMTSENIGIVVPRDKVVFRLNAMEWWRRAFNVDKLTTDTKRFGFSVSTNGVKYHQHNMKQFERSEINDWGYNYEGEFIPLEINGQTRVVALDPGRNSLYVAVAGNTAADVLESDRDRHMAITLTTTPCCYNTDDYITHLLHVLEYRDEFLGFYRDMRWRRLRWKTRIKRQKAYDTLYKELAAGGLDNVVIAYGGGKFIHNSRGHPPTPNKHLFLELKRRTSCRLVPEFRTSKLCSLCDNELVQSDIWSIKNVVIAYGGGGFSHNSRGHPPTPNKHRFLELKRRTRRRLVPEFRTSKLCSLCDNELVQSDIWSIKSCNNNNCWTRWNRDVNGARNIRRVAFHMNANGGEKPEAFRRGN

SEQ ID NO: 3007 - protein, 558 aa, Amoeboaphelidium occidentale
MLAKIRQCDLPSIEGLSKSIDTVVMQYQTNCQVYVSTTLWGRVHRWARHLLEIQLPAVFKNCARSKAAATYLMSCLLYEEPSEKERKRPSLQKKLVEFCKKKGLEQELDLALIDVYSILLQHTHCAGLCLNTVSVKTNWDKYFGLMWGILRHFEEYGPKDCESRAQEQRRGRGLKLFNLVPLAQIRNGFVTIDTSGLYELSRNLNINSKKDPLQSASNNIHQQPKIYVSPVQRFLANAEEEWGKVLRLKQVVPKNRYFSYSISTDGISLHFNLKKQILKTESTIHEFGYSIEDPKVYSPVDLKDRTAVGIDPNKKDLFMAYDGKQKFQVTGKEWRQMAGITAAKKKRENWLKKRNDIVNANSNVPTSKVSHVSDLHNHFFYLFAHLNLWLDFYGSRQWRQLRKRSSIKRQQALDLIVNRIIGKTERKCYLGHKGANAKHSRSYNNVFVAFGGGQFSSTSRGHHPIPRRSLINALKQRKIPMRLVDEFRTSMLCCKCKEPLPKRGMWHVKRYDNCNIVWNRDVNAAVNIREVFISVNACKGVRPEKFSRSYKFCSSTNA

SEQ ID NO: 3008 - protein, 576 aa, Amoeboaphelidium occidentale
VPDNAEIAQELLECLVVAVEKKGEFSELEGSSGARTEIKESIDKLNESDTKTPPRTSGSMKLRSRKRKLGEFAEETKPEQKIPEYDPSKLETYSVVRLFFAMNNLLPVSQRYKYMPRYQPSLFPLSLTEDCLLGITGTRDSRLWFKDFLDPKKDGPLMTRERTGELVQLVFGLKSKKYRKYRTIGQKDSGERLVLMTSFATDGFSLSVNVIDTRCRKVKHTPPPPVVSRDPAYRKDTDIIMGLDLGQAFTVGAVSWLPEGSKKNLAVKKKALGEPHALYRNWLNKTKMNDENKPKNLAVKKKALGEPHALYRNWLNKTKMNDENKPVRDAENCGLSRLPDETITKYFNRIMERYTVLANFYNSHAIRKRTFEYHCAKQREMDRVFNALTSMVGLKPHQKVKKKQRIYVGIGTGDFGATGSLHTSFLEYFVRKARPLGITILGVDEYFTSQKCVRCHELTESLSMRAKKCSKCNVVFHRDILAAENMCAALSAILEKGERPEYLCKPPDDKSDDDDNDEQDDGLNKKDRNGRNPKEKKKKPKDKESRQSTSSEYALENAAKKKSASYLLGSARVIVQ

SEQ ID NO: 3009 - protein, 588 aa, Amoeboaphelidium occidentale
MSYLAWQANERADKPEFPLFLDKFLAKNDDLRAVVLAALLTARVKLFSISYASEGTAGAKYIMSYLAWQANERVDKPEFPLFLDKFLAKNDDLRAVVLAALVTARVELFSISYASEYSLSKDYIKENWYKYVRLLFHVLSYFNEHSIADAQGRLFERRCGRGLRRFTLAPLTKMRNEFILVDTTSLRNFGFCLRSWKKPSSKVIISKEGYYSKESDNVMKPRKTDGVSARVHFKKNCYTTDVGKDGFKTFGDKEYVQLDVENKRVVGLDPGRKDMFCCHDGSKKADKPEFPLFLDKFLAKNDDLRAVVLAALLTARVKLFSISYASEYSLSKDYIKENLYKYFPLLFHVLSYFNEHSIADSQDRLLERRRGRGLRTFILAPLTKMRNEFILTDGVSARVHFKKTCYTTDVGKDGFKTFGDKEYVQLNVENKRVVGLDPGRKDIFSCFDGTKAWRQLRRKTDIRRQKAYDVLCKRIAGEKLDSIVAYGSAKFSASSRGSPPIPTTHLYKKLLEKKVCVRLVWEHRTSVVCSVCHNDLPKGKKWRVKICPICKIYWNRDVNAASNIRQIFLFMNGNNGQRPMQFRTFKER

SEQ ID NO: 3010 - protein, 395 aa, Amoeboaphelidium occidentale
MSYLAWQANERADKPEFPLVLDTFLARNNDFRVVVLAALLTARVELYSQTYASDYSLSKEFIKKNWYKYFPLLFHILSYFNEHSTADAQGRLLERRRGRGLRTFTLVPLTKMRNGFVLVDTTLLGEILAFASARGRNRVPKSFPGKLGIIQRNQTILRNQGKYWKDVMKIDKLSNSSKKFSFSINTDGVSARVHYKKTCYTSDLGRDGFKIFGDKEYVPLDVENRRKVGLDPGRKDMFSCHDGSKKSYHCSGKEWRVISGAKSSKQKRDLWISKRDDIQTIKSGMPSAKLYWKIIHVCLLFYGSLKWRQLRRKIDIRRQKAYDVLCKRIAGEKLDSIVAYGSAKFSGSSRGSPPIPTTHLYKKLLEKKVCVRLVWEHWTSVVCSVCHNDLPKGKK

SEQ ID NO: 3011 - protein, 1107 aa, Amoeboaphelidium occidentale
MPVITRSQKKPKHHPYQTRQRPPRATAAPKAPVTTTQAKQAQQLKHAPWWTDQSKVMSQRLAVQSSGTRSAQSALTKFKVTKKKISWCTANYYEPLAKLNNKIEIHENPPAPYHLNRQSPESKKRKKTKPLQSGMSSYDKKICSRMKSGPDENETMRSVKIRVYPEATQKAALKQIFGIVRVVWNQGLDEMFLRGHPKNWQSLRNKIVTASNVSEEEQASRPWLYDGSICSASIKGEAIHKLVSSIKATEELLRAQNRAFNYQMTRKKKKDSRQSLSFYPGGAYALRCIESTSTRNGTKKNNFGLKLPFDALAQPLKVTSESEFQGAKSIMENEMDKKESNEYKRLVEVVWEKPDQYYVCFPYTKANQEKTIDDHPIAAALDPGVRDIRRVERLCVNLDRLISKAAGVKTGRKNRYKRRRMNAAIQRARQRIKNLISDFHGKLAHDLTSRYNAILIPTFYVSKMVIKNNRKINSKTARNMLNWSHYKFKQKLLQKAEENPNCEVHVVTEEYASKACGICGRLNHKLGGNKTFNYLNKRAKLNLDTGNYKPMDLMPQPQPNRKKATELELKEEPLKGPATDQPELPLNTIVKRFHHTTSSFVARCYLFPLVGDGIERDHALLMVDVLRSVKQVLLWFATHEKSPSFEWTLIRAKSLDLVKKWKRSVILKAHEMTKNRAVDFREESRKMMDQFIEEFEEFVTFLNAQLGYYNKTKSLMSVDDYTLMRNKVHASSRAQSREKNPKIDIQEQGSRIARSRSTPHIYPDDQPNNSSTEKTHIQTVLVPSPDDSDTATIIPEVTSPVESIKTLHRHSNIRPRARTVEFEHESEPLSPTKLSKPQWDIKKLFDNLQELKQKYEEDINEKKEKQKMLINTIRRYSKDDPNTNYVKLASALDAVLPSAILPSAATDLSKFDTGNSVNVPISAIDPHTSGTKSLSAEQNAALKRSHTINVPSKAVAPSLTLVIPDYVPPPIPKLESAKLRPSNSMDVIVKDKKTKAFSPSISAPNLVNKAQNEVMAAPGDGNHRFRKVALLEDIRHSFRTLFSRTDKKKLVKGVDFKSTKKYEGHEKCQVCEDRFSFGGGKVKCVQCDLIVHQKCRENADLGYFDCL

SEQ ID NO: 3012 - protein, 728 aa, Amoeboaphelidium occidentale
MKKKRKLPDDDVEEYDPAAEDDVAAEPIDEPEEEEEDDMTPIPMTSIVTRKTGLNSLLPNEILRTKIRDLVDAMNFIRYHGSRLLHLYVVQMCSEGRDLGLLTCSYGGILRHFFVAVCYNSGNIHAKRLDNNVAPLAEIYRNTAFEYGIEFPLNTGISSTLNNMITTTTVGRVRRWLMHLLELEYPDCFKVKKRSTSGANYCISSLSALLEENNELPELPDILEKFAKKHDRARIMRALRTKRNFLKEYWYKFFYLQYHILEHFTKYSEADAQARLEENRRGKGLRLFTMVPLADIKTSHAFFDSSGLSEVVHMAFEDESFVAPPNHPRNLNVTSRKALFTGKKSRVPLWNWAVELKCVKHTNLDFNYSFSTDGVSVSVHFKKPGFKERLNDKGFLWSNQMKYSPIGIENRVVVGVDPGRIDLVVCSDGSRKSFGCSGKEWQEIAGFSTDGLSVSVHFKKPGFKERLNDTGFLWSNQMKYSPIAIENRVVVGVDPGRIDLVVCSDGSRKSFGCSGKEWQEIAGFRYQRWRQKSWSDKNDNIQTIIRDMHSAKVRKVEVYLTYLNYILRHYASLADFYGSQRWRQLRRKTDIMKTKTFDIVCRRIAGNNFERVVAYGSGGFSSCSRGHAPLRVKGLFKALKQKNALVRLVWEHRTSKLCCQCEGELPEGKRWQVRICKTCKIHWNRDFNAANNIRKILKHMEENSGDRPCNFLTKKQQKSKGNDLIVGG

SEQ ID NO: 3013 - protein, 377 aa, Amoeboaphelidium occidentale
MLRNPGKYWKDVLKIDRLSNSSKKFGFSIKTDGVSVRVHFKKTCFTTDLGKDGFKTFGDKEYVQLDVENKRVVGLDPGRKDIFSCFDGTKAVHCSNKEWQEISDGFKTFGDKEYVQLDVENKRVVGLDPGRKDMFCCHDGSKKSYHCSGKLKETKRFVDFKKGRYPDFKFWYAFSQGLHCQKFSQYLGVVLENHSHLFHFYGSLKWRQLRRKTDIRRQKAYDVLCKRIAGEKLDSIVAYGSAKFSASSRGSPPIPTTRLYKKLLQRNVCVRLVWEHRTSVVCSVCHNDLPKGKKWRVKICPTCKIYLNRDVNAASNIRQIFLFMNGNNGQRPMQFKTFKQRMLASSASNPAVPNDGQQADDRGEENTLSDIPAQIPL

SEQ ID NO: 3014 - protein, 314 aa, Amoeboaphelidium occidentale
MIVTVNTQQKEWRVISGAKSSKKQRDLWISKRDDIQTLNSGMPSAKVCTVQKFSQYLGVVLENHSRLFHFYGSLKWRQLRRKTDIRRQKAYDVLCKRIAGEKLDSIVAYGSAKFSASSRGSPPIPTTRLYKKLLQRKVCVRLVWEHRTSVVCSVCHNDLPKGKKWRVKICPTCKIYLNRDVNAAIAGEKLDSIVAYGSAKFSASSRGNPPIPTTRLYKKLLEKKVCVRLVWEHRTSVVCSVCRNDLPNGKKWRVKICPSCKIYWNRDVNAASNIRQIFLFMNGNNGQRPMQFKTFKQRMLASSASNPAIPNDGQ

SEQ ID NO: 3015 - protein, 344 aa, Amoeboaphelidium occidentale
MYQVVRLTKFYKDLWPQNREQTINKAREFWIQIINVEKHERCNRRFGYHVCSNGVEIGVQYLKSIAVSSFDNHGYDKNNTFHPLNLTSTTRIIGLDPGRASLYVAAGGSSEQLEIFKCSNSRWREISGATHGLQKRKNWNKKNPVLIVQITSGPSHKVSTTAAYCEYLRHVLSLRDDVLGFYRDLQRRRLRFKTRITRQKAYEAPARELTDGDKNCIVAYGSGGFISTSKGHAPTPNKHLFVELKKRCKVRLVSEYRTSQVCSNCGSQLQQTKYWGIKKCNNHFAEGKLNRLHCLTLWNRDINAARNIRYMFLERNSNGDNLPEVFKKKEECSKENKYKCFKNE

SEQ ID NO: 3016 - protein, 783 aa, Amoeboaphelidium occidentale
MVKRITTIIPKSKHITIVFDGGSTEEKQVTHIKRLESKRQSVQALQYFVDSLCKGNGDQEGAEDIVSLKRVSKAKKILMKQLIKKAFVLTKQDKKEIMALLKRLGYTIEQAAGEADVFIGTRKGRVNVISPDSDMVFHLNDGIWAVPSLQGNNLMIRYIDVAEARNKLKLNLASLRALAVLGGNDYCSNVRGWAIASVYKRIRQYRKADLESCNKLVQSFLETVGSDSNFDKALMIFECKEEHVLPHDARTEILLQLSLYNKESEKFNDDNESLTRYKYKTVDRKSLCVSEVPPLTLKNRPKQPEEILESQIEALQENLYGSESNEENDINKLQKLCKSKVEYFYKLNQLLPSNKRWSMISLSRVPDLAITVNESGLLDVLKQVVPVFKRISNDFVIQNKGWFFMELFGKNFGDNRNRHLRLQNDTSNKRYILQNTLQTGGVELRVHVLDTAEKKKRNVLQPTQEIDFDEELFDNAGVKPSDVVYDKVPIMTEDEAKDCYFVGVDLGYKYSAGVCAVQESSNTIRNLAIRKNFLREPFKKYNRWFYKQKNENEWVYETERLMERTESETASNFATRWFNCYSKLYVFYNSLSMKKNRWDLKKALRGELDRAVHAILRMVEMKINFNLKHEAFKNKRTVIGIGASKFEMGDNTHTLFEKHLVMKLRSLGYTVVCVEEYLTGQMCRRCFNRTEQLKMRVKYCRHCHVFYHRDVMAGENMARVLRDEVTGKGRPEHLRYKPPNKPSPDYSASIGDEIGDKTLDDSAEDNVSVSLVKKGKRRLDMSH

SEQ ID NO: 3017 - protein, 510 aa, Amoeboaphelidium occidentale
MKQITNTTEALQILQNEIITKRLGRGLPVAVLTGAGISTDSGIPDYRGPNGTYVKYKNYRPIRYQEFMSSDLSRKRYWARSFVGYPEMTKAKPNPSHYALAKLGLPVITQNVDSLHIHAGSEDCTELHGSLKHVVCTKCGKLFERSWYQAELKQLNPSLSISADSIRPDGDVDLGSFDYSQFRYPSCPCTAASIIKPHVVFFGENIDAKVRDASFETIDKSSSLLVVGSSLEVYSAFRLVKRAIDQLKPVIILNIGDTRAERDVANNALITKLEVHCSKTRVVALDPGRNSLYVALSGITAADVLECSNSRWQEISGTRYSTKKANTWITADRDRHMAITLTPTPCCSNTDGYITHLLHVLEYRDEFLGFYRAMRWRRLRWKTRIKRQKAYDTLYKELAAGAEDVVIAYGGGGFSHNSRRHPPNPNKHLFVELKRRTRCRLIPEFRTSKLCSLCDNVLVQSDILSIKSCNNPDCWTRWNRDVNGARNIRRVALYMNANGGAKPWAFRRGN

SEQ ID NO: 3018 - protein, 782 aa, Amoeboaphelidium occidentale
MSDQRFVPPDTGQDHSEIDTHVYQAMPMDLDDRDQPTDIVEIEMKPVQRTAASADDVITTDDDVVGVSSSTSKRKRRTQCKCGSTTHLNISHSACPLNKRHKSTSQTETVSANASPVAAVNDQSADIENPVKKCPSCGGTDHQRKSSKKCAHYQGKFADRYKQHDHEESECTVKLGLSYMYNRQLHPEQKQLLHNLIQDAVHRMTEIYCETTKLLQGYLIGLLERGDKIPDIRFSDGILTQLFQAIQFENENSHRIPKTVSTASINTFVSEVYSVARGDRSFCDGSGISHMISSVAEQYNTNCMLHLSLKMKRYLKQWLQCGIKRSILWSLKLLALKQSKNLGGPILSHSIICWLSLGENFYSEAERRRTNRLKGRSLRLFNLVPQASHHLIHVPIDSTILIDLLSSVGVKKFGYRDRNECSADPLKVWQSLFYFDRIITARKRFGLRIATNGVEVSVLLMKIVTNGPKLNDFGIDQNDQFIPFSVAGNVRIVVLDPGRSCLYDAVAATHVDGLIQNDNEVLSCSNKRCQDLSGAHRGRQKRSHWMLWNQTLMKTLTQAKWRRLKFKTRISRQKAYDQLAKELTKGDPDTIIAYGAGKFDCCSKGHAPAPNRHLFKELKKRCRVRLVSEYRTSQVCFNCHSQLEKVYGAVIMSDKHGRLGKNGKMKSNRTGRRKLCWGLKKCINHSANVNGRSFCLTLWDRDVNAALNIRQVFLYRNAHNNESPEEFKRKKKEGEKVCAAEIQDSTTSEAMNTDTLREDGLGSNGYGIKSQVAQKYSEIPAI

SEQ ID NO: 3019 - protein, 1479 aa, Amoeboaphelidium occidentale
MEIDTALTIEIKEDSTESKENEKDDKENDNVIPMEIDDAASPELPTCNACGLVGHSRRSSKHCLQHIPRVAERNLDPLEEYSNVTVKVGFKKAIRGIELASAIENYVRTMNLVRIHGSRVVLKYVLDKVQRGLPVGNLQSSEGGIMRQLFVGAFHYFHKGNGAGLDNEDIALSIHEYVMLAKIRQCDLPSIEGISKSIDTVVMQYQKNCQVYVSTTLWGRVHRWARHLLEIQLPAVFKNCARSKAAATYLMSCLLYEEPSEKERKRPSLQKKLVEFCKKKGLEQELDLALIDVYSILLQHTHCAGLCLNTVSVKTNWDKYFGLMWVILRQAQEQRRGRGLRLFNLVPLAQIRNGFVTIDTSGLYELSRNLNINSKENPLQSASNNIHQQPKIYVSPVQRFLANAEEEWGKVLRLKRVVPKNRSFSYSISTDAESTIDEFGYKTDYSKEYSPVDLKDRTNDDVIPMEIDGAASPDLPTCNACGLVGHSRRSRKHCRQHIPRIAERNLDPDEEYSNVTVKVGFKKAIRGIELAFAMEKYVRTMNLVRIHGSRVVLKYVVDKAQRGLPVGNLQSSEGGIMRQLFVGAFHYFHKGHGAGLSNEDIALSTHEYVMLAKIRQCDLPSIEGLSKSIDTVVMQYQTNCQVYVSTTLWGRVHRWARHLLEIQLPAVFKNCARSNAAATYLMSCLLYEEPSEKERKKPSLQKKLVEFCKKKGLEQELDLALIDVYSILLQHTHCAGLHLNSAAVKKNWGRYFGLMWVILRHFEEYGPKDCESRAQEQRRGRGLRLFNLVPLAQIRNGFVTIDTSGLYELSRNLNINSKENPLQSASNNIHQQPKIYVSPVQRFLANAEEEWGKVLRLKRVVPKHRSFSYTIVQRGLPVGNLQSSEGGIMRQLFVGAFHYLRKGIGAGLDNEDIALSIHEYVMLAKIRQCELPSIEGLCKSIDTVVMQYQTNCQVYVSTTLWGRVHRWARHLLEIQLPAVFKNCARSKAAATYLMSCLLYEEPSEKERKRPSLQKKLVEFCKKKGLEQELDLALIDVYTILLQNTHCAGLCLNNISVNTNWDKYFGLMWVILRQFEEYGRKDCESRAQEQRRGRGLKLFNLVPLAQIRNGFVTIDTSGLYELSRNLNINSKKDPLQSASNNIHQQPIIYVSPVQRFLANAEEEWGKVLRLKRVVPKNRYFSYSISTDGISLHLNLKKQIFKTESTIDEFEYSIEDPKVYSPVDLKDRTVVGIDPNRKDLFMAYDGKQKFQVTGKEWTHMSGITAAKKKRENWLKKRNDIVNANSNVPTSKVSHVSDLHNHFFYLFAHLNLWFDFYGSRQWRQLRKRSSIKRQQALDLIVNRIIGKTERKCYLGHKGVNAKQSRSYNNVFVAFGGGQFSSTSRGHHPIPRRSLINALKQRKIPMRLVDEFRTSMLCCKCKEPLPKRGMWHVKRCDNCNIVWNRDVNAAVNIRDVFISMNASNGVRPEKFSRSYKFCSSTNA

SEQ ID NO: 3020 - protein, 242 aa, Amoeboaphelidium occidentale
MKWWRRAFNIDKLTSATKRFGFSVSTYGFEYHQLNMKQFERSEINDWGYNYEGEFIPNSLYVAVAGNTAADVLECSNSRWQEISGTRYSTKKANTWITADRDRHMAITLTPTPCCSNTDGYITHLLHVLEYRDEFLGFYRAMRWRRLRWKTRIKRQKAYDTLYKELAAGAEDVVIAYGGGGFSHNSRGHPPTPNKHLFVELNRRTRCWLVPEFRTSKLCSLCDNILVQSDIWSIKSCNNPNC

SEQ ID NO: 3021 - protein, 1369 aa, Amoeboaphelidium occidentale
MCSKYSRSKDWDHMIKRITTIITKIKHLTIVFDGGSTEEKQVTHIKRLESKRQSIQDLQYFVDSLCKDNGDQEGAEDKVSLKRAVFYPLLCSKYSRLKDWDHMVKRITTIIPKSKHLTIVFDGGSTEEKQVTHIKRLESKRQSVQALQYFVDSLCKDNGDQEGAEDKVSLKRVSKSKKILMKKLIMKAFVLTKQDKEEIMALLKRLGYQIEQAAEEKQVTHIKRLESKRQSIQDLQYFVDSLCKDNGDQEGAEDKVSLKRVSKAKKILMKKLIKKAFVLTKQDKEEIMALLKRLGYKIEQAAGEADVFIGTRKGRVNVISTDSDMVFHLNDGIWAVPSLQGNNLMIRYIDVAEARNKLKLNLASLRALAVLSGNDYCSNVRGWAIASVYKWIRQYRKADLESCNKIVQSFLETVGSDSNFDKAIMIFECKEEHVLHHDARTEKLLQLSLLIRRKITVCVSEVPPLPLKKRPKQPEEILESQIEALQENLDGSESNEDSGFTASTTVHNSSKKRKKKSAKHQPSSRNFRNKPDAAEAEEHVLHHDARTEKLLQLSLFNKESIKKWDNYNIAWKDKQENYIGNSDNLDLKRWTHKNPFRVLGEKFNDDNESLTRYKYKTVDRKSLCVSEVPPLPLKKRPKQPEEILESQIEALQENLDGSKSNEESGSSASTTVHNSSKKRKKTSAKHQPSSRNFRNKPDAAEAGATGSRNVTDESREMSSLKAKFVTKTWSIGALSTRNRQRQYAQYEKEIIHCFKSIIKLNENTLKLDDMILGDTKGQGGRKFWQPCMSFLNGTGRDETESVGLNLFKNDMILGDTKGQGGRKFWQPCMSFLNGTGRDETESVGLNLFKSCINKKLFSGREVKSLKLYTLSKFSMCQATDFIAKQLDTEFAGQVVGRVKLLEEVVFEYDSNLKDDINKLQKLCKSKVEYFYKLNQLLPSNKRWSMFSLSRVPDLAITVNESGLLDVLKQVVPVFKRISNDFVIQNKGWFFMELFGKNFGDNRNRHLRLQNDTSNKRYILQNTLQTDGVELRVHVLDTAEKKKRNVLQPTQEIDFDEGLFDNAGVKPSDVVYDKVPKMTEDEAKDCYFVGVDLGYKYSAGVCAVQESSNTIRNLAIRKNALRGPLKKYNRWFYKQKYENEWVYETERLMERTESETASNFATRWFNCYSKLYAFYNSLSMKKNRWDIKKALRGEFDRAVHAILRMVEMKINYNLKREAFKNKRIVIGIGASKFEMGDNTHTLFEKHLVMKLRSLGYTVVCVEEYLTSQMCPRCFNRTEQLKMRVKYCRHCHVFYHRDVMAGENMARVLRDEVTGKGRPEHLRYKPPDKPSPDYSASISDEIGDKTLDDSAEDNVSVSLVKKGKRRLDMSH

SEQ ID NO: 3022 - protein, 251 aa, Amoeboaphelidium occidentale
MTFGYSMVTDGVSVEFHVMKKIHDGDKGPDDFGLNMVDDKKFYVPVDLKDTVVIGLDPGRKDLFDAYDENGSFGCSGGEWRRLLSKRTDIGKINADMPSAKCLFTDLTSGVFLRRTCDIHKQWAYDHLIKRIKRRGKKVFVAFGGGKFSSCSRGHAPIPKVGFYKALKQRKIPCRYVWEYNTSKICAKCFTVLPKGRKWRLKICSKITCGRYWNRDVNAAKDMKFVFTFMNKNNGERPEQFKPKPTEAGTK

SEQ ID NO: 3023 - protein, 717 aa, Absidia glauca
EPSAATIKKVCGLIVDLLRKKDEDYCINTNDLLERVPTLNPHTVEPIAKIYRFFRRFVLQDVGEDDIDGHILVNLHILDMCNAVLFSTGYTRHLRKLLPEPDMSTLHALHLNLEGLYYFTRAFFDEGKKKESVMMIDPSTPITSLEIATLNKSSVFDTCIGMEEVERSCRERKVEFDNKLVITSSGVVHLQVTYHAPTASLPPVAPAKKSKASKSAQAEQARQQLDNLKNQTNQLKHDLRLVKLSLSPTKKKIKAITDRIGKADDDMTRKQLIEERTEEKKQRDNTYRRMLEVYGQIDKINKDKATIYNTLYPKPTSSSSSAVPASSSSSSSSSAVPASSSSSSSSSSAVPASSSSSSSSSVPASSPLSSPSCPFIPKETLYIGIYIGIDPGVKTMATAVQLDSYQAGAFLLLPNKLQHLSTDINTQQQKRLALAMKVPTKEIRASSIASRSRSNHSRKVMETKKKQATNDQPSIQAIESRLGGDQMQYTWDRGHSIQRRLETAKEHRPTLVSFYRESSWAKKQTNGRKRFSEKAYAAAARSLFHPSSKHVVFFGDAGRGYGSTIKGHIRRSPDKLLAHLKERTTVIATNEYLSSKLCCFCNTRVLHPNKPSGKQNLGVVNCINPDCYSRTSGCSSRSRDKNAAINMITIGLHKEITGMHHPTFSPFQTTATAAAAAAAASTTAIETAFFGHITSWLERMGVPPSMKGTGDGRSLRT

SEQ ID NO: 3024 - protein, 984 aa, Absidia glauca
IRCNGSLTVFGYIRSGDALFVQGYVNAGTYLDCGGSLFVHSYVKIGTALSTGGTVNAHANIQVGGDMKSMGKIAVKKDIVIGGKLTVIGGVDCGGSMQVNGNVESNGDIEVDGDLIVTANMLLTGELVVMKNFTLGGDMTSTGMIVAGGNILHSDIANINVPRLAQDMHAEYDDDNNQYGDHDGPVSSFSLHDIQSSLADIDPDGTASGASGANFAGAASDASGASGAGAASGAGAASGAGAASGAPTGAAVEDDEDIYDVADQDVFEGDDEFASMMDPLANSQNLRGMCPIMFSKEFFYGCMQLVLGNKVTNKNTKMPVRVMESVFSDYRQLFSSEDMFLEKMPPGKSYSASLASMALTMATSMKNIVVETFEKRCLLYLEHRLRVEIPDIDTKTVKKLRIYLYNELSGVEDPPWPTSLDKTEDLMVHLNRITLTEYLGPQPITHKSLVTNICEHMSVLHQILRNYEQYNNVSSNELADQVSPWWAYQQLKDHDEFLNLTKKQRQQVSRQLRQHANGNDGDTILFTTTISDGLRNVLLELVTDTRARIANSRRVKAGDDEINLDDCFVPTRSSLKPDHRLFNLLPHRSFGMPFVEVPIGSLVALVNKSLPPGSPLPKARVSALKGIHRIREDGKTFERVFNLGAVRLARGVDNLDQYDDEEGAAGRKMPIFNNLVSTDGHTVNVSLVRPTAGPPLPDLELEDFTPELVNNHFRLWGIDPGMTHIFTATDGSSQYLKYSSAEWRAKSGFTRRLTAQRQRMTTQITDIQSRLPTTKTASVSTYATAVTSIMAHLNTLVSFYADVSWSNDRLLNYSGRRRLDEEVVKIFVDGGKKYAHNTASAPSTSSNASRFHKAAFTPSPAIPLLGMGDGSFAMTMRGTKPGMASRVKKVLKRAELEGKLVLVPVNESYTSKCLTNNQENKVLEDGSRLHSVLVCKDCNTVWNRDINACNNIFFLATEEIAKRSRPSVFCHPNHHPPQLPQTMG

SEQ ID NO: 3025 - protein, 988 aa, Absidia glauca
MEFTIAASTDPPEPSDRFYGMSGKQIILALKNEKARRLRAQTSNRQQFTCRHCGGNHRDARSTECPQNSRWTGSGARPLKRNLSAAEKTFDKKQKGEGSRQLRLQHRNEDASLCQPCSRKGLFDRNEVAPHHSTGSSLCPDHSATKGDVQNRIYGSQHTLATRKVSLDKILKLDGDNKDTFVAETRHMVERLRNIGIKTQMFVNYYFLRQLEYDNPPPRFTAPAHASDPAPAPAHASDPAPAHASDPAPAVAPATAPDSDPAPALSHLTDATAAPLALSDATAEVYTQHMLDSLDVSVRTPTPRDPALEEPDTTNPDLAGQIHDGNYHHIGDLVLDGTFFITGNLMATGKIRCNGSLTVFGYIRSGDALFVQGYVNAGTYLDCGGNLFVHNYKPLKNAVSYILNTVCVLKFRRPALAHQLGQNGGHDGAPQPDHFDRISWSPPITPKSLVTNICEHMSVLHQILRHYEQYNNVSSNELADQVSPWWAYQQLKDHDEFLNLTKKQRQQVSRQLRQHANGNDGGTILFTTTISDGLRNALLELVTDTRARIANSRRVKAGDDEINLDDCFVPTRSSLKPDHRLFNLLPHRSFGMPFVEVPIASLVALVNKSLPPGSPLPKARVSALKGIHRIREDGKTFERVFNLGAVRLARGVDNLDQYDDEEGAAGRKMPIFNNLVSTDGHTVNVSLVRPTAGPPLPDLELEDFTPELVNNHFRLWGIDPGMTHIFTATDGSSQYLKYSSAEWRAKSGFTRRLTAQRQRMTTQITDIQSRLPTTKTASVSTYATAVTSIMAHLNTLVSFYADVSWSNDRLLNYSGRRRLDEEVVKIFVDGGKKYAHNTASAPSTSSHASRFHKAAFTPSPAIPLLGMGDGSFAMTMRGTKPGMASRVKKVLKRAELEGKLVLVPVNESYTSKICSKCLTNNQENKVLEDGSRLHSVLVCKDCNTVWNRDINACNNIFFLATEEIAKRSRPSVFCHPNHPPPQSPQTMG

SEQ ID NO: 3026 - protein, 713 aa, Absidia glauca
MMDPLANSQNLRGMCPIMFSKEFFYGCMQLVLGSKVTNKNTKMPVRVMESVFSDYRQLFSSEDMFLEKMPPGKSYSASLASMALTMATSMKNIVVETFEKRCLLYLEHRLRAEIPDIDTKTVKKLRIYLYNELSGVEDPPWPTSLDKTEDLMVHLNRITLTEYLGPHPITPKSLVTNICEHMSVLHQILRNYEQYNNVSSNELADQVSPWWAYQQLKDHDEFLNLTKKQRQQVSRQLRQHANGNDGDTILFTTTISDGLRNALLELVTDTRARIANSRRVKAGDDEINLDDCFVPTRSSLKPDHRLFNLLPHRSLGMPFVEVPIDSLVALVNNSLPPGSPLPKARRSTLKGIHRIREDGKTFERVFNLGAVRLARGVDNLDQYDDEEGAAGRKMPIFNNLVSTDGHTVNVSLVRPTAGPPLPDLELEDFTPELVNNHFRLWGIDPGMTHIFTATDGSSQYLKYSSAEWRAKSGFTRRLTAQRQRMTTQITDIQSRLPTTKTASVSTYATAVTSIMAHLNTLVSFYADVSWSNDRLLNYSGRRRLDEEVVKIFVDGGKKYAHNTASAPSTSSHASRFHKAAFTPSPAIPLLGMGDGSFAMTMRGTKPGMASRVKKVLKRAELEGKLVLVPVNESYTSKICSKCLTNNQENKVLEDGSRLHSVLVCKDCNTVWNRDINACNNIFFLATEEIAKRSRPSVFCHPNHPPPQPPQTMG

SEQ ID NO: 3027 - protein, 551 aa, Absidia glauca
MEEVERSCRERKVEFDNKLVITSSGVVHLQVTYHAPTASLPPVAPAKKSKASKSAQAEQARQQLDNLKNQTNQLKHDLRLVKLSLSPTKKKIKAITDRIGKADDDMTRKQLIEERTEEKKQRDNTYRRMLEVYGQIDKINKDKATIYNTLYPKPTSSSSSAVPASSSSSSSSSAVPASSSSSSSSSAVPASSSSSSSSSVPASSPLSSPSCPFIPKETLYIGIDPGVKTMATAVQLDSYQAGAFLLLPNKLQHLSTDINTQQQKRLALAMKVPTKEIRASSIASRSRSNHSRKVMETKKKQATNDQPSIQAIESRLGGDQMQYTWDRGHSIQRRLETAKEHRPTLVSFYRESSWAKKQANGRKRFSEKAYAAAARSLFHPSSKHVVFFGDAGRGYGSTIKGHIRRSPDKLLAHLKERTTVIATNEYLSSKLCCFCNTRVLHPNKPSGKQNLGVVNCINPDCYSRTSGCSSRSRDKNAAINMITIGLHKEITGMHHPTFSPFQTTATAAAAAAAASTTAIETAFFGHITSWLERMGVPPSMKGTGDGRSLRT

SEQ ID NO: 3028 - protein, 606 aa, Absidia glauca
MNSGSRTGKQPYQEARPKPSNDLETILNRIVQNEDLGPSPITEKSLTSNICDYTGVLYRILKKYEALNVSSASISSEPTIDDLAENVSPWWAYGQLKDLDDFTSLGKRQRQKVSRQLRSQINNPVGPTPTFTIPLPEELRAVLSTLVVDTRKLIANSTRLKSGDQVPLNDCFAPRKSSQNAPHRLFQLLPMRSFRMPFITLDIHTLVSLYNNSITRTNDTDWAGVSNKQGIHRIREDSQTFSRVFNLSKVRLGRSDEAFDDIEDHPPETRRRPLFNNMVLTDGFTVNILLTRATSSTKLPDLELEDIAKPHVAQYFDLWGADPGLKDIFVATDGQQQYRKFSAAEYRCKTGQTRRKAERDRLHRQANITTIESAIPTTKTSSSSSLIAAIRYILEHLSPLLALYGDVMWAQHRLWNYSGAQKLDHELVQVFLNGGRKYDPSTAPHPTMQHRTSAHPTRFRQAPSTRKTRIPLIGMGDGSFGMTMRGTKPGLATHFKKVLKHAELQGKLLVVSVDEAYTSKVCSRCQVKEMENMKIGADSRLHSVLTCKGCNTVWNRDVNAANNIFSLAARAIDGLPRPAIFCRPPTTSVAATTTTTTTTTTTTLTM

SEQ ID NO: 3029 - protein, 393 aa, Absidia glauca
MAEEELVLMLERNVATRKSVPLIYDKATDLWNTNQGIKTKGDKPTTATKAEMKRVCDKYYFPMMKLWREYVAAHCREVFRETSQRPRPPTRHLPPALFLLIAFGLGSSTTSSTSASIFSNKIDSEDRASDSNKEGVIRYHGYPTKHIGLTIITLKPDNEGCFVFTTCIKELDDIARPHAANDFGLWGVDPGIKEIFVAIDGAHQYRLFSATEYRPKTGQTRTSSEQHQAHRRSNIWAIESAIPTTKISSSSIIVAARYILENLLALVDFHGAAIWPQHRLQTYTGRQKLDHEMVQIFLNGGMKYKPVTAQHPTLHHRPSTSTHPTRFHQVAYSQGTRIPLIGIRGGPFGMAMRGIKPGLVSKIKKILKRAEVQGIIHALAARSINGLPCPATF

SEQ ID NO: 3030 - protein, 531 aa, Absidia glauca
LSADPGSLVPVCIAIINIYDQYGAEEHEDPVRTYGFSILPVPSTHRRFVSLVPENVKKRTGYNGRISREDGPSFLHSYRIFYEVFQFRKLGIASFQDFLTRHEARLPMFYGYILTDGVSMNFVFARIPPPSRIELYAPDFNNSRDIIGRRMNTIGLDPGRRDIITTASGIGDATYATRQVSTIEYQAISGAAKRSQYLEIQKATTFITNDDGAVSTMENLKSTLPTLKTASTDEMRQSIQTHLSYLNHASTFYGIDQSRRRFKAYQGTQRTIATTANIVLNGGKKFDRNRRNKEQTKRNRKHRRNKTKKRRRNATRRQELIKAQYYAVAGQISQLRQQMDLVDGAIMALEQVNAFDTSGFLEGMRNQRISMDETHQQQVIEEQRLQYNYLFELGGSTIKGRKKDRHGSNHTTTTTVPLVAFGAGMMGTDQSHIHGYPVGSTNIIRRHLLERQRRALCVVAHTNEYLTSQICHVCETRMPNTVLDCREVYALKSCDHCAKIVNRDKNAASNMYRIMESGLAGLGRPLSLSRS

SEQ ID NO: 3031 - protein, 427 aa, Absidia glauca
MFYGYILTDGVSLNFVFSRLPRPTHYDLYAPDFSRHSIQGHFRIAGLDPGRRDIVTTAGGVGDGIYPTRQVSTAEYRSISGVTKRQQHLENLKNTTMITELDGNIVPFSTFESNLPTLKTTSPEVLQESIRVRLSTLNQSLDFYDIRQSRNRIKAFQGQQRAIATTTNIALNGGKKFRHDRPASKRNQKLRKNRKAKRRRLRQQRQQAIKDKYDLVVEQLVVVNRQIKLMDDALLNLARLNSLISVESVDLGILHANSSQAQRTWTETLRQQLTDQKIELQASYLAEVGGSKMKQWKKNRHGSNDTTATALPLVAFGAGMISTNHNHIHGYPVGSTNLIRNHMLQRQRRALCIVGHTNEYLTSQICSLCESRMPNAVIDGQQVYALKSCPTCHRTINRDKNASSNMYKIMATSVDGLGRPLSLSRTM

SEQ ID NO: 3032 - protein, 204 aa, Absidia glauca
MNGQISEHQRQLDLLDGAALNLQLINVFDTTELLQTIRRQKASLEALQQTNVDEKESLQQKYLDQVGGSTMKRWKKNRHGSRDTTITAIPLVAFGAGMLHTNHSHIHGYPVGSTNVVRRHMLERQRRALCLVGHTDEYLTSQICASCGERMNNAEINNQQIYALKHCQRCNKIMNHDKNAASNMFSIMQSSIIGDGRPPALSRS

SEQ ID NO: 3033 - protein, 496 aa, Ustilago bromivora
MASATLSNYARTERAINRGPDVYPFWDADLNTQLRDNRSPFVNRRPHLLKCPVSVRQAAIDEALAARKAILTTYWNKNPPRGPIPTLSHRSKAKDRQNGFSIFLSPSSSTIVFDEGAAVKAPRTVSSVDVHTFSRSAHEDGSLGAPKLKITPKTVKRCSGGQDNTLGCEEDTWVKICLRSQRGRHFLKDHCKAVSQSRTTKLKAGHEWGIQLDRYGDWCFLLSYNVPTSVVPQEQSLKQAIVVKSVDPGVRTPFAVYSSDGCMLDVGSQDNGIRLEQLRRCNDKIQSCRHRRRQPHHQQPLPPPQTTSDPQSSQQAQSQPQETRQRRPALPFALSSVQRRKLQKRSKKVHKKLQQLINDLHFRMANYLATSSDIVIMPRMEVRKMIQRKNGNLHRNTRRRLLGWGHCNFINRLLVKCHDVAHDPRYLHKRGRPTVLLIQPEAYTSKTCSQCGNLNQRLGASKQFRCPTCLYSADRDHNGAFNMLIKAIRRTPLSSM

SEQ ID NO: 3034 - protein, 938 aa, Sporisorium reilianum
MQRMRPRLDAWSSPNVLRFVAPRQSLRSGTPSRPTRLAPASRWPTAGRPRPLRPSTPSSRRDPPIRIRDGAGRSTPPRSSSGTPTRSQRTSVCSTPKTSATRWSLRLLPPVTMRPNTTTMRSNTTTSVPPTPRRLFSAERTTSAPRAPRTTSTSPVSPAGPASASSSARRGNADPPSDVIDLTLSSPPPSQHGRAEATTESDRQRAMATPRRHVDHISSSVAPSSSPSSSSGSTDFIVGSPTSSFDAASYSPSSTSCPSSVRMADSGSSWCSSPSSRNLSTSPGLASPTSLDAASASSTSSVRFVDIASSPLPLVAASSPPGQDVVLEASRGRSASSSATGSVYSSRPRSESSTSDMSVDSAPPSPPSPAHSVPSVIVISDDESDTDRPRVDAAAPDTARPAAPAPRPASSVKKPTVRNFRTRKYRIVVPPELREVLRDWRASARIVKNEAIRLANMAEQHSHPNLKPFRVMREIVNNGSDFVRERPHLAKCPTYIRRQVVIEAISARKSILTQHYNKPRSQRGPIPTISPSTARRDKRQGFSLALDPQSGSIDFEVAEARAPRRAANDTAPASTPGRHERRITSLTLKIAPRHVRRRGASLDVKICLRGQRQRQFLVDSCNVRGMGRGDKYQMPHEWLIQCDRYSRWYLVVYHKVASDADFEANKLARQDRGGETTLQGTYHVCRSSCRCLSPLLKTVPPLLFSSGSVRVKSCDPGVRTPYSIYTSEGETIDIGDDADKDRLHRLRLEMDELKSRRHKTRPLDRRPSRNISRKKRAKRKRFMLNSKERQDVLGKQLRVSEKIRNLVTDLHCRTANFLAVSSDVVVMPRMEVGRMISRKGGLAVSTKRQLKGWSHAKFIDRLATKCHDVQFDPKHQRPRETVLLVQPEAYTSKTCGRCGVLNERLGSNRVFECPNPGCGYVADRDHNGAFNMIVKAIR

SEQ ID NO: 3035 - protein, 796 aa, Ectocarpus sp.
MTRPISPEIYDAFKKCDAQWMQRRRKLDTSSVFYTITKCCTRERGVSHVLKMEAEEYSSQAVHLARKKLPIGAFKEVNRFLHRGPHEPRIFAIDGSKVHVHPSFIKAGYKTRTNDKPVPRPAKRPLVMLSSMVDVRTKSCIDFELTKHFDERRAAVSMLRSVRKSDTLLFDRGYYSKDLLRSVHDSGAFGVWRLRIMPCLILGVRVRLLKYFIKGKTYVCLTNDPSLSRRDIKTMYAWRWRVEESFKRLKSNLKLEKAHAKTPALYIQEVEARVLLDTITLRMQSSTKESSYLYTLDTHVTHILRNVKRVSGHTSYRGDLVYKKYATKLYDLAKKIITEFDGTPEYAEDLRQKAQSIDPGTDIDTILDFARNKRYEFVKNELGEEFTYAPPKDTAVLPICSTGSVFIYIDMKTLKSWGLLHSNDAWWYKDVLRPFSKEANIKCLANKENSRYASSEHGYLSSLLGSGPDKCPWMIGESFLTDGVQIKLLLVTLEHGRKAFPGSTQLNEAGYNKLPRADVQLESLLREGRGVYNISSLLDSPSIREDVVVMSADPGQAKVINVSSATARTWARQDPGVILNSSTCVFGDDYRRDTLASRSDKYETFRRKDQPYGVAIDRLRNEKKRTSCLATFIRYCKSWCANGAALLLETLQEARKFLRFDRFRATQKTLAKIADKYMGHVGDPCRVMLFGKASFRAQKGRASAPRKALIREMASRGVVLMVEEYNTSKKCPGCGEDTVEDKERRIRSCKNFKIGSPEESCRLHPLTPEFEMDRDDVGSTNIGMRGFGKLLGQEWF

SEQ ID NO: 3036 - protein, 599 aa, Ectocarpus sp.
MPKYIRDRLERMSRYTGSFRYIVGLFSNYVVIRRLEQGLQPPEVKKVFYDRCWAAINIRISGKNTRNDFSDLLDEFIDQSGFDTSLFPPKVPCRLQETVTREMEVSAKNSIVVHLEAKIKGFLRFRLMNDSQLAFQHLPAKDRSRIIVSLSNDCLEREMREDLDPGYVPHVLQVRDLLAQVYSTEPDVPVLKILKKKPHLFLELISMISRVAEEASDNNRALREETKTRSDEEKVRKAFYISERIKRGLVDRPKMCTVLPVWKLAPCFPYYSSSVVGSIFHKEGHDFSSVSRFISEHFDLRRVNRKGYKPSGFRSDGYQVQVTFMALVSKKPHVPGTTDLAKSGYQIAKKVVSLETQERGLFVLSQARKDSRKIVADRVLAYNLTVVDPGCASVVSVRSCPLEFCRCVGSVREKSTDWEMKGTEYSVKSGRTMLEGREKKRRSNDEYGRCFPRFSAVKKKTARKSSFLAYCRVAAETFKVMFAEKMKRARKRSRFHSSRLVQKTVDKLASNIAACPSDRKNIVLFGNGSFRAMKGHASAPRKKLVRAICSRVNVGMLDEFRTSKMCPGGCGGEMTDVQGDCKARLLIHTRGLFSDEYVD

SEQ ID NO: 3037 - protein, 509 aa, Tilletia controversa
MADNPPTGAAGPAPDRRAWTVSIQQESRYWPSARQSDQQDRWSPRQPRRVGPSWFSIREADLESQVRVPDVQARLHDATAFLQSVLPPPSHRQIRHNRLWTRDTQRNDGETWRTHKVRILPTTPQKEILRQALGTYRWTYNRALNILKTSTGRSPDLTALRQQCVNRSAFGGDDSMAWVFRTSYRIREQACIEAFEAFAEMRKRQGNINRLRFRKKRALFGSMRVRGDAWKGRTDITEEYGSGGVINGLKDSDGRPFGDIDAGEPITATIEGNITILWENGVWYLMVPFQTSRTPSDVATGPRICAIDPGIRTFATVYDPLRQRALQWGGKNNHQQLLKVARKVDSLLSRMAKPEVGHRKRYKMKIAANRYRRKLKSLATEIHRKLAHWLSKHYDTVLLPSLSAPQISARGQRRIGTPSVRQMSAWAHGKFRQRLMDKMHYLEVPEDYTSRTCSECGTDHPGLGGNSTFACPSEQCRMRADRDVNAAKNIFIKWLFDIRQNRTAVVKRR

SEQ ID NO: 3038 - protein, 748 aa, Tilletia controversa
MSQPSSGIILPAPLQNEGTSTTHKGTLRVAINPNPHRKSKILSRIRTWVLVAHKVQYIASWLALFILESEHRRPTKLKTLERAGAFTDFTDVLTDTSGTRGGSGLNLLYEECINYVNSGNVRKTIRSGTKRLACEEMVGIHAAAFHALWPFAPNDANIPSSVLVHLAAQWTSSVLNQIQEHLMKALAHIVNKVADIKKAQAHLHDANPGVAAASKNRLAAIRQYKAWLFEHTNNPAPPDVTDASIARVHGKMGPLLERLPCNDRTRLDQDVSRNPLRYLDFFLSVLRFFADDSVFSENRAPLAFPAAHRLVPKNIQLDAHALSQLSNSITYVAQQTETAAAAKHGKSKEQLKKEAWAFVFDLSKPLFGSTTRWILNASVRTDGVAISVHKRKNTKKLSKSQAKARRYKSARGSSAQKRANAKVLRARGPFPELETLNDEEIFGAIGRAVFIDPGKRNLLTAVGEHSKSKKNGAVVLRYSAPQRAAMLGTAMFTRRLTKRECQMDPQLPDVIASLSRLNRRAFSASAIASWVHSMYIHFDRLAKVYTDPFYRQVLLRKYSMQQVETARLVKEFAREFGPDAVLIFGTWTQTVIRKQPSTLRGSTLQETFSKAGFTVYSVDEYLTSSRCPFCLGKVIKAPNTVQVRRKDEFDHQVRPHGLLVCDSTTCKEACGGSARFMNRDVMAAMNFRIVFQKHVNDIESGTQRRRPAHLSRRRHDNLSQAHNEDHSDSEGNGDSDEEDGEEDEDEEE

SEQ ID NO: 3039 - protein, 968 aa, Tilletia controversa
MGILGGYNAFLHLLGCLGVRAPNEVLVDRLTRHSAEQLAELLGEGLFAILAERVGALGGLTDGSELRDDWVVLNVTGSHEDPDPAMHLFFKTEFVARLLQQTHGATPVTMSNSLEYTKKKDKKAHIVFKKDETVPRDDVYKSSTVLVPTGEAPGSLSRPPARRSEARYRKASHDRQTDPTGRTELRPRSSRSLNTPRDPEAGAEVARRSVGGCCFFGRDQASAQQSQSLMDVEPGQLERRENTGATAAHKAWLGPTLAGPRRKIRKTRFKIHQCVTTASSADHIASWLVAFVIEKEWRHPSIRQDVRSNISSFRSSMELLSHTKGTRNSTAIGFLFEEAMRFALSGEPRTTRGGQGSGPRRECQQLIALHGPTFKAIFDFPTSKIQLPTEVIVDIGEQWATAYQNQIQEHLFTTILHIVNVLTAAKDVRAGARFGSSQQKRAAQRRLKAIATYKKWLANDPDGAIRINDNAIRRTHNVLGPIIAAHGSPPSFIQHRSRRSQVNENPLIFLPLFLATLEVLAAEPMLKSARPRLSLPVRRSFIPKHIRLDAGALSTLSPSLQYDPSNNSNKSQDEREQERHSIFRYHFDLTKRPFASEDEDGNTRDVRWTLGSSIVTDGYAISVIKARSGAAPKGRAERSKSSRGDAAARRRQGQDASSFPDLTKMTDEEVLHTQGRAIFVDPGKQNIAFALPDKDDRRVTFRYTSAMRRRGLGTVILRRRLVQLERNLPPDLKTALKIYRENPLPSSRVFSEEGIAAWLRVLNTHFRSMTAIYSKPLFRTQRMLSYSRNQREWSRVIKTIVDKFGADAQVFLGNWGASNIKGSPPSPSRKSFQNELFKAGFDVYTIDEFRTSSYCPDCSEKVYKSKKTTHPNPALKKLGWIRQESPRGLLICTSETCRARCKGGDRYFDRDLLGAANMRLVYRTRIAAINGSSESARPPHLSRQRRNEDNEEAIASSDESSGSGSSTR

SEQ ID NO: 3040 - protein, 453 aa, Tilletia controversa
MTAEERASVDQNRQRLIELPHNFQREQVLKVAANARAAQTNLERGWTKSYRLDSADEDNKSVLFFTSDAIDKRGALFPRILKHIDSNLYVRDRMLAGPGERRRKRSDWVKLLTGASRSFSIHRTGRKWYLLLSHDAWTGPYTEEGKRQGLDKGWNSRNTAVFEPTKRAGNCIALDPGARDLLTGYDAQRQQFYTYLTGFNEHIERAHASIASAQSKLDKLKNETGPTVDTDTGRRRRRARRRVNKQRGGKKKKGRSSSAEQRAARKAAKKSHPHFVRPNERSILRAHERLRVHITQAQNCTVNALVSNYDLVVLPEFMTARMIKRRRRRQGMPYSNVPQREAAVQGDEANEEPAAKFVLAKRSRATLARFGHRQFRERLVAKAQADPNHQKDVIVTSEEYTTKQHPFQRGLHSKIGGNKTWHYCHLRGKRDNVGAFNILLRALTKDEVRLSSQ

SEQ ID NO: 3041 - protein, 310 aa, Tilletia controversa
MGRAVFIDPGKRNLLTAVGEHSKSKKHGAIVLRYSAAQRAASLETAMFKKRLTKRELRMDPSLSEVIASLSRLNSRAFSASAISAWLQSMASHFDRLANVYGDLFYRQVLLRKYSMQQIETTKLIKNFSQKFGSDAILIFGTWNQTSIRKQPSTLKASTLQKAFSKAGFTVYSVDEYLTSSCCPFCFGRVTSSSNTIQLRRKVGFDHLVRPHGLLVCNRKTCKDECGGSGRFMDRDVMAAMNFRLIFQHHANAIQAGTERGRPAHLSRSKHPSLSQAHDEVNPDFDEEDDEHGEEEEEEEEEEEEEEEEE

SEQ ID NO: 3042 - protein, 262 aa, Tilletia controversa
MRRRGLGTVILRRRLVQLEQNLPPDLKTALKIYRENPLPSSRVFSEEGIAAWLRVLNTHFRLMTAIYSKPLFRTQRMLSYSRNQREWSRVIKTIVDKFGADAQVFVGNWGASNVKGSPPSPSRKSFQNELFKAGFDVYTIDEFRTSSYCPDCSEKVYKSKKTTHPNPSLKKLGWIRQESPRGLLICTSETCRARCKGGDRYFDRDLLGAANMRLVYRTRIAAINGSSESARPPHLSRQRRNEDNEEVIASSDESSGSGSSTR

SEQ ID NO: 3043 - protein, 739 aa, Tilletia controversa
MDVEPGQLKRRENTGATAAHKAWLGPTLAGPRRKIRKTRFKIHQCVTTASSADHIASWLVAFVIEKEWRHPSIRQDVRSNISSFRSSMELLSHTKGTRNSTAIGFLFEEAMRFALSGESRTTRGGQGSGPRRECQQLIALHGPTFKAIFDFPTSKIQLPTEVIVDIGEQWATAYQNQIQEHLFNTILHIVNVFTAAKDVRAAARFGSSQQKRAAQRRLKAIATYKKWLANDPDGAIRINDNAIRRTHNVLGPIIAAHGSPLSFIQHRSRRSQVNEKPLIFLPLFLATLEVLAAEPMLKSARPRLSLPVRRSFIPKHIRLDAGALSTLSPSLQYDPRDNSNKSQDEREQERHSIFRYHFDLTKRPFASEDEDGNTRDVRWTLGSSIATDGYAISVIKARSGAAPKGRAERSKSSRGDAAARRRQGQDASSFPDLTKMTDEEVLHTQGRAIFVDPGKQNIAFALPDKDDRRVTFRYTSAMRRRGLGTAILRRRLVQLERNLPPDLKTALKIYRENPLPSSRVFSEEGIAAWLRVLNTHFRSMTAIYSKPLFRTQRMLSYSRNQREWSRVIKTIVDKFGADAQVFVGNWGASNIKGSPPSPSRKSFQNELFKAGFDVYTIDEFRTSSYCPDCSEKVYKSKKTTHPNPALKKLGWIRQESPRGLLICTSETCRARCKGGDRYFDRDLLGAANMRLVYRTRIAAINGSSESARPPHLSRQRRNEDNEEVIASSDESSGSGSSTR

SEQ ID NO: 3044 - protein, 846 aa, Tilletia controversa
MLNADHDDGDARHPSPAPPPRPPWLDPDLPPRLGPADYGHYQSNPAPPSPPPPTPQDLAPPPLPWLDPTLAERDRPPPPPGLELQPLQPPQPPTSSWESIARLPAKDKQDALIQALRSSQKDDWKAKVNNLLDFATSSLVEEVRVAILLAAAPIFAPWFTDESSRLSRRLWGITGESWTQESARLSDAFSAGKDREWATTVHQPRANREHSIISASSLRFSRQQLISRNDMGQNVSDAREGASFWECRTWATQRLWDAFVARGLNTSSLTKPKGSKRDTGKRKMEDGEGSSDSKKVRKLSYDADSKAAFERRAAKDKKRAPPKRKEPECLRALRLRLYPSAELGAKLREWESLAASLRQMVRARLQKAKDVGEKTDAFVLADQTCLSQTKWNKMTAEERASVDQNRQRLIELPHNFQRELVLKVAANARAAQTNLERGSTKSYRLDSADEDDKSVLFFTSEAIDKRGALFPRILKHIDSNLYVRDRMLAGPGERRRKRSDWVKLLTGASRSFSIHRTGRKWYLLLSHDAWTGPYTEEGKRQGLDKRWNSRNKAVFEPTKRAGNCIALDPGARDLLTGYDAQRQQFYTYLTGFNEHIERAHASIASAQSKLDKLKNETGPTVDTDTGRRRRRARRRVNKQRGGKKKKGRSSSAEQRAARKAAKKSHPHFVRPNERSILRAHERLRVHITQAQNCTVNALVSNYDLVVLPDFMTARMIKRRRRRQGMPYSNVPQREAAVQGDEANEEPAAKFVLAKRSRATLARFGHRQFRERLVAKAQADPNHQKDVLVTSEEYTTKQHPFQRGLHSKIGGSKTWHYCHLRGKRDNVGAFNILLRALTKDEVRLSSQ

SEQ ID NO: 3045 - protein, 249 aa, Chlamydomonas reinhardtii
MSGLERLQPNRPQLAPALQAYVGGIPTAATASAARFEERLRYLFASGAAGQAAGQAAGQEAGQVEAAGPAEAGPPGAVHVLWHYHFSAFRRKRWAAFIQRDRALHRVAKQLTGGRPKEEVVVGWGSWAFQGGKGGSPISVRGGRAPTGRLIKLLRERYAKHVFIIDEYKTSKTCYNCGCQEMAIKRLGGLKEGQRPWSVKVCNDCLTTWNRDVSAANVIRVLLLLKLMGFERPTKLQRPPWPPAAAGPG

SEQ ID NO: 3046 - protein, 205 aa, Chlamydomonas reinhardtii
MCVPALQWGGRAGGGAGGGGGAGGGGGAGPRGTVHVLWHYHFSAFCRKRWAAFIQRDHALHQVAKQLTGGRPKEEVVVGWGLWAFQGGKGGSPISVRGGRAPTGRLIKLLRERYTKHVFIINEYKTSKTCYNCGCQEMAIKRLGGLKEGQRPWSVKVCNDCLTTWNRDVSATNVIRVLLLLKLMGFERPTKLQRPPWPPPAVWPG

SEQ ID NO: 3047 - protein, 222 aa, Chlamydomonas reinhardtii
MRAEHELAAVKAETADFEAYRNYLRTYLSVLRPLLAHRTARGYRNMRFLRKVGRDKLVNTISRSIAPHKPDGSGMIAVGMGDWQGPGNTPIKRRTSGPLELVRLHLKHRKDVVLVPVKEPGSSCLCHNCHNRLTNMRANTTRYNKEGEKVTKMSKVHKVLYCRAPATKAGNNLKNSDSGKPRCGTTWNRDVNAAKNMLMLLMCILQGEPRPKAFRLAHAKNG

SEQ ID NO: 3048 - protein, 290 aa, Chlamydomonas reinhardtii
MLWVRVSNVCCGRSFPHACALNCQLPLARLSTSANCTCASLQSAALQRRRPTAATASAARFEERLRYLFASGAAGQAAGQAAGQAAGQAAGQAAGQAAGQAAGQVEAAGPAEAGPRGAVHVLWHYHFSAFRRKRWAAFIQRDRALHRVAKQLTGGRPKEEVVVGWGSWAFQGGKGGSPISVRGGRAPTGRLIKLLRERYAKHVFIIDEYKTSKTCYNCGCQEMAIKRLGGLKEGQRPWSVKVCNDCLTTWNRDVSAANVIRVLLLLKLMGFERPTKLQRPPWPPAEAGPG

SEQ ID NO: 3049 - protein, 225 aa, Chlamydomonas reinhardtii
MAPKRRRDEAEKAEEEKGQAAGQAAGQAAGQAAGQAAGQAEAAGPAEAGPRGAVHVLWHYHFSAFRRKRWAAFIQRDRALHRVAKQLTGGRPKEEVVVGWGSWAFQGGKGGSPISVRGGRAPTGRLIKLLRERYAKHVFIIDEYKTSKTCYNCGCQEMAIKRLGGLKEGQRPWSVKVCNDCLTTWNRDVSAANVIRVLLLLKLMGFERPTKLQRPPWPPPAAGPG

SEQ ID NO: 3050 - protein, 329 aa, Chlamydomonas reinhardtii
MARLLGLPSPHCSDGGSGGGDDNNGGNSGGSSDSSGGVGGGRNGGGGARGAGGGRARGRWLWQQARLEEQPALKRCQAGIPSARVASAADHELRIRYLYSGGRVDAAAAAGSAPAPVQQYGLWPLRRFYRQWGQRLWRLTVHARTQKVLEHTARPKEEVIIGWGNATTGHGGCISRLGRGPNRALLRLLVDKYAHLVVYLDEFYTSRDIGRDVNSATNILHALVEMLLGHKRPSSLQTGGGGGRLVAAAAAAAAAAAAAAAAAAAAAAAAAAAAAAAAAAAAAAAQRQRRWRRRQQRGRVRASCSGGGGKGHVEEESAAPPKKRRKRAG

SEQ ID NO: 3051 - protein, 937 aa, Chlamydomonas reinhardtii
MAPKRRRDEAEKAEEEKDHTTSTKCGLAGLLPEKIEADGEAVTREESLAAFDFLVAALTRLRFEALCLLGLVAVRMCEDARREGQGLQPHCATCRRLRKTELVEDDMYAAICAVSVCDLTEQGRKRGRPSKRDQHPEDDLFRHVCEEHFPRDEEAAGARVNRSGLTPFLPPLSKGVFTNVKNHYAANFAAWLARSFRCRIDDELRELRTPATKKLDKLAWSMAHAVLYDGELEQPRWWVGWAQGAAAQAAGAAAAAAAHGAGPAGGAAAAQAAGAAAAAAAHGAGPAGGAAAAQAAGAAAAAAAHGAGPAGGAAAAQAWTALVDYVNAQRASKRAAELLLREVKGTQATYKKASTRHMEWAAEILAGLEARRDQLGAQVQQLTQAQPLTREDTQRLASLRRELHRARPFTLTPSPSFAPIYVPLDNTSMARLPGLLPTLARRHGEVFAGAGAGAVAPSSFVQAAFGGGGMQSSATLNAVGWGLFQLGGVTSRNAPFANYITTDGVACSVAREAHNKPLANLKPATAPADAGELCTLEEMKATQIIGVDPCGGRNWFMAARSPLYQPGPWAWEGVGPAQRYLLELHDKQLDEELFPGQLPPEPRRRRKGGGRKGGGRTGGHRRKQSKHWQPRARTARRRRQKRGRFHMSMGHWRHMSGLERLQPNRPQLAPALQAYIGGIPTAATASAARFEERLRYLFASGVAGQAAGQAAGQAAGQAAGQAAGQAAGQAAGQAAGQAAGQAAGQAAGQAAGQAAGQAEAGPRGAVHVLWHYHFSAFRRKRWAAFIQRDRALHRVAKQLTGGRPKEEVVVGWGSWAFQGGKGGSPISVRGGRAPTGRLIKLLRERYAKHVFIIDEYKTSKTCYNCGCQEMAIKRLGGLKEGQRPWSVKVCNDCLTTWNRDVSAANVIRVLLLLKLMGFERPIKLQRPPWPPAAAGPG

SEQ ID NO: 3052 - protein, 746 aa, Chlamydomonas reinhardtii
MCDLTEQGRKRGWPSKRDQHPEDDLFRHVCEEHFPRDEEAAGARVNRSGLTPFLPPLSKGMFTNVNNHYGANFAAWLARSFRCRIDDELRELRTPATEKLDKLAWSMAHAVLYDGELEQPRWWVGWAQGAAAQAAGGAAAAAAQGAGPAGGAAAAQAAGAAAAAAAQGAGPAGGAAAAQAWTALVDYVNAQRASKRAAELLLREVKGAQATYKKASTRHMEWAAEILAGLEARRDQLGAQVQQLTQAQPLTREDTQRLASLRRELHRARPFTLTPSPSFAPIYVPLDNTSMARLPGLLPTLARRHGEVFAGAGAGAVAPSSFVQAAFGGGGMQSSATLNAVGWGLFQLGGVTSRNAPFANYITTDGVACSVAREAHNKPLANLKPATAPADAEELCTLEEMKATQIIGVDPCGGGNWFMAARSPLYQPGPWAWEGVREGVSPAQRSLLELHDKQLDEELFPGQLPPEPRRRRKGVRREGGGRKGGGRKGGHRRKQSKHWQPRAYIGGIPMAATASAARFEERLRYLFASGAAGQAAGQEAGQAAGQAEAAGQAAGQAEAAGPAEAGPRGAVHVLWHYHFSAFRRKRWAAFIQRDRALHRVAKQLTGGRPKEQVVVGWGSWAFQGGKGGSPISVRGGRALTGRLIKLLRERYAKHVFIVDEYKTSKTCYNCGCQEMAIKRLGGLKEGQRPWSVKVCNDCLTTWNRDVSAANVIRAWAPPAEADGLRAADQAAAAAMAAGNGGAGLRA

SEQ ID NO: 3053 - protein, 917 aa, Chlamydomonas reinhardtii
MAPKRRRDEAEKAEDEKDHTTSTKCGLAGLLSEKIEADGVAVTREESLAAVDFLVAALTRLRFEALCLLGLVAVRMCEDARREGQGLQPHCATCRRLRKTELVEDDTTRHAAICAVSVCDLTEQGRKRGRPSKRDQHPEDDLFRHVCEEHFPRDEEAAGARVNRSGLTPFLPPLSKGVFTNVKNHYAANFAAWLARSFRCRIDDELREVGQAEVGQAEVGQAELRTPATKKLDKLAWSMAHAVLYDGELEQPRWWVGWAQGAAAQAAGAAAAAAAQGAGPAGGAAAAQAAGAAAAAAAHGAGPAGGAAAAQAWTALVDYVNAQRASKRAAELLLREVKGTQATYKKASTRHMEWAAEILAGLEARRDQLGAQVQQLTQAQPLTREDTQRLASLRRELHRARPFTLTPSPSFAPIYVPLDNTSMARLPGLLPTLARRHGEVFAGAGAGAVAPSSFVQAAFGGGGMQSSATLNAVGWGLFQLGGVTSRNAPFANYITTDGVACSVAREAHNKPLANLKPATAPADAGELCTLEEMKATQIIGVDPCGGGNWFMAARSPLYQPGPWAWEGVGEGVGPAQRYLLELHDKQLDEELFPGQLPPEPRRRRKGVRRKGGGRKGGHRRKQSKHWQPRARTARRRRQKRGRFHMSMGHWRHMSGLERLQPNRPQLAPALQAYIGGIPTAATASAARFEERLRYLFASGAAGQAAGQAAGQAAGQAAGQAAGQAAGQAEAGQAEAGQAEAGPRGAVHVLWHYHFSAFRRKRWAAFIQRDRALHRVAKQLTGGRPKEEVVVGWGSWAFQGGKGGSPISVRGGRAPTGRLIKLLRKRYAKHVFIIDEYKTSKTCYNCGCQEMAIKRLGGLKEGQRPWSVKVCNDCLTTWNRDVSAANVIRVLLLLKLMGFERPTKLQRPPWPPAAAGPG

SEQ ID NO: 3054 - protein, 488 aa, Chlamydomonas reinhardtii
MARLPGLLPTLARRHGEVFAGAGAGAVAPSSFVQAAFGGGGMQSSATLNAVGWGLFQLGGVTSRNAPFANYITTDGVACSVAREAHNKPLATATAPADAEELCTLEEMKATQIIGVDPCGGGNWFMAARSPPYQPGPWAWEGVREGVREGVSPAQRSLLELHDKQLDEELFPGQLPPEPRRRRKGGGRKGGGRKGGHRRKQSKHWQPRARTARRRRQKRGRFHMSMGHWRHMSGLERLQPNRPQLAPALQAYVGGIPTAATASAARFEERLRYLFVSGAAGQAAGQEAGQAAGQEAGQAAGQAEAAGPAEAGPRGAVHVLWHYHFSAFRRKRWAAFIQRDRALHRVAKQLTGGRPKEEVVVGWGSWAFQGGKGGSPISVRGGRAPTGRLIKLLRERYAKHVFIIDEYKTSKTCYNCGCQEMAIKRLGGLKEGQRPWSVKVCNDCLTTWNRDVSAANVIRVLLLLKLMGFERPTKLQRPPWPPPAAGPG

SEQ ID NO: 3055 - protein, 213 aa, Chlamydomonas reinhardtii
MPRVQVLEHTAQQLAGGRPKEEVIVGWGNANTGYGGCISRLGRGPNRALPRLLVDKYAHLVVYMDEFYTSQVCAKCGRRLLGDGQRCLQAVVPWGGGSRAHQVQECTHCGTVWGRDVKSATNIRHALVEMLLGHKRPASLQTGGGGGGSGGGGGGGSGSSGGGGGGGGGGGGGGGGGGSSGGACAHLGSGRGGKGHVEEESAAPPKKRRKRAG

SEQ ID NO: 3056 - protein, 226 aa, Chlamydomonas reinhardtii
MAGQAAGQAAGQAAGQAAGQEAGQEAGQAAGQEAGQAAGQAEAAGPAEAGPRGAVHVLWHYHFSAFRRKRWAAFIQRDRALHRVAKQLTGGRPKEEVVVGWGSWAFQGGKGGSPISVRGGRAPTGRLIKLLRERYAKHVFIIDEYKTSKTCYNCGCQEMAIKRLGGLKEGQRPWSVKVCNDCLTTWNRDVSAAKVIRVLLLLKLMGFERPTKLQRPPWPPPAAGPG

SEQ ID NO: 3057 - protein, 916 aa, Chlamydomonas reinhardtii
MAPKRRREAEKAEEEKDDTTSTKCGLAGLLSEKIEADGVAVTREESLAAVDFLVAALTRLRFEALCLLGLVAVRMCEDARREGQGLQPHCATCRRLRKTELVEDDMYAAICAVSVCDLTEQGRKRGRPSKRDQHPEDDLFRHVCEEHFPRDEEAAGARVNRSGLTPFLPPLSKGVFTNVKNHYAANFAAWLARSFRCRIDDELRELRTPATKKLDKLAWSMAHAVLYDGELEQPRWWVGWAQGAAAQAAGAAAAAAAHGAGPAGGAAAAQAAGAAAAAAAHGAGPAGGAAAAQAAGAAAAAAAQGAGPAGGAAAAQAWTALVDYVNAQRASKRAAELLLREVKGTQATYKKASTRHMEWAAEILAGLEARRDQLGAQVQQLTQAQPLTREDTQRLASLRRELHRARPFTLTPSPSFAPIYVPLDNTSMARLPGLLPTLARRHGEVFAGAGAGAVAPSSFVQAAFGGGGMQSSATLNAVGWGLFQLGGVTSRNAPFANYITTDGVACSVAREAHNKPLANLKPATAPADAGELCTLEEMKATQIIGVDPCGGGNWFMAARSPLYQPGPWAWEGVGEGVGPAQRYLLELHDKQLDEELFPGQLPPEPRRRRKGVRRKGGGRKGGHRRKQSKHWQPRARTARRRRQKRGRFLMSMGHWRHMSGLERLQPNRPQLAPALQAYIGGIPTAATASAARFEERLRYLFASGAAGQAAGQAAGQAAGQAAGQAAGQAAGQAAGQAEAGPRGAVHVLWHYHFSAFRRKRWAAFIQRDRALHRVAKQLTGGRPKEEVVVGWGSWAFQGGKGGSPISVRGGRAPTGRLIKLLRERYAKHVFIIDEYKTSKTCYNCGCQEMAIKRLGGLKEGQRPWSVKVCNDCLTTWNRDVSAANVIRVLLLLKLMGFERPTKLQRPPWPPPAAGPG

SEQ ID NO: 3058 - protein, 257 aa, Chlamydomonas reinhardtii
MSGLERLQPNRPQLAPALQAYVGGIPTAATASAARFEERLRYLFASGAAGQEAGQAAGQEAGQAAGQAEAAGQAEAGPRGAVHVLWHYHFSAFRRKRWAAFIQRDRALHRVAKQLTGGRPKEEVVVGWGSWAFQGGKGGSPISVRGGRAPTGRLIKLLRERYAKHVFIIDEYKTSKVDLLQLRVSGDGHQAAWGAEGGAAALVGQSLQRLLDDLEPRLSAANVIRVLLLLKLMGFERPTKLQRPPWPPQCSYLPSTL

SEQ ID NO: 3059 - protein, 645 aa, Chlamydomonas reinhardtii
MVETRAQAQGKPLKKPGAYNTDAYYQEKDEGYGDVGVDQEPDAGAIDNPSDPDFKVSAAEVAGATEEATRDPEGLDMSQLKEEVADLQRPADTGVEELDARGEPVPIVEAGAPGGGPSIEEQRASKRAAELLLREVKGTQATYKKASTRHMEWAAEILAGLEARRDQLGAQVQQLTQAQPLTREDTQRLASLRRELHRARPFTLTPSPSFAPIYVPLDNTSMARLPGLLPTLARRHGEVFAGAGAGAVAPSSFVQAAFGGGGMQSSATLNAVGWGLFQLGGVTSRNAPFANYITTDGVACSVAREAHNKPLANLKPATAPADAGELCTLEEMKATQIIGVDPCGGGNWFMAARSPLYQPGPWAWEGVGEGVGPAQRYLLELHDKQLDEELFPGQLPPEPRRRRKGGGRKGGGRTGGHRRKQSKHWQPRARTARRRRQKRGRFHMSMGHWRHMSGLERLQPNRPQLAPALQAYIGGIPTAATASAARFEERLRYLFASGAAGQAAGQAAGQAAGQAAGQAAGQAAGQGGKGGSPISVRGGRAPTGRLIKLLRERYAKHVFIIDEYKTSKTCYNCGCQEMAIKRLGGLKEGQRPWSVKVCNDCLTTWNRDVSAANVIRVLLLLKLMGFERPIKLQRPPWPPAAAGPG

SEQ ID NO: 3060 - protein, 366 aa, Chlamydomonas reinhardtii
MAAAAAAAAATAATASAGAETEVAAQGWRGTRQHTHQRAATERRRQQRACFTRLSGAGYRHYTGQTGRRLWLQARLKEQPALKRCQAGIPSARVASAADHELRIRYLYSGGGVDAAAAAGSAPAPVQQYGLWHLLRFYRQWGQRRWRLTVHVRTQKVLEHKTQQLAGGRPKEEVIVGWGNANTGYGGCISRSGRGPNRALLRLLVDKYAHLVVYVDEFYTSQVCAKCGRRLLGDGQRCLQAVVPWGAYVLTKSKCATTAGRCGDVTSTPQPTSGTRWWRCCWGTSDLHRCRLAAAAAVAAAAAAAAAAGVRAHILVAEGAGKATWRRRAQRRPRSGASAQAEEPAGVQVAVRGGAGRACVAACVAA

SEQ ID NO: 3061 - protein, 328 aa, Chlamydomonas reinhardtii
MRRWVAALLPEELVDRLLQSGAITILERDMDGDLVEFVRVEGPADRLQRQRQQYRANRKQQKGRKRRQWRQHGSRWKHAPGRRRRPNGRQQAATRARRKQRSRFYSCSGAGHRQQCGYNDRRRWQEWQLNANLALTTWQSNIPSTRVLTVQEHDLRLRWLFTGPGAAPPGPGPGGGGGGGGGGGGLPLPPPLPQGLRLRVVDILVHYFNPQQRKKRLEVYIRKQRVMHREARNLTGGRPKQQVLVGWGNGSAGWNSRISRKGQPPRKEFVRLLRDHYAAHVVIVNEFRTSRVCFKCGHMALQARLKPGMRRAHGVQVCNHCGTGGTAM

SEQ ID NO: 3062 - protein, 1123 aa, Chlamydomonas reinhardtii
MTSPNIHFQFLLIPSSDTHGRPAIGEKFHFEQARAAQERFDWGRGPRLPPRRVLEACGEAPLSRDCSQGTIKTTFKSIADPPGLEQLLHAQHPTAAAADVQRLASQHRDSAVLLQKALQVLVWVMTAVRQEAFDLLLLVVALCAEDTRLQAAGQPPNPERFRGQSSIAEGFRRQRQRACGSDQPHHVTNDAAQRALRGFPDLNQRVMEDCITAVTTSEHHQEVQHSDQRAGRDPHSHNLAQYVYGHVFQVHRSEDRVGPPRSVTGLTSVVHQLARQMETNVGVHLATNLFRWLKTRCRVQLHRTLHPEAAAAAPDAGAGGGGGGGGAYGGDGMGVDQAAAAAPDAGAGGGAGVELPRQQQTIVLALAAAIARDEPLCAYPDAAAALQSQPDVLQELELWVQQEQDRWRPRGLLVPGCSFKRHSLPHGERYLAWAAEVLHEIEQHRSQLRARGVPEAEVARHFPVFGLLPEPSYQQVHIGLGQEAVKELLVHRDHFASEHHLIPPAAVPTGLRRAARSGGQRQRRRRGRGGSGGGSTAAGSGGSAAGSGGSGGGAAGSGGSGGGAAGSGGGSGGGGADQPLRWGPKGGKFRNIPACFKEWVADHGLDPGDVWAAAGLRLGISQHEHRGSKFDGFVTTDAFDMCLTMRRRYHSSWDEAKEAGKQVRVSEEELLRLSLRGVDPGCSPIYWTCAMRWPWLPAWVVALLGVDLVLRLPEVRNGSCPVRWPDDLTKDQQAAAEAQLAAHLTASKAAAARDTIVTRTQAADRATAAASTAAARWAKEVQAAPQQGRPELVPPRPLALMVAQSAEHSKAAAVAAADAAAREAADAANGVAREATMSALVQGFRRYVEVMAAAHCAMLQLHRCLQQQQQQQQLAARVWDIAFTHCSGAEHRTNCGYAQHQRWQQWRVKADPALCAWQSSLPTARTVDVQNVLGRLDYKYGGSTGAGGQQGEAVVRELGFVDLLARYAAPAWRQKRLQVYCQKQRVLCREAVRLMGGEPEVTQQNGVVGWGGGSAGFHGTVSRADQPPRKGFVRLLRERFARHVIMINEYRTSMVCANCGRLSLRRKEPPQGGADFRVLVCNDCHTTWDRDENAALNMRLLLVLQLLGRDRPAVFCRPEGGVD

SEQ ID NO: 3063 - protein, 508 aa, Chlamydomonas reinhardtii
MQSSATLNAVGWGLFQLGGVTSRNAPFANYITTDGVACSVAREAHNKPLANLKPATAPADAGELCTLEEMKATQIIGVDPCGGGNWFMAARSPLYQPGPWAWEGVGEGVGPAQRYLLELHDKQLDEELFPGQLPPEPRRRRKGGGRKGGGRTGGHRRKQSKHWQPRARTARRRRQKRGRFHMSMGHWRHMSGLERLQPNRPQLAPALQAYIGGIPTAATASAARFEERLRYLFASGAAGQAAGQAAGQAAGQAAGQAAGQAAGQAAGQAAGQAAGQAAGQAAGQAAGQAAGQAAGQAAGQAAGQAAGQAAGQAAGQAAGQAAGQAAGQAEAGPRGAVHVLWHYHFSAFRRKRWAAFIQRDRALHRVAKQLTGGRPKEEVVVGWGSWAFQGGKGGSPISVRGGRAPTGRLIKLLRERYAKHVFIIDEYKTSKTCYNCGCQEMAIKRLGGLKEGQRPWSVKVCNDCLTTWNRDVSAANVIRVLLLLKLMGFERPIKLQRPPWPPAAAGPG

SEQ ID NO: 3064 - protein, 257 aa, Chlamydomonas reinhardtii
MSGLERLQPNRPQLAPALQACVGGIPTAATASAARFEERLRYLFVSGAAGQAAGQEVGQAAGQEAGQAAGQAEAAGPAEAGSRGAVHVLWHYHFSAFRRKRWAAFIQRDRALHRVAKQLTGGRPKEEVVVGWGSWAFQGGKGGSPISVRGGRAPTGRLIKLLRERYAKHVFIIDEYKTSKTCYNCGCQEMAIKRLGGLKEGQSPWSVKVCNDCLTTWNRDVSAANVIRVLLLLKLMGFERPTKLQRPPWPPPAAGPG

SEQ ID NO: 3065 - protein, 253 aa, Chlamydomonas reinhardtii
MSGLERLQPNRPQLAPALQAYIGGIPTAATASAARFEERLRYLFASGAAGQAAGQAAGQAAGQAARQAEAAGPAEPGPRGAVHVLWHYHFSAFRRKRWAAFIQRDCALHRVAKQLTGGRPKEEVVVGWGSWAFQGGKGGSPISVRGGRAPTGRLIKLLRERYAKHVFIIDEYKTSKTCYNCGCQEMAIKRLGGLKEGQRPWSVKVCNDCLTTWNRDVSAANVIRVLLLLKLMGFERPTKLQRPPWPPPAAGPG

SEQ ID NO: 3066 - protein, 574 aa, Chlamydomonas reinhardtii
MDGDLVEFVRVEGPADRLQRQLQQYRADRKQQKQRKRRQWRQHGSRWKHAPGGRRRPNGRQQAATRARRKQRSRFYSCSGAGHRQQCGYNDRRRWQEWQLNANPALATWQSNISSARVLAVQEHDLRLRWLFTGPGAAPPGPGPGGGGGGGGGGAYGGGLPLPPPLPQGPRLGVVDILVHYFNPQQRKKRLEVYIRKQRVMHREARNLTGGRPKQQVVVGWGNGRAGWNSLISRKGQPPRKEFVRLLCDHYAAHIVIVNEFRMSRVCFECGQMALQARLKPGMRRAHGVQVCNHCGTTWKRDVNSACNMLLLLVLQLLHGDDGWPKVFGGRPHADADADGGDQQQQQQQQQQQQRAMTRTAHPLRRRLWVSEKRMAQEGYDADGTSIAATAMGEKRMAQEGYDADGKSIAATAMGEKRMAQEGYDADGTSIAATAMGEKRMAQEGYDADGTSIAATAMGEKRMAQEGYDADGKSIAATAMGAAVMAVDGYDEAGKSIAARSAGVARAEKAGMFIWAPVWPKLHEWVKAHPSSTVDWTAAEKHLRREFPDIPVGAFERGGAGRTKYSKWKRLYDP

SEQ ID NO: 3067 - protein, 320 aa, Chlamydomonas reinhardtii
MAAAAAAAAATAATASAGAETEVAAQGGREVEGQETGRRLWLQARLKEQPALKRCQAGIPSARVASAADHELRIRYLYGGGVDAAAAAGSAPAPVQQYGLWHLLRFYRQWGQRRWRLTVHVRTQKVLEHTAQQLAGGRPKEEVIGGWGNANTGYGGCISRLGRGPNRALLRLLVDKYAHLVVYVDEFYTSQVCAKCGRRLLGNGQRCLQAVVPWGGLRAHQVQVCNHCGTVWGRDVNSATNIRHALVEMLLGHKRPASLQTGGGGGGGSGGGGSGGGGSGGGGSGSSGGACAQLGSGGGGKGHVEEESAAPPKKRRKRAG

SEQ ID NO: 3068 - protein, 200 aa, Chlamydomonas reinhardtii
MAGTKAGTVLERTVQQLAGGRPKEEVIVGWSNADTGHGGCVSRSGRGPNRALLRLLVDKHAHLVVYVDEYYTSQVCAKCGQRCLQVVIPFGGSCARDVQVCQHCGTVWGREANSATNMRHALMEMLLGRARPAALRRGGGGGSHGGGGGPGPTSSSSGSSSSSSGGGSSSGTGPGGSGPGPSSCGVRVRSGGGEQGHVEE

SEQ ID NO: 3069 - protein, 279 aa, Chlamydomonas reinhardtii
MRWQAGIPSARVGSAAEHELRIRYLYSGGGVDAAAATGSAAAAAAGSAAAAAGSAAADIHQCGLWHLLRHYRQWGQRRWRQTVHVRTQKVLEHTAQQLAGNRPKGAVIVGWGNANTGHGGSISRPGRGPNRALLLLLVDKYAHLVVYVDEYYTSQVCAGRRLLDNGQRCLQEIVPCGGSRAHHQVQVCNHCGTVWGRDVNSATNIRHALVEMLLGNVRPAPLQPGGGGGGGGGGGGPAAAQQRHSDSGACAHVGSGGGGKGHVEEESAASPKKRRKRAG

SEQ ID NO: 3070 - protein, 606 aa, Chlamydomonas reinhardtii
MILRHEAWTALVDYVNAQRASKRAAELLLREVKGTQATYKKASTRHMEWAAKILAGLEARRDQLGAQVQQLTQAQPLTREDTQRLASLRRELHRARPFTLTPSPSFAPIYVPLDNTSMARLPGLLPTLARRHGEVFAGAGAGAVAPSSFVQAAFGGGGMQSSATLNAVGWGLFQLGGVTSRNAPFANYITTDGVACSVAREAHNKPLANLKPATAPADAEELCTLEEMKATQIIGVDPCGGGNWFMAARSPLYQPGPWAWEGVREGVSPAQRSLLELHDKQLDEELFPGQLPPEPRRRRKGGGRKGGGRKGGHRRKQSKHWQPRARTARRRRQKRGRFHMSMGHWRHMSGLERLQPNRPQLAPALQAYVGGIPTAATASAARFEERLRYLFVSRAAGQAAGQEAGQAAGQAAGQAAGQAAGQAAGQAEAGPRGAVHVLWHYHFSAFRRKRWAAFIQRDRALHRVAKQLTGGRPKEEVVVGWGSWAFQGGKGGSPISVRGGRAPTGRLIKLLRERYAKHVFIIDEYKTSKTCYNCGCQEMAIKRLGGLKEGQRPWSVKVCNDCLTTWNRDVSAANVIRVLLLLKLMGFERPIKLQRPPWPPAAAGPG

SEQ ID NO: 3071 - protein, 293 aa, Chlamydomonas reinhardtii
MVSSSDSTLTPSVHTHTAPSHHGLSHPRASAARFEERLRYLFASGAAGQAAGQAAGQAAGQAAGQAAGQAAGQAAGQAAGQAAGQAAGQAAGQAAGQAAGQAAGQAAGQAAGQAEAGPRGAVHVLWHYHFSAFRRKRWAAFIQRDRALHRVAKQLTGGRPKEEVVVGWGSWAFQGGKGGSPISVRGGRAPTGRLIKLLRERYAKHVFIIDEYKTSKTCYNCGCQEMAIKRLGGLKEGQRPWSVKVCNDCLTTWNRDVSAANVIRVLLLLKLMGFERPIKLQRPPWPPAAAGPG

SEQ ID NO: 3072 - protein, 762 aa, Chlamydomonas reinhardtii
MASPTASRTTMHSHSRNAPTASLRRPPPCSDAASHTHARSTASSHLRACRLAPTTRVHHPDQLRTPATEKLDKLAWSMAHAVLYDGELEQPRWWVGWAQGAAAQAAGAAAAAAAQGAGPAGGAAAAQAAGAAAAAAAQGAGPAGGAAAAQAAGAAAAAAAQGAGPAGGAAAAQAWTALVDYVNTQRASKRAAELLLREVKGAQATYKKASTRHMEWAAEILAGLEARRDQLGAQVQQLTQAQPLTREDTQRLASLRRELHRARPFTLTPSPSFAPIYVPLDNTSMARLPGLLPTLARRHGEVFAGAGAGAVAPSSFVQAAFGGGGMQSSATLNAVGWGLFQLGGVTSRNAPFANYITTDGVACSVAREAHNKPLANLKPATAPADAEELCTLEEMKATQIIGVDPCGGGNWFMAARSPLYQPGPWAWEGVSPAQRSLIELHDKQLDEELFPGQLPPEPRRRRKGGGRKGGHRRKQSKHWQPRARTARRRRQKRGRFHMSMGHWRHMSGLERLQPNRPQLAPALQAYVGGIPTAATASAARFEERLRYLFVSGAAGQAAGQEAGQAAGQEAGQEAGQAKAAGPAEAGSRGAVHVLWHYHFSAFRRKRWAAFIQRDRALHRVAKQLTGGRPKEEVVVGWGSWAFQGGKGGSPISVRGGRAPTGRLIKLLRERYAKHVFIINEYKTSKTCYNCGCQEMAIKRLGGLKEGQRPWSVKVCNDCLTTWNRDVSAANVIRVLLLLKLMGFERPTKLQRPPWPPPAAGPG

SEQ ID NO: 3073 - protein, 287 aa, Chlamydomonas reinhardtii
MSGLERLQPNRPQLAPALQAYIGGIPTAATASAARFEERLRYLFASGAAGQAAGQAVGQAAGQAAGQAAGQAAGQAAGQAAGQAAGQAAGQAAGQAAGQAAGQAAGQAEAGPRGAVHVLWHYHFSAFRRKRWAAFIQRDRALHRVAKQLTGGRPKEEVVVGWGSWAFQGGKGGSPISVRGGRAPTGRLIKLLRERYAKHVFIIDEYKTSKTCYNCGCQEMAIKRLGGLKEGQRPWSVKVCNDCLTTWNRDVSAANVIRVLLLLKLMGFERPTKLQRPPWPPAAAGPG

SEQ ID NO: 3074 - protein, 243 aa, Chlamydomonas reinhardtii
MARLLGLPSPHCSDGGDGNSGDGSGSSGGSGDSSDGVGGGRNGGGGARRAGGGRARGQTGRRLWLQARLKEQPALKRCQWGQRRWRLTVHVRTQKVLEHTAQQLAGGRPKEEVIVGWGNANTGYGGCISRLGRGPNRALLRLLVDKYAHLVVYVDEFYTSQGRDVNSATNIRHALVEMLLGHKRPASLQTGGGGGGGSGGGGSGGGGSGGGGSGGGGMTSSAAVENCAVPGCGWLCCGIATTR

SEQ ID NO: 3075 - protein, 1353 aa, Chlamydomonas reinhardtii
MVRGKPAGAVKAPVLEAGLRGYCDSLERDNALQQFRVPQRTPLLQLLGWALRHGVLTGDEVAASTPLACQTRPCYLQPLLQHLPATLEPALERYVVASSLAGHRGSVILGIGANTAIGARSPSALAPSMRRRRAAASRHSTASTPATATVASLSDGDVLRDLQLAAAAAVFSGVPEWARPKPALPSARRQAAAGSGGGGGSGVGGAGGGGGGDGGGRGRSRSSSSGLGSIGNDSWSSSSSRFCVDPAWASLPQRHPEQQLVAAAGQAVAASGGHAVVASVAVGGAVDISIDAVTDALRQAASATSRRRYPAWHASLPTGHAAAASGLLARPRWLAGAGATTRPAAVAELRASTASAGQRAIAATRAQPRLAAAVTSAASSCSEAAAASMASASNNDVAAFCLENERTDASSTQLWELLNTQKLLKQAFLPEYYPSPRGTPLHPLLATVMTGPFTDVLPPAPDWQGVFKTPGCWHKPLDQLASKYLANVKVHVQARVRKRVEQHVRAMELQPDTPRGTKGLLIASVLGRPRPLIAHNQDYSQVMDFRTAMGAVGTEPPPKDPKYSHDLFLLHLHLARYGPKERSYLPVVKLGRRFCYVDGRVAAGLTGVSYECVESNSGGGGGGGTPRRGRRGGRRRGQAASGDAAAATIAVQLALAGLPGRQLPDAAPSGTPAAGAAGGPGLPLHAAAVAAAEQSQAQARAVAAARKIICEAAPAAAAAASSQDTEPSSNRHRSLAELWGLTPGQLAAKGKAERRRKRQLLRRAARAATKEEQPELRRHERQLGRRAVHRTVQILSMETDGLSARLTITRPQDVRPHIQPLPLSSGTIADAATTAAHPAAYRSSSSAAAGRVAASPSSATAAAAAAAAAGRVAASPSSATAAAAVAAAAGRVAASPSSTTAVAAAAAAAGRVAVSPSSRPAFAGIDEGCVKLLVVAYSHDGKTPPHVIVVTRSWYYHEMRYRELTAYGKDWRRQQRSGILVAHQALSASGGLYNCDPAKWRAYLAVQRQYWPALLQESVISKQFAQRRMLLLSNKRSAQDRAANRVMRALTHGLPKERPLVIGVGSASFSPTAGGGALAAPNTAMREALSRVAQRERQATGRSVKIVPVWEHRTTLCCSTCGAETQGAWVRRNGVLSRSGRIRHCMECGTSRDRDVQGARNMLRIVEDEYDGRGRPLYLCRQEHLPKPPPMAPAVPRCILPQLPDGLIEALDGRPRGTVAVIDALSALQAEGDVAAQRAAQAVAAAMDQQVEASGGNSLVGEPQLQAIDVRLAAGPPAEVMDAASGRPRGTVAVIDALSALQAEGDVAAQRAAQAVAAAMEQQVAEASGGNSLVGEPQLQAIDARLHRDSVLS

SEQ ID NO: 3076 - protein, 219 aa, Chlamydomonas reinhardtii
MSGLERLQPNRPQLSPALQAYVGGIPTAATASAARFEERLRYLFASGAAGQAAGQEAGQAEAAGPAEAGPRGAVHVLWHYHFSAFRRKRWAAFIQRDRALHRVAKQLTGGRPKEEVVVGGGRAPTGRLIKLLRERYAKHVFIIDEYKTSKEMAIKRLGGLKEGQRPWSVKVCNDCLTTWNRDVSAANVIRVLLLLKLMGFERPTKLQRPPWPPAAAGPG

SEQ ID NO: 3077 - protein, 411 aa, Chlamydomonas reinhardtii
MKATQIIGVDPCGGGNWFMAARSPLYQPGPWAWEGVGEGVGPAQRYLLELHDKQLDEELFPGQLPPEPRRRRKGGGRKGGGRTGGHRRKQSKHWQPRARTARRRRQKRGRFHMSMGHWRHMSGLERLQPNRPQLAPALQAYIGGIPTAATASAARFEERLRYLFASGAAGQAAGQAAGQAAGQAAGQAAGQAAGQAAGQAAGQAAGQAAGQAAGQAAGQAAGQAAGQAAGQAEAGPRGAVHVLWHYHFSAFRRKRWAAFIQRDRALHRVAKQLTGGRPKEEVVVGWGSWAFQGGKGGSPISVRGGRAPTGRLIKLLRERYAKHVFIIDEYKTSKTCYNCGCQEMAIKRLGGLKEGQRPWSVKVCNDCLTTWNRDVSAANVIRVLLLLKLMGFERPIKLQRPPWPPAAAGPG

SEQ ID NO: 3078 - protein, 870 aa, Chlamydomonas reinhardtii
MCEDARREGQGLQPHCATCCRLRKTELVEDDMYAAICAVSVCDLTEQGRKRGRPSKRDQHPEDDLFRHVYEEHFPRDEEAAGARVNRSGLTPFLPPLSKGMFTNVNNHYGANFAAWLARSFRCRIDNELRELRTPATEKLDKLAWSMAHAVLNDGELEQPRCWAGWAQGAAAQVAGAAAAAAAQGAGPAGVAAAAQAAGAAAAAAAQGAGPAGGAAAAQVAGAAAAAAAQGAGPAGGAAAAQAAGAAAAAAAQGAGPAGGAAAAQAAGAAAAAAAQGAGPAGGAAAAQAWTALIDYVNAQRASKRAAELLLREVKGAQATYKKASTRHMEWAAEILAGLEARRDQLGAQVQQLTQAQPLTREDTQRLASLRRELHRARPFTLTPSPSFAPIYVPLDNTSMARLPGLLPTLARRHGEVFAGAGAGAVAPSSFVQAVFGGGGMQSPATLNAVGWGLFQLGGVTSRNAPFANYITTDGVACSVAREAHNKPLANLKPATAPADAEELCTLEEMKATQIIGVDPCGGGNWFMAARSPLYQPGPWAWEGVREGVSPAQRSLLELHDKQLDEELFPGQLPPEPRRRRKGVRRKGGGRKGGHRRKQSKHWQPRARTARRRRQKRGRFLMSMGHWRHMSGLERLQPNRPQLAPALQAYVGGIPTAATASAARFEERMRYLFASGAAGQAAGQAEAAGPAEAGPRGAVHVLWHYHFSAFRRKRWAAFIQRDRALHRVAKQLTGGRPKEEVVVGWGSWAFQGGKGGSPISVRGGRAPTGRLIKLLRERYAKHVFIIDEYKTSKTCYNCGCQEMAIKRLGGLKEGQRPWSVKVCNDCLTTWNRDVSAANVIRVLLLLKLMGFERPTKLQRPPWPPAAAGPG

SEQ ID NO: 3079 - protein, 298 aa, Chlamydomonas reinhardtii
MARLLGLPSPHCSDGGSGGGDGNSGDGSGSSGGSGDSSDGVGGGRNGGGGARGAGGGRARGQTGRRLWLQARLKGQPALKRCQAGIPSARVASEADHERRIRYLYSAGGGVDAAAAAGSAPAPVQQYGLWHLLRFYRQWGQRRWRLTVHVRTQKVLEHTAQQLAGGRPKEEVIVGWGNANTGYGGCISRLGRAGTAPPAGGQGRDVNSATNIRHALVEMLLGHKRPASLQTGGGGGGGGGGGGGSGGGGSGGGGGGSGGGGSGSGGGACAHLGSGGGGKGHVEEESAAPPTKRRKRAG

SEQ ID NO: 3080 - protein, 783 aa, Chlamydomonas reinhardtii
MAEAPAKRQCSAPTGVSLLWRAKELGQLHAGALVFAAWVARNESRFPEAVYYCSSDMSEEQLGRADHEQLLGALQSLTSQHLLGQLCGLAPEQVATSSAATRSAYSGCWKAQGSAWMGPSWLTYVLTAGHKVVVKQLVGGGLARATFCSEAWGAAFDDKMYIARTTWPPGAMSMELPAGHLGWWEPNPHALRAHYRGFERDAYWHFLLEQRLGQPPRMTCTCSSFSVVGAAVSSCLHTAYVSSVEWLLEAGPPPPRLVPAARCARLVDGRVMPGDYIWLPGRTLVACTRQTGALRCCHSGCGAACQHVTEARSAFEQHMLPAVAVAAAAASTGQIRTPAGAEGDADDTQSQQAGAPAAAAAAVADEAVEEAVPPPSEVRYPYAPDKATIIAMMTFELSLMQRQDAVGPVRAHLFELYSGCSCLMRACVMAYVGVADGWRLFRRSSRSSFFCLRHMYTYADQLLGSGMNVEAYVSSQRRLAATTLLADAQRPKQFSATLFRRTWHQFEARLDRFHTFKCPIQHQRPQQQQQQQPSMPPPRVHSTAGPGGGGGSGGPGGGAGARAAGCVAHRRRAGARCWQFGSERGGRSGRGPNRALLRLLVDKYAHLVVYVDEYYTSQVCAKCGRRLLGNGQRCLEVVIPFGGSRARDVQVCQHCGTVWGRDANSATNMRHALMEMLLGKPRPAALRPAGGGGGGGGGGGGGGGGGGGGGGAGPGDGGGGGGGTAPTGGNSSGHGVGPGGGGGTGGPGPSGSGGAHVRSRGGGQGHVEEDSAAPPSKRRRRAG

SEQ ID NO: 3081 - protein, 262 aa, Chlamydomonas reinhardtii
MNHRQFLLAQRLSRRLWLQARLKEQPALKRCQAGIPSARVASAADHERRIRYLYSGGGVDAAAAAGSAPAPLQQYGLWHLLRFYRQWGQRRWRLTVHVRTQKVLEHTAQQLAGGRPKEEVIVGWGNANTGYGGCISRLGRGPNRALLRLLVDKYAHLVVYVDEFYTSQGRDVNSATNIRHALVEMLLGHKRPASLQTGGGGGGGGGSGGGGSGGGGGGGGSGGGGSGSGGGACAHLGSGGGGKGHVEEESAAPPKKRRKRAG

SEQ ID NO: 3082 - protein, 264 aa, Chlamydomonas reinhardtii
MGHWRHMSGLERLQPNRPQLAPALQAYVGGIPTAATASSAQFEERLRYLFASGAAGQAAGQAAGQAAGQAAAGQAAGQAEAAGQAEAGPRGAVHVLWHYHFSAFRRKRWAAFIQRDRALHSVAKQLTGGRPKEEVVVGWGSWAFQGGKGGSPISVRGGRAPTGRLIKLLRERYAKHVFIIDECKTSKTCYNCGCQEMAIKRLGGLKEGQRPWSVKVCNDCLTTWNRDVSAANVIRVLLLLKLMGFERPTKLQRPPWPPAAAGPG

SEQ ID NO: 3083 - protein, 217 aa, Chlamydomonas reinhardtii
MGARTPCCNILLSAPPSTKAAAWAGAAGRGPNRALLRLLVDKYAHLVVYVDEYYTSQVCAKCGRRLLGNGQRCLEVVIPFGGSRARDVQVCQHCGTVWGRDANSATNMRHALMEMLLGKPRPAALRPAGGGGGAGPGGGGGGGGGAGPGDGGGGGGGTAPTGGNSSGHGVGPGGGGGTGGPGPSGSGGAHVRSRGGRQGHVEEDSAVPPSKRRRRAG

SEQ ID NO: 3084 - protein, 322 aa, Chlamydomonas reinhardtii
MARLLGLPSPHCSDGGDGNSGDGSGSSGGSGDSSDGVGGARNGGGGARGAGGGRARGQTGRRLWLQARLKEQPALKRCQAGIPSARVASAADHERRIRYLYSGGGVDAAAAAGSAPAPVQQYGLWHLLRFYRQWGQRRWRLTVHVRTQKVLEHTAQQLAGGRPKEEVIVGWGNANTGYGGCISRLGRGPNRALLRLLVDKYAHLVVYVDEFYTSQGRDVNSATNIRHALVEMLLGHKRPASLQTGGGGGGGGGSGGGGSGGGGSGGSGGGSGGGGSGGGGSGGGGSGSSGGACAHLGSGGGGKGHVEEESAAPPKKRRKRAG

SEQ ID NO: 3085 - protein, 529 aa, Chlamydomonas reinhardtii
MATPNHPHFGKSYLGKPYRSKKTGKWRRNTCYFGLDPSFAPIYVPLDNTSMARLPGLLPTLARRHGEVFAGAGAGAVAPSSFVQAAFGGGGMQSSATLNAVGWGLFQLGGVTSRNAPFANYITTDGVACSVAREAHNKPLANLKPATAPADAEELCTLEEMKATQIIGVDPCGGGNWFMAARSPLYQPGPWAWEGVGEGVSPAQRYLLELHDKQLDEELFPGQLPPKPRRRRKGVRRKGGGRKGGHRRKQSKHWQPRARTARRRRQKRGRFLMSMGHWRHMSGLERLQPNRPQLAPALQAYVGGIPTAATASAARFEERLRYLFAGGAAGQAAGQAAGQAAGQAAGQAAGQAAGQAAGQAAGQAAGQAAGQAAGQAAGQAAGQAEAAGGAGRGGRPKEEVVVGWGSWAFQGGKGGSPISVRGGRAPTGRLIKLLRERYAKHVFIIDEYKTSKTCYNCGCQEMAIKRLGGLKEGQRPWSVKVCNDCLTTWNRDVSAANVIRVLLLLKLMGFERPTKLQRPPWPPAAAGPG

SEQ ID NO: 3086 - protein, 486 aa, Chlamydomonas reinhardtii
MCPLTTRPWPAFLLPTLARRHGEVFAGAGAGAVAPSSFVQAAFGGGGMQSSATLNAAGWGLFQLGGVTSRNAPFANYITTDGVACSVAREAHNKPLANLKPATAPADAEELCTLEEMKATQIIGVDPCGGGNWFMAARSPLYQPGPWAWEGVREGVSPAQRFLLEPHDKQLDEELFPGQLPPEPRRRRKGVRRKGGGRKGGGRKGGHRRKQSKHWQPRARTARRRRQKRGRFHMSMGHWRHMSGLERLQPNRPQLAPALQAYVGGIPTAATASAARFEERLRYLFASGAAGQAAGQEAGQAEAAGPAEAGPRGAVHVLWHYHFSAFRRKRWAAFIQRDRALHRVAKQLTGGRPKEEVVVGWGSWAFQGGKGGSPISVRGGRAPTGRLIKLLRERYAKHVFIIDEYKTSKTCYNCGCQEMAIKRLGGLKEGQRPWSVKVCNDCLTTWNRDVSAANVIRVLLLLKLMGFERPTKLQRPPWPPAAAGPG

SEQ ID NO: 3087 - protein, 290 aa, Chlamydomonas reinhardtii
MRQKSRKRKKLADEEDSEEEEDPSTFSVKTRRRRRNDRRKRRLQAGKPTQPPRYWSKKLRKLEAATAAVAAGAGGGEAAGQGAWAPLQLHWSDIRFRSRKFGVYSQSQRVLHREARRLTGGAPMSRVSIGYGNASTGHNSVIKRPSRGPHKAMQRLLRRCYARSVVMIDEYCTSQVCYNCGLRELRKILPHNGTRRYTVLACDGCGTVWNRDANAAANIRLITACLEEGLPRPEALTRPIHGSGGGGAGRQGGGQRAPCTRSAPGAAAAATAAAAAADADAAVQGGGAYG

SEQ ID NO: 3088 - protein, 781 aa, Chlamydomonas reinhardtii
MGITIFLGITCGQPNAHLPGVSSAGEDVAAAAVGLRCAPGSGAASDGRGLHAGGPHGYVGLRPAGGGRGAVEHFADHLLIRRLVCVLVHYNHYGANFAAWLARSFRCRIDDELREVGQAEVGPAEVGQAEAAGQEAGQEAGQEAGQEAGQRAAAQLTTTAAQHFHNNPVALDPWLHRTSAAAGLQNTPLRTPATEKLDKLAWSMAHAVLYDGELEQPRWWVGWAQGAAAQAAGAAAAAAAQGAGPAGGSAAAQAAGAAAAAAAQGAGPAGGAAAAQAWTALVDYVNTQRASKRAAELLLWEVKGAQATYKKASTRHMEWAAEILAGLEARRDQLGAQVQQLTQAQPLTREDTQRLASLRRELHRARPFTLTPSPSFAPIYVPLDNTSMARLPGLLPTLARRHGEVFAGAGAGAVAPSSFVQAAFGGGGMQSSATLNAVGWGLFQLGGVTSRNAPFANYITTDGVACSVAREAHNKPLANLKPATAPADAEELCTLEEMKATQIIGVDPCGGGNWFMAARSPLYQPGPWAWEGVSPAQRSLLELHDKQLDLAPALQEYVGGIPTAATASAARFEERLRYLFVSGAAGQAAGQEAGQAAGQAEAAGPAEAGSRGALHVLWHYHVSAFRRKRWAAFIQRDRALHRVAKQLTGGRPKEEVVVGWGSWAFQGGKGGSPISVRGGRAPTGRLIKLLRERYAKHVFIIDEYKTSKTCYNCGCQEMAIKRLGGLKEGQQPWSVKVCNDCLTTWNSDVSAANVIRVLLLIFLRNHPYKVEQGQTRCPPAA

SEQ ID NO: 3089 - protein, 239 aa, Chlamydomonas reinhardtii
MTSVRRKCATKTQQTASRHKEPVTVVHFCSGSLSRLFLPGPSATPSGRVRTSQWQAAGQAEAGPRGAVHVLWHYHFSAFRRKRWAAFIQRDRALHRVAKQLTGGRPKEEVVVGWGSWAFQGGKGGSPISVRGGRAPTGRLIKLLRERYAKHVFIIDEYKTSKTCYNCGCQEMAIKRLGGLKEGQRPWSVKVCNDCLTTWNRDVSAANVIRVLLLLKLMGFERPTKLQRPPWPPAAAGPG

SEQ ID NO: 3090 - protein, 668 aa, Chlamydomonas reinhardtii
MKRSAAAWQALVAGAAAAVGVSFFLQLMRRLGLRAKSGLTPYGTPLPRVAHRRLEPVKPGRLIVVGDLHGTPELFTLLERLSFRPSHDNLVLVGDLVNKGPASLRLLEALPGLGAVAVRGNHDDAALAAWLAWRQKGQPLPSKFEWSRDMSPAQADLLAQLPFTLAVPQYGVAVVHAGLVPGVPLKQQKLWACYKMRNLVPHPHGDGGGGGGGGGSTSGSGGADPATATSASTSTSTSAGTLTATASSTVTGHAPGARYTAVEKAKEGGQAWAPLWPGAEPPAQHVFFGHDAKRRLQLAPHATGLDTGCVYGGELTAAVLPPLGELVASSPGFVAAMRHGRPLTREDLRVQLVSVPAARVYSAPDGHADTAAAGAATAAAAGASAGSGSGSSSGGMAKEAGRVGAASGAGVELVHPASRGAAGQAAGQAAGQAAGQAAGQAAGQAAGQAAGQAAGQAAGQAAGQAAGQAAGQAAGQAAGQAAGQAAGQAEAGPRGAVHVLWHYHFSAFRRKRWAAFIQRDRALHRVAKQLTGGRPKEEVVVGWGSWAFQGGKGGSPISVRGGRAPTGRLIKLLRERYAKHVFIIDEYKTSKTCYNCGCQEMAIKRLGGLKEGQRPWSVKVCNDCLTTWNRDVSAANVIRVLLLLKLMGFERPIKLQRPPWPPAAAGPG

SEQ ID NO: 3091 - protein, 360 aa, Chlamydomonas reinhardtii
MKATQIIGVDPCGGGNWFMAARSPLYQPWAWEGVREGVSPAQRFLLELHDKQLDEELFPGQLPPEPRRRRKGVRRKGGGRKGGHRRKQSKHWQPRARTARRRRQKRGRFHMSMGHMSGLERLQPNRPQLAPALQAYVGGIPTAATASAARFEERLRYLFASGAQGQAAGQEAGQAEAAGPAEAGPRGAVHVLWHYHFSNFRRKRWAAFIQRDRALHRVAKQLTGGRPKEEVVVGWGSWAFQGGKGGSPISVRGGRAPTGRLIKLLRERYAKHVFIIDEYKTSKTCYNCGCQEMAIKRLGGLKEGQRPWSVKVCNDCLTTWNRDVSAANVIRVLLLLKLRGFERPTKLQRPPWPPAAAGPG

SEQ ID NO: 3092 - protein, 561 aa, Chlamydomonas reinhardtii
MAAELCRALLPRLAAAGLREVKGAQATYKKASTRHMEWAAEILAGLEARRDQLGAQVQQLTQAQPLTREDTQRLASLRRELHRARPFTLTPSPSFAPIYVPLDNTSMARLPGLLPTLARRHGEVFAGAGAGAVAPSSFVQAAFGGGGMQSSATLNAVGWGLFQLGGVTSRNAPFANYITTDGVACSVAREAHNKPLANLKPATAPADAEELLCTLEEMKATQIIGVDACGGGNWFMAARSPLYQPGPWAWEGVREGVSPAQRFLLELHDKQLDEELFPGQLPPEPRRRRKGVRRKGGGRKGGGRKGGHRSNRSTGGREPGQRGGGARSGADSKGVWATGVTCQAWNDSSQTTHSLRQPCRRTGAAGQAAGQEAGQAEAAGPAETGPRGAVHVLWHYHFSAFRRKRWAAFIQRDRALHRVAKQLTGGRPKEEVVVGWGSWAFQGGKGGSPISVRGGRAPTGRLIKLLRERYAKHVFIIDEYKTSKTCYNCGCQEMAIKRLGGLKEGQRPWSVKVCNDCLTTWNRDVSAANVIRVLLLLKLMGFERPTKLQRSPWPAAAAGPG

SEQ ID NO: 3093 - protein, 275 aa, Chlamydomonas reinhardtii
MSGLERLQPNRPQLAPALQAYIGGIPTAATASAARFEERLRYLFASGAAGQAAGQAAGQAAGQAAGQAAGQAAGQAAGQAAGQAAGQAAGQAAGQAEAGPRGAVHVLWHYHFSAFRRKRWAAFIQRDRALHRVAKQLTGGRPKEEVVVGWGSWAFQGGKGGSPISVRGGRAPTGRLIKLLRERYAKHVFIIDEYKTSKTCYNCGCQEMAIKRLGGLKEGQRPWSVKVCNDCLTTWNRDVSAANVIRVLLLLKLMGFERPTKLQRPPWPPPAAGPG

SEQ ID NO: 3094 - protein, 359 aa, Heterostelium album PN500
MEMDIDYPSTTTTTTTTTTTTTTTTTTPNNNNINNKYIFGIDCGRSSHVSIDEHGKTHSFSVHEHYLNLRSRFNSEAQKKMLGPAMLKFESLIPPSKNINDICLDRSLISNRISYLRLHPTTTKNYVNIRLDEYNLIMKKNNYYNKLFIGSAKFSHNSRGQSSFISSATLYKWVKKKKHKALWINECYTSKVHNACWNKTEKEILAKLNNKVSNMKDPPPCALSSGPYSKSVSIDRNQVAECHKQLSTLHQTVTGYIDGTNKVNSSTNKSNERFDYMKHHSLYSNQMSGNNVNVDGLAKDHPILKVFQEKKWKRPLCRCCGHFYHRDKNASRNILLLGLLSVRYQFRPVVFQYIKFINK

SEQ ID NO: 3095 - protein, 813 aa, Heterostelium album PN500
MVKEYKSPPPPPPSTTKTTTTTSTTSLSPPITSPSAVSPLIPTIPTLSSSSSKPIQFNYNKLSADTSATSNNNNTYDKDFKMDIDSQSTLAHVFPSPKSSMASSSQSSTTIHSTASTTNSDSSTHYYNDSDEEFNLLDYYQYCLENKLEDQAFTTPSKSTLQKNCESFLPDISFELERSSFSNSGSLYIPPPPPIPEKTSKFAFCIPNSSSSSTKSLILPTSSLSAPSSSNPPPSTTSPPPSTTSPTTTISSTKPQSSNTLPKLLKLKPSATTKSLILPTSSLSAPSPISNSLSAPSSSSNSLSAPSPTSNFLSAPSSSSNSLSAPSSSNPSPSTSNPPPSTTSPTTTISSTKPQSSNTLPKLLKLKPSATTKSLILPTSSLSAPSPISNFLSAPSPTSNPSPSTTSTTTISTTDSSRSRIETYNHVDKRPRTTNYIFQGGRFVKERDEYSLQSNNNSTALEMEMDIDYPSTTTTTTTTTTTTTTTTTTPNNNNINNKYIFGIDCGRSSHVSIDEHGKTHSFSVHEHYLNLRSRFNSEAQKKMLGPAMLKFESLIPPSKNINDICLDRSLISNRISYLRLHPTTTKNYVNIRLDEYNLIMKKNNYYNKLFIGSAKFSHNSRGQSSFISSATLYKWVKKKKHKALWINECYTSKVHNACWNKTEKEILAKLNNKVSNMKDPPPCALSSGPYSKSVSIDRNQVAECHKQLSTLHQTVTGYIDGTNKVNSSTNKSNERFDYMKHHSLYSNQMSGNNVNVDGLAKDHPILKVFQEKKWKRPLCRCCGHFYHRDKNAARNILLLGILHSNNNFISHLN

SEQ ID NO: 3096 - protein, 1581 aa, Heterostelium album PN500
MVNPTDLIRKDIIMDSGRQFFTNTLNNLENIYKRFSNNSSSYLKIKDWEEENNNNIDTLSKYNISISEYQQHNRIKSTIEKLKKTKSTDIRITEHLSTISDLYNDSETIIFIRILKKEDNNNNNNNNNNNNNNNNNNSIGPGDSEMIDISVTPTPVPVTPTPVTPTPVPVTPTPVTPTPVPVTQNSIPVHETLETTPDPHQYLWMVGLPLVIIHPLTEDRHLEDFCNYINITSTETQIDINNIKNNLYYIFKKSKSYSNSFDKSSYYTLSPSSPPSSSSSSTPTTTTTTTTTTTTTTTTTTPQTTSFDEYYLINNFLNKTNIKSSDISLSITLLKSFCNFVKESISNTPLTSKFSVTLENYIKYLSSNVISEDYFYTIQKHVFTFHLFLKIYNILSKSKVDKAKKSLNSDEAVSIETLRSIISKEELELKKPTADEINQFKKQRLCPRHLKPMEECSQTCKDEFQGYQWAVDLFSEGFFSKSKDLAKLWPKYRSTYIDDIKIQFKEPQVHDIKFSTKQPTPEPTTSNLENQDIPTQFANTPAVVSCDSNLLPIKVTDHKDIMVVMSDPISSMHLAFNREDNDLCKTFANLFKAFGIKKPSAMPTDKPSAMSIDSPAISTNDNPSVKPSEKPSTLPIDSPSARPTDKPSTLPIDNPSTMSIDKPSAMSIDKPCAMSIDKPSALPIDSPSAMSIDKPSALPTDKPSALPTDKPSALPTYKPSAMSIDKPSAMSIDKPSAMPIDKPCAMPIDSPSAMSIDKPSALPTDKPSAMPTYKPSAMSIDSPTIPPTDSPPTNYSKQSIKRKKPELSIDSPTIPPTESPTDSLSVTPTGKPLAQTKQSKKSKKQAGKPSENTPNKKQKAKQPAKQPAKVKRVYDKRVSPKKMVKEVQFKLPIGTTISMTDIYPQINLSELSIPSEEEENINQWVDTIMVGEHKIYLLCGLNAQVLFLNRAATQYEVFNITDEIKSSVPILLIKTPNYYSVAICLSHPSRPDFSKWVTEAIEFCHQFLKQGEIFKLNDIKARISKRPQRKKIYSPSWLISKEGFTPVSIYEKSAPVIRTDGISLSITRGVARRFEPKLKEQHLPYQKAGTAKERRSIETLKMAVATDGTNPICYSIDPGRSSHVSYSTDSKERRASVKQYYDWKSNRYSKKVKKLEEKFKLFQSKMPPHSNAYGRADYFIKNWEVMKLYIDFRLNNIHRQRRRLEFKLNQQSKSKLVKQLVPTTASEMKQGVIFLGASSFNHASKGHRTFISSKGLKKIFEAHGYNVVSVNEFCTSRVHHGSYVEQEMKLLSAIKRVDQHVSGPKAQWPPESKPKVNSSRGSVYEKVRNDYENLSKFESDLNSGGSMQEQQSTYDYYGHHSIYSTELSKKTTKSDQGHHSTHSTKLSRKTSKSVAKREWKKVLSKDGFLKVNVNDLNYMSNLDHAAIIKIIHEARVDCLRQLGLSERNLLPDKSRPYSVQMYIKDLSVQYMNSGELFDDLIVESGFTEKQRCGFKMCHRVRSLVPIGSQDFPANADNHNFDQPTGSTFKSIALVEVGVVAVDAITKSPVELPLPFFEKLGFSRSELETHLTKTNNSVHPTP

SEQ ID NO: 3097 - protein, 1176 aa, Heterostelium album PN500
MSDSDFYSETDSEYVSESDSETNSESDSETNSESNPPPPTTCGTRHHSLFVGQNEEPSNRPTRCKNCLTLASFLSTHKHLDKSSLCSTSYHSIITDSPSTSTNNNDICEFCQSFQTYFVKKFNTEPPIQNNNNLPPTIHSSSNALKYQIFQDLLRQRNTNQLNLFENKFSNILKNSSISHVLRDLNEQSSIITNHQLTLFGISPHEFQNHQLIENLIKDLSTTKSAQLNTTQYLSILSDLYNSPDIIISNNILLSYKVNSDKIKKRKHEDEDDTNKNNNNKNNNNNNNNEFIDNNKNKINIIESKIKTRELNLRLMLIGLPIIRLHPLTNDKHIIDYYKYIKLNNVIIDYNYICNNFIYIINKHSSSSLSLSSTTTTTTTTQDLNLINNYIFNNIEKKDISANNVAYFKPKRSHQEFGHPIPGSHLSSKFVLLSEEVVKQINKHGNKYCLEDRFIDRIRKIYPGLSSNHLWNNFHHKRQDSDPNPPESSVVTIDSLLQIANKHSISLPKPTTREITSFKANRLCPHHLSSSDKCTKDCQSVYGDYQWNFNMFINGITDNFDEFKKVLPSYRSTFTDTLNMGTLPESHLSTKVNFSNRSPTLPTNTFDLDKQQHVPHQLTNVPAVHSCDSNFMPINVKDHFDILVMTSDPISQRHLAFNKTENDICQTFKSLFINFGIPMNVKPKSPPTKKTTSSTKPSKGKKPERKFKKKNKSKTVKQQIKCPTKSLGFTDTYPRANRRLVPLETEDSVDSILMCLPHPAYKSYDKWSKEAMEFSQCFLAKKGSPIDIDSIHARMSLRPSVKGIYRPSWMTRKIGDTSIYLADYAGPEFRSNGDTLSITRAVARPFNPAVSKDKLYLPYQMPGSKREKQHVEDFRSISDTDPTCYSVDPGRSSHVSCSSHGLVRRASVNQYYSWRTNPLARLDYFNLNWSIFVEYIAFKMDPRHKYLRRINYRFGQIAKSKLVKQLIPTPASHMSGGLVFLGASEFRHNSKGHRSFISTKGLKKLLEQHQYRVVMVNEYCTSRVYHGTYLREEKNLMVAINDQCEHESLPKVEPTKWPPDNIPPVPPTNQPSTVFEKVRADYAELVEFGSDLNSQGSKQEKLLNYDYYSHYSIYSTELNLKKTQVPTRDWKRVLAKDGFLFNRDVNAARNILYLGLFMSLYSFRPKVFMSVRKYTV

SEQ ID NO: 3098 - protein, 786 aa, Heterostelium album PN500
MVKEYKSPPPPPPPSSTKTTTTTSTTSLSPPITSPSAVSPLIPTIPTLSSSSSKPIQFNYNKLSADTSATSNNNNTYDKDFKMDIDSQSTLAHVFPSPKTSMASSSQSSTTIHSTASTTNSDSSTHYYNDSDEEFNLLDYYQYCLENKLEDQAFTTPSKSTLQKNCESFLPDISFELERSCFSNSGSLYIPPPPPIPEKTSKFAFVTPNSSSSSTKSLILPTSSLSAPSSSNPSPSTSNPPPSTTSPTTTISSTKPQSSNTLPKLLKLKPSATTKSLILPTSSLSAPSPSSNFLSAPSSSSNSLSAPSSSNPSPSTSNPPPSTTSPTTTISSTKPQSSNTLPKLLKLKPSATTKSLILPTSSLSAPSPSSNFLSAPSPTSNPSPSTTSTTTTSTTDSSRSRIETYNHVDKRPRTTNYIFQGGRFVNERDEYSLQSNNNSTALEMEMDIDYPSTTTTTTTTTTPNNNNINNKYIFGIDCGRSSHVSIDEHGKTHSFSVQEHYLNLRSRFNSEAQKKMLGPAMLKFESLIPPSKNINDICLDRSLISNRISYLRLHPTTTRNYLNIRLDEYNLIMKKNNYYKKLFIGSAKFSHNSRGHSSFISSATLYKWVKKKKHKALWINECYTSKVHNACWNKTEKEILAKLNNKVSNMKDPPPCALSSGPYSKSVSIDRNQVAECHKQLSTLHQRVTGYIDGTNKVNSSTNKSNERFDYMKHHSLYSNQMSGNNVNVDGLAKDHPILKVFQEKKWKRPLCRGCGHFYHRDKNAARNILLLGILHSNNNFILTLF

SEQ ID NO: 3099 - protein, 457 aa, Eremothecium gossypii
MPIFAAKKRQATLKKKLVLQQGDELKKESLNIPSWAPFKLIDHGQAANDQVLIPQKPEVPGDALKDHWTPKTVRIYPTSKQKEILHLWLTATRHMYNLAVAERIRLGKEAKENGTKVKMKLKHLREVMPLKKNFDYERDPKLTYLKNVPFLIKDNGLRDFDKDYRTNLAKSKNTLRPFKIHFKKIKDKQSMTVEKKVWGLSRGIYHDVFRKGAFRSTEPLPEQLPHDSRLIREHGKWFLVIPYETSGLMPKKEAINAVAVDPGVRTFLTTYDSSQRVLEIGEDGYLKLQHLDRRLRSLQSEIHKLRSKGIVLSKEDRKRKIRNRRTVISRLYQRKKNLANDVHRKASHLLASKYNYILIPVLNFHNFKKTNRRVKANLANMKHCLFVQRLKNKASHFENTTVIEVDEEFTTKTCSLCGVRSNIGASKVFKCDNCDATFDRDHNAAKNILLKYLGEID

SEQ ID NO: 3100 - protein, 600 aa, Cyanidioschyzon merolae
MEAVAERACKSQGPCHRPRMNLYCAEWRAFGNFFHALSTLKEDKRQRLVPAYGAGRWASKTGCTPASPTRAYKECARRFVTFPIDEFRTSCIDHELGCTLQTLEMENCQISPDDIKKCGVLTEEQMGSRTKVRALHALVSTTNGGKKRMEFVNRDFNAAVNVRRCAVLEKRPPEWTRENFVGQSLKVELYEKKLESGVGGRSEKTGRRLHDSRRPLVEGTFTATTIHVRRRSTLERRLIASLMTQLNFVPCVRLPSQKCTRYRACRWIHASATTPVTRNPEGKLPALIVQGILAFPPTAWLLKRIGRAGVVKRAEEIGVPWRENVRELRLKWDTLEQKRARLVERDLVYPDYYVRAPFHTYPEGNLGWIPAMEVESSALAVHARLFPEAPPTQGDRLLRDTFLDRVWPRLEQLLVPMGRPLVALDLGASTGLSTMRFIDAWLARYPERPLDITGIDLSTFMLAVAELRAEERSYPSSIQVRFKHAAVENLPQKADSVDLVLCSLVTHELPMAATERLVVEAYRVLRPGGMLAMMDSDPHSEAFRSIPPVGAAIFRSTEPYFSEYERVDMVSLLTISGFTDVQTENNTPRHRVWLATKPLN

SEQ ID NO: 3101 - protein, 645 aa, Phytophthora sojae
MAGTMAASGSCRCSSKYRRMPSKKTRARPPGAEVPSRSKARIKSSKKRAPPPDAHDTGGAGPPKRRRPDVAKRKADAKTVDIVARKVTLKSFCTPEAQALHWDDVIMTMNHAAAEGWLLANFVVMHTIENPTGGGVLPPMDDKFFRRCMATVSKTSRPKKTFKTVFQKSKEKRVQPDLALKEWKWIDFERAADEYLKHRGGARRGARRLRQYVRVTYPEHRADAFLITSWVLDEACDCRHCKSCRTKKRQKKPVPTESQSCDAVNDIVGALREDIPRNQNQKVDWKSTDVLRLFHKYLKAVEEFNETNKDNPKIRQERVDSIIPTKQGFRSSYFSMTSTGLWDLLRRSRDRLDLDTIVYTEGGGSISLGDKPKAEPPLRKIENYDEIKGADPGFTDMFVACMYNVRSQTFSDDFLSYPAKKFYSDSGYSSSNRKIRRKLGLNAEIKKVFKDMPTRKTASLTKLMEYLDYTVPKMERLFSFFMTKTCRDMRFSRQVLAEKNLRDICRELAGEPGTRTLIAFDNWELNNSSGIIKKKTPGPVMKLRRMLTDYRGVDVMIVDEYLTSKMHHGCYSLAPMENQQVKHRCRDKVVRTVGVHKVYHCLKRNGGCGATVERDVNASKNMVEVALTQMREGEGVRPERLQRPS

SEQ ID NO: 3102 - protein, 366 aa, Phytophthora sojae
MLIRSGYDVPREGSDWNAVADSMWRRLFNTNLVETSKPDGSPSRFFAGEITTDGKSVSILVKKPVQGRQELQMSPETAAFFSTRWGLDPGRRDMFVATNNHGETIRCSSKEFYRDASYTQSNKTTRHWYDYADAEVSETIRLVPTKKTCSLERLEAYVRYVVLAFTMRKKFRDLRFRRYCQSRKKLHELCTRFVAGRDPTRTIVGFGDWSCSDFGGVIKKSPGGPTKRFMRELSKYCRVELESEYRTSKVHHGCRQAHPGDLVNQYQRQECRDGVVRNRKIHSVLHCLRNNGGCGITVNRDVNASRNILRAFELRLSGQARPPELSRSSQQRSTCAAVLDRRWNPRTDEVSSIDINITSGKSKYIL

SEQ ID NO: 3103 - protein, 707 aa, Phytophthora sojae
MPSKKKRARPPGSEVPNRSKARRKASKKRAPPPDAHDTGGPGPPKRRRPDVAKRKADAKTVDIVARKVTLKSFCTPEARALHWNDVIMTMNHAAAEGWLLANFVVMHTIENPTGGGVLPPMDNKFFRRCMATVSKKSRPKKSFKAVFQKSKERKVQPDLALEEWKWVDFERAADEYLKHRGGARPLDCKYICLGWFEQAATQMAKNTETSTWKNLARRLRQYVRVKYPEHRADAFLITSWVLDEACNRRHCKSCRTKKRQKKPFPAECQSCDAVNGIVGALREDIPRNQNQKVDWKSTDVLRLFHKYLKAVEEFNETNKDNPKIRQERVYNIIPTKQGFRSSYFSMTSTGLWDLLRRSSDDLDLNMIARTEDGGSISLGDSIKKENWSGVADIWWRKLFRVADLEKGTRLVFHGQICTDGIGASVLLHKPKREPKAEPPLRKIENYDKIKGADPGFTDMFVACTYSVRSQTFSDDFLSYPAKKFYSDSGCSSSNRKIRRKLGHNSEIRKVFKDMPTKKTASLTMLMEYLDYTVPKMVRLFSFFMTKTFRDMRFRRQMLAEKNLRAIRRELAGEPGTRTLIAFGNWELNNSSGIIKKKTPGPVMKLRRMLTDYRGVDVMIVDEYLTSKMHHGCYSLAPMENQQVKHRCRDKVVRTVGVHKVYHCLKRNGGCGATVERDVNASKNMLEVALTQMREGEGVRPERLQRPS

SEQ ID NO: 3104 - protein, 519 aa, Phytophthora sojae
MVVPTSMLAAAVGKRKRGTGPSRNQKLQAKRCRERNQAAAKKRKTSSGAVTTKRTPKTSPRKRKTPVKPKPTWTRTTVKMKLRPFCKDEGLALAWDSVLRDMNKMVAETYMLAAVHMVRCCEQGSDIPILARSFYQQCLSAVSGGNLHHPLATMTEEFRDSVAIYSAWRGESPIPNRDAINRGWAQVAAKRMAHETQNHLQLNFYRRFKQYITLRYGLAGRDRYLVLKGILDPEYDGDNEIVLEYRELIPRNDEGYLDQRASELLPLVHMFLTFVEDHNREHEGEPARGGSSSTGRDPTRTIVGFGDWSCSDFGGVIKKSPGGPSERFMRELSNCRVEMESEYRTSKVHHGCRQAHPGDLVNQYQRQECRDGVVRNRKIHSVLHCLRNNGGCGITVNSDLNASRNILRAFELRLSGQPRPPELTMLARYSLRLPKAAARCISSPTPALVLQQTPATSGGSAKTSVPPVSQGEKAWCDIYGIQEALHESPVAAQGSAKQVNYSTSSVNPRRARPILNVAP

SEQ ID NO: 3105 - protein, 541 aa, Phytophthora sojae
MEYASGGDLDAFLQWQQESTTEPGCRERNQAAAKKRKTSSGAVTTKRTPKTSPRKRKTPVKPKPAWTRTTVKMKLRTFCKDEGLALAWDSVLRDMNKMVAETYMLAAVHMVRCCEQGSDIPILARSFYQQCLSAVSGGNLHHPLATMTEEFRDSVAIYSAWRGESPIPNRDAINRGWAQVAAKRMAHETQNHLQLNFYRRFKQYITLRYGLAGRDRYLVLKGILDPEYDGDNEIVLEYRELIPRNDEGYLDQRASELLPLVHMFLTFVEDHNREHEGEPGFEMARTYSLLPTKRGFKRAATGTLSRTARGGSSSTGRDPTRTIVGFGDWSCSDFGGVIKKSPGGPSERFMRELSNCRVEMESEYRTSKVHHGCRQAHPGDLVNQYQRQECRDGVVRNRKIHSVLHCLRNNGGCGITVNRDVDASRNILRAFELRLSGQRRPPELSREEPLSSTAKTVPQQPPRLIILAKDSPSKKTCETRAQVAGKTRNGISVLDRKLGPPAARAQSSPSSYEELLNAERRRIQLETKALQERMRALQAAD

SEQ ID NO: 3106 - protein, 384 aa, Phytophthora sojae
MEAQRQPPDCPDWWDEEVEMLAEEAWLPVAQDFCQRSGEPYSRCIHHLAGKSFVGLRNLTNHSLRGAMPVELLPENLDIDSSIKIELSPTPEERCQLRKMFGAFRFVYNKLVDLVGDDWRRLSQAQLRADYRPVRSVTRRNLLTDHLPDWVWDVPQKILDAAFTDFLKTITTTKAGDEAARNNGENRRPSELHFKTRKNNSTSIEIQVESFGYTGHASQARFLPNYFGWRRGSDEGIATKEDFPEPTHARIKRIVKDMHQKVAKWLSVNFDVVLLPKFPVSQLVRRRNRPDGRRRRINSVTARRMLTWSHYKFRQMLDYKMKRTGGVVVVCDEPWTTKTCSHCGRINHRITVQKTFWCPECNYVCDRDVNAARNIFLKNERLIP

SEQ ID NO: 3107 - protein, 422 aa, Phytophthora sojae
MTGVPARVEELSSAQTSGSASFVARLVSDTSWIDTGQLDMGSVAKSTEPFHKKVDWKSPEVLRLFHKFLKVVEEFDETNKDNPKYDLYGAAVLVAEKSGYATIVYTEGGGSISLQNSLKDRNSSGIADIWWRKLFRTENDDEIKGANPGMTDIDSGYAGSNRKIRRKLDHNAEIKKVFKDMPTKKTASLTKLMKYLDYTVPMMERIFSFFMAKTFRDMRFRRQMLAKKNLRAICLELAGEPGTRTLIAFGNWGLTTARHHYEEDSGMMHHGCPSLAPMENQQVKHQSTIERDVNASKNMVEVALAQMRDGDADADRGELTSQFAFFFADVPPRPRYSPSRSSVLKSRIKRDLALDRHAIYDRSREPDSNGEILSISERQMHILERATANMNVMTPALVASMELHCRDFATKAANNEDMVYGM

SEQ ID NO: 3108 - protein, 1054 aa, Phytophthora sojae
MERAACRPPGRLRDWKRRYACSTVRCKLGRVCPHPELINEIQICARLILKSTTEAWALANFHVLRQCEERGDIPDLTSSTFSPGAVESSAGAFAEETTFPDDVTKIDVLHGEAGGLMSVNATNMVVTQFRKHFTLFVRLWYGISAKETRKVVRACYSSDASERREVLEMKAWLGSAAWGEDGELEQVFPRKTVIKKHVGYFVRKLYEIMVFVEQNQIEQRRQQETIQEMEEEKRTKKGKGAKKPKEKRSKTIKMFSLLPLSQSFALYNIKIDPSTLAHLCSRIYKRTGENVLGVELTPNNRIPTRPYFTQRGSELMRRAFNITQFETRRTKIGKARFNGLSVDEKARHAARFFGDSIRSDGYAASVLMVQLTRLARSVGRREENEEDEELGDADEFDDDPDSESLVTETNGEEITEDEPELEPEEDTTHEQDPSIASEVSDSAPYPAPEPALRGIRARGFVGVDPGKKAPCTAAIIGKLCSKKKKPPPPPPPSPKPPRWHRNKRCPVEDRVSSTGPPRTPVRRRREPKLPKVQHEQRILQIKAGEYQHMSGSKKFNKWHEKLRLRFPEYQIAISSLPCLKTADARVFLVRMEQVWLSLDYFLDFGIAHNFRKWRFFSHVKHRIAVDDVAKWLIPEAGAHKAMRKRATVVKVHEFRTSKLCSACYQPMKMAVFLDPNDPGPDELDADERPLYYDRSVLRCANKNCKKNFLNRDVNAAVNMQTLLMARLQGLPRPAEFAAGQEDESVIAREEADPRCIPHCGSLSRMVVRLRDDIERLDSTYEWLAAQVGALENKWAQLDAQLEASTPRSYYDRVLQELSCSGDVSLLLEALSSGPELSGASESPREHGMGEASTGRFMTLQERAEHEQAVTPLTGTIDQSGATNGSVLEAWLAMERKYRSRQGVVDQVQKLESDVAQKEFLLAAVAPERLLSRVKQTLSWVGDIGLLREALDPSAVSASKAGLRQLVLLEVGSPPRDADSSMATLEERVAKMEPAPVEKLPASRPRVVGRKRSGARAVSEGDLGLAHSEAKRPAIRSTTSRPITRSMGDRELWHG

SEQ ID NO: 3109 - protein, 578 aa, Phytophthora sojae
MTMNHAAAEGWLLANFVVMHTIENPTGGGVLPPMDDKFFRRCMATVSKKSRPKKTFKAVFQKSKEKKVQPDLALEEWKWVDFERAADEYLMHRGGARPPDCKYICLGWFEQAATQIAKNTETSMWKNLARRLRQYVRVNCRTKKRQKKPAPTECQSCDAVNDIVGALREDIPRNQNQKVDWKSTDVLRLFHKYLKAVEEFNETNKDNPKIRQERVYSIIPTKQGFRSSYFSMTSTGLWDLLRRSRDRLDLDTIVYTEGGGSISLGDSIKKENWSGIENYDEIKGADPGFTDMFVACTYNVRSQTFSDDFLSYPAKKFYSDSGYSSSNRKIRLKIGHNTEIKKVFKDIPTKKTASLTKLMEYLDYTVAKMERLFSFFMTKTFRDMRFRRQMLAEKNLRAICRELAGKPDTRTLIAFGNWELNNSSGIIKKKTPGPVMKLQRMLMGYRGVDVMIVDEYLTSKMHHRCYSLAPMENQQVKHRCRDKVVRTVGVRKVYHCLKRNGGCGATVERDVNASKNMVEMALTQMREGEGVRSERLHGQIDLRITDLNNDYPKASSTDGDFLAADGYIRMAALRSSTN

SEQ ID NO: 3110 - protein, 324 aa, Phytophthora sojae
MTAVLASRTQFFRMKNEGKKTTFPVLGFRSERARSNSIGIRTKTEGFELVDDGGKHYVQFHSKFFGASLGKGIRLSHAVPTPEHMARLIRVRGGKYYFAFSTHKEFEQSAGTRVGGMDPGVRKYLKRRYEVIDARKSRLAKLDNAAKAAAKDRESTKLHTDQKVANAKTVKPPKSREHRRRARLRREIQQTNTKITNAVIDFHHKFASWIAATFKTFLLPSFQTSLMVRKYEVEMAADGTPEKRRICSPTARRMLGLRHYSFSQILKHKMERAGGRLISCDCGKIKENLGGKEVYKCDFCGAVMDLDLNGAKNIIAHEPASYAE

SEQ ID NO: 3111 - protein, 592 aa, Spizellomyces punctatus
MPPKKKQKLERLEKLDKPTLHTCNKTSFAKAFLPNETYRQRLLDYIAIIHQLASHASHALKFYTLSAPSFTVNEETIEAILYLLNKGEAWHPRKEAKKAWRDCLLPYVQRYCQIVGFVHPNLRGEQQSVNYLTVSMMTNLKVNVQEHFMQMLLRYINLRLDVKGRKGPPKSEARKAFFARLRYLKSIFLFDIVPESLDDLTAKESELLEEMWSFIPLSDQQLAYSVAVDPLAFFPAYCKLSGLYERHGFRRFSAIPLRRSLIQSHIRIDTVILYAHILCITRQEAEAVEKVDLWLRVCNLQNKAFRSRRRMWFEGSITTDGTSVSVYLKHPEADKYGKRSGGKKSANTMEAEVKALYVENNLSACQENFVVIDPNKRDLLYCQDSNGTTFRYTANQRAMETGSRRFAREREAMKAGGIDLIESRISSHKTMNLIDFMRYLLVRRADWDRRKEFYAHPAHTRWKWHASINRQKSESNLISNLHNKYGENFTIVMGDWSDAGRTARFQISSKTKGFKTRAHSRPYRRREGKVEKVHGLLGCTNPNCLQQAWTSGMRYWNRDTLSTCNMLMIVRSMLDGHCRPEVFSRRSVPAVA

SEQ ID NO: 3112 - protein, 638 aa, Spizellomyces punctatus
MPPKKKQKLERLKKLDKPTLHTCNKTSFAKAFLPNETYRQRLLDYIAIIHQLADHASHALKFYILSTSTSSFPVVHEDTIEAILYLLNKGEAWHPRKEAKKAWRDCLLPYVQRYCQIVGFIHPNLRGEQQSINYLTVSMMTNLKVNVQEHFMQMLLRYINLRFDVKGQKQRLPPKSDARKAFFTRLRYLKSVFLFDVVPELEFLDDLTPLESEVLEEIWSLDLPFLPNDPLAYAIVADPMSFFPAYCKLSGLYEQYGFQRFSAIPLRRSLIQSHVRIDTIILYQHILCITRRDAETVEKDDLWMRVCNLCTKAFRSRCGMHFEGSITTDGASVSVYLKHPEADKYGKRGARKSANTVAAEVKALYVENNLPACRAAENVVVIDPNKRDILYCQDSNGTTFRYTANQRAVETGSRRFAKRREAMKEEAGVDLIESRIPSHKTMNLMDFTRYLLVRRADWDRRKEFYSHPAHTRWKWHSFINRQKSESDLISNMRNKYGENFTVVMGDWSDAGRTARFQTSSKTKGWRTLFKRNRIDCFLLDEYKTSSVCPRCSSSEFVEKKFKTRPHSRPWRRREGKIEKVHGLLGCTNPNCLQQAWTSGMRYWNRDMLSTCNMLLIVRSMLDGHGRPEVFSRSVPAVA

SEQ ID NO: 3113 - protein, 592 aa, Spizellomyces punctatus
MPPKKKQKLEKLDKPTLHTCNKTSFAKAFLPNETYHQRLLDYIAIIHQLADHASHALKFYILSAPTFPTVNEDTIEAILYLLNKGEAWHPRKEAKKARRDCLLPYVQQYCRIVDFPHPNLHGEQQSINYLTASMMTNLKVNVQEHFMQMLLRYINLRLDVKGHKQRLPPKSDARKAFFTRLRYLKSVFLFDIMPESLDDLTAEESELLEEMWTLNLPFPDQDKPLAYSVTVDPLAFFPAYCRLSSLYEKHGFRRFSAIPLRRSLIQSHVRIDTVILYSHILCITRRDAEAVEKVDLWMRICNLRTKAFRSRRGMQFEGSITTDGTSVSVYLKHPEADKYGKRSGGKKSATTLTAEVTALYVEKNLPACRAAENVIVIDPNKRDILYCQDGNGTFRYTANQRAVETGSRRFAKERQRMKAGGIDLIESRIPSHKTMNLMDFTRYLLVRRADWNRRKDFYSHPAHTRWKWHAFINRQKSESNLISNLRNKYGENFTIVMGDWSDAGRTARFQTSSKTKGFKTRPHSRPWRRREGKIEKVHGLLGCTNPNCQQAWTMRYWNRDTLSTCNMLIIVQSMLDGHSRPEVFSRSVPAVA

SEQ ID NO: 3114 - protein, 238 aa, Spizellomyces punctatus
MHYHTANQRAVETGSRRFAKERQRMKAGGIDLIESRIPSHKTMNLIDFMRYLLVRRTDWDRRKEFYSHPAHTRWKWHAFINRQKSESDLISNMRNKYGDNFTVVMGDWSDAGRTARFQTSSKTKGWRTLFKRNRINCFLLDEYKTSSVCPHCLASSADFLEKGFKTRPHSRPWRRREGKIEKVHGLLGCTNPNCQQAWTMRYWNRDTLSTCNMLMIVQSMLDGHGRPEVFRRGVPVVA

SEQ ID NO: 3115 - protein, 628 aa, Spizellomyces punctatus
MPPKKKQKLENPTCLHTCNKTSFAKAFLPNDIYRQRLLDYIAIIHQLADHASHALKFYILSAPSFPTLDQDTIEAILYLLNKGEAWQPKADAKKALRGCLVPYIRRYCHIVSFVHPNLQKEQQSINYLTASMMTNLKVNVQEHFMQMLLRYINLRLDVKGQKQRLPLKSDARKAFFTRLRYLKSVFLFDIVPESLDDLTAEESELLEEMWSFIPLSDQPLAYSVAVDPLAFFPAYCKLSVLYERHGFRRFSAIPLRRSLIQSHIRIDTVILYQHILCITRREAETVEKVDLWLRICNLRNKAFRSRRGMCFEGSITTDGTSVSVYLKHPEADKYGKRSGGGKKSANTMEAEVKAQYVEKNLPACRVAENVVVIDPNKRDILYCQDSIGTTFRYTANQRAMETGSRRQQKERQQMKKGEIDLIESRIPSHKTMNLMDFTRYLLVRRADSDRRKEFYSHPAHTRWKWHSFINRQRSESDLISAMRNKYGENFTVVMGDWSDAGRTARFQTSSKTKGWRTLFKRNRINCFLLDEYKTSSVCPHCSSDDFLEKGFKTRPHSRPWRRREGNVEKVHGLLGCTNPNCLQQDWTSGMRYWNRDTLSTCNMLMIVQSIMDGHGRPEVFSRSVPAVA

SEQ ID NO: 3116 - protein, 632 aa, Spizellomyces punctatus
MPPKKKQKLEKLDKPTCLHTCNKTSFAKAFLPNETYRQRLLDYIAIIHQLADHASHALKFYILSAPTFPTVNEDTIEAILYLLNKGEAWHPRKEAKKAWRDCLLPYVQRYCQIVGFVHPNLRGEQQSVNYLTASMMTNLKVNVQEHFMQMLLRYINLRLDVKGQKQRLPLKSDARQAFFTRLRYLKSVFLFETMPESLDDLSILENEILEEIWTLNLPFPDQDKPLAYLIAIDAMSFFPAYCRLSKLFEQQGFQQFSAIPLRRSLIQSHIRIDTVILYAHILCITRQEAEAVEKVDLWLRVCNLRTKAFRSRCGMHFEGSITTDGTSVSVYLKHPEADKYGKRGARKSAKALAAEVKALYVENNLPACRAAENVVVIDPNKRDILYCQDSNGTTFRYTANQRCKETGSRRFAKERQRMKAGGIDLIESRIPSHKTMNLIDFMRYLLVRRADWDRRKEFYSHPAHTRWKWHAFINRQKSESDLISNMRNKYGENFTIVMGDWSDAGRTARFQTSSKTKGWRTLLKRNRINCFLLDEYKTSSVCPRCLASSDDFLEKDFKTRPHSRPWRRREGKIEKVHGLLGCTNPNCQQAWTMRYWNRDTLSTCNMLMIVQSMLDGHGRPEVFSRRSVPAVA

SEQ ID NO: 3117 - protein, 632 aa, Spizellomyces punctatus
MPPNKKQKLDNRPTCLHSCNKTSFAKAFLPNETYRQRLLDYIAIIHQLADHASHALKFYLLSAPTFPTVNEDTIEGILYLLNKGEAWHPRKEAKKAWRDSLLPYVQRYCQIVGFVHPNLRGEQQSINYLTASMMTNLKVNVQEHFMTMLLRYINLRLDVKGRKGQFPPKSEVRKAFFARLRYLKSIFLFDVVPESLDDLTAEESELLEEMWSLDLPFLPNNPLAYAIVADPMSFFPAYCKLSGLYERYGFRRFSAIPLRRSLIQSHVRIDTIILYQHILCITRPEAEAVEKDDLWLRVCNLCTKAFRSRRGMQFEGSITTDGTSVSVYLKHPDADKYGRRGGGKKSAKTMEAEVKAVYVENNLPACRAAENIVVIDPNKRDILYCQDSNGATMFRYTANQRCRETGSRQFAKRREAMKKEAGIDLIDSRIPSPKTMNLMDFMRYLLVRRADWDRRKEFYSHPAHTRWKWHSFINRQRSESDLISNMRDKFGNFTVVMGDWSDAGRTAKFQTSSKTKGWRILFRRNRINCFLIDEHKTSSVCPRCLASYNDFLEKDFKQRPHSRPWRRREGKVEDVHGLLGCTNPNCLQQDWTTMRYWNRDTLATCNMLTIVQSMLDGHGRPERFSRSVPAIA

SEQ ID NO: 3118 - protein, 629 aa, Spizellomyces punctatus
MPPKKKQKLEKLDKPTCLHTCNKTSFAKAFLPNETYRQRLLDYIAIIHQLADHASHALKFYILSAPTFPTVNEDTIEAILYLLNKGEAWHPRKEAKKAWRDCLLPYVQRYCQIVGFVHPNLRGEQQSVNYLTASMMTNLKVNVQEHFMQMLLRYINLRLDVKGQKQRLPLKSDARQAFFTQLHYLKSVFLFETMPESLDDLSILENEILEEIWTLNLPFPDQDKPLAYLIAIDAMSFFPAYCRLSKLFEQQGFQQFSAIPLRRSLIQSHIRIDTVILYAHILCITRQEAEAVEKVDLWLRVCNLRTKAFRSRCGMHFEGSITTDGTSVSVYLKHPEADKYGKRGARKSAKALAAEVKALYVENNLSACQENIVVIDPNKRDILYCQDNKGTIFRYTANQRCMETGSRRFAKERQRMKAGGIDLIESRIPSHKTMNLIDFMRYLLVRRADWDRRKEFYSHPAHTRWKWHAFINRQKSESDLISNMRNKYGENFTIVMGDWSDAGRTARFQTSSKTKGWRTLFKRNRINCFLLDEYKTSSVCPRCLASSDDFLEKDFKTRPHSRPWRRREGKIEKVHGLLGCTNPNCQQAWTMRYWNRDTLATCNMLTIVQSMLDGHGRPEVFSRGVPAVA

SEQ ID NO: 3119 - protein, 535 aa, Spizellomyces punctatus
MPPKKKQKFDNRPTCLHSCNKTSFAKAFLPNGTYRQRLLDYIAIIHQLADHASHALKFYLLSAPTFPTVNEDTIEAILYLLNKGEAWHPRKEAKKAWRDCLLPYVQRYCQIIGFVHPNLRGEQQSVNYLTASMMTNLKVNVQEHFMQMLLRYINLRLDMKGQKQQLPPKSNVRKDFFARLRYLKSIFLFDIVPESLDDLTAEESELLEEMWSFIPLSDNQPLAYSVAVDPLAFFPAYCKLSGLYERHGFRQFSAIPLHRSLIQSHVQIDTIVLYQHILCITRREAETVEKVNLWLRVCNLRTKAFRSRRGMQFEGLIMTDGTSVSVYLKHPGADKYGKRGARKSAKSLEDEVKAQYMEKNLPACRAAENVIVIDPNKHDILYCQDNSGMTFRYTTNQRAVETGSRRQQRQWQQMKKEAGVDLIESRIPSQKMMNLIDFMRYLLVRRADWDRRKEFYSHPAHTRWKWHAFINRQKSESDLISNMRNKYGENFTIVMGDWSDASRTARFQTSSKTKGWRTLFKRNRINCFLLDEYKT

SEQ ID NO: 3120 - protein, 493 aa, Spizellomyces punctatus
MTNLKVNVQEHFMMMLLRYINLRLDVKRQKQRLPLKSDARNAFFARLRYLKSIFLFDIVPESLDDLTAEESELLEEIWSLSIPLSDDQPLAYSVAVDPLAFFPAYCKLSRLYEHHGFRRFSAIPLRRSLIQSHVRIDTIILYSHLLCITRREAETVEKVDLWLRVCNLQNKAFRSRRGMCFEGSITTDGTSVSVYLKHPEADKYGKRSGRGKKSAKALAAEVKALYVENNLSACQENIVVIDPNKRDILYCQDNKGTIFRYTANQRCKETGSRRFAKERQRMKTGGIDLIESRIPSHKTMNLMDFTRYLLVRRADSDRRKEFYSHPAHTRWKWHAFINRQKSESNLISNLRNKFGNFTIMMGDWSDAGRTARFQTSSKTKGWRTLFKRNRIDCFLLDEHKTSSVCPRCSSSEFVEKEFKERPHSRPWRRREGKMEKVHGLLGCTNPNCLQQAWTMRYWNRDMLATCNMLTIVQSMLDGHGRPKVFSRGVPAVA

SEQ ID NO: 3121 - protein, 268 aa, Spizellomyces punctatus
MTDSTSVSVYLKHPEADKYGKHSGRGKKSANKMEAEVKALYVENNLPACQAAENIVIIDPNKHDLLYCQDSNGATMFRYTANQCCKETDSDHRKEFYSHPAHTQWKWHAFINRQKSESNLISNMRNKFGNFTIVMGDWSDAGRTARFQTSSKTKGWRTLFKRNRINCFLLDEYKTSSVCPHCLASSADFLEKGFKTRPHSRPWRRREGKIEKVHGLLGCTNPNCQQAWTMRYWNRDTLSTCNMLMIVQSMLDGHGRPKVFSRGVPAVA

SEQ ID NO: 3122 - protein, 580 aa, Spizellomyces punctatus
MPPKKKQKLERLEKLDKPTCLHTCNKTSFAKAFLPNDIYCQRLLDYIAIIHQLADHASHALKFYLLSSSAPVFPTVNQETIEAILYLLNKGESWQPKTGAKKALRESLLPYIQRYCNIVGFVHPNLQKEQQSVNYLTASMMTNLKVNVQEHFMMMLLRYINLRLDVKGQKQRLPLKSDARNAFFARLRYLKSIFLFDIVPESLDDLTAEESELLEEMWSFIPLSDQLLAYSVAVDPLAFFPAYCQLSSLYEQHGFRQFSAIPLRRSLIQSHVRIDTVILYSHVLCITRREAETVENVDLWLRVCNLQNKAFRSRHGMCFEGSITTDGTSVSVYLKHPEADKYGKRSGGKKSANTMEAEVKALYVEKNLPACRAAENVIVIDPNKRDILYCQDSNGTAFRYTANQRAMETGSRRFAKRREAMKKEAGVDLIESRIPSHKTMNLMDFTRYLLVRHHADSDRRKEFYSHPAHTRWKWHSFINRQRSESDLISNMRNKPHQGRKAGAPSLSATGSTASFSTSTRPHLFALAVPLALKKASKHDLIQDLGGDAKARLKKSTDCWVVPTLTVCSKPGRCATGIEIR

SEQ ID NO: 3123 - protein, 627 aa, Spizellomyces punctatus
MPSKKKQKLEKLDKPTCLHTCNKTPFAKAFLPNEIYRQRLLDYIAIIHQLADHASHALKFYILSAPSFTVNEETIEAILYLLNKGEAWQPKTDAKKALRRCLLPYIQRYCHIIGFVHPNLQKEQQSVNYLTVSMMTNLKVNVQEHLMQMLLWYINLQLDVKGQKQRLPLKSDARKAFFTRLRYLKSVFLFETMPESLDDLSILENEILEEIWTLNLPFPDQDKPLAYLIAIDAMSFFPAYCRLSKLFEQQGFRQFSAIPLRRSLIQSHVRIDTVILYSHVLCITRREAEAVEKVDLWLRVCNLRTKAFRSRCGMHFEGSITTDGTSVSVYLKHPEADKYGKRSGGKKSANTMEAEVKALYVENNLSACQENFVVIDPNKRDLLYCQDSIGTTFRYTANQRAVETGSRRFAKRREAMKKEAGVDLIESRIPSHKMMNVMDFTRYLLVRRADSDRRKEFYSHPAHTRWKWHAFINRQKSESNLISNMHNKFGRNFTIVMGDWSDAGRTTRFQTSSKTKGWRTLFKRNRIDCFLLDEYKTSSVCPHCSSDVEKGFKTRPHSRPYRRREGKIEKVHGLLGCTNPNCQQDWTMRYWNRDTLSTCNMLMIVQSMLDGHCRPEVFSRRSVPAVA

SEQ ID NO: 3124 - protein, 568 aa, Spizellomyces punctatus
MPPKKKQKLEKPTCLHTCNKTSFAKAFLPNYHQRLLDYIAIIHQLADHASHALKFYILSAPSFTVNEETIEAILYLLNKGEAWHPRKEAKKAWRDCLLPYVQRYCQIVGFVHPNLRGEQQSVNYLTASMMTNLKVNIQEHCMTMLLRYINLRLDVKGRKGQLPPKSDARKAFFTRLRYLKSVFLFDIVPESLDDLTAEESELLEEIWTLNLPFPDQDKPLAYLIAIDAMSFFPAYCRLSSLYEKHGFRRFSAIPLRRSLIQSNIRIDSKILYQHILCITQREAEAVEKVDLWLRVCNLRTKAFRSRCGMHFEGSITTDGTSVSVYLKHPEADKYGKRSGGKKSANMMEAEVKVQYVEKNLPACRAAENIVVIDPNKRDILYCQDSNGTTFRYTANQRAMETGSRRFAKRREAMKKKAGIDLIESRIPSHKTMNLMDFTRYLLVRRADWDRRKYFYSHPAHTRWKWHAFINRQKSESNLISNLRNKYGENFTIVMGDWSDAGQTARFQTSSKTKGWRTLFTTALIVFFLMNTRPHLFALAVHPLSLLRKASKNDLIQDLGGDMKASKPG

SEQ ID NO: 3125 - protein, 605 aa, Spizellomyces punctatus
MPPKKKQKLERLEKLDKPTCLHTCNKTSFAKAFLPNYHQRLLDYIAIIHQLADHASHALKFYILSAPTFPTVNEDTIEAILYLLNKGEAWQPKTDAKKALRKCLLPYICQYCRIGFVHPNLRGEQQSINYLTASMMTNLKVNVQEHFMQMLLRYINLRLDVKGQKQQLPPKSDVRKAFFARLRYLKSIFLFDIVPESLDDLTAEESELLEEMWSFIPLSDQPLTYSVAVDPLAFFPAYCRLSSLYEKHGFRRFSAIPLRRSLIQSHVRIDTVILYSHILCITRRDAEAVAKVDLWMHICNLRTKAFRSRRDMQFEGSITTDGTSVSVYLKHPNADKYGKRGARKSAKTLEAEVKARDILYCQDGNGTTFRYTANQRAMETGSRRQRKEQQQMKKEVGMDVIESRIPSHKTMNLMDFTRYLLVRRADSDRRKEFYSHPAHTRWKWHSFISRQRSESDLISAMHNKYGENFTIVMGDWSDAGRTARFQTSSKMKGWRTLFKRNRIDCFLLDEHKTSSVCPRCSSSEFVEKEFKERPHSRPWRRREGKMEKVHGLLGCTNPNCLQQAWTMRYWNRDTLATCNMLTIVQSMLDGHGRPEVFSRGVPAVA

SEQ ID NO: 3126 - protein, 492 aa, Spizellomyces punctatus
MMTNLKVNVQEHFMQMLLRYINLRLDVKGQKQRLPLKSDARKAFFTRLRYLKSVFLFDTVPELLDLTPLESEVLEEIWSLDLPFLVDNPLAFAVVVDPMSFFPAYCRLSSLYEKHGFRRFSAIPLRRSLIQSHIRIDTVILHQHILCITRQEAEAVAKVDLWLRVCNLQNKAFRSRHGMCFEGSITTDGTSMSVYLKHPDADKYGKRGARKSAKTLEAEVKAVYVENNLPACRAAENVIVIDPNKRDILYCQDSNGTTFRYTANQRCKETGSRRIAKRREAMKAGGIDLIESRIPSHKTMNLMDFTRYLLVRRADSDRRKEFYSHPAHTRWKWHAFINRQKSESNLISNLRNKFGNFTIVMGDWSDAGRTARFQTSSKTKGWRTLFKRNRIDCFLLDEYKTSSVCPHCSSDVEKGFKTRPHSRPYRRREGKIEKVHGLLGCTNPNCLQQAWTMRYWNRDTLSTCNMVTIVQSMLDGHGRPEVFSRRSVPAVA

SEQ ID NO: 3127 - protein, 234 aa, Spizellomyces punctatus
MDGTSVSVYLKHPEADKYGKRSGGKKSATTLTAEVTALYVEKNLPACRAAENVIVIDPNKHDILYCQDGNGTFRYTANQRAMETGSRRFAKERQQMKAGGIDLIESRIPSHKTMNLMDFTRYLLVRRADWNCRKDFYLHPAHMRWKWHAFINRQKSESDLISNMRNKFGNFTIVMGDWSDAGRTARFQTSSKMKGWRTLFKWNRINCFLLDEYKTSSVCPRCSSSEFVEKGFKE

SEQ ID NO: 3128 - protein, 600 aa, Spizellomyces punctatus
MPPKKKQRLEKLDKPTCLHTCNKTSFAKAFLPNDIYCQRLLDYIAIIHQLADHASHALKFYILSAPTFPTVNEDTIEAILYLLNKGEAWHPRKEAKKAWRDCLLPYVQRYCQIVGFVHPNLRGEQQSVNYLTVSMMTNLKVNVQEHFMQMLLRYINLRLDVKGRKGPPKSEARKAFFARLRYLKSIFLFDIVPESLDDLTAKESELLEEMWSFIPLSDQPFAYSVAVDPLAFFPAYCKLSGLYERHGFRRFSAIPLHRSLIQSHIRIDTLILYAHILCITRREAEAVEKVDLWLRICNLQNKAFRSRHGMCFEGSITTDGTSVSVYLKHPEADKCGKRGARKSAKSLEDDVKAQYVEKNLPACRAAENVIVIDPNKRDLLYCQDNSGTTFRYTANQRAVETGSRRFAKRREAMKEEAGVDLIESRIPSHKTMNLMDFTRYLLVRRADWDRRKEFYSHPAHMRWKWHSFINRQRSESNLISNLRNKFGNFTIVMGDWSDAGRTARFQTSSKTKGWSTLFKRNRIDCFLLDEYKTSSVCPRCSSSEFVEKKFKERPHSRPYRRREGKVEKVHKRGTLYDHVTSISGCPGNAHSEQATSSLAS

SEQ ID NO: 3129 - protein, 392 aa, Spizellomyces punctatus
MSFLPAYCRLSSLYEKHGFQRFSAIPLRCSLIQSHIRIDTVILYAHILCITRQGAEAVEKVDLWLRVCNLRNKAFRSRRGMQFEGSITTDGTSVSVYLKHPEADKYGKRGARKSAKSLEDEVKVQYMEKNLPACRAAENVVVIDPNKRNILYCQDNSGVTFRYTANQRAMETGSHRFAKERQQMKKEAGIDLIESYIPSHKTMNLMDFMRYLLVCHHADSDCRKEFYSHPAHTRWKWHSFINQQQSESNLISNLCNKYGENFTIVMGDWSDAGRTARFQTSSKTKGWRTLFKRNRINCFLLDEYKTSSVCPHCSSGIEKGFKTRPHSRPWRRREGKIEKVHGLLGCTNPNCQQAWTMRYWNRDTLSTCNMLMIVQSMLDGHGRSEVFSLFQP

SEQ ID NO: 3130 - protein, 217 aa, Spizellomyces punctatus
MKEEAGVDLIESRIPSHKTMNLMDFTRYLLVRRADWDRRKEFYSHPAHTRWKWHSFINRQKSESDLISNMRNKYGENFTVVMGDWSDAGRTAKFQTSSKTKGWRTLFKRNRINCFLLDEYKTSSVCPRCSSSEFVEKGFKERPHSRPWQRGKVEKVHGLLGCTNPNCLQQDWTLRMRYWNRDTLATCNMLTIVQSMLDGHGRPEVFSRSSRSVPAVA

SEQ ID NO: 3131 - protein, 627 aa, Spizellomyces punctatus
MPPKKQRLEKLDKPTLVTLHTCNKTSFAKAFLPNEIYHQRLLDYIAIIHELADHASHALKFYILSAPSFPMVDQDTIEAILYLLNKGEAWHPRKEAKKAWRDCLLPYVQRYCQIVGFVHPNLRGEQQSVNYLTASMMTNLKVNIQEHFMTMLLRYINLRLDVRGRKGPPKSEARKAFFARLRYLKSIFLFDIVPELLDDLTAEESELLEEIWSLDRPFLVDNPLAYAVVVNPMSFFPAYCRLSSLYEKHGFRQFSAIPLRRSLIQSHVRIDTIILYQHILCIARREAETVEKVDLWLRVCNLRNKAFRSRRGMCFEGSITTDGTSVSVYLKHPEADKYGKRGGGKKSAKTLEAEVKAVYVENNLPACRAAENFVVIDPNKRDLLYCQDNKGTIFRYTANQRCKETGSRRFAKERQRMKAGGIDLIESRIPSHKTMNLMDFTRYLLVRRADSDRRKEFYSHPAHTRWKWHAFINRQKSESDLISNMHNKFGNFTIVMGDWSDAGRTARFQTSSKTKGWRTLFKRNRINCFLLDEYKTSSVCPCCSSDVEKGFQTRPHSRPYRRREGKIEKVHGLLGCTNPNCLQQAWTSGMRYWNRDTLSTCNMLMIVQSMLDGHGRPEVFSRSRSVA

SEQ ID NO: 3132 - protein, 625 aa, Spizellomyces punctatus
MPPKKKQKLEKLDKPTLHTCNKTSFAKAFLPNETYRQRLLDYIAIIHQLADHASHALKFYILYAPTFPTVNEDTIEAILYLLNKGEAWHPRKEAKKALRGCLLPYIRRYCQIVGFIHPNLRGEQQSINYLTASMMTNLKVNIQEHFMQMLLRYINLRLNVKGRGRLPLKSDARKAFFARLRYLKSIFLFDVMPESLDDLTAEESELLEEMWSFIPLSDQPLAYSVAVDPLAFFPAYCKLSVLYERHGFRRFSAIPLRRSLMQSHIRIDTVILYQHILCITRREAETVEKVDLWLRVCNLRNKAFRSRRGMQFEGSISTDGTSVSVYLKHPEADKYGKGARKSAKSLEDEVKVQYMEKNLPACRAAENIVVIDPNKRDILYCQDSNGTTFRYTANQRAMETGSRRQRKERQQMKKEAGIDLIESRIPSHKTMNLMDFTRYLLVRRADSDRRKEFYSHPAHTRWKWHAFINRQKSESDLISNMHNKFGNFTIVMGDWSDAGRTARFQTSSKTKGWRTLFKRNRINCFLLDEYKTSSVCPHCLASSADFLEKGFKTRPHSRPWRRREGKIEKVHGLLGCTNPNCQQAWTMRYWNRDTLSTCNMLMIVQSMLDGHGRPKVFSRGVPAVA

SEQ ID NO: 3133 - protein, 581 aa, Spizellomyces punctatus
MPPKKKQKLDNRPTCLHSCNKTSFAKAFLPNGTYRQRLLDYIAIIHQLADHASHALKFYILSAPTFTVNEETIEAILYLLNKGEAWHPRKEAKKAWRDCLLPYVQRYCQIVGFVHPNLRGEQQSVNYLTASMMANLKVNVQEHFMQMLLRYINLRLDVKGHKQRLPLKSDARQAFFTRLCYLKSIFLFDIVPESLDDLTAEESELLEEMWSFIPLSDQPLTYSVAVDPLAFFPAYCRLSSLYEKHGFRRFSAIPLRRSLIQSHVRIDTVILYSHILCITRRDAEAVAKVDLWMRICNLRTKAFRSRHDMQFEGSITTDGTSVSVYLKHPEADKYGKRGARKSAKALAAEVKVLYVENNLSACQENIVVIDPNKRDILYCQDNKGTIFRYTANQCCKETGSRRFAKERQRMKAGSIDLIESRIPSHKTMNLIDFMRYLLVRCADWDRRKDFYSHPAHTRWKWHAFINRQKSESNLISNLCNKYGENFTIVMGDWSDAGRTARFQTSSKTKGSTASFSTSIKPHLSALTVHPMTSLKKVSKHDLIQDLGDDEKARLKKSMDCWVVPTLTVSKPGRCATGIEIR

SEQ ID NO: 3134 - protein, 1534 aa, Salpingoeca rosetta
MQNPACNQLSQACCARITGRIVRHVQTLTKMFRRVIIVDETPTAYKLRDSGTPSCLVRQLRAAIEQKTSAEFTTAPGEADHQLAAMLRRKEIHVALFPSSDSDMLLHDAGDGIIVFRHTLQRKAGRVRLRGVCIRKRHKLCMADGIVAILAGCDVFKRAATADTTAAATADTTADTTATATADTTDADTADTTTTAATAAATANRLGFWPAVAAVDRHIRADGDFIASAVAFFCGPVHLDGREQMLAPMPDNFTTLRPPLNQDNDPHQHCIPGRVRVMKNTSRRTGKRVFRRISKQIHTSMQLAQESPRVPQRVQEREAGKQVQTRAQTKEQKKQRAETHVTGRKKKKEDTKKKKKNTKKKDTASVDGGDDARSFFWHADTAAVIPEPASPATPQAKAETPVQLQHQWGLVSVVPHGHDTTAPCLSDKIIAAHKKRQEKKAKEKAEKRAKQQAAKQKQQEQQQEQQQEQQQEQQQEQQQEQQQEQQQQQQQQQQQQQQQQQQQQQQQQQQQQQQQHQQPAASAHPQSHAAPQSPPPKKPSTHQRSRKVRIYPSRVQRQWLNTYFAAATEAYNAAVDDHNAGAAYDGAYARRDGVRVLMRLNQLAALTDEDLKQAYTQQDEAAQRQQQLKEEFERLLQPPPPPPKKPSTHQPAASAHRQAHAAPKQPPPPPPPKKPSTHQPVASAHRQAHAVPKQPPPPPPPKKPSTHQPVASAHRQAHAVPKQPPPPPKKQSKRPGSSPVSPAVLLLLRLQSQGDDKACSGDCGQDTSPTGSTTACTQHQQQPSKKAKMLPPLQLPQVDGAGDLGDDELDGDHQDDDAPSDDAPGPATKKAKSKPRRCTVCRQSGHDKRSCRQTSQSKPQPQHQKQQQKQTQKQKAPQSGQTQSSPPLPPLPPLPPLPDLAKARASLLQLRKLNDELQAAVRERDEVQEVVDDLLDPVEHDRAARSLKDKQVVADTKHRHFLHALQALKTMLLNELQEFQACRRAAKSRKEALAEEHAAKQEALAEEHAAKQEALAEEHAAKQEALAEEHAAKQEALAEEHAAKQEALAEEHAAKQEALAEEHAAKQEALEKHQQREVADLEQRQVQEIRDCTLTDAYARKIADVHRSTWLMTKKGMAVSSWTGSILEFHTALKTQQQRQEENDTFKFHMNFRGQARFTLDASGRYHICVASNFTRGAPDDVGTLGQSLLQVERPVLAGCDDGLQEVEEEEEARAKCEEHGGGDMAMQALEEKARVRERKMGEVARRLQAEAREARRRWVRLRRAKAIDKQTQEAEAEFQAARERHAAHLDWRRRLRKRRRLLRMKERNALLRERRGGVVSIDPGVRVPFTLWTASGTVSIAHDAIEELRMLLRNADDIRADADLLEVAVQEGEARGEGDVAAARRRHRQQLRVVRNRVDHLHRVVANYLVMSFRVVLLPRFGTSRMIRRSGRPFGRDTARSMGVWAHHRFRQLLLDRAEREPGCTVVICDEAWTSKTCGRCGRLHHSLGADDVFACPHDSCRYVAGRDANAARNILLLWLYRNDIQLAPVPAP

SEQ ID NO: 3135 - protein, 948 aa, Salpingoeca rosetta
MLLFHHLQELTLTRYGVRLSLRDLRLDTLQLAAVLSGCDYLPKHSGAHIHGIGMRTAMYVTHKYKTYTDIMQHLRQKYIITDDLDARVRHAMLAFACQVVWDDTEKARRRLPPLAPEPADDDGDSAHPATTPLFEFTSDPANEGHTVAGVVHVENAVERARGRADPDTGHTCHSVRLRPALKAIVSDMRNGRLETTSHRTRRPGRKPHDRNGRDDCGKSTKQGKRGQKRRGQDQNKNPRVAVLMPFKRLGVELERSKVLEMCRYAGQMKCTATTALYLHILRTAEQHHREILSTLADLAQTTRKEIVERKVAFREAQERAEGVEDLKKKKKKKKDHKKSRAASPSDNPCKRAKGAAATTAATATTPPATATTVTAAATGKSPRPAYCFQHLAPQLTADKLSNLFTTLRNHKKHSQHPMLSILRQHGVGIPDPPKWMTATMAYKLLNLASKEFTPLLQRDLKNKARAAQRQLKKVAEHHDEGARFACEHTAELALYIGAAQHLARTLAPPDTDLTSLKIFPTFTNKHPFIQLDAGLLRDLTCFKCGRLGHSQRQCRQPAAVRPPPRQALSLLDFLGADVARQFRKRRVTSIRTDGYTAYLLVEPSARRDTVCDTSPITPVVGVDPGTRIPLACVRIQDGKKMIVSQKRIVNQLYTGRGRRHHKPTATVPARSGGSDEGGEQGGAMGKGETGSRRKKRERGKRTKRERSRRRKEKARIEKEEQLRRQQQEEQGGRDKGEGQEGRDKGEEEREQREREEQGGGAEPGSVDDVVASARECLREGVSRRELKWRLHEKLKHCRFRSRVAGELATRFGRDCRVFFGDCVHKGRGGGTKAPILELRRAIGCRVDTKIVEEFRTTKYSLCCAWPNRIDEQTRIATCTHCGASADRDVAAAKTIAARSLVEEANGELGPWRGSSEPDRPDMDNGLVTVSRRMCREWSIANHRHHLGL

SEQ ID NO: 3136 - protein, 707 aa, Salpingoeca rosetta
MTSAAVARHLAKARASLLQLRKLNDELQAAVRERDEVQKVVDDLLDPVEHDRAVRSLKDKQVVADTKHRHFLHALQALKTMLLNELQEFQACRRAAKSRKEALAEEHAAKQEALAEEHAAKQEALAEEHAAKQEALAEEHAAKQEALAEEHAAKQEALAEEHAAKQEALAEEHAAKQEALAEEHAAKQEALAEEHAAKQEALEKHQQREVADLEQRQVQEIRDCTLTDAYARKIADVHRSTWLMTKKGMAVSSWTGSILEFHTALKTQQQRQEENDTFKFHMSRQAARNTIPVDAVNLKQTRGMFAVMCVDKLRVAEPLPAAKDFRGQARFTLDASGRYHICVASNFTRGAPDDVGTLGQSLLQVERPVLAGCDDGLQEVEEEEEARAKCEEHGGGDMAMQALEEKARVRERKMGEVARRLQAEAREARRRWVRLRRAKAIDKQTQEAEAEFQAARERHAAHLDWRRRLRKRRRLLRMKERNALLRERRGGVVSIDPGVRVPFTLWTASGTVSIAHDAIEELRMLLRNANDIRADADLLEVAVQEGEARGEGDVAAARRRHRQQLRVVRDRVDHLHRVVANYLVMSFRVVLLPRFGTSRMIRRSGRPFGRDTARSMGVWAHYRFRQLLLDRAEREPGCTVVICDEAWTSKTCGRCGRLHHSLGADDVFACPHDSCRYVAGRDANAARNILLLWLYRNDIQLAPVPAP

SEQ ID NO: 3137 - protein, 485 aa, Salpingoeca rosetta
MLSILRQHGVGIPDPPKWMTATMAYKLLNLASKEFTPLLQRDLKNKARAAQRQLKKVAEHHDEGARFACEHTAELALYIGAAQHLARTLAPPDTDLTSFKIFPTFTNKHPFIQLDAGLLRYLTCCKCGRLGHSQRQCRQPAAVRPQPRQAPSLLDFLGADVARQFRKRRVTSIRTDGYTAYLLVEPSARRDTVCDTSPITPVVGVDPGTRIPLACVRIQDGKKMLVSQKRIANQLYTGRGRRHHKPTATVPARSGGSDEGGEQGGAMGKGETGSRRKKRERGKRTKRERSRRRKEKARIEKEEQLRRQQQEEQGGRDKGEGQEGRDKGEEEREQREREEQGGGAEPGSVDDVVASARECLREGVSRRELKWRLHEKLKHCRFRSRVAGELATRFGRDCRVFFGDCVHKGRGGGTKAPILELRRAIGCRVDTKIVEEFRTTKYSLCCAWPNRIDEQTRIATCTHCGASADRDVAAAKTIAARYGSM

SEQ ID NO: 3138 - protein, 501 aa, Salpingoeca rosetta
MRWAVTEAIRDMYLKCAEEHDILGELQELAQTTRKRYVQAKIDFRKTGKWDKEVKTPTEPATFSSKVVELSAHGMGRVCTRMRQHARNKEARQPDPQGIERFFGDRVPTRPSFMSATAAHTLLNLQFRLMEGNCRLYLRVAARKAAARSSRAGGGCLASVLSKNVRSIRTNGHIAYLIQKKAPATSTATSSSRSTGTSKKAGKTEATDVKPDVCRVVGLDPGTRKPLVAVRLGDGKKYTVSQARLVSECGVKAGRTSARGATSTDGDDGDNDGDDDEGDDVNCDDDDDGAIKDSKVGHGHPEDRGGDDAKGACEDASSGDDGRGPPALSGRRLKRKLHTRMKAIRPYQQRALAAAGANVHRGRGGGAKSSTLRLRRMLEARAPLQTVDEFRTTRYSLCCAWPRDIDASRQSRCKSCGDTRDRDAAAAVTIACRTLTAQAGGNLGVWQRRTCSPQIPDRHNALRRTHRRVQRMWSVRMRAATVANRLLKLNSRLGKTSPHRQ

SEQ ID NO: 3139 - protein, 1658 aa, Cavenderia fasciculata
MKHNKKGLKKEKKQNIDTDERETLWTLADQNSSRNTEMPWQIDEYICIGRLPYNYVLQQGNGSIQTKVNEVFPVGVILAIKEPYFKVTVAGNLAVRIDDHPHPENQMWKDSLFSKLPKDIEGWRTRGNDYYTKGNYECALGCYNSALQLDQQHAIMLLNKLAAILALKRYHECIPLGHVLLSKLPKEPKVYARMQVAMEKEFAGKSLKDVIAIGIDPNTCSITVVNNHDDKVLDMRMDTLMVKRNTKFLLEKISCHMGKAIKSFESCLPSLKFNVLNPQTFQSRLDYYEKYCDYFDIYFEAINDPIVLSWKRNFAFKKQKLNKEFYQQFDNYILDLFKDHFPTKYASMNDSERNQYIQDNTIIFFGNAKFGHNTRGKVTTFAAKTVANKLKSKQYSVVYINEYNTSRLGKEKDGGQPTNVQQCSPISEACQSAAKGNSFLRCSDHRHRLALVKQDTLSKEYKESLGFLKSIDDLDKKLQSHNLLNVAGQCRTRKVTPSDVAGSETESRQDSQKVASTQSSSSSTKKFDYRHGQNKYGPEIRKSIMMSTQRYKVNKRISVSYESSSSTILATTIENDQITSSNNSSCISSTSNTTRTTPLSMSSLLMLPQMSPFILGYALEDMDSLDEIATIPSSTSFPLHPFVDYSSFSFLALYFNQNNNNQNDNNNNIDSSLNLSKSLVNLYNRLQSNNVLDITMEQLVWIIYLVLDYYHKTFAKSTPKMTTPHVDVLSSFIPLHTPYSEMGGDETILNAIQSMSSDEQREESYNDCMKIFTKRYKSLDQLVQWTVKEFIGNDIALPIFKNLFAMTFRVYNLVKVAAMVPISIGPNITFNGFLPIPHHLLHTIVHYSSKTKNNNNNNNNNLQQNLFKVAIENQHNENKNNVEMVASLKRKIYKDSPIYLDSIEIMTLKEYNASILNNGQKIATDSSSFIGGTTDQDEYSFELISNEDLLLFYGYTLDDYDNISFNIDAFKPQSQLMSEYNGDELEREIKLMNAKLKILKEIGVYKQEEKDQDNSSDKQKNQDQSPHNNSFSYLDIKTGNYRDILTRDKQLGINLLEVTRISKLREMESYFYEKGQCHTLICNRNELETLVYLSRHLGTVQRNITTKISIINKAISDTPSYSLSSSNTQGSPSILLTEMEKYYKNHQSIIEHSLQFISTLKTQHCRNACKQVSFVKPTDVVYRKFEKWLTDGGVHFPKLQIANFNDSTGRGVVTTKKVEENECVVSVPRKFLINVDCARKHPVLNSILFEEATGLNDDTILFLFVIYEKENPNSFWRPFFDTLPSYFPTSIHYTTTELLELEGTNLFEETIQIKEHLESIRELLFPELSNQYPDVFPESLFTMENFLWARSLFDSRAIQLKIDGRIVNCLVPMADMINHHDQAQISQRYFDQENDCFRMISCCNIPATSQIFLQYGALQSWELALYYGFVISNNHYDSVHIGFDMPEEDTPELREEKQKLLDRHLLTVDHHYLHRSNIPSKLLASLRVALLAEDEFNPHVDVWNPISRSNEEVVLYTLYSTVLMLLKQFSSTCDEDQQLLEQLMTITKSIKEKKKEQEQGGNEDEEEEEEEEEEEEEDNQTDEESTEQMKIVLQYRIEQKQILVSTLESIITSMKEIGMEIPQSPSSYDQDEDQDDDDYDSFENDSSSSDENDDNNNK

SEQ ID NO: 3140 - protein, 1868 aa, Cavenderia fasciculata
MDAKVSCFNKKIVSFSLLYDWICWKISPLRLFAITVCANEKVVSDVQISMNSRLLPYHLKKRQKLEESFPEQSLVSQKNGQDGTPMDDSDDDDDDDDESWKYLPMVCEQCDATIPILSEHEKRLDLCGDLMDLYSVDIQLKRNAFEKMPPFDSKDDLFPPPVPLIAEINHRLVKFDQPESPHVEIFLHEALNTTSIALNSNRSGIAPSMRNLFNLIKTTSDPSMQFRIRDAYPFVHDSSTGGFENEIKHEIMVKELMNHFSMTTSKLIIVCGQFPCKAAKEAFNANPLDYEMVDYSQESYHTILDKAKGTTEDKEVDVSRIVPKRLIAIAPHPSVMFALHITAAYILIAHDIYKMAPKVSQFDPVQTFKSNSPSSASSSFSSTSLSSTSSSSSASSSSSSASSSSSALSPSSSSSSTSLSSTSSSSSASSSSSSLSSTSSSSSSPSSSNQNTTKRPNLSNKTKDFPKLKQWTLEHLVEEATSRKIDVENIKEDRLQVECVLLKSVLGVQIWSEQKIEQFDLEKSNSKKDILTYAREKNIPLTDYWFFMTLETLKKAVQRCLASTSSPSPSSYLPTPSSPLTDISLPSSPSLTDAPPTSSSSDTSTPPSSTDTSSLTDTSTTSSETETPPSSTDTSSLTYTSLPSHSFSYSSYSKPFVKNEKCVYKDEEKHIRAKRDFYHSGMCRRRRSKWKVMRENNRGNYLYIGIDPGRSKCTIVDSMNRARVVSVASYYNLMGTDRLLARQQNYKKNPVLSKFESGLPTYNTFDTLFNVESVLRRIEYERFTHRDQCRLYSHVVTSYTFQTMDKNRNIDKKRAQYAYAKSFVPPTTIPKNRIVIYIGGSDFFRGSRGGGRTGCTSKTLLRLFLNMGYKARLVNEFNTSKIHNACASKIHSTNNNKFLKKAKHQKVKNVLPESFEKTHVVGAPISSTFSDNGVRWQGKDSKLCDGCKLTDYNCQCSKAQLADKENDSTLKVSQLADDMNETLKVFISLENTSPSPTMLLESLFSLSKKTVKELIEFCNLNSIKYHQQEEPTKGKNKRGSHKDSKGGATNSKKDQLINAIIKFNFEKQKRDASKNKKKRSKSSSTTNDRCKDQDQSNSQKDGNKSTSNSVSTHDYGFGKSLCDSQIKDLWKSMNPNATEMPFKTKWQWLYCPVCDHFFNRDTSAAKNILLLGILHQTADYRPWIYRPLPADIVHIGRKIDLATLQELDLSSQGFTETSSFSRLKALEILDLSTNRFQLIRHIKGLFDLPRIKQLKLKGNPVTKAEAYRLTVIANLPTLQVLDDIVEVKDPLLNPSSSSSSSSTDDSNDILEANVKEPEPPKKVEKPVVVEKKEEKPVVATPKEEPKPTPTPTPTPKPAAPVEKKEEKPVAAVAPKVVEKKEKPIEKEIKKKLVFVDEDTLFDSKPKAQLSFEEEEDKSKLLFGDDDDSDLKALEKKKAPAKKAAEPKKLLFEDDDDGDSLFAPSKSTKAANNSNTKSSDDLDDLFSSFGGGQDKSISKEFDVSSYIESQKNRKKQSLFEMENENIDIIPDSPTLNSNNNNNNSNGIDYSPSSPSSLISGYTKPKHRPKLYPFHFNIHLPNSRNRAKWRYDLGAFIESHRVQVFIVGLIILDLVITIVELFLEETYKCTDHHDIPHAVQTAEDVFQIMTLVLLGLFEIEIIGLLLSFGFDFFKHPLYVLDAIIITVSIVVDVVFRESASNLLVIFRLWRLVRVGHGIAVSVETHDRNKYKHLKRHFKKCKAHYKQVEEENQELRKRLDLSSPSSHFSPSHIPGISNNNTTTTSTTKRQDNNNNHSNTSRNDLSTSPTFSPSTFTSMDSPTVSNHSSGPQSRKIYKQTKTKKNKKSNTSKYPSDDDDDDDDDEISQDEDQ

SEQ ID NO: 3141 - protein, 1221 aa, Cavenderia fasciculata
MDAKVSCFNKKIVSFSLLYDWICWKISPLRLFAITVCANEKVVSDVQISMNCRLLPYHLKKRQKLEESFPEQSLVSQKNGQDGTPMDDSDDDDDDDDESWKYLPMVCEQCDATIPILSEHEKRLDLCGDLMDLYSVDIQLKRNAFEKMPPFDSKDDQFPPPVPLIAEINHRLVKFDQPESPHVEIFLHEALNTTSIALNSNRSGIAPSMRNLFNLIKTTSDPSMQFRIRDAYPFVHDSSTGGFENEIKHEIMVKELMKHFSMTTSKLIIVCGQFPCKAAKEAFNANPLDYEMVDYSQESYHTILDKAKGTTEDKEVDVSRIIPKRLIAIAPHPSVMFALHITAAYILIAHDIYKMAPKVSQFDPVQTFKSNSPSSASSSFSSTSLSSTSSSSSASSSSSSASSSSSALSPSSSSSSTSLSSTSSSSSASSSSSSLSSTSSSSSSPSSSNQNTTKRPNLSNKTKDFPKLKQWTLEHLVEEATSRKIDVENIKEDRLQVECVLLKSVLGVQIWSEQKIEQFDLEKSNSKKDILTYAREKNIPLTDYWFFMTLETLKKAVQRCLASTSSPSPSSYLPTPSSPLTDISLPSSPSLTDAPPTSSSSDTSTPPSSTDTSSLTDTSTTSSDTSTPPSSTDTSSLTYTSLPSHSFSYSSYSKPFVKNEKCVYKDEEKHIRAKRDFYHSGMCRRRRSKWKVMRENNCGNYLYIGIDPGRSKCTIVDSMNRARVVSVASYYNLMGTDRLLARQQNYKKNPVLSKFESELPPYNTFDTLFNVESVLRRIEYERITHRDQCRLYSHVVTSYTFQTMDKNRNIDKKRAQYAYAKSFVPPTTIPKNRIVIYIGGSDFFHGSRGGGRTGCTSKTLLRLFLNMGYKARLVNEFNTSKIHNACASKIHSTNNNKFLEKAKHQKVKNVLPESFEKTHVVGAPISSTFSDNGVRWQGKDSKLCDGCKLTDYNCQCSKAQLADKENDSTLKVSQLADDMNETLKVFISLENTSPSPTMLLESLFSLSKKTVKELIEFCNLNSIKYNQQEEPTKGKNKRGSHKDSKGGATNSKKDQLINAIIKFNFEKQKRDASKNKKKRSKSSSTTNDRCKDQDQSNSQKDGNKSTSNSVSTHDYGFGKSLCDSQIKDLWKSKNPNATEMPFKTKWQWLYCPVCDHFFNRDSSAAKNILLLGILHQTADYRPWIYRPLPADIVHIGRFKSSCSAQSSSSSNAKKGLKFSYS

SEQ ID NO: 3142 - protein, 1744 aa, Cavenderia fasciculata
MATKVQDNPFEKGPLPYPTGDKQDFKNALTKYYDTTGLNKIEKDEMMKDIDKCLSGPLSIGKALIDAVLCKVTQVEERSSSSLPKKYISSKDEEKAKAILEMVSKTFSKLNVQRLTENQKIRNALKDSDLAPIGTCHSYLTEFSNSIETQFLAETVETFKRHLTSLKDYIHDRRIYLLLSYEVCELLQGILDKLNGGGNDIGEAIEAIKLICDSQQLKDHNLRCIAKGKKNLEEREKEQEREKKQARGKKSKKNYDLENEMADFSKINIDGKIITIKELAETALRLDAGIIPTNDGLPQVNERMLSETSKRLKELIDSSVSPKSSWSSLDKDQLNRLKLFNLENVICLDKEKVDLSKLTTKQFESLIDFWKTIGYEFPKESNASNHKEKLENLQTSDFERIRTKEIRIKCLVPQYGFNSTLIPFSLKLFVNILKNSGIDRTITLTSKDKINKYLQTIFPNLENVLGHPLSGGYPLSRYSFFDKEIDHLIDLSKSPSPDLSPPSPSPVVSPPSPSPVVSSRGSSKSNVRILGEKSDTFHNFKGLVWDDLCQQLKARGINFDTDTPKKEEEEDKIALVKLVLWKDMLKNRPELNIVDFDYNRSPNKMEILTWLRDNNIEIKDVAVDKMLIDIQNTSKRGFSPSVDLETPCIPWKKQKNLEEPNEHVPMSEDSTPSTDIISYPLKCTVVETDKAKMSPNHPHFPCYIAQQVGLKPSVTKEIRKITCAHCLVSHTLNSECLPIQCPTPLCNIQIPILSEHEKRKETCGNFSNLYNVDPSLKKAASEKLVHSSDSCPPVKPAISQVDRILREYISTDSPHVEIFLHEPLNTTSIALNSDRSGIAPTMRNLANVINATSDPSMSFRIRDAFTSVRDSSAGGFEDEPKEKEMAEELKKQFESTTSKVIIICGHVACKAAKAAYEVNKKDYEIVDYSQNSYDNICDTFKVKGKRLIAMAHHPSVMLATHLIAAYITIAHSVYELKPKVSMFDKIKTFASTTSAVSSSSEPSSSSSSSGLTTTSSSVGIPLTSTSTGLNNTKKLGLVNGKSLNMFTKFDQAALLEQAKAYDITVQAEEDPYSIKLALWKATLGECEVSTDKSFDPNKSKLELLIWARDNQISIQDDWFTTKLKILVKVLKSYSEKLPTAPSVPAPSVPDSSVPAPSVPDSSVPAPSGSTPTAPSVPDSSFIKNIQDDDGVPLYENRRAKRNFYHPETLFSLESVMKRIEYERVTCQHQCRLYVQVVTSYTFQTMDKNKHIDNQRARYAYAKRFVPPTTIPKNKTVICIGGSDFYRSSRGGGPTGLGPKSFYRLWKNMGYKALMVNEFNTSKIHNACAASIHLTNNEMFKDKIKHQKIENKQLPESLEKTLVVATPPISDNGVHWECNFKKDEKCGKCACKKYDCQCANGDLAKDINSSLETFITLEKGSPSHTLPLESLYSLNQKTKKELIVFCNENKIDYNDKENEEDEDDEDDEEEEEDDEESKENQKKTGKKRKKKKITNIIKKKKKNNNNNNNNNNNNNNNNNNNNNNNNNNNNNNLSGSQSTRDWICHFKLNGNGFFVQSATGSSTEIRVLQKIFSFWEYYTRPKQVIALGYTVPYPLMSYTLAGRIYKEQEEREGQDNSIVYTIMGKLFMSYYSGGSIYCCNGCHVHLTLHEQLISKAFQGRYGAAYLFNECKTYDIDLPFSINVVVGESEDRNLTTGMHVVADIYCVQCNQLLGWKYEFAKEDSQKYKVGKFILEKEKIVKISDFD

SEQ ID NO: 3143 - protein, 1194 aa, Cavenderia fasciculata
MDAKVSCFNKKIVSFSLLYDWICWKISPLRLFAITVCANEKVVSDVQISMNSRLLPYHLKKRQKLEESFPEQSLVSQKNGQDGTPMDDSDDDDDDDDESWKYLPMVCEQCDATIPILSEHEKRLDLCGDLMDLYSVDIQLKRNAFEKMPPFDSKDDLFPPPVPLIAEINHRLVKFDQPESPHVEIFLHEALNTTSIALNSNRSGIAPSMRNLFNLIKTTSDPSMQFRIRDAYPFVHDSSTGGFENEIKHEIMVKELMKHFSMTTSKLIIVCGQFPCKAAKEAFNANPLDYEMVDYSQESYHTILDKAKGTTEDKEVDVSRINPKRLIAIAPHPSVMFALHITAAYILIAHDIYKMAPKVSQFDPVQTFKSNSPSSASSSFSSTSLSSTSSSSSASSSSSSLPPSSSSSSTSLSSTSSSSSASSSSSSLSSTSSSSSSSSSSNQKTTKRPNLSNKTKDFPSLKQWTLEHLVEEATSRKIDVENIKEDRLQVECVLLKSVLGFQIWSEQKIEQFDLEESKSKKDILAYAREKKIPLTDYWFFMTLETLKKAVQRCLASTSSPSPSSYLPTSSSPLTDISLPSSPSLTDAPPTSSSSDTSTPPSSTDTSSLTDTSTTPSSSDTPPSSTDTSSLTYTSLPSHSFSYSSYSKPFVKNEKCVYKDEEKHIRAKRDFYHSGMCRRRRSKWKVMRENNRGNYLYIGIDPGRSKCTIVDSMNRARVVSVASYYNLMGTDRLLARQQNYKKTPVLSKFESGLPTYNTFDTLFNVESVLRRIEYERITHRDQCRLYSQVVTSYTFQTMDKNRNIDKKRAQYAYAKSFVPPTTIPKNRIVIYIGGSDFFRGSRGGGRTGCTSKTLLRLFLNMGYKARLVNEFNTSKIHNACASKIHSTNNNKFLEKAKHQKVKNVLPESFEKTHVVGAPISSTFSDNGVRWQGKDSKLCDGCKLTDYNCQCSKAQLADKENDSTLKVSQLADDMNETLKVFISLENTSPSPTMLLESLFSLSKKTVKELIEFCNLNSIKYYQQEEPTKGKNKRGSHKDSKGGATNSKKDQLINAIIKFNFEKQKRDASKNKKKRSKSSSTTNDRCKDQDQSNSQKDGNKSTSNSVSTHDYGFGKSLCDSQIKDLWKSKNPNATEMPFKTKWQWLYCPVCDHFFNRDSSAAKNILLLGILHQTADYRPWIYRPLPADIVHIGRVDTT

SEQ ID NO: 3144 - protein, 1580 aa, Cavenderia fasciculata
MDAKVSCFNKKIVSFSLLYDWICWKISPLRLFAITVCANEKVVSDVQISMNSRLLPYHLKKRQKLEESFPEQSLVSQKNGQDGTPMDDSDDDDDDDDESWKYLPMVCEQCDATIPILSEHEKRLDLCGDLMDLYSVDIQLKRNAFEKMPPFDSKDDQFPPPVPLIAEINHRLVKFDQPESPHVEIFLHEALNTTSIALNSNRSGIAPSMRNLFNLIKTTSDPSMQFRIRDAYPFVHDSSTGGFENEIKHEIMVKELMNHFSMTTSKLIIVCGQFPCKAAKEAFNANPLDYEMVDYSQESYHTILDKAKGTTEDKEVDVSRIVPKRLIAIAPHPSVMFALHITAAYILIAHDIYKMAPKVSQFDPVQTFKSNSPSSASSSFSSTSLSSTSSSSSASSSSSALPPSSSSSSTSLSSTSSSSSASSSSSSLSSTSSSSSSSSSSNQKTTKRPNLSNKTKDFPSLKQWTLEHLVEEATSRKIDVENIKEDRLQVECVLLKSVLGFQIWSEQKIEQFDLEESKSKKDILAYAREKKIPLTDYWFFMTLETLKKAVQRCLASTSSPSPSSYLPTPSSPLTDISLPSSPSLTDAPPTSSSSDTSTPPSSTDTSSLTDTSTTSSDTSTPPSSTDTSSLTYTSLPSHSFSYSSYSKPFVKNEKCVYKDEEKHIRAKRDFYHSGMCRRRRSKWKVMRENNRGNYLYIGIDPGRSKCTIVDSMNRARVVSVASYYNLMGTDRLLARQQNYKKNPVLSKFESGLPTYNTFDTLFNVESVLRRIEYERITHRDQCRLYSHVVTSYTFQTMDKNRNIDKKRAQYAYAKSFVPPTTIPKNRIVIYIGGSDFFRGSRGGGRTGCTSKTLLRLFLNMGYKARLVNEFNTSKIHNACASKIHSTNNNKFLEKAKHQKVKNVLPESFEKTHVVGAPISSTFSDNGVRWQGKDSKLCDGCKLTDYNCQCSKAQLADKENDSTLKVSQLADDMNETLKVFISLENTSPSPTMLLESLFSLSKKTVKELIEFCNLNSIKYNQQEEPTKGKNKRGSHKDSKGGATNSKKDQLINAIIKFNFEKQKRDASKNKKKRSKSSSTTNDRCKDQDQSNSQKDGNKSTSNSVSTHDYGFERKKEITYASQYIYSYQITRYDPNPLVQFVYLEGGTFSISINAKPQNHPLFFLLCSDDDWKNIFGYKIPEPTCNLLENPEMLKICDVGVNFTDTLSVYKVITKYNKYLVNILDCQDSVVQEKPVNITLDLKMINPDNNNLSAELIPAPFMYTIMGILWCIVLLFWLYNNIKHVQRISKIHFFMTLYPLLKLVICFYNASLIRDLSHLDTSPTQIFFRKFLDIFFNLYIQVLLLLLGTGWYVTQNTIKGDRYNMMALVGGLSVAMILDELYVSDSISYLFVELFILSIRVFLLFYVFIAININSRQLEYHILQYNPSQESQTTLSQEEIVLFIKKFKLFVMFKLILLFWVALITLKFFTSLLLYGGIINNWVSMMNSENIDLILFICIGYNYRARSENIFKIIRIRPPELDSRVNREHMHHNLVRNQQQNQNNNNNQSDEDDNNNDNYDDDEDHGIEMRDLSNNNNRHNNI

SEQ ID NO: 3145 - protein, 1075 aa, Cavenderia fasciculata
MKYSTIVSNETQKKKKKKKKSNSSSSSYWTFKSMDITDDQSSSSSSSSSSSSSSSTTSNNMDTTDDQSTTTTTTTTTISPVPTNDELIQSIRKLANFIGNQTTTFLNLIATNNKCFESNGTPVPFVVKFFQTQCKLTENQLKENLTTFRFDRTSIEWMIRYFALGGDAIFSAMGKHPVPRIDTVEDLSNDSIYSLCFFMKHVAPFLEKEMQKRPKMLQMLQKLRQFRCNNSKNWVNVIVINIKNNIMVSTYNHLKQLLNTYKDRKIKDLGKNQEEIKKVKKLVRDTIYNFSNTRLKRAEKDQQPVQEEGEEDEEGEEDEEGEEEEDEEKKADRVVTYDLSDGVYKTIEILGGYNQQVIDEYNNLSDDKKKKKEAKYDNRVSRRKNIIKKKKEDAHKRREAIIKERREASIKLQKSPNTSLTVDDLTNSPSSSPNTSSPRNPKGKFNQRMKHDSIRIRELDELKKITIEAEKRNADLQQISDTRTPTVFIPGLINISSIIPSLGFDIQFMFTREHAKNLLKCLGLKKANVEKDHEGNPSYAIATLFPGLYKYDPRLFTNTKRVYLPATPPTDVEKQKDEERRKTNNDNRFASALKKYKGNEDVARVAATLQTGEKAKNAIEQHNKLHGFKKGSHDKNRALLAKGTITFSKEEMFQEIVNKGVKYENTSTTTTPSTSSSSSSLPYVTQVAMEKEFAGKSLKDVIAIGIDPNTCSITVVNNHDDKVLDMRMDTLMVKRNTKFLLEKISCHMGKAIKSFESCLPSLKFNVLNPQTFQSRLDYYEKYCDYFDIYFEAINDPIVLSWKRNFAFKKQKLNKEFYQQFDNYILDLFKDHFPTKYSSMNDSERNQYIQDNTIIFFGNAKFGHNTRGKVTTFAAKTVANKLKSKQYSVVYINEYNTSRLGKEKDGGQPTNVQQCSPISEACQSAAKGNSFLRCSDHRHRLALVKQDTHSKEYKESLGFLKSIDDLDKKLQSHNLLNVAGQCRTRKVTPSDVAGSETESRQDSQKVASTQSSSSSTKKFDYRHGQNKYGPEIRKFGKMVTVRQDMERQINCQGKNRGINTIWALKVVFEYMHTTTT

SEQ ID NO: 3146 - protein, 1198 aa, Cavenderia fasciculata
MDAKVSCFNKKIVSFSLLYDWICWKISPLRLFAITLCANEKVVSDVQISMNCRLLPYHLKKRQKLEESFPEQSLVSQKNGQDGTPMDDSDDDDDESWKYLPMVCEQCDATIPILSEHEKRLDLCGDLMDLYSVDIQLKRNAFEKMPPFDSKDDQFPPPVPLIAEINHRLVKFDQPESPHVEIFLHEALNTTSIALNSNRSGIAPSMRNLFNLIKTTSDPSMQFRIRDAYPFVHDSSTGGFENEIKHEIMVKELMNHFSMTTSKLIIVCGQFPCKAAKEAFNANPLDYEMVDYSQESYHTILDKAKGTTEDKEVDVSRIVPKRLIAIAPHPSVMFALHITAAYILIAHDIYKMAPKVSQFDPVQTFKSNSPSSASSSFSSTSLSSTSSSSSASSSSSSASSSSSALSPSSSSSSTSLSSTSSSSSASSSSSSLSSTSSSSSSPSSSNQNTTKRPNLSNKTKDFPKLKQWTLEHLVEEATSRKIDVENIKEDRLQVECVLLKSVLGVQIWSEQKIEQFDLEKSNSKKDILTYAREKNIPLTDYWFFMTLETLKKAVQRCLASTSSPSPSSYLPTPSSPLTDISLPSSPSLTDAPPTSSSSDTSTPPSSTDTSSLTDTSTTSSDTSTPPSSTDTSSLTYTSLPSHSFSYSSYSKPFVKNEKCVYKDEEKHIRAKRDFYHSGMCRRRRSKWKVMRENNRGNYLYIGIDPGRSKCTIVDSMNRARVVSVASYYNLMGTDRLLARQQNYKKNPVLSKFESGLPTYNTFDTLFNVESVLRRIEYERITHRDQCRLYSHVVTSYTFQTMDKNRNIDKKRAQYAYAKSFVPPTTIPKNRIVIYIGGSDFFRGSRGGGRTGCTSKTLLRLFLNMGYKARLVNEFNTSKIHNACASKIHSTNNNKFLEKAKHQKVKNVLPESFEKTHVVGAPISSTFSDNGVRWQGKDSKLCDGCKLTDYNCQCSKAQLADKENDSTLKVSQLADDMNETLKVFISLENTSPSPTMLLESLFSLSKKTVKELIEFCNLNSIKYYQQEEPTKGKNKRGSHKDSKGGATNSKKDQLINAIIKFNFEKQKRDASKNKKKRSKSSSTTNDRCKDQDQSNSQKDGNKSTSNSVSTHDYGFGKSLCDSQIKDLWKSKNPNATEMPFKTKWQWLYCPVCDHFFNRDSSAAKNILLLGILHQTADYRPWIYRPLPADIVHIGRVDTT

SEQ ID NO: 3147 - protein, 1607 aa, Cavenderia fasciculata
MATKVQDNPFEKGPLPYPTGDKQDFKNALTKYYDTTGLNKIEKDEMMKDIDKCLSGPLSIGKALIDAVLCKVTQVEERSSSSLPKKYISSKDEEKAKAILEMVSKTFSKLNVQRLTENQKIRNALKDSDLAPIGTCHSYLTEFSNSIETQFLAETVETFKRHLTSLKDYIHDRRIYLLLSYEVCELLQGILDKLNGGGNDIGEAIEAIKLICDSQQLKDHNLRCIAKGKKNLEEREKEQEREKKQARGKKSKKNYDLENEMADFSKINIDGKIITIKELAETALRLDAGIIPTNDGLPQVNERMLSETSKRLKELIDSSVSPKSSWSSLDKDQLNRLKLFNLENVICLDKEKVDLSKLTTKQFESLIDFWKTIGYEFPKESNASNHKEKLENLQTSDFERIRTKEIRIKCLVPQYGFNSTLIPFSLQLFVNILKNSGIDRTITLTSKDKINKYLQTIFPNLENVLGHPLSGGYPLSRYSFFDKEIDHLIDLSKSPSPDLSPPSPSPVVSPPSPSPVVSSRGSSKSNVRILGEKSDTFHNFKGLVWDDLCQQLKARGINFDTDTPKKEEEEDKIALVKLVLWKDMLKNRPELNIVDFDYNRSPNKMEILTWLRDNNIEIKDVAVDKMLIDIQNTSKRGFSPSVDLETPCIPWKKQKNLEEPNEHVPMSEDSTPSTDIISYPLKCTVVETDKAKMSPNHPHFPCYIAQQVGLKPSVTKEIRKITCAHCLVSHTLNSECLPIQCPTPLCNIQIPILSEHEKRKETCGNFSNLYNVDPSLKKAASEKLVHSSDSCPPVKPAISQVDRILREYISTDSPHVEIFLHEPLNTTSIALNSDRSGIAPTMRNLANVINATSDPSMSFRIRDAFTSVRDSSAGGFEDEPKEKEMAEELKKQFESTTSKVIIICGHVACKAAKAAYEVNKKDYEIVDYSQNSYDNICDTFKVKGKRLIAMAHHPSVMLATHLIAAYITIAHSVYELKPKVSMFDKIKTFASTTSAVSSSSEPSSSSSSSGLTTTSSSVGIPLTSTSTGLNNTKKLGLVNGKSLNMFTKFDQAALLEQAKAYDITVQAEEDPYSIKLALWKATLGECEVSTDKSFDPNKSKLELLIWARDNQISIQDDWFTTKLKILVKVLKSYSEKLPTAPSVPAPSVPDSSVPAPSVPDSSVPAPSGSTPTAPSVPDSSFIKNIQDDDGVPLYENRRAKRNFYHPETLFSLESVMKRIEYERVTCQHQCRLYVQVVTSYTFQTMDKNKHIDNQRARYAYAKRFVPPTTIPKNKTVICIGGSDFYRSSRGGGPTGLGPKSFYRLWKNMGYKALMVNEFNTSKIHNACAASIHLTNNEMFKDKIKHQKIENKQLPESLEKTLVVATPPISDNGVHWECNFKKDEKCGKCACKKYDCQCANGDLAKDINSSLETFITLEKGSPSHTLPLESLYSLNQKTKKELIVFCNENKIDYNDKENEEDEDDEDDEEEEEDDEESKENQKKTGKKRKKKKITNIIKKKKKNNNNNNNNNNNNNNNNNNNNNNNNNNNNNNNLSGSQSTRDWICHFKLNGNGFFVQSATGSSTEIRVLQKIFSFWEYYTRPKQVIALGYTVPYPLMSYTLAGRGYPV

SEQ ID NO: 3148 - protein, 1232 aa, Cavenderia fasciculata
MDAKVSCFNKKIVSFSLLYDWICWKISPLRLFAITVCANEKVVSDVQISMNCRLLPYHLKKRQKLEESFPEQSLVSQKNGQDGTPMDDSDDDDDESWKYLPMVCEQCDATIPILSEHEKRLDLCGDLMDLYSVDIQLKRNAFEKMPPFDSKDDQFPPPVPLIAEINHRLVKFDQPESPHVEIFLHEALNTTSIALNSNRSGIAPSMRNLFNLIKTTSDPSMQFRIRDAYPFVHDSSTGGFENEIKHEIMVKELMKHFSMTTSKLIIVCGQFPCKAAKEAFNANPLDYEMVDYSQESYHTILDKAKGTTEDKEVDVSRIIPKRLIAIAPHPSVMFALHITAAYILIAHDIYKMAPKVSQFDPVQTFKSNSPSSASSSFSSTSLSSTSSSSSASSSSSSASSSSSALSPSSSSSSTSLSSTSSSSSASSSSSSLSSTSSSSSSPSSSNQNTTKRPNLSNKTKDFPKLKQWTLEHLVEEATSRKIDVENIKEDRLQVECVLLKSVLGVQIWSEQKIEQFDLEKSNSKKDILTYAREKNIPLTDYWFFMTLETLKKAVQRCLASTSSPSPSYLPTPSSPLTDISLPSSPSLTDAPPTSSSSDTSTPPSSTDTSSLTDTSTTSSDTSTPPSSTDTSSLTYTSLPSHSFSYSSYSKPFVKNEKCVYKDEEKHIRAKRDFYHSGMCRRRRSKWKVMRENNCGNYLYIGIDPGRSKCTIVDSMNRARVVSVASYYNLMGTDRLLARQQNYKKNPVLSKFESELPPYNTFDTLFNVESVLRRIEYERITHRDQCRLYSHVVTSYTFQTMDKNRNIDKKRAQYAYAKSFVPPTTIPKNRIVIYIGGSDFFRGSRGGGRTGCTSKTLLRLFLNMGYKARLVNEFNTSKIHNACASKIHSTNNNKFLEKAKHQKVKNVLPESFEKTHVVGAPISSTFSDNGVRWQGKDSKLCDGCKLTDYNCQCSKAQLADKENDSTLKVSQLADDMNETLKVFISLENTSPSPTMLLESLFSLSKKTVKELIEFCNLNSIKYNQQEEPTKGKNKRGSHKDSKGGATNSKKDQLINAIIKFNFEKQKRDASKNKKKRSKSSSTTNDRCKDQDQSNSQKDGNKSTSNSVSTHDYGFGKSLCDSQIKDLWKSMNPNATEMPFKTKWQWLYCPVCDHFFNRDTSAAKNILLLGILHQTADYRPWIYRPLPADIVHIGRIGRYIDIMNINPLVLRIHYHVLGHCETKSVIPPILSFIF

SEQ ID NO: 3149 - protein, 1111 aa, Cavenderia fasciculata
MDAKVSCFNKKIVSFSLLYDWICWKISPLRLFAITVCANEKVVSDVQISMNCRLLPYHLKKRQKLEESFPEQSLVSQKNGQDGTPMDDSDDDDYESWKYLPMVCEQCDTTIPILSEHEKRLDLCGDLMDLYSVDIQLKRNAFEKMPPFDSKDDQFPPPVPLIAEINHRLVKFDQPESPHVEIFLHEALNTTSIALNSNRSGIAPSMRNLFNLIKTTSDPSMQFRIRDAYPFVHDSSTGGFENEIKHEIMVKELMNHFSMTTSKLIIVCGQFPCKAAKEAFNANPLDYEMVDYSQESYHTILDKAKGTTEDKEVDVSRIVPKRLIAIAPHPSVMFALHITAAYILIAHDIYKMAPKVSQFDPVQTFKSNSPSSASSSFSSTSLSSTSSSSSASSSSSALPPSSSSSSTSLSSTSSSSSASSSSSSLSSTSSSSSSSSSSNQKTTKRPNLSNKTKDFPSLKQWTLEHLVEEATSRKIDVENIKEDRLQVECVLLKSVLGFQIWSEQKIEQFDLEESKSKKDILAYAREKKIPLTDYWFFMTLETLKKAVQRCLASTSSPSPSSYLPTSSSPLTDISLPSSPSLTDAPPTSSSSDTSTPPSSTDTSSLTDTSTTPSSSDTPPSSTDTSSLTYTSLPSHSFSYSSYSKPFVKNEKCVYKDEEKHIRAKRDFYHSGMCRRRRSKWKVMRENNRGNYLYIGIDPGRSKCTIVDSMNRARVVSVASYYNLMGTDRLLARQQNYKKNPVLSKFESGLPTYNTFDTLFNVESVLRRIEYERITHRDQCRLYSHVVTSYTFQTMDKNRNIDKKRAQYAYAKSFVPPTTIPKNRIVIYIGGSDFFRGSRGGGRTGCTSKTLLRLFLNMGYKARLVNEFNTSKIHNACASKIHSTNNNKFLEKAKHQKVKNVLPESFEKTHVVGAPISSTFSDNGVRWQGKDSKLCDGCKLTDYNCQCSKAQLADKENDSTLKVSQLADDMNETLKVFISLENTSPSPTMLLESLFSLSKKTVKELIEFCNLNSIKYYQQEEPTKGKNKRGSHKDSKGGATNSKKDQLINAIIKFNFEKQKRDASKNKKKRSKSSSTTNDRCKDLDQSNSQKDGNKSTSNSVSTHDYGFVILL

SEQ ID NO: 3150 - protein, 1198 aa, Cavenderia fasciculata
MDAKVSCFNKKIVSFSLLYDWICWKISPLRLFAITVCANEKVVSDVQISMNCRLLPYHLKKRQKLEESFPEQSLVSQKNGQDGTPMDDSDDDDDESWKYLPMVCEQCDATIPILSEHEKRLDLCGDLMDLYSVDIQLKRNAFEKMPPFDSKDDQFPPPVPLIAEINHRLVKFDQPESPHVEIFLHEALNTTSIALNSNRSGIAPSMRNLFNLIKTTSDPSMQFRIRDAYPFVHDSSTGGFENEIKHEIMVKELMNHFSMTTSKLIIVCGQFPCKAAKEAFNANPLDYEMVDYSQESYHTILDKAKGTTEDKEVDVSRIVPKRLIAIAPHPSVMFALHITAAYILIAHDIYKMAPKVSQFDPVQTFKSNSPSSASSSFSSTSLSSTSSSSSASSSSSSASSSSSALSPSSSSSSTSLSSTSSSSSASSSSSSLSSTSSSSSSPSSSNQNTTKRPNLSNKTKDFPKLKQWTLEHLVEEATSRKIDVENIKEDRLQVECVLLKSVLGVQIWSEQKIEQFDLEKSNSKKDILTYAREKNIPLTDYWFFMTLETLKKAVQRCLASTSSPSPSSYLPTPSSPLTDISLPSSPSLTDAPPTSSSSDTSTPPSSTDTSSLTDTSTTSSDTSTPPSSTDTSSLTYTSLPSHSFSYSSYSKPFVKNEKCVYKDEEKHIRAKRDFYHSGMCRRRRSKWKVMRENNRGNYLYIGIDPGRSKCTIVDSMNRARVVSVASYYNLMGTDRLLARQQNYKKNPVLSKFESGLPTYNTFDTLFNVESVLRRIEYERITHRDQCRLYSHVVTSYTFQTMDKNRNIDKKRAQYAYAKSFVPPTTIPKNRIVIYIGGSDFFRGSRGGGRTGCTSKTLLRLFLNMGYKARLVNEFNTSKIHNACASKIHSTNNNKFLEKAKHQKVKNVLPESFEKTHVVGAPISSTFSDNGVRWQGKDSKLCDGCKLTDYNCQCSKAQLADKENDSTLKVSQLADDMNETLKVFISLENTSPSPTMLLESLFSLSKKTVKELIEFCNLNSIKYYQQEEPTKGKNKRGSHKDSKGGATNSKKDQLINAIIKFNFEKQKRDASKNKKKRSKSSSTTNDRCKDQDQSNSQKDGNKSTSNSVSTHDYGFGKSLCDSQIKDLWKSKNPNATEMPFKTKWQWLYCPVCDHFFNRDSSAAKNILLLGILHQTADYRPWIYRPLPADIVHIGRVDTT

SEQ ID NO: 3151 - protein, 1194 aa, Cavenderia fasciculata
MDAKVSCFNKKIVSFSLLYDWICWKISPLRLFAITVCANEKVVSDVQISMNSRLLPYHLKKRQKLEESFPEQSLVSQKNGQDGTPMDDSDDDDDDDDESWKYLPMVCEQCDATIPILSEHEKRLDLCGDLMDLYSVDIQLKRNAFEKMPPFDSKDDLFPPPVPLIAEINHRLVKFDQPESPHVEIFLHEALNTTSIALNSNRSGIAPSMRNLFNLIKTTSDPSMQFRIRDAYPFVHDSSTGGFENEIKHEIMVKELMNHFSMTTAKLIIVCGQFPCKAAKEAFNANPLDYEMVDYSQESYHTILDKAKGTTEDKEVDVSRIVPKRLIAIAPHPSVMFALHITAAYILIAHDIYKMAPKVSQFDPVQTFKSNSPSSASSSFSSTSLSSTSSSSSASSSSSALPPSSSSSSTSLSSTSSSSSASSSSSSLSSTSSSSSSSSSSNQKTTKRPNLSNKTKDFPSLKQWTLEHLVEEATSRKIDVENIKEDRLQVECVLLKSVLGFQIWSEQKIEQFDLEESKSKKDILAYAREKKIPLTDYWFFMTLETLKKAVQRCLASTSSPSPSSYLPTSSSPLTDISLPSSPSLTDAPPTSSSSDTSTPPSSTDTSSLTDTSTTPSSSDTPPSSTDTSSLTYTSLPSHSFSYSSYSKPFVKNEKCVYKDEEKHIRAKRDFYHSGMCRRRRSKWKVMRENNRGNYLYIGIDPGRSKCTIVDSMNRARVVSVASYYNLMGTDRLLARQQNYKKNPVLSKFESGLPTYNTFDTLFNVESVLRRIEYERITHRDQCRLYSHVVTSYTFQTMDKNRNIDKKRAQYAYAKSFVPPTTIPKNRIVIYIGGSDFFRGSRGGGRTGCTSKTLLRLFLNMGYKARLVNEFNTSKIHNACASKIHSTNNNKFLEKAKHQKVKNVLPESFEKTHVVGAPISSTFSDNGVRWQGKDSKLCDGCKLTDYNCQCSKAQLADKENDSTLKVSQLADDMNETLKVFISLENTSPSPTMLLESLFSLSKKTVKELIEFCNLNSIKYNQQEEPTKGKNKRGSHKDSKGGATNSKKDQLINAIIKFNFEKQKRDASKNKKKRSKSSSTTNDRCKDQDQSNSQKDGNKSTSNSVSTHDYGFGKSLCDSQIKDLWKSMNPNATEMPFKTKWQWLYCPVCDHFFNRDTSAAKNILLLGILHQTADYRPWIYRPLPADIVHIGRVDTT

SEQ ID NO: 3152 - protein, 498 aa, Saccharomyces delbrueckii
MNLPIPLVQNTHPLLKQTRISNDHLESKSSTSRPFWNKDAAHHSKQWGLNTILPMAAKKLSQKINFDSWFSVVKHPQAPIINNSLNLPLSSGVKEEMIRARKTRIYPTNSQRETLKKWFGCQRYIYNRALKLHRDGMAMTMKGLRQTLLNKDTNILERQEQWLNDYNYDLKDEALRDLVKNFSSNMVKFKKTGVPFKLKFKTKKAPVQTISVLKKHWNKGAKSFYGPIFSPSKICGAESLPEELPADSRLQRTRNNKYYLIVPMVGEEIARKSHAEKFIFIDPGVRTFLTGYDSNQTVVEIGKDAVVRIEKLKRRRPQLQSKLAKLRKHKKRQNHRKALHRLDGKISHIVQDMHKKSALFLCQYYNNIFLPKLDYHECTKLTRKSRSNMATLAHCSFHDRLTMKAEQLHGASVHEVEEDYTSKTCSSCGNLKDGLGSVKVYSFLKCSSVFDRDFNAAKNIMLKYICEHLMASGESSISSALSTENGRLAMMVPGPFVR

SEQ ID NO: 3153 - protein, 495 aa, Saccharomyces delbrueckii
MTISTQNQAKKRKTSKSKAAKPYWNENAAHFSQQWGLNTMLPTAAKKLGQKINSDSWFSVIKHPQAPIINDSLNLPLSSGVEEELIRARKIRIYPTNSQKETLKKWFGCHRYIYNKALKMHKDGVLMNIKILREKLLNKKTSALTPEEQWLSEYNYDLKDEALRDLVKNYSSNMAKFKKTRVPFKLRFKTKKAPVQTLSVLKKYWNKGKKTFYSDIYSSFSLRGAEPLPEELPRDSRLQRTRNNKYYLIVPMAGGEIARKPPTEKFIFIDPGVRTFLTGYDSSQTVVEIGKDAIVRIEKLKRRRRQLQSKLAKLRKHKKRQNHRKALHRLDEKISHIVQDLHKKSALFLCKSYDSIFLPKLNFHHCTKLNRKSRSSMATLAHCSFHDRLTMKAEQFHDASVHEVEEDYTSKTCSTCGKIKNDLRSNKIYSCLGCFSVFDRDFNAAKNIMLKYICEHLMASGGSSISSSLSGGNGRLAMMGPGPFVRKYVVSPSEI

SEQ ID NO: 3154 - protein, 294 aa, Saccharomyces delbrueckii
MAKYKSTGVPFKLKFKTRKARTQNLSVLKRFWNNKRSFYCDVFSSSKMRSAERLPEQLIMDSRLQRTRHNKNYPIVPIVGEEITRKEGREKFIFIDPGVRTFLTGYDSGQNVVEIGKNAVVRIEKLKHRRRKLQSKLAKLKRQKKRQNHRKALHRLDEKISRIVKDMHKKSALFLCNSYDNVFIPKLNFHHCTKLNRKSRSSMATLAHCSFNERVAMKAEQFRSTSAVVVEEDYTSKTCSKCGNVKQDLGSSKIYSCVQCFSVFDRDFNAAKNIMLTYCSEHLMASGASSILLL

SEQ ID NO: 3155 - protein, 203 aa, Saccharomyces delbrueckii
MVGEEITRDEGREKFIFIDPGIRTFLTGYNSGQNVVEIGKNAFVRIEKLKHRRHKLQSKLDKLRTHKKRQNHRKALHRLDEKISRIVSDMHKKSALFLCKSYENIFMPKLNFHQCTRLNQKSRSSMTTIAHCSFNDRLVMKAEQLRVTSAIVVEEDYTSKTCSKCGNIKQDLGPNKIYSCVKCSSVFDKDFNAATCSSIAVSI

SEQ ID NO: 3156 - protein, 486 aa, Saccharomyces delbrueckii
MTTCTQYQAKKRKRSNSKTTKPYWNEDAAHISQQWGLNTILPTAAKNLSQKITSDSWFSVVKHPQVPVINDSLNLPLSSGVKEENTRARKIKVYPTNSQRETLKKWFRCQRYIYNRALKLHRDGMAMTIKGLRQTLLNRDTIILEPQEQWLNDYSYDLKDEALCDLVKNYSYNMAKYKQTGMPLKLRFKSKKTPIQTLSVLEKHWNKRTKSFWSEVFSLSNFRGTEPLPEELPGDSRVQRTRNNKFYLVVPLAGEEIARKSPAEKFIFIDPRVRTFLTGYDSKQTVVEMGKDAVVRIEKLKRRRRQFQSKLAKLRKHKKRQNHRKALHRLDEKIQHIVRDMHKKTASYLCKNYENIFLPKLNYHQCTRLTRKTRSSMATIAHCCFHDRLTMKAEQFHSTSVHEVEEDYTSKTCSSCGNLKDDLGSNKIYSCSSCSSVFDRDFNAAKNIMLKYICEHLMASGGSSITSASSGGNGGFAMMGPGPFVR

SEQ ID NO: 3157 - protein, 486 aa, Saccharomyces delbrueckii
MTIVVQNQAKKRKTSNSKTTKPYWNEDAAHISQQWGLNTILPTAAKNLSQKITSDSWFNVVKHPQVPVINDSLNLPLSNGVKEEITRARKIRIYPTNSQKETLKKWFGCQRYIYNRALKLHRDGMAMTIKGLRQTLLNRDTNILEPQEQWLNDYSYDLKDEALRDLVKNYSSNMAKLKNTGVPFKLRFKSKKAPAQTLSVLKKHWNKRTKSFWSKVFSSSKMRSAEVLPEKLLMDSRLQRTRNNKFYLILPVVGEEIVRKMKADKFIFIDPGIRTFLTGYDSGQNVVEIGKNAVVRIEKLKRRRRQLQSKLAKLRKHKKRQNHRKALHRLDEKIQHIVRDMHKKTASYLCKNYENIFLPKLNYHQCTRLTRKTRSSMATIAHCCFHDRLTMKAEQFHSTSVHEVEEDYTSKTCSSCGNLKDDLGSNKIYSCSSCSSVFDRDFNAAKNIMLKYICEHLMASGGSSISSALSVRNVGFAMMGPGPFVH

SEQ ID NO: 3158 - protein, 485 aa, Saccharomyces delbrueckii
MTISSQNQAKKRKTSKKTTSRPFWNEKTAHHSKQWSLYTISPMSARKLSQKINSDSWFSVVKHPQAPITNHSLNLPLSSGVKEEITRARKIRIYPTNSQKETLKKWFGCHRYIYNKALKMHKDGVLMNIKILREKLLNKKTSVLKPEEQWLTEYHYDLKDEALRDLVKNYSSNMARFKKMGVPFKLKFKTKSAPVQTLSVLKKHWNKGKKTFYSNIDPSSSMRAAEPLPEEFPRDSRLQRTGRNKYYLIVPTAGEEIVRKSPAEKFKFIDPGVRTFLTGYDSNQTVVEIGKDVVVRIEKLKRRRPQLQSKLAKLRKHKKRQNHRKTLHRLDGKISHIVQNMHKKSALFLCKSYDSIFLPKLDYQCTKLTRKSRSSMVTLAHCCFHDRLTMKAEQIHGANVHEVKEDYTSKTCSSCGNLKDDLSSAKVYSCMKCASVFDRDFNAEKNIMLKYICEPLIASGKSSISSALSVGNGGFAMMGPGTFVR

SEQ ID NO: 3159 - protein, 447 aa, Phytophthora parasitica
MKTNSENAVKLNFYRRLHKQIKRSYYIDGSEAYLMLKSILDPVYDGDDVEILAWRARIPRKSNGYLDDKPHLLLPLTFMFRSDIEEWNHRNRETQGYEEIRHFSLLPTKKGFECSHFTMCNLGLRALLKRAGIAVPNEDVWIAEADSWWRKLFKIEKFETVNRKFSGVIETDGKAVCIVLRKPKREIVETALDEKDYDVLWGLDPGRRDLFVATNQFGEKIFCTTREFYEDAHYKKSNQKTKVWQENRPDVLEAVRNMPTKKTASLEQLEAYVKFMTPRIDLLLDFRMHKPFRKLRFRRYILAKKKLRQLCQRLTAQAGRRTIVGFGDWSNTDVSGLIKKCPAGPVNSFRRELKKHCRVESIDEFRTSKLHSVCHREMKNQYSKRLCKKDGVERTLKVHSVLHCTNNGCHGMTVNRDENASKNMLMLLIECKLRSQPRPLAFSRPRT

SEQ ID NO: 3160 - protein, 599 aa, Phytophthora parasitica
MSRKRKRDDYPGDWDVVEETQDPDKWLPPIEIVAETQDPDGDEEMKGTDSDKEMKEVVPKATRTKTAGTLRKKENKKSKVLRSVVCRVNRICADNRLVKEIKCTTLAMKQIQMETWHLVNLHTLRCLEHDLPLPDYGKTFFDHCCTGVASTQLKQALREQLVVNVDVMIREQFRKRWRAYVLIKFGKTGDGLSPVEEKASKSSSGRSCMLATTNIKNNGLAFYIRPEWEFQSVVEARMEAVLNEKGTLAGFVSRICKCGEGNLMEDWNMPQVKISRSSFGAIRWTVMRRAFAIDHFETVADESVTKPEFRQMTVEAKYNHASHRFANEINTDGYNRQSFIGLDPGMRSVCTAARQHLRPQAPRRRKQRRALRLGQRPGREIVSVTTREYRHLAGFNRFRAWNESQKMKFPEYNKVIDGMPSFKTASYEQYLEPLEYFWQHAAYLLQFCKDRPYLKWRFFQKRMARVAVDTLARRIVPTVSRLTCVAYGDWSRRDGIKGHAPIPVKGLKEALQKRATCPTPVFPKSVDNPKRKKVKGKVLPRDWFQTEIQSRHCHVVLLCENKICQAMYWDRDVNAAINMLELLKSEVQGRGRMQPFKRS

SEQ ID NO: 3161 - protein, 506 aa, Phytophthora parasitica
MQQIQMEAWYLVNLHTLQCLEDDSPLPDYTGKAFYDHCCSCIATTAKTNLNTRKNPELWESYSVYKGKRALTGLEEVRNLVGYSQLKAELREQMIVKAEVMIRQHFAKHLRLYVQIAFGGLGSNLDKKVIKEKALLVREIMRVLHAEWSEQWTPWPNRIGENGLTFYVRLVWEFQSVVEKRMKAEPNEKGVRAFSLFPVSTTYTASHSKINGTTLPGFYLRIKKREKAFYWQIAEVEVSTESFQQNRWVVMCNAFDISRFETRSSQCPLPKSEFASLPVEGKYEHASHLFANQVTTDGYSASILLFRPKTEKNGKDRAEKRPSEHLVIPAGYVPDIVVGLDSGISRRGKKALGSQRKKSDCPHLIRTPKAPQRQCDRDIVRISTREYRHLAGFNKFREWNECLKKRDQEYQRVIVDVPSFKTASFKKYLECLDYFWRHANFLLEFCSEHSFLKWKFFRRRMACVAVDAIAKRIIPVVSTKTCVAYGDWSKRNGIKGHAYSPVKVLM

SEQ ID NO: 3162 - protein, 427 aa, Phytophthora parasitica
MNREQFRKRLRAYVLIKFGKSGDDLSPAEEKVTKKLVGQIMYACYNVEETGCLEALQMRDVLTPDGEDIIKNNGLAFYIRQIWEFQRVVDARMEAVLNEKEVRAFSLFPMSTALRTAHIVINGTTLAGFVSRIRERGEGNLMEDWNIRFLDHPLALSDGLVPADDSRSEVQPRQHLFANEIKTDGYNASILYYQPKQDELERGEDDPLVPAGYLPDVIIGLDSGMRSVCTAAHQYLRPQAPRRRKQRRVRRPRRQKKKKRKRNFPKWIRRPKALRLGQRPGREIVSVTAREYRHLAGFNRFRAWNESQKRKFFEYKKMADAYGDWSRRDGIKGHAPSPVKGLKEALRKRATVVSMDEFRTSSTTSRFRASSTLLQSSPKTSTSPRERRPRAKSFHVIGPRLRSIHTTVTSCFSVRIRSARRGTGTET

SEQ ID NO: 3163 - protein, 329 aa, Phytophthora parasitica
MCNLGLRALLKRAGIAVPNEDVWIAEADSWWRKLFKIEKFETVNRKFSGVIETDGKAVSIVLRKPKREIVETALDEKDYDVLWGLDPGRRDLFVATNQFGEKIFCTTREFYEDAHYKKSNQKTKVWQENCPDVLEAVRNMPTKKTASLEQLEAYVKFMTPRMDLLLDFRMHKPFRKLRFRRYILAKKKLRQLCQRLTAPAGRRTVVGFGDWSNTDVSGLIKKCPAGPVNSFRRELKKHCRVESIAEFRTSKLHSVCHCEMKNQYSKRLCKKDGVERTLKVHSVLHCTNNGCHGMTVNRDENASKNMLMLLIECKLRGQPRPLAFSRPRT

SEQ ID NO: 3164 - protein, 362 aa, Phytophthora parasitica
MNTLEPLHNLWHAAGVPRASNRHIVRGWQHNAALRMKTNSENAVTLNFYRRLLKQIKRSYYIDKSEAYLMLKSILDPVYDDDDVEVLAWSARIPRKSNGYIDDKPHLLLPLTFIFLSDIEEWNHRNREIWGYEDFRHFSLLPTKKGSSAVISRCLFKIEKFETVNRKFSGVIETDGKAVGIVMRKPKREIVETALDEKDYDVLWGLDPGRRDLFVATNQFREKIFCTTRKFYEDAHYKKSNQETKQHRRERQIKKCPAGPVNPFRRELKNHCRVESIDEFRTSKLHSVCHREMKNQYSKRLCKKDGVERTLKVHSVLHCTNNGCHGMTVNRDENASKNMLMLLIECKLRSQPRSLAFSRPRM

SEQ ID NO: 3165 - protein, 295 aa, Phytophthora parasitica
MATKRPRLDAEDDPGPNSQVRKIEDISLELSHLTTETKRRRQDVAARRAANADKDVSVVKISLKSFCTEQSKMLPWEEVLKDMNKMVLEAYVLANTHIVRLSVRNMPTKKTASLEQLEAYVKFMTPRMDLLLDFRMHKPFRKLRFRRYILAKKKLRQLCQRLTAQAGRRTVVGFGDWSNTDVSGLIKKCPAGPVNSFRRELKKHCRVETIDEFRTSKLHSVCHCKMKNQYSKRLCKKDGVERTLKVHSVLHCTNNGCHGMTVNRDENALKNMLMLLIECKLCGQPRPLAFSRPRT

SEQ ID NO: 3166 - protein, 520 aa, Phytophthora parasitica
MRNNHKKTDEYPDEWDVVEDSQDPDELSLPFEIVAETQDSDEGDTSELSQDLLQLTVTNTKVVHKQTKKSSLKRQQPKKVTAKSKKIQVKKPKRVKSEGTMLEKAFRKGKGFCSVVCRLTSICPDSLLVEEIKRTARAMKQIQMETWHLANIHTLRCLENNLPSPDFGNTFFDHCCSGIYRADRERAGLEETMVTNAGVMIREHFRKRLRAYVEITFGGGQSKKARQERLKKIVQACYNVEETDLLEALQMRDILTPNDEEWSDKWIPWSNHIKGNGMGFYVRLIWEFQSVTSGLFQGSKTPRHRNERDIVSVTTREYRHMVGFNRFRAWNEGQKRSHPEYWKIIAEMPSFKTASSKKYLERLEYFWRHARFLLQFCVDRPFLKWKFFQKRMSQHKGIKGHALSPVKGLKQAMQKRAKVVSIDEFRTSKLCSQCHQTLSQVDYIVDVKLPKKRKRKGVVLPRNRAEVQLEEKTCYRVLRCDHVNCIAHYWDRDVNAAINMVELLMSEILGRGRMQAFKRA

SEQ ID NO: 3167 - protein, 238 aa, Phytophthora parasitica
MPTTEPTDTNTAPRKRRKTSKNRLTNVVEKDALDLARDKLPEGYTPDIFIGIDPDVRILVTAASTGYLPQQRQGRQCKHRHRRRRFRKKDSRKCIAKNQHGHGQRVIGVSTAEYYHLAKLNKKRVWDLNLRKTEPAYVLILKEMPSFNTSQLTTFMDRLQYFVKHVGFLVSYSTKTSFRKWRFLTTSSKMRALTAITKRLVPIRSAQVCIAFGDWSCQDGLCGNPSAPVQALKKELEQ

SEQ ID NO: 3168 - protein, 328 aa, Phytophthora parasitica
MDGYGASRLLFRPKTEANDEERAEKRSSEHPVILTGYVPDAVVGLDPGMRTICTTVTGDLRSNRKRHCRQRRRRSRRGKETLGSHRRKSDHPHWIRTPKAPQRQCDRDVDRISTREYRHLAGFNKFRKWNECLKKRDGEYQRVIADMPSFKTASLKKYLECLDYFWRHANFLLEFCAEHPFLKWKFFMKRMARVAVDAIAKNASFQRSHAYSPVKGLKQALQKRAMVVSMDEFMTSKLCSQCHQTLSFVQYLVATKFMKRKKRKGTVLIRNRPEVQFEKKKCYGVLRCDHEGCGACYWDRDVNAAINMLELLKSEILGLGRMVPFNRK

SEQ ID NO: 3169 - protein, 291 aa, Phytophthora parasitica
MKSKLALMDNESKAKHETMIRQGKKTKEKKKTQLHQALAANHKQVLLPSFNTSEMARKYEKLVTADGTPPTSSDEVTETAVQPRKGKKREIRSSTARAMLAQLHFKFNMLLKYKMECVGGRMIECEEEYTSKTCSSCGEIKDDLGGSSIYRCLFCHVELDRDVNAAKNIFHKNMPAPLRLQRHGAHNATDFARQIISPCSTVSIADTPTTNSPYSGTYASAPTLLSSSLPIITALSYRIDLDTQEMTRSSPISRHPVFYVVSSHSRTLPVRLQGIYVDWMGMLARRGCHVH

SEQ ID NO: 3170 - protein, 347 aa, Phytophthora parasitica
MTVEAKYNYASHLFANEIKTDGYNASILYYRPKKDEPKRGEDDLLVSAGYLPDVVIGLDPGMRSVCTAARQYLRPQAPRRPKQRRVRRPRRQKKKNKKRKRNFPKWIRRPKALRLGQRPGREIVSVTTREYRHLAGFNRFRAWNKSQKRKFPEYKKVFDGMPSFKTASYEQYLKRLEYFWQHATYLVQFWKDRPYLKWRFFQKRMARVAVDTLARRIVPTVRPRSEPGQEVERGTAEARDGGFHGRVQTSKLCSQCRQSLSSVQYPTPVFPKNGDKPKRKKVKGKVLPRDWSQAGIQSRHCRVVLLCENKICQARYWDRDVNATINMLELLKSEVQGRGRIQPFKCS

SEQ ID NO: 3171 - protein, 550 aa, Phytophthora parasitica
MNKGVLEAYLLANLHILRLLKENKEIPKLDGGFFRSCLSAVMKLLRYSKVKGELGESLKIYNSSRCARSPQANGGYINQGRSHNAGYQMATMTKNALSMNFYRRFHKFLKRTYTIDGKKAYTLLKGILSHEEYVRTGTRFDEIVLEWRAKVPRKPNGYLADEAHQLIPLTYLLLQDIEDRNTHGKDAIDEGELFQEIRVFSILPTKKGFECSHMKMCQLGLWGLLKRAGFAAPKPGKGWEDVQHDYLHKLFNIKKFETETRKFAGEIVTDGKAVSIMMRKPKKEAGPARTYTEKDIDVVWGLDPGRRDMFVATNQFEESVSCSSKEFYEEARYTKAKQKIKGWQDRHPKVLEAIRNMPTKKTASLQKLKVYIAFMTQHMDLLLGFSQLKPFRRLRFRSFLFMKKKLRQLCERLAPRGKRVVVGFGDWSNQDVAGIIKKSPAGPVKVFERELARYCTVIPIAEFRTSKVHFECQRRLKNQYSQRLCRDGEIRTQKVHSVLHCLNNGCRGMTVNRNVNASRNMRRLLECKLRRPSLGLHSSGKSVITKKKCF

SEQ ID NO: 3172 - protein, 236 aa, Phytophthora parasitica
MFVATNQFEESVSCSSKEFYEEARYTKAKQKIKGWQDRHPKVLEAIRNMRTKKTASPEKLKVYIAFMTQRMDLLLRSSQLKPFRRLRFRIFLFMTKKLRQLCERLTPRGKRVVVGFGDWSNQDVAGIIKKSPAGPVKVFERDLARYCTVIPIAEYRTSKVHFECQRQLKNQYSQRLCRDGEIRTQKVHSVLHCLNNGCRGMTVNRDVNASRNMRRLLECKLRGQDRPLAYTRQARA

SEQ ID NO: 3173 - protein, 1074 aa, Phytophthora parasitica
MVTGHVLVAALAGSVVSAQRLHPTSQRVKELAAQEDEEPERFLTTKRESAKSKQKQKTSDDLIHNLPGLDPAANVIQHAGRIALHDSDKNKIFYWHFQAAQNPDRVPLVIWLNGGPGCSSMQGLFLGNSPFKLMNESTIGKNEHSWHEFANLLFVDQPVGTGMSYTKGNDYRPDEETVAKDFYEFLTKFLQRHPEYLSDGDDGVKISRAVYMFGESHAGRWIPEFSDHIFKQNDDPNNQIKINLDGVGIGNGWVHPRIQYEYSDYAHGLGLLTFGQVRSLKASYAECLAALDAGTYYSRSCLDNMDSITGSVKPGNGGNSLNFYDVRQYLRNVGAYPSGQENIVKYMNKMEVRKAVHGNEDKNFRFDLCSNGVFRALSKFDGVSTLDKVDSLLQRGLRMLFYNGQWDMMCNHYGTEKLLLNLNWNGSDAYQQAKKYTWRVQGRKEPAGFAQQGDRIDKNKTADFFVMKKTLKSFCKPDAGRLAWDECIQEVNHTIAEAYLLANYNALSQLKAGRPLCKIDTPFYQLCLSLATSVPRRANYEKFLVTQATKDRRKLWIDSGKVGKLKDFPATVPEFSETGYQEWLKTQKVKNADLENANDEFGKMRGDRAQAKTEHLNQGWFQAAAKQMATNAKNSVVPNFAKRLRTYVIEHYGPKRAAAHEVLNKTFATEEFNSTYVRVVEPVITELRKKIPRTKDGKINWVPHDLLPMFYKFLQFVVGYNEEKMGKPDFVEKRTLSLLSTKRGFEASYCKVDSTGLKSLLKRSPGVSRGLWVVHDGQMWTLEDSLKTSAPWIAISGQWWRRLFRVDELEKPGARSLQRENTTDGYGVNCGDRPWANGFHHGGNEDGKVVRFRTSDFYQASGYSRSNRKSNHYIDKSPRVRELLQNTPTKKISSVETFCNSIEFWFQHDHELLSFFMDPFFRKLKLRRYTLRTAQLDCACFELAGARRTKAVVGFGDCGMTGEGLIKCSVAGPVKAFACKLARYCELVVVDELRTSKKHFDCQTTDDLKNQRVMRKCRDGVVRKVPGYKVLHCLRKHGGCGMSVDRDVNAAKNILSILQNQLAGISERPLRLRR

SEQ ID NO: 3174 - protein, 284 aa, Phytophthora parasitica
MGPPPNGVYDTPKNLRFNTLRTFQTNVKSALSNVKNGNIKKFKIDFSSKKKSPSFTISQDGEQAKIREEKSVFYLSITNLKDIRVKMNAHVEISSEIDILNINGFWYVAIPEYVEPTGNVLEFGRGTKAYLDAIRKRRDNAQSVMSKFKNKKKSKRWQYRAYVRAKRTFLSSTAKLKNCVKELHLQTCSYLVKHYDVILLPIFQSKDMFLQLLQAKCEVVGKTVVVCSEMYTSRTCTRCERLHLKLGSNDVFTCPHCSYTAGRDEHAAFNILRYVCAGSLQTYA

SEQ ID NO: 3175 - protein, 273 aa, Acanthamoeba castellanii
MDHEFRVTRTKLGRYYISIPVPLDVKHPIQQQQPNAVGGGDNQAPTVAPHAAAAIDPGVRTPFTVYSPDEARIYELGANDFGRIRRLCHHLDDLVSRTTDRDVRKKRRRRMRRAAARMRRRIRDLVDDLHRRAAKWLCETFETIIYPHYETSNMVVGKSKRRGLHSKTVRAMLTWSHFRFKQHLLHKIREYPSGCRVVLVDESYTSKTCGGCGRINHGLGKSKLFWCEQCGFRTDRDWNGARNIWLKFLTEWCNGSSRGNDDDDKEQQQQQQQ

SEQ ID NO: 3176 - protein, 771 aa, Acanthamoeba castellanii
MQGPLGETNERPWLHNPRNTAIVRHRTRQLIEAGGDTYVPSSEATKYFGVTAACLRKLADRGNLRTRRIGDKGKRLYHCGDLLSQFPAVTRSEDGRTIQTTTRPPRKRIAYARVSSEKQRPDLERQIAELRRLCPDHEIVSEVASGLNFRRKGLCAILDRCFAGLVDEVAVLHRDRLARFATELLEHVFKRHDVRLVVVGQGDPAAAATLDALDPQRELADDLIAVTTFFVARQNGLRSAAHRRARRDRAALEEGRGSTTSEPSEEESEERGGSEESERDETDGSSSSSSSDDGGGRRKRQRTSRRRRRRREAEAEGTAGAEGGGDGEGGMVAFDGKTRKICVFPTAQQKTLLKRWIGTVRWTYNQCVAAVRGRQCAPTKKALRARFVTEFGLREAERIKRAKSGVGGGGDDDDVGISWVFETPHDLRDQAVGQFVTAYKNAVQAHGRGKFDIAFRSAKRLQQETVVIRSRDWNRTRGEYAPIFGNTVLRSSESLPAKMDHEFRVMRTKLGRYYISIPVPLDVKHPIQQQQPDAVGGGDNQAPAVAPHAAAAIDPGVRTPFTVYSPDEARVYELGANDFGRIRRLCHHLDDLVSRTTDRDVRKKRRRRMRRAAARMRRRIRDLVDDLHRRAAKWLCETFETIIYPHYETSNMVVGKSKRRGLHSKTVRAMLTWSHFRFKQHLLHKIREYPSGCRVVLVDESYTSKTCGGCGRINHGLGKSKLFWCEQCGFRTDRDWNGARNIWLKFLTEWCNGSSRGNDDDDKEQQQQQQQ

SEQ ID NO: 3177 - protein, 734 aa, Acanthamoeba castellanii
MQGPLADLPTNSTSRPWLVGPRNTTKLNHRTRQILESGEDAFVPSNEVTKYYNVTAACLRQWANKGEVRVLRIGELGKRLYNAKDLKSKLVGRDGGAQQQRQQQRKRFAYAQVSSEHQRGDLERQVGELRRLCPNHKIVTNVASGLNWKRKGVRAILDQCLEGMVEEVAVLHRDRLARFGVELMEYLFAKNDVRLVVVGEGATADAETHAVLEAVVDPAQELADDLIAQPWRKQQAANLKTAQKKANRKKASAAKTKVMEASGDGDTNQPGGKRKRKGKERAPISEEGEEEEEPAPYDGKCRKIRVFPNRWQKDLLKSWMGTVRWTFNACNAAVRAGLSGHSEAELRSRFVDNEAFGKPHLPGPSTLWVLDTPRDIRDQAAKELSAAYKNGTKAHGKGKFEVKFKSPKKMAQQCITSNARDWGRGRTSVFHGLFDSGRALRASEPLPREMKHEFKIVRTRLGRYYLCVPMDLETRGESQAPSSSDDVGAECVFIDPGVRTFVTTFDLSGRIHEFGTGSIGRIEKLCRRLDDLISRTYAKKPDDRQRFLRGKKKRWRMRRAALRMRRRIRDLIDEAHRKIALWLCENHRVILWPLSGVSNMVVAKEDLKQRKRRIGAKSVRAMLTWSWYRFQEWLKHKVREFPWCRLVLTSEAHTTKTCTHCGTPNHDVGRSEVFRCADAACPNRSAHRDHHGARNNGLRFLTEWANLPTTTTTTTMTQRLPTRVIDLTTSGLND

SEQ ID NO: 3178 - protein, 690 aa, Guillardia theta
MSNIRIVKRKAKGFFKCEDLVTIKDAVKAAHRIMSDASILVRSYYLRWFQSSYPLDSDDKELELEHFHISMACSIVQGITRPPVRGVGPEQSVKIDVFNDMLDEYKRLYERAPNDKENETDLSLSHVLAYSIDNLLTAYKNNIEAHFSKYVKRFIRCDMLAKGFNKSEANRVAAIYTNAYIYDSSLDLEPDFMERLGLEATSYSSLFPSKINKGGFPRVYDLKANPWVYLPKMVMINQALETDFSSVEHKERRLLNPLPFYSSFVPMHIRIDTSGLSQLLMTKDRLDDFKRSYLAEFGVSLNIKNKGDMLASFEKIFGRKATSNREAGLYATEMWSFLTNLKTCRQWKELDGVVRKNDPKGTQWMFDNAVVTDGVSISFQVIDNSMFGRKAFSGRKKRVACQEANDEEDSKQVTREELKTSKLLGCDPGKRDILAITDGIKTICYTKGQRDMDTHKTIRLRTSLKRRRGCGLEEYETQVMNRFQKRSCHPEMFRRYACSRKRMEHMLLECYSHPVFREFKFLVYNKTKSSEHRFMHRVLETFKRPQTNLSKARCASGVMRMNALKEVQRHGDIIIGWGNWGKNPNALRCSAGPTPGIGIRRRFESLFKTTTVPEHYTSQECPSCKGRCLRKATGNPIMRHHLLRCTNDSCCSRWWNRNVAGAFNILTRLLDGQTLSGNETTGDGLGGDDL

SEQ ID NO: 3179 - protein, 1464 aa, Rhodotorula toruloides
MSAVTSDEYMPKIPWVGFTSFVRSEAFMSMANETDWDAVMAGDADAIEELMVEMAVAIGALTDNDLEGPAPRADDGADVAMLDAEGSGDGGGAAGEGPEDEAGDVVMEEGDAAGGAVDQGGPASEADGAQDGDEQNAPPPAPDQRRPTPKEQRLRWFNDIFSIDQLVKVMKISRGDDDVPLGSKKEAYRQLVDELKGNMKQAKADAKVGRPNLHLPFGEPPKRPDWMPARRRPGKKERPPRLEDVPWLSEETWARLKATTGGTPDPELDKPDLRLSRLPFRPRIQITRPGPPPSNIVADAINIATELHARLSRDPSLIPQKASLKGDDKGETADTTKKKKGKGKAGEVVEQIQVKGIKELRWVARQEAAKLEGEEDDEGGGGSSSKKSGLKHSGRLSTIQKPFDSAFNTFAVRASAVEESGLADEESDEATDGSGSDDSFLYIGSPWRDLIEVRLLHHQLEWLVLVDVLNGLLERATSLSPLHSFVRRFYATNASDNWRQTFGQLARLIVKLQEGRSATPSACDADDIADATWTELWQTTTGSSTKPSPDDLDRLKTKYGDLSAHDVQACAKEKLPLFAIDVIRDVDSHLQIKLAPGITILFYEQTAKTIAVNFATRSRKRVPTVVANVAAFLSEDIIARLPAFVDGLATKIGIDVGTTSLHAESFDAPVQALARDISSKQAMRARNILRLRLETLISTLPLKFDAKSSWSRGTIEMLAKALSPVDQNFRPPRKGQPLVATDTAIDLASSIVTELGRFSSLITKYLALVNSTAKANPTATLASLAGGRAGGGLSITDLTLVQVAWEQQLGQTPKIRYRGTSLVLPPTMLAYHLIKHDTIVTTTLGNVNSLVARCNEAVHGLEVRESAQPPRKDPLSAAPLADNKQRPSHKAAPSAMTILHARARDYPNQLLLEHAHSLHLFQVDTRSTGDCKIPRLVLDTERMRALEVFCKSALAIGPKTKWAASIWDKCPLAAVPFLYAAPSPSKSGLLVHSQTTVTRHAVSFLMLNPNEIKDATPWQVSQSPRAMLESTWRGGGKHSKLLSNWAETGACRAFLEASAASPIQPCVYARDAIWSPCTTLVDGILPIRLKGTKVVLTDDGEDGGADDRADDDAHGGVFGKRKVDAPRGRGRTDAKSTPSATSHISSALDTFFPSRFSLTAPANASTDSDGNDQSESRPEMFKIAENTIFVPIDVGERNTVSAAIISAAFEEIFHVEIGNHQFKAANKQQAETSARILRESGLAAVRDAIRANGGDGTDNDLLSLLDTLSDCNPKTLALNWEQRQKFNDRVRRLTHAIAALVDLISRDAAKPEIEERNIVVFIGPKLGQRSSSASGADRREQVSGSLITALRALRGTDDNLRVAVLEASEFRTSFTCPSCRIERFDQHKKEKIAYAADLTTGFDVFRVLQCGHCKRVFNRDWLGAINIGIVGIVSAAFSGLKVQVFSDWVEGVFGWGRTKKRGRK

SEQ ID NO: 3180 - protein, 1665 aa, Rhodotorula toruloides
MGIRGFFQLAREAGAMVEEFVRGGPAAVGRVLAGWLREREIQVLFLDVSSLTGHILVQQEQRQAREDRLGERLPHYQAAFTARSCDHLHALLLPIRAALPDLAIHLVSDHFDYRPSTKEPEIEKREKKRLTVWFEGAMQLVKEVRRKGKNHVGHAQRLLEKAGLAEVHSGLPKGAVGLHRVQAEEIAGCSSASARWQCDNVLLVTAPSDADGHLARAALAASSPCASSKPRPLHGLVEPTQHLDLLAKQSVSPARILTLAGDSDLSANAGSGVARFFARINWQTGGASLGVIDKRDLSLSLGYSTSGVELANAALAMGQDSTGSGILGLGIKAVVNPKPEYMAFAAEDWGALARDDKVEEQRLWDERGGSLEKALKVKVPEKPWGEEMRVFRGYEGAVVSKMAVMERVWVTVRDEAQARNPNPSPPRRHNLGLPTSTPPRTAPRSPKQKLPPSPQTQFVQVRYRPQVPTSADQLAVLDATKPANPAPIVTPTETPSGGKKRKRESLKLKVPSVEAGRQAKRQEKEGKKADAIEGKEKGDEPAGDKEKVPQATPIRDSAPTRTRRINLKNAVQSADLLYILRLANIVFTSVAPVLISSSLSLLLTSRKRFDKASIGAIRLAQDCADCTADVFKLVDLVLDFTLNQSRQGTFREASLAETARQELGRGADGSAVAAWAEEWDSLAEEEQNVALERSLPLGDVRVAKSVQQHLDIPPVIAVFLLYPGAQAILKDLVAQASTAVFVARKARAGRFVADLVSSILLGGVNGTPNLDVDIDDATAASRARLAAACHDDPALEKEVVYICRQTFLRTPSHTILPSTELLNTLSTFAQSLSPDLEQRFASTLSLPSIDDLASVLVICTQVASRLIIEAADATARTQYDEDEALRPKNLAHRGNSSRWRDSVHELLVEKLVNAGIVAAGAGRPHESAWSVEECDGAVLAGRKALLDLSRRTVKRNPSEKAGSAAPAEDKEEGEADEEDSKEQAWPMRRSSFAQLIAGGASTLLSPEILLFFLEEQLSQSSASVVKDEAGLSSTTFLPTHAPMSAADACSLISSIAEEPVIVPRVAATLKDYIPFLSRIKSHDRKTDDTLGKSQDAADHFYYCSQLLSLLNIDCTTLSPHAPTAAQDRTLRNIAAQIEATWSGGVISVGRKPIMKPTPRQILQLASGDLLEAFRIVFPSFKLPHLPRGSVTFSHNRIHVHILRIDTPPPYLLKSLYGSAAATPRKLTVGCFLRDAYESAKSAKYFTGLALPPAKLVEQHSPSTSNTSTFFDENDQPLDRRLAERPVTPRQAQVKPALSTLPSVPWLGGDNLVELRRFLGLQPDGSGGYDKNVLVIAFNLGSKNVGVGCAERPAIPGSVTCIRVRDAVFLGSERELQRRAQQKATLSSNAGPSKRTAFDCQRQRQKLLDQVAHEFVSEAVKTPPHGIGWPVVEKVVVAIGGGDIEAAFGQRGSKAAGPFIASIIQHFEAQFGKGNVVARIVNEAYTSSRCVRLPCRKKDNKPLVKYVWTEGPRKGRQFYRILYCADCERTINRDEVGGQNILTNVLSAVRFGFGAFTAKFAARMGLKWKGVGDAAQMGGEGEGEGVGEEKGEGEEKGEAEVDDPTTAQENPATTSAGTADSPLADQSLPADVRRDLNELEDDLYLHPEEYVVRRDAILSRVRQTGS

SEQ ID NO: 3181 - protein, 1679 aa, Rhodotorula toruloides
MAVKEFTSWIYRKAYAQQQAAEARKEAARNDAVGNFVDLEAVADHLRASMDQSQPAAVIRETTSLMFGTHLDACTRYRNTATGRIDYAKVHAAEHAALRKQDEVLQNLSVAGVMTINTQDHDFFKPLPKLGEIKKRRRRGGYSGGKYSARDVERAAETDMIDMLEYSVTVDQQYLHRDDEGDRTVTRLLNRAREIRTGVPGAPDRDPKFEEVAALLAQVPPQNIVVLGRDNDLIAIDTHLERRWVVTPRMGIREPPLFLRTQNVPRATASGVGVGKGGKASTTETRQLTVSLFDMDGVDRLLPLDLTRVDRAVLAALIGNDYSNGGVFGVGVNTILAGLIDEGHKVEWTLENALMVRDALNTDLGMLNGSSDEAKRRRTTLGLHQSKSIVQVGESTVRGLIDAVDAALGRDVEIFDTREIPWVEHHNDDMRVRFNNGTRPPPRPYDAKGAEKTFMYRRPVPGQPHAEQRRFPPSPSPFLKLPNPLVPLRNSPMPRADDTSTEANRRRELARRIGSSRSSTIRITAISSGASLHAAMLRRAGTERDEDEGGDEDEGGDEGTGDAAKPKPKGGDERKSKRKGKHGGKRGKGKKEDNSAVVKGGQEGDAAPEQEQEPPSNDKDDKSESRVRLDSQFDTVCTDPLRTRSIERTLHRDQIELRPPRDVPQTSPTPKQPSAPGSAKQRTRLASSGIPNSAPRVGGVFTGGNRPRANGPANIQVARSDKPVADILSLLSLSFALSTLEQNDVADEWVGACGTDDDFSYLANKARGRDFHRDLARLMCGLGGEFIKGGGQGEGGTLKKVGSGGQAITLDEHHVAAVRAVEAKRPPNVVRPAEIGQEAWSVVVNPQATAILKAVVDKAVLSLGALGSALAKDIDTLVANGRSLRAEWVDIGPLPDLETYLRIDLTGADELARFKQLLASVLPTILVETPFDPQRARRGASPAGKADASQPAKRRRSGRTKSAADAAQAPAAQPAPAPAPAAAHPVDSSAWTQLFEKGEYEALVKFIRSESLSDLSDSSESVSDASDSREPGRGSSGRVLADLERWIDGWLAWRDRSVRIAAGSAAAASSLAGRSFAEIVEEEKDVAHGLLPFFYRCEKLRGVDKPLPTVEPDFRPLNIICLLRVMGSEYFQAFVERAAEQVQVAYDSLRQNIKNKADRSTAHLLTFEPLIQLFENADGSGLPLWVHVQNGDDVELRVKGSIVDGIGRVIQELRDRFGCATGSLNEFIVKRGAQVEAMYQLFKTDRFPRTFFASGHFLFSFSEISFVGHHVDGPKPWLVKTMEKGPTVFLTDAGIAMSYLVHHAPNLRNKGGWSHLDPVKYDRGMDKDRLVEYVVEGGAIRERRIGTRFRFFGGNISHNNLLGKILEHRRNDLDLPRDRRPLEAIEKPFRKRFWSARERPTEGGVPDNWWRCYTPGQANALRRWIGGTPDDKLVLCACDPGENSPVTVFNSVANEHAIGGRSEGFASVAANNFRAITKTGQRRMSAFNVAFNNEFSPTFSASSVSERAAVYALRKTNQVGYGIRRLTKVRAKAIYRRVANELADFILGGELQKGVGVDPETKVVLAIGHGFKTKRRSEGAGTTLPLLREVDDVLSRRRVEHRFVVVNEAHTSRRCSNPDCVDDEGRRSRVKHATLGSGSTTRNLLHCETCDCVYGRDAAAAANIAASLASLLQTGRAKW

SEQ ID NO: 3182 - protein, 1766 aa, Rhodotorula toruloides
MIPHLPAYIELFPDTYQDLPSPARTDGRVLVQAVKDLPVQVLLLDTNPLVFSALRSITLAISKHDPFLARLRQSTVTQSSAQGSTAPPAPFGPPLPPDAYENTIADHVVRELERLVEPLLKFRSDIRIILVPDGRLRPLPKWWECVARDLEAARATWGRWERASENEEERVWKGGQADKRIELLRATFAPLAGNADLEPVPPTVLGLRAPLPQELYAAAKRNSSFLLHQAIFVDPLIDADGALAQLDPQLARPFDPSFSGLPPDRPLHLFELNAMLSGRRSEELGVVSIDNDVVINSPASAVRFAFIFRSPKTGSTLRVVDKEKLAEAASLASFGPSLAHLGLVLGHEYLLGGIRGLGPVNLRNAAQLFSPFLNLEWGNPAIPPSAGDAEAWREWTEYFATLGFVMSFTLEDYREASAALRGLDVPLFERSSTKAVAWNVVAQERSEKAGAGQEIKPVFHNFRLSPELQAHFASQMDESTSSHPFRPHDRSLRPKPSHLSPLPPDPPSHKTKPCRNLVSTRLMPHVPSVVDFYTNLQPVPTDEKAPKAKILSRKRGFGTVVPESADAGRSAAKRQQLRLSRTTGDAGAVDAPGEKAAEKGAAGKGPGEGAVASAGVATEEDAEEESRGKGKAEAEVKVPELWRHLKLTTIETDFASSCQSPAVYETLSAIRLPMHFIFPRLLNILIPNLIASSIDSNASSSLARNLLSGPDAIRDSVWCSINYMAEKTSARGVNESMEQLLYHLVGPAAPEARIAAAASRVGRLTPATRTRIQQSLLGVAACETLDGIKLALRLPDTLYAFFSTPTARAALEETVVDFSASLDKADKDRTLISLRDLFSRFLSSPSEAVDACAQIFETHASWIMQIPRNATSSSNARHTAFELLDKFTELVRIVKQDATVREPFLVLDASLTDEEKEELSKILARHLACAPLCVTDDDAETQRTRLADAFVNKVSKILGRVPNMRDSSLSVADAARSSFLFLARLLAFLMSAAVTSSAALDYDEAHEPAHQQGHQSAWADERHKTVGRQLPSGHPRAVRQVQTGWSLQERLTAAEVALVRAEIPRSWDRKERQGSASEEGEEEGDDSTATGTGEFEDAQANETLGALAHSLSGKARTILPPSSARIILCQLRRATSLAQQHTAPTTRPTPSSTQTAPPQVLSEYLATAYSAKTSIVYAPRSFSVLGPHLACLILQLGLWSTSTRTADGLALSDIFSATAAAHARLAALTRLAPEAARVRLSARAEEFDSSSSAIFRHDIVDTMRKVAEELRGVLAACSTSSSTPKLSQLQELAIQNRFQVVATFFKTSKLYAPHGLVRLGNKRLQVLYLDFGSPSRKLLDYIFGSAPRPHTMTVGSLFNRLVADPNATKLFHLLRSLQPPSDGSSPFTGSRAGFVDEDGLLVPEVAQKHLNLYPLHRPSRPRIAALPLPHLSPTAKTTLATLRHFCGFREDGTGSIEAGTTIIGIDVGSTYSAVGYSEVVGQEGSARAVLVKNGHVRAFQQKASRNQVKVQLGGKKTGRFYRRRGRLSQAGRFRVRQKYASVTAQLGRQLFDALVPQPAKSARPRPPAAASSSSTSSSAAPPLLPDPIKTPPKRRSKVLVFVGAGGTAADNVRGKHAIDAGHAIVGNMLRHGQARPDVEALATTVDEAFTSSICPKPTCRKAKLQWLAYFRHVTTTGKPSSRPFYRVLICPVCSARYHRDVVGASNIVQVGVVLLKHGMNLHGADFTTTFGFPAVPARKVDIEKGKESTSHRGDVQEGEWEDIASE

SEQ ID NO: 3183 - protein, 678 aa, Pseudozyma hubeiensis
MRSVTLTNVPRADLTVGRGPDIYPFYDANLEEQYRYLIAPSDELLARVDENRPTGNALERCWLHSKTSTFSYPGLTQTLYLPIRWPFDSTTVIDQDHAAFRTDRGLLDPADLGDQVETALGAATDTAANNNNNTITNTTTTSMLNTDNLGAHVLKPEIGNIRTRKFSLKPSTKLKEILRDWRRCANVCFNETLRYINHARSLRELPSNYKYDLYALICNEQSAFVKKHPFLKNCPSQTRRHAVDEALAARRSIITRYWNTPAHVRPDPDQMPQVGPATKKKDMHRGFGVFFPKTCGSVRFQQEDAKIIDLFLYVAPNTVKYKHVGGREADCLVPIQLRGQEQRRFLVDRCQPIPMKTQIKYEFKHEWGIQLDRYGRWNLLFTYEVPLPTSMAAENEFEGPITVMTGDPGVVTPLSVYDSSNGTVIDIGSAQDGARLEKLRRENDKLQSRRSSPSDQAGPQRRPPRDRGAQQARRKPRQPRQPRSPRHPRLSRQPRPPRQPRPPRLPRQRRPPRQHQHLPALSSAERRKLVKRSKRIGRRINNLVTDLHCRAANFLATSADVIIMPRMEVRQMIARRRSGPRLTRSTKRRLIGWGHCAFIRRLAIKCVDVAADTRYNIPHPTILLVQPEAYTSKTCGRCGELNHSLGASRHFTCRHCSYSADRDHNGAYNMLIKAIRRS

SEQ ID NO: 3184 - protein, 286 aa, Pseudozyma hubeiensis
MLADVQADEDGEVSGGVLAERSAKRSADNALIRPLPGPRRDAHRRPPPPVPARQPRPPPPPLPPPPPVARAPPRPGRRNRSVPFALSAKRRRRLDRQARAIRYKMSNLVTDLHCRVAHHMALTSDVIVMPRMEVRNMIRRRGARLHRNTKRRLMAWGHCAFLNRLSIKCRDIGTDQRYEKRQTVLLVQPEPYTSNTCGQCGHLNDRLGSSRTFACSDPECQYVADRDRNGAYNMAVRAICSARVANPVAAKLSDLSNKRVLNFFPTFGINIIYDIRPAWNPTVHAA

SEQ ID NO: 3185 - protein, 842 aa, Pseudozyma flocculosa
MTHYRPKADLSQRFVHAGKRKRDTSPGPAPRRQRTLIVPGEGRDRPRSPVMPEEPMPLADFRSVAKPTGAAPTTSTRPTSSASQASSISRTDPGAPEIRQPSPALASLPPRPQSSISAARRAGPIDGDTLAKRPPAPLPSSLPSKPQTRCHMHAQTAPGGAAAVAAGQLAFGTSAQSSLPQPDARRIPRDGGSTAAQTSEAAKASSVSTLPAKPQLRPGGPQASTRADISRTPLQPVSPNSTPLPRPQAGVPEARRSTSTVTKSLIVPRSCRANSGVTAQQAASPSSTLLPRPQAGVSEARPTTSTVRTPIASASASAGEARDVVGGAPTSAQQDPPIASPPNTSEPSSAKTKATEGSNEEPKRDPWWTKFVGRLDAFLPSVHGTAHLPYKPETAPPRPRRRHLSNVDPKSGKKRTWYQATQMRLAAPKKAFSLPDVVIKAIEAAAAQPLKRSNYKGHRRRIFPTPYQEYKLRLAIIAINRTYNLAVTFLQERFSEDWYKKRPGALFAEFNPMLQGRFVNAATVSDECRGLLKDAPACTRKFAVHQAIKAFENGIKTCKPFKVALRELVRGYGTIHVQKERVNSEKGTFYTTYFDGEIKGLRGLKLPHDTTIIERNEKFYINVISDRHPLELPRLNKDDKICSIDPGVRTFATVYDPHGQRVVEVGAGDFARVWRLSRHIDRMVRRLKHLDKKRWIRMVKAIHRARDRVKNLVSEVHRKLASWLVSNFNIVQLPPFNSTRMSARAKRRISRSTVRSLLTWGHGRFRQHLLEQARASGIRVVIADESYTTQACSQCGELKKIGGSKFRRCPCGLNADRDANGARNIMLKFLIEVLFQNERPKD

SEQ ID NO: 3186 - protein, 904 aa, Pseudozyma flocculosa
MSAIKQRKIACQCLGCRGDPPTRCLYEGHGTELSRSAGSAREATAVAPWFEATPLRQGEQDTIAGQGEHHAIASQGEHHAITGQGEQSTIAGQGEHHAITGQGEQSTIAGQGEHQAITGQGEQPPLIDEPMHAAFARRHRPGHHGGRRPHGRNHCRGKRRGRRPRAGRRHRSRNRRRAPRHPRQHISRRPRRTRPLREAIKSVKGSVRNCLGWRPELRARLEELFVRVNEVDRYVRLFLKYACVRILSDTPAYDLSPLHDPQVIMNVWKALTLDARGGLRDCEPLWLSQHLAAFLELTGYRRRAFANVDEIAGYQATKIVTNHTNTIRANFGKRLRRLLMLSSDITAFEHDREVLSSFKRSVARGTPTASADPRLHRCREAAQRVLAGYPAGWAFQRESIYYDVVARPGGHIAAFHQLGLALDAAERHPVDRKARQKMQRRLEAAQRRAAANPDAVVQTPEPRSPSYYPLADGWIPRHIRIDTRIAWNHILAKAKNPPARGDVLDVWDEIVDLSRPIFRHHGQIDPDVTTLHDGILTFEGSIETDAVAATVQMQNYSGRSLQRTTRHGGDLGDGAIDLEEPYIDSLLPEDLDSVLLMDPGEKAIVSGMLFTSTAEEPQTIAYTKAQRARDMRSRRYAAIREAVKTRAVREAEADLSMGNARTLDLAQFEEHLRRYGRHEQVLAAHYSTTLTRGSGDPLHRKFRLAGYIRGERSYRALAERIKHKFGRDIKVVVGNWSVGAGRTPSRGKDFRAAMRRNGLPVYLIDEWGTSVCCPTCHGRTLSSYEPPSAPGRARTGKVWRLQRCSRCRVQVDGQDDCQRIWQRDTAALINMASILFASAHGQPRPRHLCRADDDSDSDGDSDGDDNNNNNNNNNNNNNNNNNDDNNDNNGGSAALACLDRQAGT

SEQ ID NO: 3187 - protein, 720 aa, Kalmanozyma brasiliensis
MLPPVKLTNFPRSDLPRRNADRGVHIYPFHDPKLKGKYGQLPLPTVANASPGEILHPALKPKKTWFDVKVTNFNSGSGRGTMQRWPFGKTTVEQTKGRMPSGQGTVYMDDLGGVQEVLEEANVPIKTDVANANKDDAPPKKANTKKPDVAKKPDPFPTVLAPEITGTRTRTYKLEPSAKLKKVLSDWHECVVITKNEAIRRVNLVQDYKALSDFQLKRDLVNNTSDFVREQDRDLKHSMTNCPVQPRRQAIVEAVAARKSLLTRAGKTDKLFDIKPVETSTGFELAFAKTCGSIAFVTNGNKRPKVSKNGSKRRKDGKDSSRGGVVDPDRFANPWLVMTPMKLKEVKVSPYVEMRVRGNKNRQELYDLLKGDKGQDNGDGGDKKDDEDSDDKDEDKAVDSASPANELEERLQLPREWRIVRNSQGYWLTIAFKVDKTQPKVKTVFQSEMAVTGIDPGARTMLTAFESVGRTVEIGSKEDAARLAAMRVKADKLKGRRMEKVGDRPDNKKDDDQDKSISDKDDSQDAKDMSVDKKGKGKARDDEDKPVDTVASTPGEDDSEGDKRPFVLPAKQRRRLLKVEKRILAHHRNLVTDLHRRAANYFATTANVVVMPRMETRGMIRGRRLNKKVKRTLMAYRHCEFADRLYIKAHDVQHDKRYNKHQSMLLAQPEAYTSKTCAKCGHLNDKLGAKEVFECSQPDCDYVAGRDHNGAVNMILRAIR

SEQ ID NO: 3188 - protein, 487 aa, Auxenochlorella protothecoides
MHQKPFRKVRHQAYVGRERAINQLTEQFRAPPGMTTIVGVGNWSAQDRGGIMRGTPPGPWIRFLRRLRRVCRVVVMDEHRSSKLCCACHATLHAHQYVRVRNGVEKLVDVWDTKRCTNRGCKVHVVNRDVNGAANMLMLTKCFFANALRPTAFGILLHYGDESTHRYSSSRLFVQCAASCCAEKPLAPNSRGGSIFTPNGFESHCGLAHRKKWRTTLRVFEPGKALQSLGGGSDGTPPAALRALRELNHGCPGQGPTEVEDGDAGLLEAMEQPGRGSLDCSPLCHQQAGADPQAEADAWTLIAAQGLMPRDDGGRLVGQEAGPQGRMADAHDDGAGGTEVFGAVQGLLLQLLASTGLDVAPPPGSAIPPPAAPQQSASSASAAAVASPPRAVQPSAGPCPLRPPSSGWCLDGLALRLSVMERGYQQLQRVVQVLLKADLELSAEVHALRSACAGCCHTMAHPGRPMPRRSLKRYRDEGGFLGAVHGA

SEQ ID NO: 3189 - protein, 719 aa, Auxenochlorella protothecoides
MKSPPTSVRGVHPTAEVLKALDLDNSRLDDDNEKAAIKDCLLEKDAEIHMVVGEDPGRVGMFTAVDEHGNKTACPSKEFRAMSGCSQYEKTVKGWHAKAPPCVQNLHNCPTFKMATVEALLKRIKAVATGGGHAEGPARALDAGLAAPAAGVQGGIGGRTQDEQAVLCLSRHLAHPPVRTGAARSAGDGKVWGTKRCTNRGCTVNVVNRTVNAAVNMLMLVKLFLASLPRPMAFGGPPPPVPSTPVPPTAPPSMTVRHRGNRLRMSTILGRCYAAGPPGREKGPRSFFLLHDVPSSPSHETCMALVQPVQKFRTAPCLSKPEEHRTPPYGTHACANSSTKPTVSSSRARMLSGQAERLLVPAPLSRRGDRAFSRRTMAGPTHPHASGSRNGHLHGVAEPTPLATAAELNSLRREVEELRQLLWAHQQGAHACPTPNTTRQIESGMPDRREEGMFDSRFHSTSSGATPRDFRTLPIRIVLIRHAESEGNVDNIAYTYLPDSRVPLTTYGWQQALTAGERVREVSSGDAHPPRLFFYTSPYLRSKQTFEGVAAAFDPGQIMGAQEEVQLREQDFGNFQDAEGKQREKAERLRFGRFFYRFPNGESGADVYDRMTIFEDHLVRDINAGRFGPDATLVLVTHGLALRIFLMRWFHWTVEEFMGVFNPPNAEPLVLERSRMVIKGCSDVMCSISMDAQSRELDPLENSFYAPSTAASEPTTTAV

SEQ ID NO: 3190 - protein, 241 aa, Auxenochlorella protothecoides
MRCVPPLPIPPEGPFTMADIVVACPTHKTASTEVLLSRVAWILPNLRRDLAWHMHGKPFRKLRHQAYVGRERAINRLAEQFRPPPGMTTVVGVGNWCPTHKTASTEVLLSRVAWILPNLRRDLAWHMHGKPFRKLRHQAYVGRERAINRLAEQFRPPPGMTTVVGYVRVRNGEEKLVDVWDTKRCVNKGCRVHVVNRDVNGAANMLMLTKCFLRMHLAPQLLVDPLLPLPFLLPPTPRFAI

SEQ ID NO: 3191 - protein, 936 aa, Auxenochlorella protothecoides
MSGAKRREGVIAKWHADAPPLVKKLHQCPTYKTASTEVLLSRVAWIVPTLRRALAWHMHEKPFRRVRHRAYVSRERAITQLAEQLRAPRGMTTVVGVGNWSAQDRGGIMRGTPPGPWIRFLRRLRRVCRVVVVDEHRSSKLCCACHATLHAHQYVRVRNDEEKLVDVWDTKRCPTYKTASTEVLLSRVAKIVPDLREGLAWHRDKKPFRKLRHQAYVGRERAINRLAEQLRAPRGMTTVVGVGNWSAQDRGGIMRGTPPGPWIRFLRRLRRVCRVVVVDEHRSSKLCCACHATLHAHQYVRVRNDEEKLVDVWDTKRCTEQRLQSQRQDKSIVYRLFTAPSCAIDSTCAPEFDFLQHAVVQITNPMTSNFCTGTLLKGPGDKIYVLSAYHCLAFMGKRFMYPWSTFSIIFDYKLPCNASYVEDVPRTFDRYLTGLAVVFQDVYSDVGVFELLQDIPPEWGVVLAGWEAANLGSNFTYTCISQPAGDVQKIAYGKVYNQIPSVILDAVNEEVDVYNVSCSTHACNFYATHVQHGSMTHGSSGAGMFADELGKIMGVLSTGRGSVCPGTVNKDDPRPSRVVFGSLGGAWEHGLHRIFNRSVEDEGGAEFEEYTRALPTITVGNIVPEVNPRKGSTSFSIALQQEPDKDTTISLTPTQTDLVSVTPQTLTFTRSNWRTPQFVSVTAGRAHPEATLQFDVALTWPVVSEAGGWSSRTKTISGVVWAERKGNSFFNPQEVRVPFRHVMDLERYNPQIPLITEHNGPFIPAKYFVYTAQKTEVTRKGWAYYFVAHPRTQVTIPGQSKSLNGKASMTIASMPLAEAVTESLNPTRLRIPAVPSHAVLPITIAPVLAWLDLEEDHTLNITTCSNKTDVGAEITVMDDQLEVIRTTGLARDNACVSIPSVVVEGGRRYFISITPVQYQFSLGKKTHQVDIHILDA

SEQ ID NO: 3192 - protein, 475 aa, Auxenochlorella protothecoides
MANRGGGGCPTHKTASTEVLLSRAVWIVPNLRRGLVWHMHEKPFRKVRHQAYVGRERAITQLAEQFRAPPGMTTIVGVGNWSAQDRGGTMRGTPPGPWIRFLRRLRRVCRVVVVDEHRTSKLCCACHTTLHAHQYMRVHNGEEKLVNVWDTKRCANRACKVNVVNREVNGAVNILMLLKRFFVNALRPATLGSGGYSYLYEPLWWAGFLSMVVGELANFAAYAFAPAILVTPLGALSILVSAVLAHFLLNERLNGFGVMGCILCVTGSLAIILHAPEEQVFESIPQVWALVVQPGFLLYAASAVAATLLLIFRVPPDVAASNPLVPIAICSAVGSLSVMACKALGLAVRLTLAGSSQLGHPATWAFAATVVVAVLTQMAYLNRALDLHSTALVTPLYYAGFTSLTLLASAVLFGQAAGGVAAASQASGFLTILCGTTLLHATRDADLAALAPLLGLARRAGEDQPAVELAKDARV

SEQ ID NO: 3193 - protein, 594 aa, Auxenochlorella protothecoides
MTRKNVHGGAPLGAPQGRGIADEYYRRDRPPEDAKVHMYVGIDPGRTKMYTAVDEHANVTSCSSKEFHAMSGSKRREGLIAKWHAKAPDYVKELHQCPTYKTASTAVLLSRVVKIVPDLREGLAWHRDGKPFRKLRHQAYVGRQRAITRLAEQFRAPPGMTTVVGYVRVRRGEEKLVDVWDTKRCGNKACKVNVVNRDVNVAANILMLTKCFFAGEEKLVDVCDTKRCANKACKVNVVNRDVNGAANILMLTKCFFENALRPTAFGRPGLRVLDLGTLPRVESPPTELRARKDKLAYFERQCSPVGHGLFVGAECVARNRESLREAGITHVINCVGFLYPAYFSPELEYRTLYLQDTPAEDITCILYDVFDFIQAAVGHGADPAGRVLLHCSQGVSRSVSLTIAYLMWREGRPYEEVFASVKAARGIANPNIGFVCQLLQWQKRRTTGPGAERLYRLAPQSPAAPQYLVPRSAKILGSAGLDPRGSFVLHTSTALFLWLGKACPEGFAAAATTFAAQLERYEAAPAPALLQRDGKESEEFWTALKAMLSSSTGEDGPEASGSWRAAAVCEIPAYDKDYEVGGCGAFCSVTDRSE

SEQ ID NO: 3194 - protein, 287 aa, Auxenochlorella protothecoides
MKTDCQHTFTIKQLRQDSKNSIVFYPDIGHSGHSDATFQCLRLSRCPTSETASTEVLLTRVAWIVPTFRQGLAWHRDEKPFRKLRHQAYVGRERAINWLAEQFRPPLGMTTVVGRVCRVVVVDEHRSSKLCCAWHATLHAHQYERVRNREEKLVDVWDTKRCVNKGCRVHVVNRDVNGAANMLMLTKCFFANTPRPTTFGGPSASPSFPPTLPPTRFAIRGNQLRQRYPVHGNKLLATGASPVGEQGYSVLSLSAHGCHPHSLPCCIMKGQWLSRRMKKINRNQCLV

SEQ ID NO: 3195 - protein, 313 aa, Auxenochlorella protothecoides
MVLLACRHAAVIAWDACKWREPPPEDAKIHKYVGIDPGRTKMFTTVDEHANVTSCSSKEFHSMSGSKRREKPLRSGTQRPQTSCPTHKTASTEVLLSRAVWIGPNLRRGLAWHMHGKPFRKLCHQAYVARERAINRLAEQFRGPPGMTTIYVPVCRGEEKLVDVWDTKRCVNKTCKVNIVNRDVNGAVNILMLTKCFFERGQSSNVGLLPPSDSDDSDSEDEKPKLKQNARVGELPSSSSDEDDSSSSSESEPEVEAPRQPRKRPEDEVDPAQIEADMARLRLIKEKREADRLKRIAEEGFDRYAPPGSDKAK

SEQ ID NO: 3196 - protein, 309 aa, Auxenochlorella protothecoides
MSGAKWREGVIANWHAKAPDYVKKLHQCPPYKTASTAVLLSRVVKIVPDLRRGLAWHRDGKPFRKLRHQAYVGRQRAITRLAEQFRAPPGMTTVVGVGNWSAQDRGGIMRGTPPGPWIRFLRRLRRVCRVVVVDEHRSSKLCCACHATLHAHQYVRVRNGEEKLVDVWDTKRCGNKACKVNVVNRDVNGAANMLMLTKPTRNPVATGATERESPDADEEGRANPETDSLSLLDTLVESIDPAQANPTPASGPTPKKTLAERLELAYNGEEGSELAALRKRQNARQQRMDEDQSGYLDHLANGWGARSSY

SEQ ID NO: 3197 - protein, 665 aa, Auxenochlorella protothecoides
MLVVGFAGELYNNRRDFAPVPWDLEAPATEEGPTEAELAAETAAIEAVINEWSTERAPAAARGDGDGTSGKVDEVLTTIKCTLNAFRGLPKPPRGRSSQDPLRPTLDNIVYTMAVTTILGGLLAELHVLRVVEEFERRKAAKCADADKVLHPLNNTFFCRCLRAVSGLRPEPDKKGSEETREAFPFLLETAAIFRRTCEEAVGSYQPPDLEHLHYFMDEAARDMETVTKTYYKREFFRRLKQNAQLELGCSARRAYSCARAVLAVEFVLARLNLEGCRLPPGKEAAIRACLLAKQKWHKKKKALCVHIGWAFFARLFDYRRFEHGRWTSGGHWRTNGYTVAVTLQRPRDPPRPGDPPPPPPKEAKAGKRNNAGASKGALHHQSREIANEHYRHGLPLTEAEIHMVVGMDPGRVAMFTAVDEHGNSTACGAKEFYAMAQHRQHEKTISGWLDKAPPCVQNLRKCPTFKTASIEALLRRVKAVVQNLQEGLAWMFKKPFRKLRHRAHLRREWAINRLAEQFRAPPGMTTVVGAGNWSAQDRGGVMRGHPPGPWMRFLKRLRRVCTVVVVDEFRSSKLCCACHTALHAHQYRRVHRGVLETGDVWGTKRCANRACAANVANRDVNAAVNMLMLVKLFLAGLPRPTAFGGPPPLTAPTNGWPTNYTNCA

SEQ ID NO: 3198 - protein, 417 aa, Auxenochlorella protothecoides
MDSGNRVHNGSAALLRHEGVEGIQKWLRVIFNKMGQDWMLSCVFIDASAAEYSAIRSAFPYWMPVHICSLHQSEAVASNASRPGKGHGQDFVASFKELQSMSFDLRKDSNQTAKQLGHRRVKGVSGYLQWTSKAKPDKDAMHRHIARLFSLLPYKQGLEAVHIPGTLTTLLALLQRHEKYNKDGIEKLTGLQLPTEREWNMYTAVEVLKVLNLEKDPPPDDARIDKYVGIDPGRTKMFTAVDEHANVTSCSSKEFHAMLGSKRREKTIGKWHAEAPDYVKELHKCPTHKTASTEVLLLRVAWIIPYQRRGLAWRIYKKPFRKQWHHAYVGRERAIPRQAEQFHAPPGMTTIVGVGNWSAQDGGGIMRGTPPRPWIRSLGRLRRVCRVVVVDEHRTFNCAAAVTPPCMPTSTNRSATA

SEQ ID NO: 3199 - protein, 499 aa, Phycomyces blakesleeanus
MSSTDGNPKSRVGCTPKTQFDCGGIIWLNRSGMKVPQISNLMKIPKSTVRDVIKRMEKTGTTELKPRTGRPKKIVEKYQSRPGLRIKKNIIGSSSSDTTSTTSSNTSKTNSKTDDEAQGKDWMYNTRPKKITRLKTNSTPFHSHSHSHLNPDSNQTQPNPTQPLKSQGKARRSKAKQGKASQARPGQARPGQVRSGQVRSFGLMTQCSWTSLTSGISMELQKQAHWASVMDEQSFLPGMIATEALVEFVQELVRKVDYTNKVVYVGALFVNFLFIKMPADGLLIPTIDQSLFASVFADSVQETVFQLEKTIQKKKEAPAQKQPADFINDIDKGCQIWAVDPGVCDIITAIDTSGRQRTTSVNEYYHLRGFNDAPHKYKNKFFLPASTDHTEAPVKTSIAFGDGVMNMEMYMLYEYLTSQVCNEFKKRNVENLVNSKSKRRVHAILQLQETTCNIVWNRDIMAVHNILDIFLFSSRNNNQRPDVSVRQTETNPGHQPSSV

SEQ ID NO: 3200 - protein, 228 aa, Phycomyces blakesleeanus
MYRPSFLDPGRKTVFTAAVGLDPNEHQLRHCTTKEYYHLTGSTLYARKLQQEKDTAGITAIESATPSAKTGRNIQFLRYADYMLPNMDTLFTFCDYNTAKYRFNLYQGKQRAPDMMVNILLSGSARYNRRRHFRKKNRKQERQNKKDKSKVPFVVFGNGMFGKDRVKLKGLRCSVAGDLLVLPIDEHPASKICKICKSRTLIDHPNVKGKFIVQKFILIRPEKETGIV

SEQ ID NO: 3201 - protein, 340 aa, Phycomyces blakesleeanus
MSYPARKRCPYKFSARNAFDKKVLLDKSFTGGILTEDIALESIFERPAPAGIATKIDLSTTILWRLDPGVRDAIVACVGAGAGAGQNRQSHIIRKTSTGEYYQLSGFKSATIKRARNDRVNVDERRLISNTLSTRTCNWDQFNEALRYTFWSFEATKGCYSTSLRNLRYHSYRNKQKTLDEMCKRLFTGSINLYLLGSILARSKDLLWVAFGAARFGGLGGNTAPPTKSFRAALLNYIKPTGRTQAHISKYVVMIEEYLTSQICPRCPTESISNQLDDLDVNIHSVPNCESCNTRCNRDHIAILNMRYVLLYMCLAGFLSTYITVQDTQYTHRISTVNIF

SEQ ID NO: 3202 - protein, 517 aa, Phycomyces blakesleeanus
MYEATKIHTAYIVNIKLMFGQHLRRVINILLDIKNKQRELTQQLHIQRATEERIKRMLTEHIFEPTRMFKEGVSTRRLEDVFIGEGYRTAFMEISPILTAYPKRYEFQKDSIYYDSKASPHNHFLALFRMVKLLEHLGRRSFNCFPLRRSWSPGYMQIDTRILSQGTIHTDGVGISIIRQNKDTTQGPNPRRATTINPENIPYIHDLSPEQHEIICGRCVLIDPGRRGLLYCMHEESTVKTPRCYRYTSNQKNIRLKRTKFRHILQDLKAQAPNVIAAEREISQTSGRANNTTNFAFHTSVKAANSSILSSFYTSTVSRTSKKPLFRKLRFSSYINQRKASERLAKDIRAKFGQDCVLVMVNWSAHHNRYHEHIKGVEMRNLLRKHGFNVCLIDEYATSRYCPRCYQPSLQTFKQVENPRPYRRSQMLTMTRHGLLRCTNLNCLENMDGSEVMHRLWNRDVAAVLNFRRILNNLRYDGTIPVRFTRVIRIGRIRRQAEEDLQEGRRLRQRLTRIQRK

SEQ ID NO: 3203 - protein, 739 aa, Phycomyces blakesleeanus
MWDGKKIINKLLDKVVLVLLRHHLARNRESKRISTTTTRNPSGKKDMRNHARYVCRAEDKKLKKLIQRKEKAGELEGEKWATKINSAKQRLANLRHTFKKKISQMLNDRKEASVEHKLVVQDLNITEEQQDFLEEEGTLDDDVPERRLNQLKSIIKHFVFRNDTPVCLEYVKRQSPETTTTEQSVCLLICNTLMKFLPPKKQYHVIAYQMYFCIFTNDVLKYARYTKFTRASCLSTSFSSSSALHLDSVTLYQLLTQNIDQEKSEEPSSHTNQQKKKGYSRMILYGYDRDELIGSQDKARQNKDATFNAVFDMREIQKACESYGLSFVHRITCLPGMKTVRLLGSRIKAHGTVTEETNQSYEARILINPSIIQEGRKTKDALFSELQNLTKEVKALESVHKRELDLLKDSNFQRKIKECKSNWGTTDDKDQLYRTIGKYKESRYKSYLTMAIRSKSKLHNVKDVPQYSRSPIEKCGKGVTKVEDRTVVNPGDFNYAGTDNGLVNMTASIPMSLQRMQFHLKLFNYYTALSKDSNEDKDSMRESESAPVASIDMAIRNFRAKYDQRRSLRDFYNSPKIINKKRHVEIQQHRYRHHLCRRERLELKHSENKLSSKKPLILFIGDRGTGTGSRIKGFRKYGGKWKQNINGEAVNVCITNECNTSQTCIFCFSPLTNPRIPGKKEEVTKSTKAPSFVSILGLSSVMFGAAPPPFYNLSQITAEHYTTIKSDFCTRRDDLAATL

SEQ ID NO: 3204 - protein, 252 aa, Phycomyces blakesleeanus
MHEESTVETPRCYRYTSNQQNIRLKKTKFRRILQDLKAQAPNVIAAEHEISQTSERSNNITDFAFHTSVKAANSSILSSFYTNTVSRTTQKPLFRKLRLSSYINKRKANERLAKYIRAKFGQDCVLTLSEMLPAVPSDRQVSPQPEPISPRPNTNCDTPWSPKANSTTTPFLSSFILTSTFRYTNLNCLKKTDGSEDRNRLWNRELTAVLNFWHILNRLRYNSIIPEKFTRVIQIGRIRRSSGGSSFETKTD

SEQ ID NO: 3205 - protein, 667 aa, Phycomyces blakesleeanus
MFKSFILKKKLSIINKNKSEENVDDPFKVVKSSRAKRSQSSDLKEDKQAVNKRVTVHRDLMNALIIYHQSPRCLQNNLGFPYKDLKRELPFDIAVNNEYKELPINKIIITSNDLRNIIFRAMMFINSYCLAFSRDSIPNSIYKQAFWYSKIKLRAKGNTKAFYSFIFISIIIGSRIELPQKKVTKSANVPPDLVQSWDTHRASITNSVYNQSLQSESRQFLSEACTELATCYTNYIVENFEKRLLSYLRYTLQNLLVFVCGGDPSWPSRAPSLEELQKSSIINTCRLLKSHLPDKVTLAALSAHPEKHISVFLQILSEYELEHTSHNPFDARWLPLPRLFGLFSKPSFHFRSDLEPNGKNQIMFGNLIRSNGFSIDCLFYKRSPTPIEVRNRTLQLELSDFEFNEVQNYYKPVFVDLGRKVVFAAAEGLSIKAHSLLRCTIREYYHMTGSTRYQADQLQQKRQNGVEAIESHIPSHKRASQAAYIERVQYILTHLDVLYNFYGSSTAKSQFFLYQRCQKVPEQTVNILIHEDSKYSQKRRKKKAKKKKQEEPTNPKTLKPTSRQNEYNTSKTCNNCQAKNLESADHTRGPSVLVCKACNTLWLRAVNAAKYMMTVALSTWRGTHRPTASQISDKSKQTSSNYHNNPIIVPKLACLFEPFRQIDRLSE

SEQ ID NO: 3206 - protein, 292 aa, Phycomyces blakesleeanus
MKGIYWSLFDMDCIGFMSRSGFDGKSLSDKNFTSAVCTVDTALELIYERPVRAAKDSLALVGIATKIDLSTATIYRLDPGVHDVSVACDSLRTGGGQNRKRYRIRKASTGNTYARGLIYNTLSTRKCSWNRFNEALRYILRNFKTIKGYYSTGFRELRYHCYRNKKKALDKMCKRLFTGSREYREKEVPRCNNNGEAKRPTLVASGTARLSELYGSIARSTKRFRATLLNYIESTRHNQAHAAKCVVMIDEYLASQIYSGCHIKKSVLFYVKPIASMTQLIYVLHSSKTLRT

SEQ ID NO: 3207 - protein, 1121 aa, Phycomyces blakesleeanus
MSLYTTKYRQSYFPEPERIQQVQHKLGVDRPKIQEKRIIECVEKKTPQETFYQGVNTLPPSFLQSNTKRTLSESFSEESFNKKNRVEGPVKDLEECFFTSMRDRVEELVKQTKTQDKTNELKNKLLNVKTLPAAIITNAAQLAKCDRKVMRSHMEHRPGLKDVEEWKKFVSQNFDKIAEAVVGSVVKDTAKVYSSSTPTNKQPYEKMRTCTVQINSLFRSDLPPIVKTFVCTRLQDSMVTSTDYTLCFSALVNMIISELRTSEFFFDNNDINIKKVPGFNLAKLLSFVTTNEPKQTIQPLDKDLIASKRFDTDFKCLFTSQHLQVVHSYFFGARGAKEENLNSHPVQNSLFCSFKESGLDKQSFCLEKASSSAMLMALETYLVNFENMWDGKKIINKLLDKVVLVLLRHHLARNRDSKRISTTTTRNPHEKKDIRNHARYVCCAEDKKWKKLVQRKEKAGGLEREKLATKINSAKQRLANLRHTFKKKISQMLNDRKEASVEHKLVVQDLNIAEEQQDFLEEEGTLDGDVPERRLNQLKSIIKHLVFSNDTPVYLEDAKHQSPEATTTEKSVCLLICNTLMKFLPPKKQYHVIAYQMYFCIFANDVLKYARYTKFTRALYPSTLFSSLSALHLDSVALYQLLTQNIDQEKLEEPSSHTNQQEKKGYSRMIFYGYNRDELIGSQDKARQNKDATFNAVFDMGEIQKACESYGLSFAHRMTCLPGIKTVRLLGSKIKTRGTVKEGTKQSYEARILRNPSIMQEGRKTKDILFSELQSLTEEVKTLESVRKRELDLLKDSNFQRKIKEYSRSPIEKCDKGVTKAEDRTVVNPGYFNYAGTDNGLVNMTTSIPMSLQRMKFHLKFFNYYTALRKVSNEDSIGLNLSKEEESFLHLPSVTNTKTSDVDVRSIEDSMREMESTPITSIGMTIKNVRDKCEQRRRLRNFYNSPKIINQKRHVEIQHRYRHHLCRRERLKLKHSENKSSSKKPLILFIGYRETGAGSRINGFRKYGGKWKQKIHGEAVTVYITNECKTSQTCIFCFSLLTNPRILGEKEGSYKVNKGIFLCINPRCITVKNRCASKPRDGLSALAIALVGLSSVMFGAALPPFYNVSQITAKHYTKNNI

SEQ ID NO: 3208 - protein, 469 aa, Phycomyces blakesleeanus
MSGKVLQTTPWWNPTQKHFVALDFELTGKLKELYNLFTGQKHKDTPDELRVKKAVRVSRTNEPDEAHILIVYKSCKARGNSTKRSPVYPNHDMTLLQLLNRDLGPHQRYTLSITLSSFILNNVHVQRARDRIVLQSSFLREVVVLYGRLTIVEFQHHYPRLQHLQTLYTELIQTNEVNLTVNLNGLKNYGAVVSSACKTIAITYNNYYNEFQDGYMFRVSFARRTAIDHLNYVELTTNDFNIQEIAENCRVCTVDPGRRDAFKAYYGDDGIRCLTRKEYYSASGSVKRMINEDARKVAQGIKEVGTYIPSVKTTSGEQFLRLTQYIIANMPTLFNFYNFRVAEIYWKKIRGRQKALDNCANILIHGCIKNSHQRVFITGNVSKMPLIVFGNGLTNKSSVRFHSLWHGVSEKKLQQSSFVFVMFNVDFEIWSGNGKPEMFNPQPSSRTTRTTATQSATMNVVAPHSGGRT

SEQ ID NO: 3209 - protein, 513 aa, Phycomyces blakesleeanus
MNEATPFRVLTVKASIKATGWNPELLRPLQVLVAKLHTIVTHTFALSKHIFLAELALDPFFDLNGQINQPFFVEVFLSLIDRNTDSSRITEITRLNCELISRHINTYIHNISYARISLLNAHQIAMYEATKIHTTYIVNIKLRFGQHLCRVINILLDIKNRQRELTQQLRSQRATEERIKRMLTEHIFEPARIFKEGVSTHRLEDVFIDFRDQQNGVIKFRGTIQTDGVGISIIKQNKDTPKGPNPRRATTINPENFPYIHDLPPEQHKRIRGRCVLINHGRRDLLYCMRSLRIRLKRTKFRRILQDTKAQTPNVIAVEHEISQTSGRSNNITDFAFHTSIKAANSSIISSFYTNTVSCISQKPLFCKLRLSSYINRRKANERLVKYIRAKFGQDCVLVMGNWSAPHNRYHEPIKVLFRCTNLNCLENMDGSEVMHRLCNWDVAAVLNFRHILNNLRYDGTISVRFICVIQITPESRPTPIVFFSKVSWEYLVGTTVGSSSSSSSYFYFGVYT

SEQ ID NO: 3210 - protein, 878 aa, Phycomyces blakesleeanus
MRRKKTPQGTFYQGVNTLPPSCLQNNTKRTLSESFSEESVNKRNRVEGPVKDLEECFFNSMRDRVEELVKQTKTQDKTKELKNKLLNVKTLLAAIITNAAQLAKCDRKNGRSSYLKTNKIAEAAVGSVVKDTAKGYSSATPTNKQPYEEMRTCTVQMNSLFRSDLSPIVKTFVCIRLQDTMVRASSAEDKEKGLSFIFKVNLIELLGGQTLAKSLNLICSEDALRQMLNDRKEASVEHRLVVQDLNIVEEQQDFLEEEGTLDDDVPERRLNQPKSIIKHLVFSNDTPVYLEDFLPPKKQYHVIAYQMYFCIFANDVLKYALYTKFTRALCPSRSFSSSSALHLDSVALYQLLTQNIDQEKSEEPSLHTNQQEKKGYSRMILYGYNRDELIGSQEKVRQNKDAIFNAVFDIGEIQKACESYGLSFAHRITCLPGMKTVRLLGSRIKTHGSVTEETDQSYEARILRNPNVIQEGQKTKDVLFSELQSLTEVKALESVCKIELDLLKDSNFQRKIKECKSNWGTTDDKDQLYRTIEKYKESRYKSYLTVNKIRNELAEKRQQLYFRQMKIRFKSKLYNVKDVPQDSRGQIEKCGKGVTKVEDRTVVNPGDFNYAGTDNGLVNMPTSIPMSLQRMRFHLKLFNYYTALSKDSNEDKRKKYTDEGEKVQLIEDSMRELESAPVASNDMAIGKFRAKYDQRQSLRDFYNSPKIINKKRHVEIQQYRYRHLLCRRERLELKHSERTGAGSRVKGFGKYGGKWKQNIHGEAVNVCITNECKTSRTCIFCFSPLTNPRIPGKKKRSYKVNKGTFLCINPRCITVNNRCASKPRDGLSALAIALVGLSSVIFGAAPPPFYNVSQITAEHYTKITSDFCTRRDDFAATL

SEQ ID NO: 3211 - protein, 280 aa, Phycomyces blakesleeanus
MVYHQPDTCKCRTPYAQSRLFFRCLHFLSEEVHKKVYITENIPSKVASKGYIYRKLQDVQFVHALGRKKLRSLQEQTFAQNKAIQVDMQAFWNLVKTSGVAGYPADYIDDIDKDCQVWAIDPGVCDIITTVDTSGRQRTTSVNEYYHLCGFNDHENKYFPPAPADHTEAPLKTIIDFGDEDLKTKCSKNMMYMLDEYLTSQVCNESKKINLENLVNSNLKRRVYTILQCQETTCNIVWNRNIMATQNLLGILFSARNNNQRRDVFVCQPKTNHGHQYSSV

SEQ ID NO: 3212 - protein, 1145 aa, Phycomyces blakesleeanus
MRRKKTPQETFYQGVNTLPPSFLQSNTKRTLSESFSEESFNKRNRVEGPVKDLEECFFTSMRDRVEELVKQTKTQDKTNELKNKLLNVKTLPAAIITNAAQLAKCDRKVMRSHMEHRPGLKNIEEWKKFVSQNFDKIAEAAVGSVVKDTAKVYSSSTPTNKQPYEEMRTCTVQINSLFRSDLPPIVKTFVCTRLQDSMVTSTDHTLCFSALVNMIISELKTSEFFFDNNDIKIKKVPGFNLAKLLPFVTINEPKQTIQPLDKDLIASKRFETDFKCLFTSQHLQVVHSYFFGARGAKEENLNAHPVQNSLFCSFKESGLDKQSFYLEKASSSAMSMALEMYLVNFENMWDGKKIINKLLDKVVLVLLRHHLARNRESKRISTTTTRNPPGKKDIRNHARYVCRAEDKKLKKLVQRKEKASGLEEEKWATKINSAKQRLANLRHTFKKKISQMLNDRKEASVEHKLVVQDLNIAEEQQDFLEEEGTLDDDVPERRLNQLKSVIKHLVFSNDTPVYLEDVKHQSPEATTTEQSVCLLICNTLMKFLPRKNALHLDSVALYQLLTQNIDQEKSEEPPSHTNQQEKKGYSRMILYGYNRDELIGSQDKARQNKDATFNAVFDMGEIQKACESYGLSFAHRMTCLPGMKTVQLLGSKIKTHGTVKEGTKKSYEARILRNPSIMQEGRKTKDVLFSEFQSLTEEVKTLESVRKRELNLLKDSNFQRKIKECKSNWGTTDDKDQLYRTIEKYKESRYKSYLMVKKIRNELAEKRQQLYFRQMAIRSKSKLHNVKDVPHDSRSPIEKCGKGVTKAEDRTVVNPGDFNYAGTDNGLVNMTTSIPMSLQRMKFHIKLFNYYTALSKVSNKDSIGLNLSKEEESFLHLPSVTNTKASDVDVGCGYFRQRKYLERRKKYTDEGKKVQLIEDSMKEMESAPVTSIDMAIGNFRAKYDQRRSLWDFYNSPKIINQKRHVEIQQHRYRHHLCRRERLELKHSENKSSSKKPLILFIGDRGTGSGSRIKGFRKYGGKWKQKIHEEAVNVCITNECKTSQTCIFCFSPLTNPRIPGKKERSYKVNKDTFLCINPLCITVKNRCASKPRDALSALAIGLVGLSSVMFGAAPPPFYNVSQINAEHYTKITSDFCTRRDDLAATL

SEQ ID NO: 3213 - protein, 1186 aa, Phycomyces blakesleeanus
MRRKKTPQETFYQGVNTLPPSFLQSNTKRTLSESFSEESFNKRNRVEGPVKDLEECFFTSMRGRVEELVKQTKTQDKTSELKNKLLNVKILPAAIITNAAQLAKCDRKVMRSHMEHRPGLKNVEEWKKFVSQNFDKIAEAAVGSVVKDTAKVYSSSTPTNKQPYEEMRTCTVQINSLFRSDLLPIVKTFVCTRLQDSMVTSTDYTLCFSALVNMMISELKTSEFFFDNNDIKIKKVPGFNLAKLLPFVTTNEPKQTIQPMDKDLIASKRFETDSKCLFTSQHLQVVYSYFFGARGAKEENLNAHPVQNSLFCSFKESGLDKQSFYLEKASSSAMSMALEMYLVNFENMWDGKKIINKLLDKVILVLLRHHLARNRESKRISTTTTRNPPGKKDIRNHARYVCRAEDKKLKKLVQRKEKASGLEGEKWATKINSAKQRLANLRHTFKKNISQMLNDRKEASVEHKLVVQDLNITEEQQDFLEEEGTLDDDVPERRLNQLKSVIKHLVFSNDTPVYLEDIKHQSPEATTTEQSVCLLICNTLMKFLPPKKQYHVIAYQMYFCIFANDVLKYARYTKFTRALCPSTSFSSLSALHLDSIALYQLLTQNIDQEKSEEPSSHTNQQEKKGYSRMILYGYNRDELIGSQDKARQNKDATFNAVFDIGEIQKACKSYGLSFAHRMTCLPGMKTVRLLGSKIKTHGTVKEETKQSYEARILRNPSIIQEGRKTKDVLFSELQSLTEEVKMLESVRKRELDLLKDSNFQRKIKECKSNWGTTDDKDQLYQTIEKYKESRYKSYLMVNKIRNELAEKRQQLYFRQMAIRFKSKLHNVKDVPHDSRSPIEKCGKGVTKAEDRTVVNPGDFNYAGTDNGLVNMTTSIPMSLQRMKFHLKLFNYYTALSKVSNEDSIGLNLSKEEESFLHLPSVTNTKASDVDVGCGYFRQRKYLERRKKYTDEGKKVQLIENSLREMESAPVTSIDMAIGNFRAKYDQRRSLRDFYNSPKIINQKRHVEIQQHRYRHHLCRRERLELKHSENKSSSKKPLILFIGDRGTDSGSRIKGFRKYGGKWKQKIHGEAVNVCIINECKTSQTCIFCFSPLTNPRIPGKKEGSYKVNKGTFLCINPRCITAKNRCASKPRDALSALAIGLVGLSSVMFGAAPPPFYNVSRINAEHYTKITSDFCTRRDDLAATL

SEQ ID NO: 3214 - protein, 236 aa, Phycomyces blakesleeanus
MKEYYTNEDTPTEEDQRISGLLPFKKIKYQSLINHLQGDKGLVKNIWRKFSNDAVLILGNWSAGQSKYHGPIRGIEMSRMLAKECFQIYLIDGFKNSSLCPACQNGELETFKKTQKPRPFQRRKYPTVDWHNHLSHICMYMNTLIIYTISTQVQKQQFLKPVAESTRDTTQSSLYRLWNCDMAATLNFRHIIFNLHKNRRRPKRFCRLSARSFTTLKRKEALFSSSRTVKKANYSV

SEQ ID NO: 3215 - protein, 254 aa, Phycomyces blakesleeanus
MSLYNSVYLGHGRKTVYTAVCGFDKDIHLIIRCSTKEYYHYTWSAKFLADQQKLKKENGIDKSAEANRYYDYVKYMLEHIDSLFDFYNVSSGKKWLTLYQNQYSRDGMFGKDSVKLKGNLCGVTGILWKTLNNRERDGRLIAVTIDKYNYSNNRSSCHLKKLKPLEHICGHSILEFISCRISWQRDINASKNMMTISLRLGEELVDRPLSKDLKKNSNNNSETSTTPPHYCIMNSLSLSRDLDNYRFLTCLNLK

SEQ ID NO: 3216 - protein, 525 aa, Phycomyces blakesleeanus
MATYTYFINKPFFMEVFLSLVERQVRDGIKSGNGKSKMKDETLRYRDFIMKHKEACCEHAGYVPPKLTHAKQSADYESTRIPTAYINNIKAHFARKQLPRGDFLDENQRSLVASILAIYPESYTLLKSSIYYDVQAIPLNHMKAFCKLGQLLKPLPFDKKALKKQKVDKSLFFQEMMLTNGVSVTILKQNFESGRCQKTDAAVTSGESSTNTGRKIKRTKTINEDSFTNNYDKQFSIISIYKKSKKQEITTVKVFNKQFEARVYPIEKTGDIYYGKHLMFIKRLRDARPGIAKLDAYIYYLTLLLSTKHIARRLASQKEQLSEGVNAKQVQVKQGPHVIVPKLLVLPFRQMKFISNINYDRCDSRLAEDLRIFFEKDPVFVFGDWSAPNVKFQEPSRNKDILKYLEKSRFSIYMINEYKTSSCCSICPTGEMENFKKNANPRPLQREKFPNVLCHGLLRCKNKACLVNGKGRLFNRDTAAAINFRLILNSLREEDRRPPRFIRTSKVLFSGLGIIQNYVIKKSFI

SEQ ID NO: 3217 - protein, 445 aa, Phycomyces blakesleeanus
MQTGYYSLLLNGTLFLHNSIDSTLLKAPGVVHWDIDNISFYSTCLLIKTILSLKVLIKSSLPYHKYNNKAYMKANKIRNELDKISPQLIFRQMIIRFKSKLDSVKELPLDSGNPIKECGKGVSKAKDRTILNPDKFSYEGTDNVLVNITTSIPMSLPRMVFHLKLFGHYTALSTHSNEDNISLRLSKEEETFLRFSSVTNMKASDVDVSRGCFRQRRYLERLKKHTDGGKEVQSIEDSTRKMASTPVTFSAMVIENLHEQYKQRRKLRDFYNSAKMINQKRHVEIQQHRYCHRLFRRKRLKPKHSDSKFSSKKSLLFFTGDRGTGTIFRPKGFRMYGGKWKQKIHRETANVCITNECKTSQTCIFSFSSLINPRIPGKKEGSYKGNKGTFLCINSRCITVKKQWAMPVHFLRGSKGAHSQAYLLHRFRVFKADRLPSNRLFLRSI

SEQ ID NO: 3218 - protein, 287 aa, Phycomyces blakesleeanus
MVLQSFRNKYEKRRRRRDFYNSPKIISQKRLVEIQQHRYWHHLCWRERLELENLENKSSSKKPLILFIGDQGTGAGFQIKAFRKCSGKWKQNIHGEAVNICITNECKTSQSCILCFSPLTSPRIPGKKEGSYKVNKGTFLCINLRCITVKNRCSSSPRDALLALAIALVGLGSVIFGAAPSPFYNVSQITAEIIQKLHLTSVHEETAWQLRCSFRAPSTIRNYSWKYNSGSSYVKFDEGVQEFLETLFIRGTSGNVQLPSFDDRPVFVDPSSGILKYGNETYHMVRF

SEQ ID NO: 3219 - protein, 689 aa, Rhizopus microsporus
MDIAADTNPAAAQIVLTLDDDDVQESTDITRRRMNKLRTITRQIIFKQFGHIITERHLKNVLPDIQPNELQACVMIANFLMPYLPTATDSHSVAQQLPFFLMANDLFQCTGYTKFIEKLVPMTSPTRLLALQINAPQIYSLFSSSMDIHDFNGDVITSRQIATESKDAVFSSFFDIDKINSLCASYGLKFAHNIHALPGLKTVRINGYLRNQTPSRLATPLSDTRSIKRNYEAFERKMPDRRMIQQAEVDALQRQLKKINSERREFMLRNNIRDLKKQWIRSTDRRLIAADIEQNNRLYQKIQQTKASRDAINERLIDTKQQLSDARRKIYNSINQTTSYGSNNNQLPRVENFKLDDTQSDLTNFAFSGTDNGIVTMTETAKLSLDQFKFHLKLYNRYSALTEDTTRFQASAEEATFFRFAKPFKVHASDIAYGSGAIKLRAKLQGAKKTKAKVISEIEAKLSECSFQEIHNIEELNNWYNGRITHQDVLRDFYYSRQRVRQLRTYELQKRKYIDRLCSQERSYVASSSKKPSVMFIGDSELCFGSSIKGYQRYGGHWKPIKHSFYTSVCIISEYNTSQTCIFCFKKLLHPKRSTADKNGRINLKNVNGAFICVNPSCPSVKAGQNTHARDALSAVAIGLSGMATLLLGRTFPQFNRNISPSQTDQFNQLAAAFCTGNAVKPITAGNNT

SEQ ID NO: 3220 - protein, 433 aa, Rhizopus microsporus
MPTANNDMSVEAVLHAPTPSTSRTSAPIKAYKKYIKVVDHITQLVYAGSIFINYYVLELLEDGEELFMMAQNLFYSMFSIFDGQGKHASNSIKKSFKAFCESTSLTQPDLYKRASKGYMTIASSMAKQYETLIHNYKEMEQKKLSQETKPQGKAPSSYVHRKSQELPFVKKLNTSKYRSLKENTLTAINSNKPLEITSKLKNIDKKDIDAVQSFIKAVQARIQDKTFMPLKYTDPQGLRNVIITDGYAVFFMFKRAASIQGEPRREPKAPKGFTDIADDAEIWDVDPEHYHLCGYSLATRRRKEHQECHLDEFRYISELPTLKIANLTSFFLATSTRLQNYQRIHNYYCQDKWSQKLKFKVYINKQKGTQEIVKRLFENSKKYGTSSTVGAKNQNPNKSKHEPLPSADLPSSSQWKRIVALEDGPFCSSMKSK

SEQ ID NO: 3221 - protein, 269 aa, Rhizopus microsporus
RRDILYCVHKNPAPEQPQGETRKTKKYRRILQGLKAQDPAAVQAEQALYQQPSSTMFVEDLGRFLQAISEHSAVLSRFYGHTITSHDNGYPFFRKIRLSAYFNKQRADRKLIQDLRAKFGEDAVFMMGNWSAPHGRYHEPICDLGFGRLFKKHDRCCPTCHNESLHTFRRIPYPRPYQRERYPTVVCHGLLKCTDLYCRPAMAAPDRYRLWNRDVAAYLIYLRILRGLRHGMVPHRFRRVAVAPTRHRRRVDDQEQPKVRARLDDDSPS

SEQ ID NO: 3222 - protein, 246 aa, Rhizopus microsporus
MLYFVHESSTPEQPTWKTKKYRRILQGLKVQNPDTFQVEQALCQQPSSTVSSAVLSQFYGHTITNHDNGYLLFRKIRLSAYFNKQYAVFVMGNWSAPHARYHEPICSLGFRRLLKKHRFQIYLIDEYKTSKCCPTCHKESLHTFRRVPNLRPYQCERYPSVVCHGILRCTNLYGRPAMAAPDRYRLRNRDVTACLNYVHILRGFRLNGMIPHRFRRVAVAPTRCRRRVDDQEQPRTRIRLDDDSSS

SEQ ID NO: 3223 - protein, 516 aa, Rhizopus microsporus
MYVKPQCHMKWLHFIQKEMKQKKLVQEMKPQDKTSSSYVHRKLQVFPFVKKLNTSKYRSLKENTLTAINSKKALEITSKLRNIDKKDIDAVQNFIKTVQARIQAKTFMPLKYTGLRGSKYFSLLPLYKIASKSIQIDAQAFWRLAKQCDNKIKPGQKDDNDLTLWYFNVFEFSKIGYKTLNSLTSRPKKFANAIITDGYAVSFKFKKDVAIQDEPRREPKTPKDFADIADDAEIWTVDPGISTIFTVDSTEHERIRTTSLEEYYHLCDCNLATRRRKEHQKCHLDEFKYISELLTLKTANLTSFLLAASTRLQNYQRIHNYCCQGKWPQRLKFKTYINKQKETQAIVKRLFDNSKKYDKSSTVGAKNQNKSKHVPLPPADLPSFSQRKRIIAFGNGSFGSNMKGKRAAPIRRITEEIKRKFKQSNEGTEFVSVDEYLTSQICNKCKSKQLNNISITGSKRRLHSVPKCESYGTVWNRDVNSVLNIYGIFVYKSEHDNEIPLSSKRLAVLLDLMRYL

SEQ ID NO: 3224 - protein, 236 aa, Rhizopus microsporus
MLYCQPVKFRYTKQQQDKTWKTKKYSRLFSTVSVEDFGRFLQARSEQSAIRLSAYFNKQRADQKLIQGLRVKFEEDAVFVMGNWSAPHARYHELIRGLGFRRLLKKHMFQVYLIDEYKASRCCPTCHNESLHTFRCVPNPQPYQCERYPAVACHGLLRCANLYCRPAIAAPDRYRLWNRDVAACLNYVHILRELRLNGMIPHKFCRVSVAPTRCRRRVDDQEQSRTRIRLDDDSSC

SEQ ID NO: 3225 - protein, 339 aa, Rhizopus microsporus
MFANTVKSDGFSVDFVFNKRTTKDTSLIANIDLKLEDFGLEEAKQAYQPMFLDPGRKSVFTAAIGLDTANHQIRRCSTAEYYHRTGSTKYIKKLERFKAQKGIKTIETNISSPKTSQCAAYLLYIEYILTHVGVLFTFYDYKTAKDRFYLYQCRQRAAEEMVNMLVHGGAKYNKNKRKKRNRKKKEARRGKNRRQIQKKKRNKLPKTGISQKWKPAKFQTEREKVPLVVFGAGMFGKDSIKLNGNRCGATGVFWRALKRRETAGDLIAVTIDEYKTSKVCNACNNDPLTSMSGLKGCSVQICSICKTLWQRDINACKNMLSIPLSIWDGRGRPFQQSRN

SEQ ID NO: 3226 - protein, 220 aa, Rhizopus microsporus
MEGFIRFLQARSEQFAVLSQFYGHTITNHDNGYPLFRKIRLSAYFNKQRADQRLIQDLHAKFGEDAVFVMGNWSAPHARYHEPIRGLGFRRLLKKHGFQVFLIGEYKASRRCPTCHNESLRTFRRVPNPRPYQRERYPTAICHDAPYCRPAMAAPDRYRLWNRDVAACLNYMHILRELRRNDIVPHRFHRVAVAPTRRRRRVDDQEQPRTRIRLDDDSPS

SEQ ID NO: 3227 - protein, 219 aa, Rhizopus microsporus
QPSSTVSMEGFIRFLQARSEQFAVLSQFYGHTITNHDNGFPLFRKIRLSAYFNKQRADQRLIQDLHAKFGEDAVFVMGNWSAPHARYHEPIRGLGFRRLLKKHGFQVFLIDEYKASRRCPTCHNESLRTFRCVPNPRPYQRERYPTAICHGLLRCTNLYCRPAMAALDRYRLWNRDVAACLNYMHILRELRRNGIVPHRFRRVAVAPTKRRRRVDDQEQ

SEQ ID NO: 3228 - protein, 560 aa, Rhizopus microsporus
MQVLIISSSKILGIYKDVFNNDIFESISDYTYAKNNSAKLVRFSAELLKEVISKPELKIKTWHVMPRPSNNMLFVPLSGAHAMHGVLERCFNAGLKISQQVYTEEYSFEERRLCALLTVAVTQYIPALMGPTSFEDHYGDVVWKNHLWETLFNLDHIQKKRSSASQGSQPCARLNYGWKTDGHIVIILFIKKAIEQIPQDDSEMNFMKRKVNLTIWRKGLYPLKKEPTGIMLNDRIIGQNPGLRDIFAATDCSASEIVDKDTVKEKTTKFSNAEYKMRSGFECEIPTVGSVNSNELLKYLRVIGRNREKIFDFMKGYRHRETKAYLVQNRKATDNHMCDLVLGQTAAGAPYTLAHRTSSKKRRKAKNMFKKASGIVAKETKRTVIAYGDASLTGTKAGYTLIPVKKVQRALAQRALVIPVDEFRTSVNCSKCHRRLENKYERQKLVCNHKKKKVRLRGEKKMLLYDVWTMTRGLFVVHRSAHKENPAVSYPPVMYQLKHCHLCPAVNDRDIVWQRDVNAALNIRSILMSYIESNYSILSRHPSLKREPTSGGYQATSQPL

SEQ ID NO: 3229 - protein, 275 aa, Rhizopus microsporus
MLYFVHENSTPEQPVKFQYTKQQQIKMWKTKKYRRILQDLKAQDPDVVQAEQALSQQPSSTVSVEDFGRFLQARSEQSAVLSRFYGHTITNYDNGYPLFRKVRLSAYFNKQRADQRLIQDLRAKFGEDAVFVMGNWSAPHARYHEPIRGLGFRRLLKKHGFQVFLIDEYKASRCCPTCHNESLHTFRRVPNPRPYQRERYPTAICHGLLRCTNLYCRPAMAALDRYRLWNRDVAACLNYMHILRELRRNGMVPHRFRRVAVAPTRRRRRVDDQEQ

SEQ ID NO: 3230 - protein, 512 aa, Rhizopus microsporus
MYFQYCSYEPMDLKYVQQIASYEVTKINTAYLSGVSSHFGNKLRMFLNMTLKKDERIKAVKNKMKKNSGPEEEASAIVKTIVEQCNKVKSKCLEAFKSILKTIKAFILPYVAIGTLILSTQILKNPITSHLDKEIIWVSVLNVAAKAMKPQNERKTMKLRGMLFTEGVGVSVLKQNDNMKKGGSGTGRRTKAVDEEDFKYVEKLEKEVLLAGIGKCVLTDPGRRDMLYCMHEESTIENRRTYRYTSNQRIIETKTRKFKKLRENLKPDNVRAVEVSLSNCKSSTVNVGKFAKYLQKRATVTPVLSKYYANEDIPAVDANLLPFRKMKPPSFINGQQADKRLTRNLITKLGDDATLIIGNWSTGNVKFHEPIRGTGMRRMLAKQGFKICLLDECKISSLFPSCLSGKLEKFKKVQNSRPFQREKQPTVTCHGTLRCKNQQCLEDTTGTISRRRLWNRDMVATLNFRHILFGLRENGKRPERFCRHNAPPSTSFKRKAISSAISRPTKKTTNPL

SEQ ID NO: 3231 - protein, 289 aa, Rhizopus microsporus
MKIDNGLLKLGKITFSGTDNGHATMTETVGFDMKRFKFHLDLYNKCFALENMSEERNVDADIIDRAVININTLNHYVSEQETSESTIQMSPYMQLPKPYKVHASEVDYKNGAQKYIKQLELAKNTTDIGRQVVEAEVLLSKVDTTSARKLEHLNELHNTYIEHKHIIRNFYYLSSRLKQKRAYELQKRKYTDRLCSDERRYATFSRKVKPIMFVGDRGLGIGSRIKGYMRYGGYWKPLKHSLYTYVCITNEHNTSQTCSYCFQKLSHPVQTVYKNGCKTITNSQWHIWL

SEQ ID NO: 3232 - protein, 659 aa, Rhizopus microsporus
MTEENSDDDFQSTITRKRKGRKPTPVNSSQKQMKKGKEKSSSSSSTAIVESKSSDDAPLTKPTAATAKYNTVSDSNNSSANANIVKKCAIAVKATVKPIWKPNYTQALHELELEEDFNFDLSDYIRKEFFVEIFLSPIVRNNISGRLLGKTANYRSLVSKHKESYCLSASYTPIVLVNAQQIALYECTKVQTAYLNNIKAHFGNRLRAILNKVCKTKELAADLRKDLKKKNVDKRAVNKALREEVYGPCNQNKTAPKMDNKFQNWGSVVNTNNKAFKDQGMNISLCFQDTIETDGVGASIIKQNTTINRKMAQPKTKYKESEDVARYMESLIQEELNEAKSMCVLMDSERRDLLHCMETSTAQNKQVMVYTKMTRTKVSSHYRILQKKTKPASVKSSEAKLAKTKSSSVKIEEYETYIKTRASVEKPICTLDICSLARIRGYFPQPNESTGIDMHATYLELMIKQRHISERLDNGGKAKLLGIVAKMSKESSDQDSLKQQASQILEKLQVLPFRKMKFSSKLYYDQDDLMLVKKLKQKFGSDAVLVLGNWPAPDTKYQELTRNKGLIQMLKEDGSVVFLIDEFRTSSFCPLCEGRLENFKTLRNPRPYKKKTRPTVLCHGLQRYWAIRCIFSGCLEQLKPKLWNRDLAAVLNFKKILTC

SEQ ID NO: 3233 - protein, 761 aa, Rhizopus microsporus
MPAEEAAETAASPLSAFKRILTIKTSLSTIGWKEQYKPALKELMNITRDGSVTGKSQLSDKTRMARSLTFPYTEKYCQHASYTPIKLTNAQQITKYEGTKIHTAYINNITLHFGNQLYMEERGCSEEEIKKTIKTDVLDVCHKLKMEISAKKLPTLTANFLTETITNQIQSFLNVYPDKYNFAKNSIYYDVKAKPQQHLQAYYMLAKICEENNSKSFSCFPLRKGFIPGYMTIDAKILNYHILKNKKFAVGSKFDIWKSVGTIETDGVGVSIVKQNFDPARKGASSDRWRMITTDDSFVYAGNLSKSELLKTKDKCILIDPGRGDLLHCIHETSSPEKKSIFRYKRNQRAVEMKSRRYRKLRQILKPDYIQSLEDQLSRLPASTVKSKVFAEYLEVKAQISECLKEYYCNEDVIFGTSNCDAINDGNASDNISYADAASSKVIIGEASRSNVDSIDGIANDGEANCASDSADVISDGAVSDEAVSDFNVDDKFDTELAIHQVKRCLKRSIDNLQFILNENKTKNKIEKHEYEWFNSILKEAQFLKVISKEEYEYHHKRAKDLSELIRSTLTPLPFRKLKLSSKINKQQSNKKLANDLKKKFGKDAVLILGDWMVNYVEFHEPIREKGMRLMLRKEGFTALLINEYKTSSFCPECEIGELETFKIMPTVKRHGLLRCKNQNCLKIQQTSRLWNRDLAAVLNFRSILQSLRKTGARPERFTRYTMEDNRRKRKGTQHESNKTKKPDLIPPRLLLKAPTVQINY

SEQ ID NO: 3234 - protein, 276 aa, Rhizopus microsporus
MKPQSERKTTKFRGMLFTDGIDVSVLKQNDDTKKGGSGAGRRTKAVDEEDFKYVEKLEKEELLAGVGNCALIDPGRCNMLYCMHEESIIESKRTYRYTSNQRAIETKSRKFKKLRESLKPDDVRAAEVSLSKYKSSTVNGDKFAKYLQERATITPVLSKYYANEDIPAVETNLLPFRKMKLSSFINGQQADKRLARNLKTKFGDNATLIIDNWSAGNVKFHESIRGVGMRRVLAKQGFKICLLDECKTSSFCPSCLSGELGKFKIQDLSREKSNQL

SEQ ID NO: 3235 - protein, 277 aa, Rhizopus microsporus
DILRCVYENSTPEQLVKFRYTKKQQDKTWKTKKYRRILQDLKAQDPDVVQAEQALSQQPSSTVSVEDFGRFLQARSEQSAVLSRFYGHTITNHDNGYPLFRKIRLSAYFNKQRADQKLIQDLRTKFGEDAVFVMGNWSAPHARLPKEHGLQVYLIDEYKTSRYCPTCHNESLHTFRRVPNPRPYQRERYPTVVCHGLLRCTNLYCRPAMAAPDRYRLWNRDVAACLNYMHILRKLRRNGMVPHGFRRVAVAPTRRRRRVGDQEQPRTRIRLDDDSPS

SEQ ID NO: 3236 - protein, 633 aa, Rhizopus microsporus
MKRHSTSSSSERPSKGAKLNECTVASAQEADYSSTVNQEGASSSSSEPEPSKKVQQKIDKKSSAPLCGLTAHARSTSNQCPDKKAIMPVCNSDERVENFHIKDLADYTTKVLFMGPLFANFIFIKLLDDGQAIPIIEQSLFTNIFAGRKPNDLTDFYYQLFNFTKLGFRTRDNLPSGKKFRNVITTEDHSVSFLFTRTVKRSLATTKNPSDFIDDIRNGCDVWGIDPGVSTILTSVDTSGRQSTTSLDEYYHLCGYNNANFIRKKHQEQHTAQFLKISNLSSLKTSNVTEFAKACKTGSVCMMILQDTQAKFCRSSKLKFQCYIRKQKGVHEICKRLMHGSMKYNKKTSTGAKTPSAENESKYCPPAPLDHPDKPRKTIITFGDDMFNSSLRGNRGASVRLIKKALQKYCGNQLEICMVDEYLTSQICNRCKNRNMDNIVTEKSKRRVHKILKCKQNTCNIVWSRDIMAAHNILDMFLFAARNNNQRFDVFTRQGASNDQPSALVTVNMLSSVGVNPSGFSKLLCTRFYAHIVRPQLEYDLVINRFTISQLYALEEAQNNCIKKIYGARGKASIKIMLYMPKLPIVSERVSILQAQFLFRSLDLPEDALLVCLLPYICNTRGSQWYALSHTSL

SEQ ID NO: 3237 - protein, 499 aa, Rhizopus microsporus
MDLKYAQQIDSYEVTKINTAYLNRVFFHFGNKLRMFLNMILKKDERIKAVKNKMKKDSGSEEKVSAIVKTIVEQCNKVKMYVSSRKINDLPRDLLSSQDVDIIHDIFSSYPLNYQFVKGLIYYDCKANALKHLKAFYKISSMCEILQEKSFNCFPLRRIFIPSYMTIDTLILNTQILKNPVTSHLDKEIVWASVLNVAAKAMKPQGERRTMKFRGMLFTDGVGVSVLKQNDDMKKGGSGAGRRAKAVDEEDFKYIEKLEKEELLAGVGKCVSIDPGRRDMLCCMHKESTIENKRTYRYTSNQRAIETKSRKFKKLRENLKPDDVRTVEVSLSKCKSSTANGGKFAKYLQKRATVTPVLSKYYANEDIPAVETNLLPFRKMKLSSFINGQQADKRLARNLRTKFGDDTTLIIGNWSSGNVKFHEPIRDVRMRRMLAKQGFKIYFLDEFKTSSLCPSCLSGKLESSKMYKIQDLSREKSNQLCKNQQCLEATSGTIPRHRL

SEQ ID NO: 3238 - protein, 272 aa, Rhizopus microsporus
MSKYSSNESMVKSLLQIPSSMIIKASDADVGSGYYNVRRKLQKAKKSSQGQTIQDPENNLSNLDLRTSTRVEQALEIHQQYVSNRLAPRNFYNSKKRAQLKRAYEVQNNRFRRRLCAKERTCLIGKKGKKHSSIRLMNTKYYINYLVKGKSRLCPVMFTGDRNTRVGSKTKGFRRYGGKWKQELHGMNVNVCITNENISQTCIYCFSKLDNPIHRKMIKDKEIKTQIKESFLCQNSGDVLVSNKKAVKPRDDLSPLVRPFWSMLATLSVDIS

SEQ ID NO: 3239 - protein, 272 aa, Rhizopus microsporus
MSKYSSNESRVKSLLQIPSSMIIKASDADVGSGYYNVRRKLQKAKKSSQGQTIQDTENNLSNLDLRTSTRVEQALEIHQQYVSNRLAPRNFYNSKKRAQLKRAYEVQNSRFRRRLCAKERTCLIGKKGKKHSSIRLMNTKYYINYLVKGKSRLCPVMFTGDRNTRVGSKTKGFRRYGGKWKQELHGMNVNVCITNENISRTCIYCFSKLDNPIHRKMIKDKEIKTQIKESFLCQNSDDVLVSNKKAVKPRDDLSPLVRPFRSMLAALSGDIS

SEQ ID NO: 3240 - protein, 334 aa, Rhizopus microsporus
MFANTVKSGGFSVDFVFSKRKTKDISLTANIDLKLEDFGLEEVKQTYQPMFLDPGRKSMFTAAICLDTTNHQIRRCSTAEYYHITGSTKYIKQLEKLKVQKGIKEIENSIPSSKTAECVAYLLYIKYILTHAGVLFAFYDYKTAKDHFYLYQGKQRAAEETVNMLAHGGTKYNKRKKRHRKKKRSKKQKLMANPKEKKNPVAKNSQNWKPVKFQMEREKVPLVVFGARMFGKDSIKLKGNRLASLVFFWRALKRREAAKDLIAVIIDECKTFKVCNACNNDPLTSMFGLKSRNVQVCNFCKALWQRGINACKDALPISLSVWDGRGQPFKHSRN

SEQ ID NO: 3241 - protein, 271 aa, Rhizopus microsporus
MLYCVHENSTPEQPQDKTWKTKKYPQDPDVVQAEQALSQQPSSTVPVEGFGRFLQARSEQSAVLSRFYGHTITNYDNGYPLFRKVRLSTYFNKQRADQKLIQDLRTKFGEGAVFVMGNWPTPHATYHEPIHGLGFRRLLKKHGLQVYLIDEYKTSGCCPTCHNESLHTFRRIPNPRPYQRERSPAVVCHGLLRCTKLYCRPAMAAPDRYRLWNRDVAACLNYMHILRELRRNGMVPHRFRRVAVAPTRRRRRVDDQEQPRTRIRLDDDSPS

SEQ ID NO: 3242 - protein, 275 aa, Rhizopus microsporus
MLYFVHENSTPEQPVKFRYTKQQQDKTWKTKKYRRILQDLKAQDPDVVQAEQALSQQPSSTVSVEDFGRFLQARSEQSAVLSRFYGYTITNHDNGYSLFHKIRLSAYFNRQRTDRKLIQDLRTKFGEDAVFVMGNWSAPHARYHEPIHGLGFRRLLKKHGLQVYLIDEYKTSRCCPTCHNESLHTFRSVPNPRPYQRERYPTIVCHGLLRCTNLYCRPAMAAPDRYRLWNRDVAVCTNYLHILRGLRLNGMVPHRFRRVAVAPTRRRRRVDDQEQ

SEQ ID NO: 3243 - protein, 316 aa, Rhizopus microsporus
MFANTVKSDGFSVDFVFNKRTTKDATLIANIDLELEDFGLEEVKQACQPMFLDPGRKSVFTAAIGLDTTNHQIRRCSTAEYYHRTGSTKYIKKLERLKAQKGIKTIETNMPSPKTSQCAAYLLYIEYVLTHVGVLFTFYDYKIAKGRFYLYQGRQRAAEEMEEKKKQEEAKTDGKSKRKRESNYQKQKPKVEARKVPNGKRESAPCSLWCGNVWQRLDKAEEKQVWRQWCFSASAKKETAGDLIAVTIDEYKTSKVCNACNNDSLTSMPGLKGCSVQVCSICKALWQRDINACKNMVSISLSIWDGRGRPFQHSRN

SEQ ID NO: 3244 - protein, 742 aa, Rhizopus microsporus
MSVEAEQSNNTTFSQSEYRRITTIKTSLNGIGWKENYRATLNEFVCSVNDLVTHGFAFAKFIFLKEFNKDGEFDFNKYVTKAFFQEVLLALVDRKTKEGRLAEKTRDIRQLINTYKDEYIQVSSYIPITLTNAQQIALYEGTKIHTVYINNVAQHFGNRLRMFLNLISNKKEKIENMTQEMKSKGFTDEEIKSSVRTHITNVCTQLKLNVSAKKFPDIPANFLDKKALEQLQQFLDVYPEHYKFKKDSIYYDVKSSPQNHLRAFYTLAKLCEERKNKSFTCFPLQTSFVPCYVTIDAKILNYHILKRKSFPVGQKHELWKQVINYDCKAIKCSTTMNFEGTLDTDGVGVSLLKQNFSPDRRGTLNVERKPLKADNDEFRYLESLSKKELDNTLKKCVLIDPGRHDLLFCMHEDSSIEEKKLFRFTRNQKLVETKARRFNKLRKFMKPAYIQELEASLSKIPAATVDLVKYTKYIKRRSKVSQPLKRYYSSEGEFLDRNIGYVYEDSDEDDPAIGIDDTAAATDNICPKPAFECKKSKNKLGTYLSNLRYIHQENNTQIQLAEDDITQLNTVIQQTDEILQKPETTEEGFESQISIVKNLLEETKAKLPTLKFRKMKLQSTINRQQSEKRLANALKAKFGEDAVLVLGNWSASHVKFHEPTKGKGMRKMLRHEGFEVLLIDEFNTSSICPECNSDLKKFKTIENPRPYRRSKMLEVTCHGLLKYEYCIQILVVGIFHLTLICL

SEQ ID NO: 3245 - protein, 477 aa, Rhizopus microsporus
MKRHSTSSSSERPSKGAKLNGCTVAPTQEANYSSTVNQEGAPSSSSKPGLSKKAQQKIDKQNALLKFKTEQKALKEVKCPSCELTTHARSTSNLCPNKKAKVPVCSPDERVENFVIKTSLPNVCNNQQLVQYIKDLTDYTTKVLFVGSLFANFIFVKLLDDSQTIPIIEQSLFTNIFAVMTENGKRALNYLKEYFTLFCELTTVDRDSLKSINYSSIPSIAGKKTESDLTDFYYHLFNFTKLGFRTRDSLTSGKKFRNVITTDGHSISFLFTRTVKRSLATTKNPSDFIDDIRNGCDIWGVGPGVSTTLTAVDTSGRQRTTSLDEYYHLCGYNNANFIRKKHQEQHTAQFLKISNLSSLKTSNITEFTKACQERLSLYDDITSYYNENAWSSKLKFQCYIRKQKGVHEICKRLMHGSVKYNKKASTRAKTSPAENESKYCPPAPLDHPDKPRKTIIAFSDGMFNNSLRGNRGAPVRL

SEQ ID NO: 3246 - protein, 497 aa, Rhizopus microsporus
MYFQYCSYEPMDLKHARQIASYEVTKINTAYLNGVSSHFGNKLRMFLNMVLKKDKRIKAVKNKMKNSGSEEEVSAIVKTIVEQCNNVKTHVSSRKINDLPRDLLSSQDVDIIHDIFSSYSPNYQFTKGSIYYDCKVNVLKHLKAFYKISSMCEILQGKLFNCFPLRRAFIPSYMTIDTLILNTQILKNPVTNHLDKEIVRAPVLSVAAKAMKPQSERKASKFRGMLFTDGVGVSVLKQNDDMKKGGSGADRRAKAVDEEGFKYIEKLEKEELLAGVGKRVLIDPGWRDVLYCVHEESTIESKRTYRYTSSQRAIEIKSRKFKKLQKNLKPDDVRVAEVSLSKCKSSTVNGDKFAKYLQERATVAPALSKYYANEDIPAVETNLLPFRKMKLSSFINGQQADKRLARNLIIKFGDDATPITGNWSAGNVKFHEPIRGVGMRRMLAQQGSKMCLLDECKASSLCPSCLRGELEKFKKVQNLRLFQSEKQPAVTCHGLLR

SEQ ID NO: 3247 - protein, 274 aa, Rhizopus microsporus
MLYFVHEKSTPEQPVKFRYTKQQQDKTWKTKKYRRILQDLKAQDPDVVQAEQALSQQPSSAVSVEDFGRFLQVRSEQSAVLSRFYGHTITNHDNGYPLFRKIRLSAYFNRQRADQKLIQDLRAKFGEDAVFVMGNWPAPHARYHEPIRDLGFRRFLKKHGLQVYLIDEYKISRCCPTCHNESLHTFRRVPNPRPYQRERYPTVVCHGLLRCTNLYCRPAMAAPDRYRFWNRDVAACLNYMHILRELRRNGMVPHRFHRAAAVPTRRRRRVGDQE

SEQ ID NO: 3248 - protein, 481 aa, Rhizopus microsporus
MKNRMPTLPVSKVSLNNGPFKILPVLRHILEQYENLHMAQPSPIDKDNASKFVPPRLFSLFPNPGLGWRFIKVDAQNLTGILPEAKQEKQINESPFDHNQRQFFQMFDFKKLGFRSWEELKNMPEQRGRMFLNGMYTDDYTCSVLFCRKVLLSSVAYGVSLELSDFTTDEVDKYFRPCTVDPGRKDAFVSYHGGTDIRRLSSAEYYSMSGTVNRQKAQQGRKQSLGIESIETNIPSPKTASTQRYMLYITYILQHMDSLFNFYNFETTKLKWLNYIGSQEVIQESVNILLNGGKKYNKSRRKNTKKNRKKKEKSSKTCGTHASYHTIRKNKTRFEEGDRKKKPLVIFDDGLKNKGHIKFKGLRRGVSNKIYRQLKRREGLGELLLLDINEFKTSKASTCNSCLSQDLQNLKCGEGDDIKKIHQVLKCNTCNIFWNRDVMAAKNMLTISRCIWNGQGRPNVFKRQLTTSNVVASSHSGGALA

SEQ ID NO: 3249 - protein, 275 aa, Rhizopus microsporus
MLYFVHENSTPEQSVKFRYTKQQQDKTWKTKKYRRILQDLKAQDPDVVQAEQALSQKPSSTVSVKDFGRFLQARSEQSAVLSRFYGHTITSHDNGYPLFRKIRLSAYFNRQRADQKLIQDLRAKFGEDVVFVMGNWSAPHARHHEPLRGHGFRRLLKKHGLQVFLIDEYKTSRRCPTCHNESLRTFRRVPNPRPYQRERYPTAICHGLLRCTNLYCRPAMAAPDRYRLWSRDVAACLNYMHILRELRRNGMVPHRLRRVAVAPTRRQRRADDQEQ

SEQ ID NO: 3250 - protein, 267 aa, Rhizopus microsporus
MLYFVHENSTPEQLVKFRYTKQQQDKTWKTKKYRRILQALEAQDPDIVRADTISVEGFGRFLQARSEQSAVLSRFYGHTITNHDNGYPLFRKIRLSAYFNKQRADQKLIQDLRTKFGEDAVFVMGNWSAPHARLPKEHGLQVYLIDEYKTSRYCPTCHNESLHTFRRVPNPRPYQRERYPTVVCHGLLRCTNLYCRPAMAAPDRYRFWNRDVVACLNCMHILCGLRRNDMVPHRFRRVAVAPTRRQRRVDDQEQPRTRIRLDDDSPS

SEQ ID NO: 3251 - protein, 300 aa, Rhizopus microsporus
MKPQNERKTTKLRGMLFTEGIGVSVLKQNDDTKKGGSGAGRRTKAVDEEDFKYVEKLEKEELLAGAGKCVLIDPGRRDMLYCMHEESIIESKKTYRYTSNQRAIETKSRKFKKFEESLKLDDVRAAEVSLSKYKSSTVNGDKFAKYLQERATVTPVLSKYYANEYISAVETNLLPFQKMKLSSFINGQQADKQLARNPITKLGDNGTLIIGNWSDGNVKFHEPIRGVGMRRILAKQGSKVQKLTMFGGHDWYNFSSSPLEPRYSGHFKFQAHPFWAAKATSSASSRPTKKITNPLKLPLY

SEQ ID NO: 3252 - protein, 967 aa, Rhizopus microsporus
MNMVLLELRNCDMITHGSFTIANILPDGFLPSQDCTIEHTIGPLSVADSFMKDFSMLMEHQHISLIHSYYFGSVGAKETNLNKHPVQMAIFKALESSGIERGKFKETSLKSYEMGNALVDVTTNMKNMWSTPKIFYGLMNSLLDVLLRVHLVPNREAKYRSYIQKKAEERSKKDSQQPVDDNSRTSTFADLPRNARRNIARGEEYKKKKYEAKIKRKPEEAHKWKAKVDTYQKRIDGYKMAVLVRCLIFVLQDIDNVIKNDDEDDVEEEELITGNTTDLTRRRLRCLKSVLKSLLLDDRKDEFSIDDLKKECSDVEEKEAYPCLLILNALKPYIPKKKERFIIAHQLPFCILANDTLLYAGYRKFYRKLCPQPSASSLHALRIDGPSLYQILTRLPCALAIFNYDNYLIESVEEARQNKDAVFSSLFDMNAIATVCKSKGRPLAWNKGFCGDSSKKKGPASYELTDHPTVKEESKKPKETLVQEFQGMQSEVVQIEKLLKDALKNNNNRDFSKDIKDLKAKWRNSSLEEKVDLYSAIEQVQDERDQSFLSVQAARDKLKLKRQLMHFKRVAMKQKPAITHETATTSQSSNTQWHIVQKYGHGIAKVEDCRLSPQVNPSEEFIFSGTDNGLKTMTSTVPLTMKRFKFHLELRNKYKALENIDECKEEAQKIVSKYSSEESDAKSFLQLPSSMAMKTGDIDIGSGYYNVRRKLEKAKKSTEGKAVQVIENNLSKLDLKMATSVEQAMSIHQHRISNRLALRNFYNSKKRVKLKRTCEMQNDSFRRRLCAKERTFLIEKKAKGRSRPCPIMFIGGRGTGVGSTIKGYRRYGGKWKQCMHGMNINVCITNENITSQTCMYCFSKLDHPIHRKVINGKEIKTKVKGSFLCSNPDCVLVSNKKAIKSRDNLSALAIGLSGLCSLLFQETFPELSAKISQSNTDFINKTASFLNARECWDTGRDASNRDRIVTS

SEQ ID NO: 3253 - protein, 305 aa, Rhizopus microsporus
MTPRLQRQSEIRGKPSIAGSFFAQTQTNLFKNTSFEASDNDFQGTPLFRKIVVINKNIRTTLKAVKEDASSPGPSNIVTRGKAPMPTVNNDTSAQAALPAPIPFTSCTSAPIMTSKKYQDKVDKTEALKKEKEKNKTTSNERKQLCPMNKSKAKLPKTKDIAEKPFVIKTSLANACRYPKFVNLIQEVVDHITQLVYAPTKRITEEIRRKCKQSNEGTEFISVDEYLASQICNKCKFKQLNNISTTGSKRRVHSVLKSESCGTVWNRDVNSALNIYSIFVYKSKHDNESHPLSKDLQKTNGAPWI

SEQ ID NO: 3254 - protein, 264 aa, Rhizopus microsporus
MAFIFEQNKCCHSVSIQDEPRREPKASKDFADIVDDAEIWAVDPGISTIFTAVDSTEHERIRTTSLEEYYHLYEFKYISKLSTLKTANLTSFLLAASTCLQNYQRIYSYYYQNKWFQKLKFKTCINKQKGTQEIVKKLFDNSKKYNKSSTVGPKNQKPNKSKHVPLPPADLPSSSQRKRIIAFGNGSFCSSMKGKRAALTKRIAEKIKRKCKQSNEGTEFVSIDEYLTSQICNKCKSKQLNNVSITRSERRVHSILKCDSCGTV

SEQ ID NO: 3255 - protein, 310 aa, Rhizopus microsporus
MKIDNGLSKLGKITFSGTDNGLVTMTETADFDMKRFKFHLDLYNKHAALENLSEEGKVDTDIMDRAVTNINMLNHYVSGQETSEYTIQIPSYMVHAFEVDYKNGAQKYKKQRERAKNLTDIRRQVMETEALLSKVDTTSARNLEHLNELHNMYIEHKHIIRNFYYSPSRLKQKRAYELQKRKYTDRLCSNERRYATSSRKTELTIFAGDRGLVQAIYKNGTGRLRTINGAFICDNPSFVSVQAKKAVKGIDNLSAMEIGLSGLASLLFDAIFPQIDPQASQPNTDKFKTNAASFFTANEDRPAVDDSNIS

SEQ ID NO: 3256 - protein, 251 aa, Rhizopus microsporus
MLYFVHENSTPEQPVQFQYTKQQQEKTWKTKKYRRILQDLKAQNPDVPSSIVSVEEFGRFLQARSEQSAVLSRFYGHTITSHDNGYSLFSKVRLSVCFNKQRADQKLIQDLRAKFREDAVLVMENWSAPMLYKTSRYCPACHNESLHTFRRVPNPRLYQRERYSTAVCHDILRCTNLYCRLAMAAPDRYRLWNRDVAACLNYIHILRGFRRNGMVPHRFRRVAVAPTKRRRRVDDQEQPRTRIRLDDDSPS

SEQ ID NO: 3257 - protein, 225 aa, Rhizopus microsporus
MEGFSRFLQARSEESAVLSRFYGHTITSHDNGYPLFRIIHLSAYFNKQRADQKFIQDLRAKFGEDAVFVMGNWSAPHARYREPILGLDFRRLLKKHGFQVYLIDEYKTSRCCPTCHNESLRTFRRVPNLRPYQRERHPAVVCHGLLRCTNLYCRPAMAAPDRYRLWNRDVAACLNYMHILRGLRCNGMVPHRFCRVTVAPTRRRRRVDDQEQPRARIRLDDDSPS

SEQ ID NO: 3258 - protein, 260 aa, Rhizopus microsporus
MLYFVHENSTPEQPVKFRYTKQQQDKTWKTKKYPQGPDVVQAEQTLSQQPSSTVSVEDFGRFLQARSKQSAVLSRFYGHTITNHDNGYPLFRKIHLSAYFNKQRLRAKFGEDAVFVMGNWSALHARYHEPIRGLGFRRLLKKHGFQAYLIDEYKTSRCCPTCHNESLRTFRRVPNLRPYQRECTNLYCRPAMAAPDRYRLWNRDVAACLNYMHILRELRRNGMVPHRFRRVAVAPTRRRRRMDDQEQPRIRTRLDDDPPS

SEQ ID NO: 3259 - protein, 256 aa, Rhizopus microsporus
MLYCVHENSTPEQPKAKKYCRILQDLKSQDFDVVQADNTISVERFDYFLQARSEQFIALSDFYRHTITNYDNGCSLFRKIRLSAYFNKQRVDQKLIQDLRAKFGEDAVFVMGNWSAPHARYHEPIRGLGFRRLLKKYGFQAYLIDEYKASRCCPTYHNESLRTFRRRHPTAVCHGLLRCTNLYSRPAMAAPDRYRLWNRDAAACFNYMHILRGLRRNGIVAHRFCRVAVAPTKRRRRVDDQEQSRTRIRLDDDSSS

SEQ ID NO: 3260 - protein, 260 aa, Rhizopus microsporus
DILCCVYENSTPEQLVQFRYTKQQQDKTWKIKKYRRILQDLKAQESDPSSTVSVEHFDHFLQTRSEQSTVLSRFYGHIITNHDNGYPLFRKIRLSAYFNNQHANQNLIQGLRAKFREDAVLVMGNWSASHARYHEPIRNLGFQRLLKNHGFQVFLIGEYKVSRCCPTCHNESFHMFRRRYSTVVYHGLLRCINLYCRPAMAALRMLQLASIMHILRGFRTNGMVPHKFLRVAVAPTRHRRRMDDQEQPRIRTRLDDDLPF

SEQ ID NO: 3261 - protein, 205 aa, Rhizopus microsporus
MLFCVYENSTPEQPDPDVIQAEQTLSQQSSSTVSVENFSRFLQARSEQSTVPRRLYGPTITNHDNGYPLFRKIRLSAYFNKQRADQKLIQGLRAKFGEDTVFVMGNWSAPHARLLKKHRFQAFLIDECINLYCRLIMAAPDRCRLWNRDVAACLNYVHILRELRHNGMIPHRFRRVAVAPTRRRRRVDDQEQPRTRIRLDDDSSS

SEQ ID NO: 3262 - protein, 344 aa, Rhizopus microsporus
MSFQTFYEDGHGNGVDEYGRPEPMDYIIDEERYALETVNSNTHYLHNQLQENNFDVGSIADEDAKDDVDVCMKKVSSKRAYTLYTDLDKVRFFKLMFEKVMSASVAAKVFKIEVRQANKIHGKEISGRCVAVDPGRRDMLYFVHENSTPEQPYRRILQDLKAQDPDVAQAEIVDTPLSAKFGEDAVFVMGNWAAPHARYREPIRGLGLRRLFKKHGFQVFLIDEHKTSRCCPTCHNESLYKFRRVPNPRLYQRERYSTAVCHGPLRCINLYCKSIIAAPDRYRLWNRDVAACLSYMHILRGLRRNGMVLHRLLRVSVAPTRRRRRVDDQEQPRSRIRLDDDSPS

SEQ ID NO: 3263 - protein, 278 aa, Rhizopus microsporus
MLYFVHENSTPEQSVKFRYTKQQQDKTWKTKKYRRILQDLKAQDPDVPSSAVSVEDFGRFLQARSEQSAVLSRFYGHTITNHDNGYPLFRKICLSAYFNKQRANQKLIQDLRAKFGEEAVFVVGNWSAPHARYHEPIRGLGFQRLLKKHGLQVYLIDKYKTSRCCPTCHNESLHTFRRVPNPRPYQRERYPTIVCHGLLRCTNLYCRPAMAAPDRYRLWNRDVAACLNYMHILRELRRNGMVPHRFRRVAVAPTRRRRRVDDQEQPRTRIRLDDDSPS

SEQ ID NO: 3264 - protein, 265 aa, Rhizopus microsporus
MSNDNDLTLWYFNVFDSSKIGYKTLESLTSRSEKFANVITTDGYAVSFMFKKAVAIQDESKREPNTPSISTIFTAVVSTEHERIRTTNLEEYYHLCGYSIATRRRKEYQECHLDEFKYISELPTLKTANLTSFLLAASIRLRSYQRIHNNYCQHKCIGLKSYSSRLISTSKKELKKLLKGSLTTVRNIAHQAHLALKPNPKQKQTCTSTSSPQKRTIAFGNGSFGSSMKGKRAAPTRRITEEIERKCKQSNGEPHLIMLTSTSQV

SEQ ID NO: 3265 - protein, 286 aa, Rhizopus microsporus
MYGYYARELMEVLTPHIGIRGIFVMVDGSSEDVNNKKTVKERLVKFSNNEYKARLGFDRSKQIELKNRAAAEMQAIYDEIPSLGSGNSSTVLNYLQALSKYRKKIFCFMRGYRHREAKGYLYSNRQITDEYMCQLVLAKTSPGAHCALAHKTSTKIRQKVRRSFKKNNHANQADDGRRTVIAYGDASLPGTKKESTPILVKRTQRALAKKATIISIDESRTSITCCKCHRKLDQKYEAQTLVCNHSVQKEGQALKHCKLCPAANGQDIVWQRDINAAINIRSILIS

SEQ ID NO: 3266 - protein, 359 aa, Rhizopus microsporus
MAKLCEQAGNKSFMYFEKNPHTLLCDDRYHDLEQSYSYLEQNGQFVKQSIKDQSESKAMKFQGMIQIDGIDVSVLKQNKESSKGGTKRMCMKGEDECQYINKLTTRELQETINKCVFIDPGRRDLLYCMHERSKPNSKSDLYRYIINQRGKETKLRKFTKLRQNTKPEEVKQSEAYLSKHPTSTVNVLQFAEYLKARARVHGTLPTYYTNEDNEHYDYDLLHFRKTKLSSIVNRQQSDSRLSAKIREKLGKDSVLVIGGWSVANQKYHELIRGKDMRRMLKKRSLSVYLIDEHKMSTFKDEELEKFAKVPNPRPFRPMHKSRMFGVQKSMEWDLVAVLNLKAIIEGHRQALCRPSRFQR

SEQ ID NO: 3267 - protein, 359 aa, Rhizopus microsporus
MAQPKTKYKESEDVARYMESLAQEELNETKSKCVLMDSERRDLLYCMKETRTAQNKQVMVYTKMTRTKVPRHYRILQNKAKPAFAKSSEARLAKAKSSSVKIEEYEMYIKTRASVEKVLCSYYGNETLQTRIRGCFPQSDESTSIDMHATYLELMIKQRHISERLDNDDKTKLLEIVAKMSKENSDQDSLKQQAGEKLEKLQVFPFRKMKFSSKLYYDQDDLMLMKKLKQKFGSNAILVLEHRLSVIYVRVGWRTLKQYAIQGPTRERLGLLYSVMDYNGKNDDNARHYEISNHNSYCDVRCTNFDCLEQSKPRLWNRDLAAAVNIKKILTSLREKGTRSELFTRTKTEESSTKVIARS

SEQ ID NO: 3268 - protein, 742 aa, Rhizopus microsporus
MSVEAEQSNNTTFSQSEYRRITTIKTSLNGIGWKENYRATLNEFVCSVNDLVTHGFAFAKFIFLKEFNKDGEFDFNKYVTKAFFQEVLLALVDRKTKEGRLAEKTRDIRQLINTYKDEYIQVSSYIPITLTNAQQIAFYEGTKIHTAYINNVAQHFGNRLRMFLNLISNKKEKIENMTQEMKSKGFTDEEIKSSVRTHITNVCTQLKLNVSAKKFPDIPANFLDKKALEQLQQFLDVYPEHYKFKKDSIYYDVKSSPQNHLRAFYTLAKLCEERKNKSFTCFPLRTSFVPCYVTIDAKILNYHILKRKSFPVGQKHELWKQVINYDCKAIKYSTTMNFEGTLDTDGVGVSLLKQNFSPDRRGTLNVEGKPLKADNDEFRYLESLSKKELDNTLKKCVLIDPGRHDLLFCMHEDSSIEEKKLFRFTRNQKLVETKARRFNKLRKFMKPAYIQELEASLSKIPAATVDLVKYTKYIKRRSKVSQPLKRYYSSEGEFLDRNIGYVYEDSDEDDPAIGIDDTAAATDNICPKPAFECKKSKNKLGTYLSNLRYIHQENNTQIQLAEDDITQLNTVIQQTDEILQKPETTEEGFESQISIVKNLLEETKAKLPTLKFRKMKLQSTINRQQSEKRLVNALKAKFGEDAVLVLGNWSASHVKFHEPTKGKGMRKMLRNEGFEVLLIDEFNTSSICPECNSDLKKFKTIENPRPYRRSKMLEVICHGLLKYEYCIQILVVGIFHLTLICL

SEQ ID NO: 3269 - protein, 237 aa, Rhizopus microsporus
MYRIFCFMKGYNHRETKGYLYSNRQITDDYMCQLMLVKTSPGALCTLAHRTSTKTRQKARRSFKKSNQTNQVDDGRRTVIAYDNRTQRALAKKAIVISVDEVRTSITCCKCHRKLDQKHETQTLVYNHRKKQLRLGGKKNAAQQCLDDDHHVICQTLQCSERRPSSFLPAIYQLKQCRLCSVGNGQDTVWQRDVNAAINICLILISYIESGYKILSRHLSLTRGGTFDSEGATAQPL

SEQ ID NO: 3270 - protein, 335 aa, Rhizopus microsporus
MARLFSLSPVSSLKWRSVSINPNTLSSFAGKPKQSNYEDKFNMFNTVFDLSSLVNHNEYSFEDLKKPAAKNKTAFANLIRSDGFAADVVLYKGVSNNEDVTEQSSDSTFGIQLLSDVLKPGDVDNFSLCGLDPDRQHAFTASYNEGENSHQIRRVSTAEYYNYTGSIHHQRKEQKRMEKEGMKSVLLNIPSIKTTSLMQYHMYMTYIMANIQKILDFYGYETAEGRFHCYQGVRRAREEMVNILINGGKKYNKDRRKNTRKNRRRGKKKKEKRGKDEKKKDEECSERPEKQWWPQRNSYDREKKPVVAFGSGMFGKDSIKFKGHRTGITGVLTEH

SEQ ID NO: 3271 - protein, 574 aa, Tilletiopsis washingtonensis
MPHQDQEMLRRRDFHMLKKMQAASSQTPSRTPRELLEELPGGAAVDLLEGWVRALQPAAAVGRSRPKAAGTFHQIFTPSSLPAVARAAPGRLAALGKWASQLSLTEHEWLERCGLFQDGNLWRPRPSLLSALEAMAATSRGAAEGTVTRLEALLSGSTTRSSRSPRASPWARLGFRPAWLPTGTLYSDGVNCRWLYVNLRRPKGRSDAETVQSMHQNVEVYARGSMWLAALPPAALQAALRAPLPLPSDEDFTPPRGRAGGLVRGMPDFKIKALLADADPDSTVVHVGIDPGNTNVAALHRTRPLLPGTIIEFPGTPPPELGLRPVVNAPRRYYANAAACERWDRWETLSIKPGALQRRTKAEPVHGAQESSERGALRPLTKAEPVRSAADAFARISHAFGVGAPHAEARKKDVKKKRGRAADEIIEWLACAPGFYSRRFQKWEEEKKLVVVAHVGDWPGGTSSGGGRGFKHPTHAGPLLRTVMQRAAFTPLPATILWRTQDEYLTSSVCPRCADAPPLLPLWRSRSARYPSRDVKYCPHCRCALARDMVGAANIAHAGVHQLNWGVGPWRPRA

SEQ ID NO: 3272 - protein, 1373 aa, Tilletiopsis washingtonensis
MGFTTGGAGGGGHTALAPALIGGESVRARKLVHVHRGERAALEHAIATGGPLRFLLVDTTPIEYAITARMADAAVPVPQTAAALRSAVLAALRAELLRLGALGLAERSIFCWDGPNVALIKKDTTSKRMQAMATGLLAWQREAAEAAPREAQLRQHATHAAMAMLSDLYTPEGVAALVADLPGHVTADEDAVAGSAAPIVHVVAHNEADLLIARLSRSLGHGESSAVLSIDSDMLVHALDAYRWVVRAVPLEEHDVPGAPPPEFHWQHLFDRNRLAHALNTTWSAAFGPHLDEARVLAFVALCRTDYGNGLHRIGPKQLINQRQLANALLHVGARPLLAARVHAIIERVGHNHTAAEVAAVQRIADVYLLAEHGATETRAKCRNEATRAAAQARLGFRDGSRLAHWEEHPQEHRPVVPPLRAPDHGNVGGKALGFKQQVSRAVLSHKPDILVPRTQGNVPTTHLTPKRPAPDRVFDKSKQEAAKSKKPARGSTAVKLLRKTPKVYDGGASTTKIKDSTVDKETMTKHFGLATHCTSMAALGNSGVSEAHLRAVPGFAALVSTEAYSNQHCIVVWRVALGEMLKLQPGWLTCSDATAVDRLRHLFLVCRSGCSSKSFLNKGMAAPNGYTNDEFAAVRSSGGWSDEMVQARRAVQQAGYVLPDFAMLDKATPNVLAAHIFGEWSRLAERVRGVVSSAIHLRYGHNKRGRTLTKRLWSCELPDRHGRAQHGVARDSELQALLSQRDAHVVAARRTLEDSAEGGWDLTLDQIMRSARGTVTLHLLQGWAEALSGKALLSGTAAPSFVGIFTRSSLGHFFRFGAKRLAAFASWIDTNSTLLRAAADSERLARCGVVRHPGRWALRPDLPSICAEMQFRVRRQLGLSPELTKDCTSFDKAAMDSTLHFLETALDMSARQAWGAMGMGVAWVPTGTVTSDGASMRWYYCNLTRPVRFRMLDANAPPEEDKYRVGAPVLSECAARLAPHQSSMVWRRLQRHERFCGVQVGVRRAVVLPLPSNEDFTGSPAARTSANQGALSGTTSRKNTRLAIGKAQAAGRPVMHVGVDPGINNIVTMARFVDMEPGTYYTCPDGTHPDGRAPLTADERVAARLPPLAPTRTKRSLSDELYGATDEDRQRWRRLQAVALKKETMTDQCNWLASEIAKLRRTHDAAAPVGVAARHMHAAAFEQSPAVSALRDELRRVKKRQLQLAVDAILEWLVMREGVGLMSQRFQTWGSRDALVVVHVGNWKSTRRPGLAGQTSSVLLRECMRQARLRGLPIVWRLQDEFMTSQACPSACTSTGRKIDSKKNLRGEPQRLSGLRRRFRSRAVRDIKHCTSCHRTYARDVAAAVNIMLAGLHQLRHNCGAFRPPPPKPLRQ

SEQ ID NO: 3273 - protein, 414 aa, Tilletiopsis washingtonensis
MLKHGSSAVSWARRNSTAAGLAESDTHVAIAHSRARTYRGVLQRASRPMPPDATLSLRVNIAQWSMKSAEATAAGRPVHYVGMDPGINNVITAARVFDLKEGTLYTLPGQQTHPDGRKPITDAERQDAGLPALDPSKNGRTTRDPLFRATQADTEEYGRIQAIALTKGTLDEEANRISAKIQMLEAEHELPDTADPGTRERHKAAFNQRPDVSALRDLRMVVQVRQRNLAVMAILEWLLMREGGVMAERHQGWSRDGALVVVNIGNWQSVRRVGLPAQCSSEILRRCTALTEIHGLPIVWRLQDEYLTSSVCPAGCLSKDGARVDGKANPQGTSQRVAALRKCYGNTPLRDVKYCPCCDRVFARDVLGALNIRAAGMHELAYNTGAWRLRRAESESIAAPAPHTGRGTRAAAGS

SEQ ID NO: 3274 - protein, 1360 aa, Tilletiopsis washingtonensis
MGFSIDRSGHWLLRSLVAGTYDGESDALAYARRHSQRLRFLVVDATPLVYSIVSRTCAEAGVAEAGVAEAGVAEASLANLDELVRACIAAVVEEIWRVAALLDGDDKRVIFCWDGAYVAQTKLDTITRDRMRDRIIHAESYRREASHRRPRIEELRRHAAAAVMQRLVNRLYSSGGLDELFVQHLLQHALCEEEMLENALAIDERTKTVLHIVARDEADCLIGRLCPRLQGSGESAVLSPDADLLVHSLAAPQLSYRWVVQPLPVTRKQRRQRSALPPPAFHRQHLYDQQRLLAIAPLVLASVALGTTDYGNGLPGVGARALLGKDDWLPGLAAAVKPGLVSRAWADMAASAESVQAQTHRLIQRVAALDSKKKHSAIDVARVCSIANVYILSTHAATETVPRPSFSEGPGHGWRNTLGFFANKRFMRCTPKNGAAERTPFVPTLDALPRLRKQLGGRQTAVGRTYLVPVEDAAAMPIGAPREGPNWDLLPRKKPRSVKPARHRPSQSKRAAQRAARQDEEPLVVRKKTVSMPGAAAKEKLVGIFGIATVRSTSADLDSTYVGMASTVVVAGQYLSVAVQLTLRELLLLEPTFLACEDIDLDARLRTLCQVCRSASPLWTRRPDSAALSAELSALSAEERGLMRLKGVTIPMLLARRATADRMSLPPAALADEHCISSTAHSILSLRARQLKKWCGLADRLRSLLAKALRTAYGDKHEAMLRAALDTPLDESPVCSADVMELLTVRNKHMHAARLQLPEPDRLWSSTPRQMLETLRGAAAVHMFRAWIERLSGTSVLDGTNFCPDFVSIHTRGGLTPFVREASARLGALAALANRSHPAPAPFEHEALVRCGLFFDRQQWAPRPHVAAEHKSLLARLKRALGLSTTTSRVYELEARAGRHWVRAFESILGVPWRSLGFRKPAWLPTGHVESNGTQMRWSYVNLARPKRRHMATAGVAQSRPLYEDQLDSAWGRRLQAAPIATLPLASNQRFEPARASRTSASSGGIGGTTPDKEIRERLAAGPGAVHHVGVDPGLNNVLVLSRRRPLRPGTVIAFPEPPSPKLALLQPLSAAERRHLGIRPSEPPCYRATAAACKLYELSESLTLKPGSLRSDKPLKAASEPHHPGDDVQRALAKMLTPVPTAMERERRILRHARQQRRAQDELLEWLVPGSRPGFLAQHLQQWQQGDSPALVIAHVGDWVGHKASKPALAAPVLRGVMQRAALASPSLPILFRKQDEYLTSSVCPERCEDDEGSAAAAAATAAQTNKKGTPNVVVGTAPEHARSPVPAARLTSVYRSATSRPVHGVKRCTTCRHLFSRDRAGAANIRFAGMHELAFGYGPFRPRPKKAVGAAAGTAPAS

SEQ ID NO: 3275 - protein, 1238 aa, Naegleria lovaniensis
MNNQSREENNSNNPRFTSSHHPFLQPIFPPNPNLFTQQNPSSQPIFPPNPAIFSPNLSFQPEFPPPWIPLNPFSPQLYPIIPPFPPRISEQTSTKDQESPKLEHVDKPSVSNINPIKSPNPTREIEKTFQNSKRVLVVKEQPQMIYKHPYQKRSMMERIDKWRKLKGVGGFGGFSIPPYIPMAQIKFSPCEHTLSDHYKCEEERAKKKKKIASHWQRLEVLKDVSTVDKFGDLLRTAYLERGISIEPLSLDQGKAYATQEHYMLLFLKQFNIEWSKIGTFFFDRSINSLKKKYKKLKRKINRARLEGAYDASDATNFIIQWSVDDLTFSEITNINTFTSTVSITFPETWTNSDHYQKMIMKIGQLSPSKPLPLRQAQPSSNKSNVSTTPGEPYSQSEEDLIVTSLRKGMNLEQIYRDYFKHRTFQSLKNKVRRLRKRQLYHKQQPSKKRLNKRRMVPNSTVSTDSKELRKPFWHDDTVDRLNKICPVSCFAKNGLKIPTQKPPPSKKELVEKVWSKSETWKKTPCKCGNSKFKRTVCSFNGRKFGSEKKKLVQEFKEVSALEESLTMLQENGVNSSTTAENEVSSSATTVNEVNSSTTAENEVNSSTIAENGVSSSTTAENGVSSSMTAENGVNSSTTAESKEKADDTIEKLLKQIYTSFSISNEDNYFVRTKKVRLKLTSEQKKVFERFFFNSNHTYNEACLLHFMLEQNKGKTLLTTTEDDYFKILKNPQTNLRFKQTRWLWDQELKHCPADIKLNAVKDFVKAEKITRYKNKQAAEKESKEAARKAKSKFLKKVQKGKKEMITDEELNERFNPKHFTRQPREFEMKGRSNQHPYQSFKVTNISLSQEGVLLKPTFFKGNESACPSKKSTDHLLKFYYPARARKWLKEEIDNKKFSHETTFVRERGRYFVCLPVRYHKALTRQEFQRFDKSFYESNSNSGTEYDTKFLKDCPQPSQDELRKEYIALDPGVRCFMYGYDSNGDALEFAAQGENTILFSLSLKQDQLRSEIAKNKFLKYNSRQERKFYKGLRKALKKKIRRLESKIRNKVNDMHNKIIDYLTFHYSEIIIPEFNVKAMIARKQKQRKRQGKEDTTCQGQEGYTNGQTENMDVRTEPLVASSSPFEGWESRDTTTSETTTNTSEWVGRKITRKTVRQMLRFRHYDFRMKLLQKAEMRGCKVHVVTEQYTSKTCGNCSVIKEDLYGSKWFHCNHCHFHIPRDGNGARNILIKNYHHLLHW

SEQ ID NO: 3276 - protein, 972 aa, Naegleria lovaniensis
MEWSKISTFFFDRSINSLKKKYKKLKRKINRARLEGAYDVSDATNFIIQWSVDDLTFSEITDISTLTSTVSITFPETWTNSDHYHKMIMKLGQLSPSKPLPLRQAQPSSNKSNVPTTPGEPYSQSEEDLIVTSLRKGMNLEQIYRDYFKHRTFQSLKNKVRRLRKRQLYHKQQPSKKRLNKRRMVPNSTVSTDSKELRKPFWHDDTVDRLNKICPVSCFAKNGTKILTQSWFILSVRQRCPSTEPPPPSKKELVEKVWSKSETWKKTPCKCGNSKFKRTVCSFNGRKFGSEKKKLVQEFKEVSALEESLTMLQENGVNSSTTAENEVNSSTIAENGVTSSTTAENGVNSSTTAENEVSSSTTAENGVNSSTTAESKEKADDAIEKLLKQLFTSFSISNEDNYFVRTKKVRLKLTSEQKKVFERFFFNSNHAYNEACLFHFMLEQNKGKTFLTTTEDDYFKILKNPQTNLRFKQTRWLWDQELKHCPADIKLNAVKDFVKAEKITRYKNKQAAEKESKEAARKAKNKFLKEVQKGKKEMITDEELNERFNPKHFARQPCEFEMKGRSNQHPYQSFKVTNISLSQEGVLLKPTFFKGNESACPSKKSTDHLLKFYYPTRARKWLKEEIDNKKFSHETTFVRERGRYFVCLPVRYHKALTRQEYQRFDKSFYESNSNSGIEYDKIFLKDCPQPSQDELRKEYIALDPGVRCFMYGYDSNGDALEFAAQGENTILFSLSLKQDQLRSEIAKNKFLKYNSRQERKFYKGLRKALKKKIRRLESKIRNKVNDMHNKIIDYLTFHYSEIIIPEFNVKAMIARKQKQRKRQGKEDTTCQGQEGYTNDQTENMDVRTEPLVASSSPFEGWESRDTTTSETTTNTSEWVGRKITRKTVRQMLRFRHYDFRMKLLQKAEMRGCKVHVVTEQYTSKTCGNCSVIKEDLYGSKWFHCNHCHFHIPRDGNGARNILIKNYHHLLHW

SEQ ID NO: 3277 - protein, 495 aa, Naegleria lovaniensis
MKRSREDEPTHPPTNPSLAHGIIPFWDEYSQQVSDELWACSRDSFHEFNQYNNKGCTDRWFKFSQFTVIESKPVFDVPLNVHYSITENVAFDNSKKPPQLKKAKKNQKTPQKFQADKSLKIRLYPNEQERTTLNQWMGTARWIYNKCLEFTNKSKGVKKNKKNFRTFVVNNDNYQTENQWVVNTPYDVRDAAANELLTAFKTNFEKKKAGMIDKFMIRFRRKKDRKDHFVLHCKHWKKKTGLYSFIRNIKSAKPLPEELQYDSIIIKNKLNHYYLCIPQVLDIRGENQAPQHSGQVVALDPGVRTFQTTFDLNGYSTKWGSGGAERIGRLCCAYDKLQSKWSQPEVRHCKRYKYKRAGRRIQQKIRNIVDDLLKKLCLWLCRNYQVILLPSFETQKMVKKLHRRINSKTARKMLTWSHYRFKQRLLHKAREHPWTHIYIVNEAYTSKTCSCCGHVYTVGSSEVFRCPSCGSIFDRDINGARNILLRFLTTHRISF

SEQ ID NO: 3278 - protein, 895 aa, Naegleria lovaniensis
MIMKLGQLSPSKPLPLRQAQPSSNKSNVSTTPGEPYSQSEEDLIVTSLRKGMNLEQIYRDYFTHRTFQSLKNKVRRLRKRQLYHKQQPSKKRLNKRRMVPNSTVSTDSKELRKPFWHDDTVDRLNKICPVSCFAKNGTKILTQSWFTLSVRQRCPSTKPPPSKKELVEKVWSKSETWKKTPCKCGNSKFKRTVCSFNGRKFGSEKKKLVQEFKQVSALEESLTMVQENGVSSSTTAENEVSSSATAVNEVNSSTTAENEVNSSTIAENGVNSSTTAENGVSSSMTAENGVNSSTTAESKEKADDTIEKLLKQIYTSFSISNEDNYFVRTKKVRLKLTSEQKKVFERFFFNSNHAYNEACLLHFMLEQNKGKTLLTTTEDDYFKILKNPQTNLRFKQTRWLWDQELKHCPADIKLNAVKDFVKAEKITRYNNKQAAEKESKEAARKAKNQFFKDVQKGKKEMITDEEMNERFNPKHFTRQPREFEMKGRSNQHPYQSFKVTNISLSQEGVLLKPTFFKGNENACPSKKSTDHLLKFYYPARARKWLKEEIDNKKFSHETTFIRERGRYFVCLPVRYHKALTRQEYQRFDKSFYESNSNSGIEYDTKFLKDCPQPSQNELRKEYIALDPGVRCFMYGYDSNGDALEFAAQGENTILFSLSLKQDQLRSEIAKNKFLKYNSRQERKFYKGLRKALKKKIRRLESKIRNKVNDMHNKIIDYLTFHYSEIIIPEFNVKAMIARKQKQRKRQGKEDTTCQGQEGYTNGQTENMDVRTEPLVASSSPFEGWESRDTTTSETTTNTSEWVGRKITRKTVRQMLRFRHYDFRMKLLQKAEMRGCKVHVVTEQYTSKTCGNCSVIKEDLYGSKWFHCNHCHFHIPRDGNGARNILIKNYHHLLHW

SEQ ID NO: 3279 - protein, 1259 aa, Naegleria lovaniensis
MNNQSREENNSNNPRFTSSHHPFLQPIFPPNPNLFTQQNPSSQPIFPPNPAIFSPNLSFQPRFPPPWIPLNTFSPQLYPIIPPFPPRTSEQTSTKDQESPKLEHVDNTNINPIKSPNPTREIEKTFQNSKRVLAIKGQPQMICKHPYQKRSMMERIDKWRKLKGVGGFGGFSIPPYIPMAQIKFSPCEHTLSDHYKCEEERAKKKKKVASHWQRLEVLKDVSTVDKFGDLLRTAYLERGISIEPLSLDQGKAYATQEHYMLLFLKQFNLEWSKIGTFFFDRSINSLKKKYKKLKRKINRARLEGAYDASDATNFIIQWSVDDLTFSEFTDSNTFTSTVSITFPETWTNSDHYQKMIMKLGQLSPSKPLPLRQAQPSSNKSNVSTTPGEPYSQSEEDLIVTSLRKGMNLEQIYRDYFIHRTFQSLKNKVRRLKKRQLYHKQQPSKKRLNKRRMVPNSTVSTDSKELRKPFWHDDTVDRLNKTCPVSCFAKNGLKIPTQSWFTLSVRQRCPSTKPPPSKKELVEKVWCKSETWKKTPCKCGNSKFKRTVCSFNGRKFGSEKKKLVQEFKQVSALEESLTMLQENGVNSSTTAENEVSSSATAVNEVNSSTTAENEVNSSTIAENGVSSSTTAENGVNSSTIAENEVSSSTTAENGVNSSTTAESKEKADDTIEKLLKQIYTSFSISNEDNYFVRTKKVRLKLTSEQKKVFERFFFNSNHAYNEACLLHFMLEQNKGKTLLTTTEDDYFKILKNPQTNLRFKQTRWLWDQELKHCPADIKLNAVKDFVKAEKITRYKNKQAAEKESKEAARKAKTKFLKDVQKGKKEMITDEELNERFNPKHFTRQPREFEMKGRSNQHPYQSFKVRDISLSQEGVLLKPTFFKGNESACPSKKSTDHLLKFYYPARARKWLKEEIDNKKFSHETTFVRERGRYFVCLPVRYHKALTRQEFQRFDKSFYESNSNSGTEYDTKFLKDCPQPSQDELRKEYIALDPGVRCFMYGYDSNGDALEFAAQGENTILFSLSLKQDQLRSEIAKNKFLKYNSRQERKFYKGLRKALKKKIRRLESKIRNKVNDMHNKIIDYLTFHYSEIIIPEFNVKAMIARKQKQRKRQGKEDTTCQGQEGYTNGQTENMDVRTEPLVASSSPFEGWESRDTTTSETTTNTSEWVGRKITRKTVRQMLRFRHYDFRMKLLQKAEMRGCKVHVVTEQYTSKTCGNCSVIKEDLYGSKWFHCNHCHFHIPRDGNGARNILIKNYHHLLHW

SEQ ID NO: 3280 - protein, 532 aa, Naegleria lovaniensis
MLEQNKGKTLLTTTEDDYFKILKNPQTNLRFQQTRWLWDQELKHCPADIKLNAVKDFVKAEKITRYKNKQAAEKESKEAARKAKNQFLKKVQKGKKEMITDEELNERFNPKHFTRQPREFEMKGRSNQHPYQSFKVTNISLSQEGVLLKPTFFKGNESACPSKKSTDHLLKFYYPARARKWLKEEIDNKKFSHETTFVRERGRYFVCLPVRYHKALTRQEFQRFDKSFYESNSNSGIEYDKIFLKDCPQPSQNELRKEYIALDPGVRCFMYGYDSNGDALEFAAQGENTILFSLSLKQDQLRSEIAKNKFLKYNSRQERKFYKGLRKALKKKIRRLESKIRNKVNDMHNKIIDYLTFHYSEIIIPEFNVKAMIARKQKQRKRQGKEDTTCQGQEGYTNGQTENMDVRTEPLVASSSPFEGWESRDTTTSETTTNTSEWVGRKITRKTVRQMLRFRHYDFRMKLLQKAEMRGCKVHVVTEQYTSKTCGNCSVIKEDLYGSKWFHCNHCHFHIPRDGNGARNILIKNYHHLLHW

SEQ ID NO: 3281 - protein, 495 aa, Naegleria lovaniensis
MKRSREDEPTHPPTNPSLAHGIIPFWNEYSQQVSDKLWACSRDSFHEFNQYNNKGCTDGWFNFSQFTVIESKPVFDVPLNVHHSITENVAFDNSKKPPQLKKAKKNQKTPQKLQADKSLKIRLYPNEQERTTLNQWMGTARWIYNKCLEFTHNFKDVKKNKKNFRTFVVNNDNYQTENQWVVNTPYDVRDAAAIELLTAFNTNFEKKKAGMIDKFMIRFRRKKDRKDHFVLHCKHWKKKSGLYSFIRNIKSAEPLPEELQYDSIIIKNKLNHYYLCIPQVLDIRGENQAPQHSGQVVALDPGVRTFQTTFDLNGYSTKWGSGGAERIGRLCCAYDKLQSKWSQPEVRHCKRYKYKRAGRRIQQKIRNIVDDLHKKLCLWLCRNYQVILLPSFETQKMVKKLHRRINSKTARKMLTWSHYRFKQRLLHKAREHPWTHIYIVNEAYTSKTCSCCGHVYTVGSSEVFRCPSCGSIFDRDINGARNILLRFLTTHGISF

SEQ ID NO: 3282 - protein, 360 aa, Naegleria lovaniensis
MKIRIRFVDDFVKAEKITRHKNKQAAEKESKEAARKAKNKFLKDVQKGKKEITDEELNERFNPKHFARQPCEFEMKGRSNQHPYQSFKVKDISLSQEGVLLKPTFFKGNESACPSKKSKDHLLKFYYPTRARKMLKEEIGVRCFMYGYDSNEDALEFAAQEENTILFSLSLKQDQLRSEIAKNKFLKYNSRQERKFYKGLRKALKKKIRRLESKIRNKVNDMHNKIIDYLTFHYSEIIIPEFNVKAMIARKQKQRKRQGKEDTSCQGQEGYTNGQTENMDVRTEPLVASSSPFEGWESRDTTTSETTTNTSEWVGRKITRKTVRQMLRFRHYDCRMKLLQKAEMRGCKVHVITEQYTSKT

SEQ ID NO: 3283 - protein, 359 aa, Naegleria lovaniensis
MGTARWIYNKCLEFTHNFKGVKKNKKNFRTFVVNNDNYQTENQWVVNTPYDVRDAAAIELLTAFNTNFEKKKAGMIDKFMIRFRRKKDRKDHFVLHCKHWKKKSGLYSFIRNIKSAEPLPEELQYDSIIIKNKLNHYYLCIPQVLDIRGENQAPQHSGQVVGLDPGVRTFQTTFDLNGYSTKWGSGGAERIGRLCCAYDKLQSKWSQPEVRHCKRYKYKRAGRRIQQKIRNIVDDLHKKLCLWLCRNYQVILLPSFETQKMVKKLHRRINSKTARKMLTWSHYRFKQRLLHKAREHPWTHIYIVNEAYTSKTCSCCGQIYTVGSSEVFRCPSCGSIFDRDINGARNILLRFLTTHRISF

SEQ ID NO: 3284 - protein, 1219 aa, Naegleria lovaniensis
MNNQSREENNSNNPRFTSSHHPFLQPIFPPNPNLFTQQNPSSQPIFPPNPAIFSPNLSFQPGFPPPWIPLNPFSPQLYPIISPFPPRTSEQTSTKDQESPKLENVDKPSVTNINPIKSPNPTREIEKTFQNSKRVLVIKEQPQMICKHPYQKRSMMERIDKWRKLKGVGGFGGFSIPPYIPMAQIKFSPCEHTLSDHYKCEEERAKKKKKIASHWQRLEVLKDIGTFFFDRSINSLKKKYKKLKRKINRARLEGAYDASDATNFIIQWSVDDLTFSEFTDSNTFTSTVSITFPETWTNSDHFHKMIMKLGQLSPSKPLPLRQAQPSSNKSNVSTTPGEPYSQSEEDLIVTSLRKGMNLEQIYRDYFTHRTFQSLKNKVRRLRKRQLYHKQQPMKKRLNKRRMVPNSTASTDSKELRKPFWHDDTVDRWNKICPVSCFAKNGLKIPTQSWFTLSIRQRCPSTKPPPSKKELVEKVWSKSETWKKTPCKCGNSKFKRTVCSFNGRKFGSEKKKLVQEFKQVSALEESLTMLQENGVNSSTTAENEVNSSTIAVNEVSSSTTAVNEVNSSTTAENEVNSSTIAENGVNSSTTAENEVNSSTIAENGVSLSMTAENGVNSSTTAESKEKADDTIEKLLKQIYTSFSISNEDNYFVRTKKVRLKLTSEQKKVFERFFFNSNHAYNEACLLHFMLEQNKGKTLLTTTEDDYFKILKNPQTNLRFKQTRWLWDQELKHCPADIKLNAVKDFVKAEKITRHNNKQAAEKESKEAARKAKNKFFKDVQKGKKEMITDEEMNERFNPKHFTRQPREFEMKGRSNQHPYQSFKVTNISLSQEGVLLKPTFFKGNESACPSKKSKDHLLKFYYPARARKWLKEEIDNKNFSHETTFARERGRYFVCLPVRYHKALTRQEYQRFDKSFYESNSNSGIEYDRIFLKDCPQPSQNELRKEYIALDPGVRCFMYGYDSNGDALEFAAQGENTILFSLSLKQDQLRSEIAKNKFLKYNSRQERKFYKGLRKALKKKIRRLESKIRNKVNDMHNKIIDYLTFHYSEIIIPEFNVKAMIARKQKQRKRQGKEDTTCQGQEGYTNGQTENMDVRTEPLVASSSPFEGWESRDTTTSETTTNTSEWVGRKITRKTVRQMLRFRHYDFRMKLLQKAEMRGCKVHVVTEQYTSKTCGNCSVIKEDLYGSKWFHCNHCHFHIPRDGNGARNILIKNYHHLLHW

SEQ ID NO: 3285 - protein, 1006 aa, Naegleria lovaniensis
MFIAHVQEIVELIFSFLEESDRKRSEQVSLTFHEACNAVEEREMVWRLQFEEKALHNSIHKGLCHDDSKHSYAHHVELIMKQLDDFEKKQLNFKIPFHVRMYMKHSKIYPSNDAIPYIPKLNNAILHPFMCIFKISQWQVRDRDCVVIGEYQTRKIDKYLVLLKNSGGKGVLEVERHFELEYHHLDSENFVSQLILQVSRMETFVVGSLTRWLSNFGYLKDQNKCSVVTQLKTSYPNALIYDEDILSDNPKFCLEYFVANFKQGYVYMYFYNLLKERQYRALLKHKIITLEDLPAHIRNDEKVISFSVATNGINLKHLTRAHHNDRDLVLEAVKENGLALAFASKTLKNLDPFIFSQANQNNQLVQYFSDRVGEETKLGVKPTTLGIAENDDFIDQFKENLQRGIYGWGIEHLTQFQRDIIQSICDQKNRNILIEGPCASGKTIASIIGVLNKGLDDSSTAPPDQVQCLIICPTKEMVYQIQLFFTSLCEYMSDISIGNSTCGWTTFYSAEFAKSYRVLIGTPGRIAHKSKYYLELSHVKTVIFEGSDQLLAGEFGNELNLIFKKLSNNCQSILISSLFSPKLIMRIAKIFTNENFKVLRVPLLPSNQPHKYQFLELTNEEEKWTLIKEIIQDHSNMLTMVFCNSRRKAEMLCEELNNVGFCCNVLHGDIDCQQRELILNDFRKGAFRPVFDVPPNIHHSITENVAFDNSKKPPQLKKAKKNQKTPQKLQADKSMKIHLYPNEQERTTLNQWMGTARWIYNKRLEFTHNFKDVKKNKKNFRTFVVNNDNYQTENQGENQAPQHSGQVVALDPGVRTFQTTFDLNGYSTKWGSGGAERIGRLCCAYDKLQSKWSQPEVRHCKRYKYKRAGRRIQQKIRNIVDDLHKKLCLWLCRNYQVILLPSFETQKMVKKLHRRINSKTARKMLTWSHYRFKQRLLHKAREYPWTHIYIVNEAYTSKTCSCCGHIHTVGSSEVFRCPSCGSIFDRDINAARNILLRFLTTHRISF

SEQ ID NO: 3286 - protein, 495 aa, Naegleria lovaniensis
MKRSREDEPTHPPTNPSLAHGIIPFWDEYSQQVSDKLWACSRDSFHEFNQYNNKGCTDGWFNFSQFTVIESKPVFDVPLSVHHSITENVAFDNSKKPPQLKKAKKNQKVAQKFQADKSLKIRLYPKEQERTTLNQWMGTARWIYNKCLEFTHNFKGVKKNKKNFRTVVVNNDNYQTENQWVVNTPYDVRDAAAIELLTAFKTNFEKKKAGTIDKFMIRLRRKKDRKDHFVLHCKHWKKKNGLYSFIRNIKSAEPLLEELQYDSIIIKNKLNRYYLCIPQVLEIRGENQAPQHSGQVVALDPGVRTFQTTFDLNGYSTKWGSGGAERIGRLCCAYDKLQSKWSQPEVRHCKRYKYKRAGRRIQQKIRNIVDDLHKKLCLWLCRNYQVILLPSFETQKMVKKLHRRINSKTARKMLTWSHYRFKQRLLHKAREHPWTHIYIVNEAYTSKTCSCCGHVYTVGLSEVFRCPSCGSIFDRDINGARNILLRFLTTHRISF

SEQ ID NO: 3287 - protein, 359 aa, Naegleria lovaniensis
MGTARWIYNKCLEFTNKSKGVKKNKKNFRTFVVNNDNYQTENQWVVNTPYDVRDAAAIELLTAFNTNFEKKKAGTIDKFMIRFRRKKDRKDHFVLHCKHWKKKSGMYSFIRNIKSAEPLPEELQYDSIIIKNKLNHYYLCIPQVLDIRGENQAPQHSGQVVALDPGVRTFQTTFDLNGYSTKWGSGGAERIGRLCCAYDKLQSKWSQPEVRHCKRYKYKRAGRRIQQKIRNIVDDLHKKLCLWLCRNYQVILLPSFETQKMVKKLHKRINSKTARKMLTWSHYRFKQRLLHKAREHPWTHIYIVNEAYTSKTCSCCGHVYTVGSSEVFRCPSCGSIFDRDINGARNILLRFLTTHRISF

SEQ ID NO: 3288 - protein, 477 aa, Naegleria lovaniensis
MNLLILLLIHLLHTASFHSWACSRDSFHEFNQYNNKGCTDGWFNFSQFTVIESQPVFDVPLNVHHSITENVAFDNSKKPPQLKKAKKGQKTPQKFQADKSMKIRLYPNEQERTTLNQWMGTARWIYNKCLEFTNKSKGVKKNKKNFRTFVVNNDNYQTENQWVVNTPYDVRDAAAIELLTAFNTNFEKKKAGTIDKFMIRFRRKKDRKDHFVLRCKHWKKKSGMYSFIRNIKSAEPLPEELQYDSIIIKNKLNHYYLCIPQVLDIRGENQAPQHSGQVVALDPGVRTFQTTFDLNGYSTKWGSGGAERIGRLCCAYDKLQSKWSQPEVRHCKRYKYKRAGRRIQQKIRNIVDDLHKKLCLWLCRNYQVILLPSFETQKMVKKLHRRINSKTARKMLTWSHYRFKQRLLHKAREHPWTHIYIVNEAYTSKTCSCCGHVYTVGSSEVFRCPSCGSIFDRDINGARNILLRFLTTHRISF

SEQ ID NO: 3289 - protein, 1248 aa, Naegleria lovaniensis
MNNQSREENNSNNPRFTSSHHPFLQPIFPPNPNLFTQQNPSSQPIFPPNPAIFSPNLSFQPGFPPPWIPLNPFSPQLYPIIPPFPPRISEQTSTKDQESPKLEHVDKSINPLKSPNPTREIEKTFQNSKRVLAIKEQPQMIYKHPYQKRSMMERIDKWRKLKGVGGFGGFFIPPYIPMAQIKFSPCDHTLSDHYKCEEERAKKKKKVASHWQRLEVLKDVSTVDKFGDLLRTAYLERGISIEPLSLDQGKAYATQEHYMLLFLKQFNMEWSKIGTFFFDRSINWLKKKYKKLKRKINRARLEGAYDASYATNFIIQWSVDDLTFSEFTNSNTFTSTVSITFPETWTNSDHYQKMIMKLGQLSPSKPLPLRQAQPSSNKSNVSTTPGEPYSQSEEDLIVTSLRKGMNLEQIYRDYFTHRTFQSLKNKVRRLRKRQLYHKQQPTKKRLNKRRMVPKTTASTDSRELRKPFWHDDTVDRLNKTCPVSCFAKNGTKIPTQSWFTLSVRQRCPSTKPPPSKKELVEKVWSKSETWKKTPCKCGNSKVKRTVCSFNGRKFGSEKKKLVQEFKEVSALEESLTMLQENEVSSSTTAENEVSSSVTAVNEVNSSTTAENEVNSSMTAENGVNSSTTAENEVSSSMTAENGVNSSTTAESKEKADDTIEKLLKQIYTSFSISNEDNYFVRTKKVRLKLTSEQKKVFERFFFNSNHAYNEACLLYFMLEQNKGKTLLTTTEDDYFKILKNPQTNLRFKQTRWLWDQELKHCPADIKLNAVKDFVKAEKITRYKNKQAAEKESKEAARKAKNQFFKDVQKGKKEMITDEEMNERFNPKHFTRQPREFEMKGRSNQHPYQSFKVTNISLSQEGVLLKPTFFKGNESACPSKKSTDHLLKFYYPARARKWLKEEIDNKKFSHETTFVRERGRYFVCLPVRYHKALTRQEYQRFDKSFYESNSNSGIEYDTIFLKNCPQPSQDELRKEYIALDPGVRCFMYGYDSNGDALEFAAQGENTILFSLSLKQDQLRSEIAKNKFLKYNSRQERKFYKGLRKALKKKIRRLESKIRNKVNDMHNKIIDYLTFHYSEIIIPEFNVKAMIARKQKQRKRQGKEDTTCQGQEGYTNGQTENMDVRTEPLVASSSPFEGWESRDTTTSETTTNTSERVGRKITRKTVRQMLRFRHYDFRMKLLQKAEMRGCKVHVVTEQYTSKTCGKCSVIKEDLYGSKWFHCNHCHFHIPRDGNGARNILIKNYHHLLHW

SEQ ID NO: 3290 - protein, 495 aa, Naegleria lovaniensis
MKRSREDEPTHPPTNPSLAHGIIPFWDEYSQQVSDKLWACSRDSFHEFNQYNNKGCTDGWFNFSQFTVIESKPVFDVPLNVHHSITENVAFDNSKKPPQLKKAKKNQKVAQKFQADKSLKIRLYPNEQERTTLNQWMGTARWIYNKCLEFTNKSKGVKKNKKNFRTFVVNNDNYQTENQWVVNTPYDVRDAAAIELLTAFNTNFEKKKAGTIDKFMIRFRRKKDRKDHFVLHCKHWKKKSGLYSFIRNIKSSEPLPEELQYDSIIIKNKLNHYYLCIPQVLDIRGENQAPQHSGQVVALDPGVRTFQTTFDLNGYSTKWGSGGAERIGRLCCAYDKLQSKWSQPEVRHCKRYKYKRAGRRIQQKIRNIVDDLHKKLCLWLCRNYQVILLPSFETQKMVKKLHRRINSKTARKMLTWSHYRFKQRLLHKAREHPWTHIYIVNEAYTSKTCSCCGHIYTVGSSEVFRCPSCGSIFDRDINAARNILLRFLTTHRISF

SEQ ID NO: 3291 - protein, 1242 aa, Naegleria lovaniensis
MNNQSREENNSNNPRFTSSHHPFLQPIFPPNPNLFTQQNPSSQPIFPPNPAIFSPNLSFQPGFPPPWIPLNPFSPQLYPIIPPFPPRTSEQTSTKDQKSPKLEHVDKSSVTNINPIKSPNPTREIEKTFQNSKRVLAIKEQPQMIYKHPYQKRSMMERIDKWRKLKGVGGFGGFSIPPYIPMAQIKFSPCEHTLSDHYKCEEERAKKKKKIASHWQRLEVLKDVSTVDKFGDLLRTAYLERGISIEPLSLDQGKAYATQEHYMLLFLKQFNMEWSKIGTFFFDRSINSLKKKYKKLKRKINRARLEGAYDASDATNFIIQWSVDDLTFSEITNISTLTSTVSITFPETWTNSDLFHKMIMKLGQLSPSKPLPLRQAQPSSNKSNVPTTPGEPYSQSEEDLIVTSLRKGMNLEQIYRDYFTHRTFQSLKNKVRRLRKRQLYHKQQPTKKRLNKRRMVPNSTVSTDSKELRKPFWHDDTVDRLNKICPVSCFTKNGLKIPTQSWFTLSVRQRCPSTKPPPSKKELVEKVWSKLETWKKTPCKCGNSKFKRTVCSFNGRKFGLEKKKLVQEFKEVSALEESLIMLQENEVSSSTTAENEVSSSATAVNEVNSSTTAENEVNSSTIAENGVSSSTTAENGVNSSTTAESKEKADDTIEKLLKQIYTSFSISNEDNYFVRTKKVRLKLTSEQKKVFERFFFNSNHAYNEACLLYFMLEQNKGKTLLTTTEDDYFKILKNPQTNLRFKQTRWLWDQELKHCPADIKLNAVKDFVKAEKITRYKNKQAAEKESKEAARKAKNQFFKDVQKGKKEMITDEELNERFNPKHFTRQPREFEMKGRSNQHPYQSFKVRDISLSQEGVLLKPTFFKGKENACPSKKSKDHLLKFYYPARARKWLKEEIDNKKFSHETTFIRERGRYFVCLPVRYHKALTRQEYQRFDKSFYESNSNSGIEYDKIFLKGCPQPSQDELRKEYIALDPGVRCFMYGYDSNGDALEFAAQGENTILFSLSLKQDQLRSEIAKNKFLKYNSRQERKFYKGLRKALKKKIRRLESKIRNKVNDMHNKIIDYLTFHYSEIIIPEFNVKAMIARKQKQRKRQGKEDTTCQGQEGYTNGQTENMDVRTEPLVASSSPFEGWESRDTTTSETTTNTSEWVGRKITRKTVRQMLRFRHYDFRMKLLQKAEMRGCKVHVVTEQYTSKTCGNCSVIKEDLYGSKWFHCNHCHFHIPRDGNGARNILIKNYHHLLHW

SEQ ID NO: 3292 - protein, 1262 aa, Naegleria lovaniensis
MNNQSREENNSNNPRFTSSHHPFLQPIFPPNPNLFTQQNPSSQPIFPPNPAIFSPNLSFHPEFPPPWIPLNPFSPQLYPIIPPFPPRISEQTSTKDQESPKLEHVDKPSVTNINPIKSPNPTREIEKTFQNSKRVLAIKGQPQMICKHPYQKRSMMERIDKWRKLKGVGGFGGFSIPPYIPMAQIKFSPCEHTLSDHYKCEEERAKKKKKIASHWQRLEVLKDVSTVDKFGDLLRTAYLERGINIEPLSLDQGKAYATQEHYMLLFLKQFNMEWSKIGTFFFDRSINSLKKKYKKLKRKINRARLEGAYDASDATNFIIQWSVDDLTFSEFTDISTLTSTVSITFPETWTNSDLFHKMIMKIGQLSPSKPLPLRQAQPSSNKSNVPTTPGEPYSQSEEDLIVTSLRKGMNLEQIYRDYFTHRTFQSLKNKVRRLRKRQLYHKQQPTKKRLNKRRMVPNSTVSTDSKELRKPFWHDDTVDRLNKTCPVSCFAKNGTKILTQSWFTLSVRQRCPSTKPPPSKKELVEKVWCKSETWKKTPCKCGNSKFKRTVCSFNGRKFGSEKKKLVQEFKQVSALEESLTMLQENEVSSSTTAENEVSSSVTAVNEVNSSTTAENEVNSSTIAENGVSSSTTTENGVNSSTTAENGVSSSTTAENGVNSSTTAESKEKTDDTIEKLLKQIYTSFSISNEDNYFVRTKKVRLKLTSEQKKVFERFFFNSNHAYNEACLLHFMLEQNKGKTLLTTTEDDYFKILKNPQTNLRFKQTRWLWDQELKHCPADIKLNAVKDFVKAEKITRYKNKQAAEKESKEAARKAKNQFFKDVQKGKKEMITDEELNERFNPKHFTRQPCEFEMKGRSNQHPYQSFKVTNISLSQEGVLLKPTFFKGNENACPSKKSMDHLLKFYYPARARKWLKEEIDNKKFSHETTFIRERGRYFVCLPVRYHKALTRQEFQRFDKSFYESNSNSGTEYDTKFLKDCPQPSQNELRKEYIALDPGVRCFMYGYDSNGDALEFAAQGENTILFSLSLKQDQLRSEIAKNKFLKYNSRQERKFYKGLRKALKKKIRRLESKIRNKVNDMHNKIIDYLTFHYSEIIIPEFNVKAMIARKQKQRKRQGKEDTTCQGQEGYTNGQTENMDVRTEPLVASSSPFEGWESRDTTTSETTTNTSEWVGRKITRKTVRQMLRFRHYDFRMKLLQKAEMRGCKVHVVTEQYTSKTCGNCSVIKEDLYGSKWFHCNHCHFHIPRDGNGARNILIKNYHHLLHW

SEQ ID NO: 3293 - protein, 301 aa, Morchella importuna
MKRTLASAKSSLYTLNKTSRATGATSTTTTSLNTSPPGKAAKEDYIERMNLLPAIMEHLSSCQKVIFFRNRPSINHFQALTDSSDGAPYAFDVDLLPKPYEITAAKKLAKEKREREVRMKRVYGKITAQERRHIRAHAQLPPDAPKPVLIHCVGHWQGINSCIKGHSRREMKQIREQHRVYGNVAITNEYNSSKTCPLCSSKVHLARRTVDGKERVVRLHGAVECVHPRCPARRIPHTTRGRDANAAANIALSGASIILSSDQQPLPPFRRDTNNTRYNLAKELLTVMTPGLVPRDSIRDE

SEQ ID NO: 3294 - protein, 610 aa, Contarinia nasturtii
MKRKRDNNDSPVYDDEKEEENNFVAIKCGLQTILRPEHAAVVTQILFERSLQMTEVASLASLLILFKVNEALDNEDRQFFLRRDRRQFFFDCFNAVLAENVHNNNSRNPIPPEFRFMVENFSDEQFEWPSKEKLKNGFRYFVKQHITNTKTGLTTWCEDRLESFFRMRCWYRNHNIYGPRFDGIDIRNAKMLAYRSNDLTNGNVERIEKANILLDDLVAIGWRREKCMKFFVKDHWFESLWLFGQIQRQIAAYHSDAAQWNTIHEIFRNNPNFQQPTNNRPRKINSFALVPLCDYHLKCVRLDMRDLYKKLASKLKVVPRFLNTDTNRLNKYPEKYYRDHDRDGLWNLLFDVDKINQLGKRFKQFHHQIVTNSVSVSALYTKPERACNENVHTHADNLVGKKYVIGIDPNEKTWLAITRRNIRKTPDEPAVEENITIPNTRFYWETQQKRREKEAKKLAGWFDIEEKNHLKTYPFGPPSPRNSTWKGYIEYRIKMLRKGMSAYATRKYSRLDFDHYMKSNQVNDNIAVTVTNNEPSIIIFGASEMPPNRPFGLKRRKRCPGSRKFLVSVKKLGHSVVKMEDEWGTSQTCANCQERFPANTKPKGQITTRT

SEQ ID NO: 3295 - protein, 259 aa, Contarinia nasturtii
MDFKSYPVIPSPRGSTWKAYILHRIKILRMGMQAYATRKYARLDLDHHIKATKTSDKVAMRVTNNKPSWIWIGAGEMAPNRPWGIKKRKRCPGTRKLATSFKKQEHTKVSFQDEWGTSITCANCHERFPRETKNHRFKICRNCIPKPIVGLPPIIVTNLSRQELKKERIVERAINPDRENIERLVPKIKVIFKTWSLTREYHELGDAAPEDMIEHVVIWHRDIVAAKNILFKGMCRLFGIPLPDSLKRPDNPHHANNVN

SEQ ID NO: 3296 - protein, 767 aa, Contarinia nasturtii
MRLTTIVRPEYHDVVIHWIEKKSVMSTKISVLASLLFLDKVKSAQSNRQWDFFTNKMYVVKGKLVEKNRAEDVIERCFYAVLQKNKENEDMEPHIRHFVEQGLSRDNQFAWPNNNYFGNIMKSLCQSYTRQLKTNQTTHAKKRLRNYLQMRAWQFNAVSTGLRFDKKDVDNAIDWAIRRYDAIRDTHQNAPLKRYKRKLLLDMVRAIVEEVGGLANYDNIKQFSKGKYWFKATAMWLVMQSEIDEFHNWAQDNNVTIPKIKNLSVVPLPDYQRKAVFMCNDVFYRMLAEEKLLPKVEGKQVTENFIRENKEHFWNQIFDFDKINRILKKNKEFHFTIVSNGESVSVMYKLSKQHLQRLLDDDIVRKRYLDGTFVYELGIDPGMKTWNATVRRTISTRKEVNLKTSSKKYHWLTKYKMRDKKAKRWTKQFTLDEQNDRNNRQLYQRMPSPLGTLWTDYICHRIKMLKKGMDVYTTPKYARLKFDKYVESNSTIDKLCGTLVNHQAALIHSPNSPIRIKKHVRCPGTRKLLKGFRKRGNCVVRKVDEYFTSQTCAKCGGRFDPNTKSNRFKVCENCAPVPNSIMANFLPSKIMAQLSKRRLKYNKVYIEESLVVFLARGEMTEHDFDIIADRLLSKVAVYPKKWQVNAVSGVLEYADVKVDQQPHAVDDENAAEIDGEVAQQPCTVDDDCVTEIDDKQQPMIVHQTTWDRNIVAAKCILIKGMYIRNGHLHIIDVLCLYIGHCNLFGLDIPLTLHRPRRQQAVQNNQQP

SEQ ID NO: 3297 - protein, 686 aa, Contarinia nasturtii
MTRCYILGALNLHYFTSDHFKRSTDEQIEAFYTQFVDNFFFRDWFYGVQFIEHAFNDARESGYRLCYGIWYYCQKYGVRAPVIGGFGNVVEYAVQMFYTNYKNNICMHAHSRIRKFFTHQNASKAQIDDTMDFLFKQNSNCVPDLDLMWELENTLKPIRFDDGKGYFFAMESNWFKYIPIFLNLQQYIRNHERERKAALKRGERTELREYRNFTVVPTSSFERHYIRIDRRVFYRMLRQIECPHRLFRNKNGGPKQEEDIKNKEWDVLWRLYFDIDSIEREPRNKNDGHATIKFDNSIQTDGVGMSFLMERTKFIIEKDDEERMKETQEMLLKSQQVYGLDPGLRLVIGGVRINNFNDRNNRTETIIRLTSGQYQDMINSSRRNKWRKKLTTEIDEKMRLHRESFDEQPGPRAEDHKSYADHILRHFEEKFTAYTQYEYALQAFLQYIDTNRALDAYATKLIDGKQTFIFVGDRFIAADSPARGYIRSKVRDLFEKLKRRRKCTVVEADEFRTTKLCSLCFRELEKPTKRGKVKEKYRYLTCHGCEPLCGENVLGKAQGPIESRKSNRKLTQQRKHRPRTDGPRMASKFRKYEEKTQIGRTITWNRDANAGRNILYKGWCAVMNIELHPAFQRNVEEEEENAGEGDPPPAPPARARQSRRAASNQNQQTTQRTLRSHLDQARSSRP

SEQ ID NO: 3298 - protein, 770 aa, Contarinia nasturtii
MKRRRAKINSAFKKNTAKLNDNEELRSIKLSAPSVFKSEYSEALTEHFFHKCYNGTVICYLGSTLFLYVVNLAADNDDRQYFIDSDGKNVIRECFAAVSRENLENPKQPKIPRGFLEMIADDQFEWPSRYQMGNAFEYLNQQYLSNVTTNLTTHLDNILESFLQMIRYQLNEDPNRLIKFDGIDIRNAKNNLMFNQDCTGGDQHRTNKMNELYEQVAVRCLPSFRERLSMIEYIEKKWFESLFFFIFIQREISIFLEEHHDLVQLWLRHQRHPLFYCKPSKPLPPKIRNFTVIPICDSQLKHIKFDQVDLMSLLAQWKVVPKIFNNDDGGHNMYSRNYYKENEDEAWAILFNMDKINEIKKPNQNFHHMIVCDSVSASVLYRTPKPEIENTELHRQRIKQKLENNEYKYIVAIDPGMKTYLAGIRRNIEDRTEENFKISSKSYHWGAGQKVRDKMGKLMTARFTQREQLDRESYPSIPSPRGIRWRNYVRHRLTMVKDAVAAYARRRYARLSFDKYIGSQGEKDWLAKVITKNEPSLINIGAVDMAPNSPIGIKKGKRCPGTRNLQCSVKKLGHSDVHKVNEDFTSQHCANCQKKFPIQTQKYRFKVCRNCTRDAPIPQEIEPYISLPRLIVTKKSQRRKKKDSCVKKLIARGIMDPANQPAEFQPGRLESKKMYFLKNWLLNPVNAIQMGGDADKYPEQQQQQQHQKRFCTVWHRDIVAARCIMYKGLCYIFNLEMHNSYVRAPAPPRPPLRRGQPARRRANANVVPDQ

SEQ ID NO: 3299 - protein, 741 aa, Contarinia nasturtii
MSGRKRNHESAFKPRKKIKIKEHQTIKKSARKGLKVNLPINTGKFAQLIDVYVLEMTRCYILGALNLHYFTSDHFKRSTDEQIEAFYTQFVDKNLFRDWFYGVQFIEHAFNDARESGYRLYYGIWYYCQKYGVRAPVIGGFGNVVEYAVQMFYTNYKNNICMHAHSRIRKFFTHQNASKAQIDDTMDFLFKRNSNCVPDLNLMWELENTSKPIRFDDGKGYFFAMESNWFKYIPIFLNLQQYIRNHERERKAALKRGERTELREYRNFTVLPTSSFERHYIRIDRRVFYRMLRQIECPHRLFRNKNGGPKQEEDIKNKEWDVLWRLYFDIDSIEREPRNKNDGHATIKFDNSIQTDGVGMSFLMERTKFIIEKDDEERMKETQEMLLKSQQVYGLDPGLRLVIGGVRINNFNDRNNRTETIIRLTSGQYQDMINSSRRNKWRKKLTIEIDEKMRLHRESFDEQPGSRAEDHKSYADHILRHFEEEFTAYTQYEYALQAFLQYIDTNRALDAYATKLIDGKQTFIFVGDRFIAADSPARGYIRSKVRDLFEKLKRRRKYTVVEVDEFRTTKLCSLCFRELEKPTKRGKVKEKYRYLTCHGCEPLCGENVLGKAQGPIESRKSNRKLTQQRKHRPRTEGPRMASKFSKYEEKTRIGRTITWNRDANAGRNILYKGWCAVMNIELHPAFQRNVEEEEENAGEGDPPPAPPARARQSRRAASNQNQQTTQRTLRSHLDQARSSRP

SEQ ID NO: 3300 - protein, 773 aa, Contarinia nasturtii
MKRKKEGEYENTQNRTVKQTLNTILRPKFRKSFRILVFTWCLAATRISTLASLLLLYYANKAIDQDECDENTDFFDGNGKEVIYNYFHDVLYGNHQNLPFEFLSIVRRACPRFIWPHRHGIGNAFNAIVDQYIKNVQTNLNTWCKSHIKKFFTMKQYELNRMLRIHSTDEQLITDKDVNHAVSAVVHQYYARTTGIRTHNMYILIAEAEKIGVPVNQKLKKYVEENWFASLRFFLKIQRAIDEFHRNNNYLCSLWEKYRNNRNLPKPSEPAPPKIGNFNAIPICDNQLKHISIDHTQFYFMACKIGALKRRKGKHGKINISYAEYKENPFSCWNYVFDMYKIKKLGKGKEFEFLALTDNVAVSLVYIEPIKPESIGLSWERIRHMFEVLKCFVYEIGIDPGFRTWNATVRRHIETDTEENITVDAREYHWLARYNQREKKGKRYRKEFQEEERAHMESFIFMPSPKGKFVWKFYIETRVAMMDKALAVYSQRKYVRLKFDHYSDSVHASDETAKMLTNGKPTMAYIGASGSAANSPIGIKKRQRCPGTRKLVASFKKLGNVVIKFIDEWNTSQHCAKCINRFDPRTKSHRSKVCHNCLQTGYQVRDGVMILPKVIITKMSKRQMQRLRKRKRLEQAAQPNNVVQPIVAYPNPPQPRLVPKIVVLFKMELNDAGEWVYVAMQTKTVWDRDIVAAKCIMYKGHCEVFGEEIHPSLKRPRPPPHVQLPDEPADEDDNWYDEWFYENYDEWYNVADNGEGIWEEDQFGNIIVHVLDN

SEQ ID NO: 3301 - protein, 789 aa, Contarinia nasturtii
MSTTGETTAATAPRKKRYKFQTNAQKEKDADDDVNDNGLFAIKMRLNTILRPEFNHIVKPWIEQKSIMSTKITVLASLLFLDKVKSAQMNRQWEFFKNRTYPAKKGKKKGQLVEKNRGEEVIEQCFYAVLQKNKEGENMEPHFRQFVEELSPENNFAWPKNDYFGNHFKTLCQNHTRCLKTGQKTHCKKKLKNYLRMRAWQFNAVSTGWKFDKKDIDNAVDLMIRGYNAIRDTHQNADFKRHKRTLLTGMVTAIVREVGGPTNDHNIKDFSKGDYWFKATAMWLVMQTEIDEWHNWAQDNNVKIPNIKNLSVVPLPDYQRKAVFMCNDVFYRMLAESKQLPQVDGRQATESYIRQNKEFYWNQVFDLTTINRKLKKNKEFHYTIVSNGESVSIMYRMSKQYEQQMQNDDILRKQFIGGKFAYELGIDPGMKTWNATVRRNIETKKEVNLKTSSKKYHWLAKQKTRDVKAKRWTKQFTQEEQDDRNNRQLYQRMPSPLGILWIDYVHHRIKMLKKGMAVYTTPKYTLLQFDKYVESNRTVDKLTGNLVNHKAAIIHMGNAEISPNSCIRIKKHVRAPGTRKLLKGFRKRRNCRVRKTDEWGTSQHCAKCGRRFNPATRSHRFKVCENCGAEPDSIFAEYLPSKIVAQRSKRQLRYNKDEVELYLMRFWAEGLMTEQEFDIAAERLLSKVAVYPKNWQVNTVSGKLEYAQVNADAPYATVQQPYAVDDENELEIEDEQLLMAVHKTSWDRDIVAAKCILIKGHCELFGWDIPAGLERRSPRQPAVQPNQQP

SEQ ID NO: 3302 - protein, 545 aa, Contarinia nasturtii
MVNDLNVFPEIDLHDLTTDEKHWFKAMPMFLSMQREIEEYNLEWPYQHRSKRKKRKRKKSKRRPKRKQMLDDPNFRPFIRNLVVVPMCDFRRKHYKIDCSSMHQVLSSQELLPKVEVENKNGTTSMVILPQKDFNAARDHWWNQYFYMRKIRRFVRGKKKFDFSINTDGIAVSLQYSAKKKTNSTEYDRSRIVEMILDGKFENFAGVDTGLKSWNTTVTHNIITGTETNFVMSSKQFHWKTGQNVRNAKAKRWTKKFTEEERRDRENRELYPVMPSPKGSHWLDYIKHRIKMMKHGICAYSTAKYTRLALDKHIKSSSVVDNWVEKVTDKQPTLFLFGADGEVPPDSRISIKKHVRCPGVRLTLRSIKKRRDCAIELVDEWGSSQTDARCMKRFQNQPKSARFKKCRCIPDARTLLPIKIVSKLGKKDLSEFRLLQRAMNEALEENEPLLSKVKSYYKNWQLNLECSVTWHRDVVAAKNILLKGLWTLLGLPIPDAINRYKARDAVAEAAEVAADVAEAAAAAAANVDNDVEMFEYDQQPADHAV

SEQ ID NO: 3303 - protein, 722 aa, Contarinia nasturtii
MSTKITVLASLLFLDKVKSAQMNRQWEFFKNRTYPAKKGKKKGQLVEKNRGEEVIEQCFYAVLQKNKEGENMEPHFRQFVEELSPENNFAWPKNDYFGNHFKTLCQNHTRCLKTGQTTHCKKKLKNYLRMRAWQFNAVSTGWKFDKKDIDNAVDLMIRGYNAIRDTHQNADFKRHKRTLLTGMVTAIVREVGGPTNDHNIKDFSKGDYWFKATAMWLVMQTEIDEWHNWAQDNNVKIPNIKNLSVVPLPDYQRKAVFMCNDVFYRMLAESKQLPQVDGRQATESYIRQNKEFYWNQVFDLTTINRKLKKNKEFHYTIVSNGESVSIMYRMSKQYEQQMQNDDILRKQFIGGKFAYELGIDPGMKTWNATVRRNIETKKEVNMKTSSKKYHWLAKQKTRDVKAKRWTKQFTQEEQDDRNNRQLYQRMPSPLGILWIDYVHHRIKMLKKGMAVYTTPKYTLLQFDKYVESNRTVDKLTGNLVNHKAAIIHMGNAEISPNSCIRIKKHVRAPGTRKLLKGFRKRRNCRVRKTDEWGTSQHCAKCGRRFNPATRSHRFKVCENCGAEPDSIFAEYLPSKIVAQRSKRQLRYNKDVVELYLMRFWAEGLMTEQEFDIAAERLLSKVAVYPKNWQVNTVSGKLEYAQVNADAPYATVQQPYAVDDENELEIKDEQLLMAVHKTSWDRDIVAAKCILIKGHCELFGWDIPAGLDRRSPRQPAVQPNQQP

SEQ ID NO: 3304 - protein, 763 aa, Contarinia nasturtii
MDDDELDDNQPEESKYVVIKCGLQTILRQQHERIERVGEVVTKMLFERSVQMTEVAALASLSILFILNEALDNDDRAFFLKPHPSLFIADCFRAVLNQHVNNINSQYRILPEFRFMVERNSEEQFRWPDDEKLGNGLRYFYKQYITNIQTNTNTWCEKRLENFFRMRCWYRNRFHNGSRFDNIDIRNAKEFSYRFKNLTNGNNVDPQRVEKFNILMRDLTEIGWSGTVSMKFFAKYRWFESLWLFGQMQRQIEVYHSHAEQWYTIHEMFRNNPNFQEPTINRPPKISSFALIPLCDYHLKNVRLDIKDLYYKIVNELDLVPSFLNTQTNRMNKRNLKYYTQTDRSGLWNMLFDVGKINKLGKSKPFHHQILTDSVSISIMYKKPQRQQRPQRQQRPQQTTQANRGPEKLIGKKYIIGIDPNEKSWLTVVRRNIQKTPDEPAVEENIIIPNQRFHWETQQKKRDKEAKKLAGWFDIEEKEHLKTYPYRPPSPRNSTWKSYIEYRIKMLRKGMAAYATREYARLDLDHHIRSTRVNDQIAVRVTNNKPSLVQFGAWAMKPDRPFGIKKRKRCPGSRKFRVSIKKLGHSEVEMQDEWGTSQTCANCQERFPRHTKDDRFKVCYDCRAKKIDGLPDSVAGLPDIIVSTVNRRVLRRKRAIIKRQIIDGNREAVNEKIRTGRLMSKVKVTYKNWPLNVDDDDVVPQTVTWHRDIVAAKCIMLKGMNQLETEYSLFNVFALNYIGLCRIFDVPLPVSLLRPPDYNNNVN

SEQ ID NO: 3305 - protein, 315 aa, Contarinia nasturtii
MGKRMTARFTQREQLDRESYPSIPSPRGIRWRNYVRHRLTMVKDAVAAYARRRYARLSFDKYIGSQGEKDWLAKVITKNEPSLINIGAVDMAPNSPIGIKKGKRCPGTRHLQCSVKKLGHSDVHKVNEDFTSQHCANCQKKFPIQTQKYRFKVCHCTRDAPIPQEIEPYISLPRLIVTKKSRRRKKKDSCVKKLIARGIMDPANQPAEFQPGRLESKKMYFLKNWLLNPVNAIQMGGDADKYPEQQQQQQHQKRFCTVWHRDIVAARCIMYKGLCYIFNLEMHNSYVRAPAPPRPPLRRTQPARRRANANVVPDQ

SEQ ID NO: 3306 - protein, 798 aa, Contarinia nasturtii
MSTTGETSAAQAKKKRYKYQTKKQQEEEAEDENFNDNGLLAIKMRLTTIVRPEYHDVVIHWIEKKSVMSTKISVLASLLFLDKVKSAQNNRQWDFFTNRMYVNQKQKLVEKNRAEDVIERCFYAVLQKNKENEDMEPHIRHFVEQGLSRDNQFAWPNNNYFGNIMKSLCQSYTRQLKTNQTTHAKKRLRNYLQMRAWQFNAVSTGLRFDKKDVDNAIDWAIRRYDAIRDTHQNAPLKRYKRKLLLDMVRAIVEEVGGLANYDNIKQFSKGKYWFKATAMWLVMQSEIDEFHNWAQDNNVTIPKIKNLSVVPLPDYQRKAVFMCNDVFYRMLAEEKLLPKVEGKQVTETFIRENKEHFWNQIFDFDKINRILKKNKEFHYTIVSNGESVSVLYKLSKQHLQRLLDDDIVRKRYLDGTFVYELGIDPGMKTWNATVRRTISTRKEVNLKTSSKKYHWLTKYKIRDKKAKRWTKQFTLDEQNDRNNRQLYQRMPSPLGTLWTDYICHRIKMLKKGMDVYTTPKYARLKFDKYVESNSTIDKLCGTLVNHQAALIHLGNADMSPNSPIRIKKHVRCPGTRKLLKGFRKRGNCVVRKVDEYFTSQTCAKCGGRFDPNTKSNRFKVCENCAPVPNSIMANFLPSKIVAQLSKRRLKYNKVYIEESLAVFLARGEMTEHDFDIIADRLLSKVAVYPKKWQVNAVSGVLEYADVKVDQQPHAVDDENAAEIDGEVAQQPCAVDDECVTEIDDKQQPMIVHQTTWDRDIVAAKCILIKGHCNLFGLDIPLTLQRPRRQQAVQNNQQP

SEQ ID NO: 3307 - protein, 766 aa, Contarinia nasturtii
MDDDELDDNQPEESKYVVIKCGLQTILRQQHERIESVGEVVTKMLFERSVQMTEVAALASLSILFILNEALDNDDRAFFLKPHPSLFIADCFRAVLNQHVNNINSQYRILPEFRFMVERNSEEQFRWPDDEKLGNGLRYFYKQYITNIQTNTNTWCEKRLENFFRMRCWYRNRFHNGSRFDNIDIRNAKEFSYRFKNLTNGNNGNNVDPQRVEKFNILMRDLTEIGWSGTVSMKFFAKYRWFESLWLFGQMQRQIEVYHSHAEQWYTIHEMFRNNPNFQEPTINRPPKISSFALIPLCDYHLKNVRLDIKDLYYKIVNELDLVPSFLNTRTNRMNKRNLKYYTQTDRSGLWNMLFDVGKINKLGKSKPFHHQILTDSVSISIMYKKPQRQQRPQRQQRPQQTTQANRGPEKLIGKKYIIGIDPNEKSWLTVVRRNIQKTPDEPAVEENIIIPNQRFHWETQQKKRDKEAKKLAGWFDIEEKEHLKTYPYRPPSPRNSTWKSYIEYRIKMLRKGMAAYATREYARLDLDHHIRSTRVNDQIAVRVTNNKPSLVQFGAWAMKPDRPFGIKKRKRCPGSRKFRVSIKKLGHSEVEMQDEWGTSQTCANCQERFPRHTKDDRFKVCYDCRAKKIDGLPDSVAGLPDIIVSTVNRRVLRRKRAIIKRQIIDGNREAVNEKIRTGRLMSKVKVTYKNWPLNVDDDDVVPQTVTWHRDIVAAKCIMLKGMNQLETEYSLFNVFALNYIGLCRIFDVPLPVSLLRPPDYNNNVN

SEQ ID NO: 3308 - protein, 459 aa, Contarinia nasturtii
MKHIRIDIHLFYLIARKFGALKLAKGKRGQPINIEKTEYDSNPAIYWDLIFDLPKISKLGNGKEFDFAVATDSVAVSLCFVKPERNRPELDNNTIKEKYNNFEFDYVLGIDPGVRTWNATVRKHVRSGNEEKITIDGPKYHFKAKYGKRKRKSDQWTELLQKQRELDYKRYAFFPSPKGRSHWMCYIAYYVKMMKPAMAVYTTRKFIRLRLDKYIEENRASDKIAASLTKKKSALVFIGAAQIAPNSPIGIKKRLRCPGLRRLLNSFKKLGNCIVRLVDEYNTSQTCAKCFRPFDRRTKSDRYKVCQHCIPSEDESSQWNLPNVIITMKSNRVYQQLRKYAVDFVNRLNAANPDHIPMDSDGLVSKLQVCFKNWQLNTGIWKDDRAPFQLKTVWHRDIVAAKNIMYKGLCTVLGLDIHPQLLRPQNQNAAVQNQAADDEDSSDDEDYVYVLDVSDDDQF

SEQ ID NO: 3309 - protein, 287 aa, Contarinia nasturtii
MCYIAYYVKMMKPAMAVYTTRKFIRLRLDKYIEENRASDKIAASLTKKKSALVFIGAAQIAPNSPIGIKKRLRCPGLRRLLNSFKKLGNCIVRLVDEYNTSQTCAKCFRPFDRRTKSDRYKVCQHCIPSEDESSQWNLPNVIITMKSNRVYQQLRKYAVDFVNRLNAANPDHIPMDSDGLVSKLQVCFKNWQLNTGIWKDDRAPFQLKTVWHRDIVAAKNIMYKGEKISLKLKMFKNVLANNLLFTILFLALCTVLGLDIHPQLLRPQNQNAAVQNQALRLCSRCFR

SEQ ID NO: 3310 - protein, 787 aa, Contarinia nasturtii
MSTTGETTAATAPRKKRYKFQTNAQKEKDADVNDNGLFAIKMRLNTILRPEFNHIVKPWIEQKSIMSTKITVLASLLFLDKVKSAQMNRQWEFFKNRTYPAKKGKEKGQLVEKNRGEEVIEQCFYAVLQKNKEGENMEPHFRQFVEELSPENNFTWPKNDYFGNHFKTLCQNHTRCLKTGQTTHCKKKLKNYLRMRAWQFNAVSTGWKFDKKDIDNAVDLMIRGYNAIRDTHQNADFKRHKRTLLTGMVTAIVREVGGPTNDHNIKDFSKGDYWFKATAMWLVMQTEIDEWHNWAQDNNVKIPNIKNLSVVPLPDYQRKAVFMCNDVFYRMLAESKQLPQVDGRQATESYIRQNKEFYWNQVFDFTTINRKLKKNKEFHYTIVSNGESVSIMYRMSKQYEQQMQNDDILRKQFIGGKFAYELGIDPGMKTWNATVRRNIETKKEVNMKMSSKKYHWLAKQKTRDVKAKRWTKQFTQEEQDDRNNRQLYQRMPSPLGILWIDYVHHRIKMLKKGMAVYTTPKYTLLQFDKYVESNRTVDKLTGNLVNHKAAIIHMGNAEISPNSCIRIKKHVRAPGTRKLLKGFRKRRNCRVRKTDEWGTSQHCAKCGRRFDPATRSHRFKVCENCGAEPDSIFAEYLPSKIVAQRSKRQLRYNKDVVELYLMRFWAEGLMTEQEFDIAAERLLSKVAVYPKNWQVNTVSGKLEYAQVNADAPYATVQQPYAVDDENELEIEDEQLLMAVHKTSWDRDIVAAKCILIKGHCELFGWDIPAGLDRRSPRQPAVQPNQQP

SEQ ID NO: 3311 - protein, 773 aa, Contarinia nasturtii
MRRKRAKNGRSTSLKMTLNQVLREEYRAPFIDQVTYWCLSATMITTLASLLFLFKANKAFDDENVRFFKGESDEYTNDEFNKYVNGVIGECFTSVLQENYHKLPLAFRRTVEQACPDFLCPENWPAREGMGNAFNHLITQYITNVKNNIRVWAFSRIKKFFTLRRYELNLNRQGNLITELDVKRATKIVMFQSRVERNANIDLLLNEAAGIGLPINVHFQNLIRDRWFQSIPIFINIQRQIFDFHAKYEMLKQRWFQYRRDPNNNVMPTTPLPPKIKNFLVVPIHDFDMKHIRIDIHLFYLIARKFGALKLAKGKRGQPINIEKTEYDSNPAIYWDLIFDLPKISKLGNGKEFDFAVATDSVAVSLCFVKPERNTPELDNNTIKEKYNNFEFDYVLGIDPGVRTWNATVRKHVRSGNEENITIDGPKYHFKAKYGKRKRKSDQWTELLQKQRELDYKRYAFFPSPKGRSHWMCYIAYYVKMMKPAMAVYTTRKFIRLRLDKYIEENRASDKIAASLTKKKSALVFIGAAQIAPNSPIGIKKRLRCPGLRRLLNSFKKLGNCIVRLVDEYNTSQTCAKCFRPFDRRTKSDRYKVCQHCIPSEDESSQWNLPNVIITMKSNRVYQQLRKYAVDFVNRLNAANPDHIPMDSDGLVSKLQVCFKNWQLNTGIWKDDRAPFQLKTVWHRDIVAAKNIMYKGEKISLKLKMFKNVLANNLLFTILFLGLCTVLGLDIHPQLLRPQNQNAAVQNQAADDEDSSDDEDYVYVLDVSDDDQF

SEQ ID NO: 3312 - protein, 549 aa, Contarinia nasturtii
MLYDMVNDLNVFPEIDLHDLTTDEKHWFKAMPMFLSMQREIEEYNLEWPHQHRSKRKKRKRKQSKRRPKRKQMLDDLKFRPFIRNLVVVPMCDFRRKHFKIDCSSMHQVLSSQKLLPKVEVENKNGTTSMVILPQKGFNDARDHWWNQYFYMRKIRRFVRGKKKFDFSINTDGIAVSLQYSAKKKTNNTEYDRSRIVEMILDGKFENFAGVDTGLKSWNTTVTHNIITGTETNFVMSSKQFHWQTGQNVRNAKAKRWTKAFIEEERRDRENRELYPVMPSPKGSYWLNYIKHRVKMMKHGICAYSTAKYTRLAFDKHIKSSSVVDNWVDKVTDKQPTLFLFGADGEVPPDSRISIKKYVRCPGVRKTLRSIKKPRNCVIDLVDEWGSSQTDARCMKRFQNQPKSARFKKCRCIPDARTLLPIKIVSKLGKKDLSEFRLLQRAMNEALEENEPLLSKVKSYYKNWQLNLECSVTWHRDVVAAKNILLKGLWTLLGLPIPDAINRYKARDAVAEAAEVAADVAEAAAAAAANVDNDVEMFEYDQQPADHAV

SEQ ID NO: 3313 - protein, 592 aa, Contarinia nasturtii
MRAFELNDYAIKYNYFNNLYGMIEFELPYYDEEDIKNAINYTYRRRNTAIGDVEREMRLGELLDELRWLGAPDDCNIRDFVKEDWFKSIRMWSEIQRDIRNFHFAYEDRRDKPQIKNFVVVPMCTFQRRHIRIDTDALYVILSNAKLVPRKCGKRTRKDGTTNFKNITSNEFRTNKILSWNLFFDVEKILKLVHNKKEFDSQICSDGVSVSLMYKKPKVPPVETTDDEIKAMYDSNELKYAVGCDPGMRTWNASVRRDLHTKEEVNLRISSKRYHWDAKQGRRNAKAERITRLFTFEEQADRNRIAAMIGEMPSPKGPSWRSYIEHRLRVMNDGIETYSTKQYARLGLDKHIESVRAIDKTACKMVHNQPSIFYMGASGSTPANSPIKIKKHVRCPGTRKLLAAIMKRGNCIIRMVDEYMTSQHCPLCFKRFPVATRSHRYKVCVGCVPNPIVGLPRTIVTNVSKRLLQMRRTIERMWREMRDIGDVIAATLRDGPNAGRLVSKKQRFFKTWLPNVANVEIEGAAGAQPTLTTVWHRDIAAAKLILYKGECVVFKRTIHPNVRRPRRVDNNQPLPLYRGQNQNVNNGHLQPQ

SEQ ID NO: 3314 - protein, 757 aa, Contarinia nasturtii
MDDDELDDNQPEESKYVVIKCGLQTILRQQHERIERVGEVVTKMLFERSVQMTEVAALASLSILFILNEALDNDDRAFFLKPHPSLFIADCFRAVLNQHVNNINSRYRILPEFRFMVERNSEEQFRWPDDEKLGNGLRYFYKQYITNIQTNTNTWCEKRLENFFRMRCWYRNRFNNGSRFDNIDIRNAKEFSYRFKNLTNGNNVDPQRVEKFNILMRDLTEIGWSGTVSMKFFAKYRWFESLWLFGQMQRQIEVYHSHAEQWNTIHEMFRNNPNFQEPTINRPPKISSFALIPLCDYHLKNVRLDIKDLYYKIVNELDLVPSFLNTQTNRMNKRNLKYYTQTDRSGLWNMLFDVGKINKLGKSKPFHHQILTDSVSISIMYKKPQRQQRPQQTTQANRGPEKLIGKKYIIGIDPNEKSWLTVVRRNIQKTPDEPAVEENIIIPNQRFHWETQQKKRDKEAKKLAGWFDIEEKEHLKTYPYRPPSPRNSTWKSYIEYRIKMLRKGMAAYATREYARLDLDHHIRSTRVNDQIAVRVTNNKPSLVQFGAWAMKPDRPFGIKKRKRCPGSRKFRVSIKKLGHSEVEMQDEWGTSQTCANCQERFPRHTKDDRFKVCYDCRAKKIDGLPDSVAGLPDIIVSTVNRRVLRRKRAIIKRQIIDGNREAVNEKIRTGRLMSKVKVTYKNWPLNVDDDDVVPQTVTWHRDIVAAKCIMLKGMNQLETEYSLFNVFALNYIGLCRIFDVPLPVSLLRPPDYNNNVN

SEQ ID NO: 3315 - protein, 368 aa, Contarinia nasturtii
MIRRSKNVNTNNNNNNDDAVPNPGQPDPVPPIIQRAYDSGQIERIIGCDPGYREFVGVVRKDLATDNEENFLKSSKEWHHMTGFFERQYKLKRFTGAFEKKCRKLRENREIYEEMPSKKSADYRTYLDYQLDVFNESCEIKYQKRVVRLKFDAYTRTQVALHVLVKQMTKVDRRMSDAEKTVILAFGGAKFASNSPIKGYLRCPHRALQQMAREYVFVLPINEHNTSQKCSRSGRKLKKRRSVPERQSKDRFLVCPNCKPVEDGVFHDPIQWTGRVHRTFKKKHQEWKYRSICTFHRPVPEAEANPNPQPRQKKKRYQKQLEPKTTVIFNRDINAARNMIKKGLYMLNHLPMPNCFRPFRHQLHYYYN

SEQ ID NO: 3316 - protein, 253 aa, Contarinia nasturtii
MMPSPKGSQWLSYIKHRVKMTKHGIEAYSTAKYTRLALDKYIRSNKAIDGFVNKITNKEPTLLFHGADGEVPPDCPIRIKKHVRCPGVRKLMQAYKKRPYIVVVPVDEWGTSQTDARCMCRFQNQPKSAKFKMCRCIPNAITLLPTKIVSKFGKTDTSTYRQLQRTLNGAFEIEEELMSRVKPYYKKWQLDLECTVTWHRDVVAAKNILLKGLWTLLGLPIPAAINRYWNQINADAAVFDDDNDVDISEPEFE

SEQ ID NO: 3317 - protein, 511 aa, Contarinia nasturtii
MNILLYELERIGWQCQKVHNEQLVPVTVNEFVKDNWFQSLWMFGQMQRQIEVFHQYAQQWHAFRRDGLITNNRPPKVNNFALVPLCRFQLKNVRLDMTDMYYLANTVLGVVPSSRNPLTNRMNKYTLDYYLYGHRDELWNLVFDMDKIKQIGKQKRFHSQIITNSVCVSILYEKPAKAWVENSEQATFNNMTYASAIDPNEKTWVAVVRRHINSNIEENIKISNPRFHWQTEQKKRDRKADRLTWWFVEEEQMDFKSYPVIPSPRGSTWKAYILHRIKMLRMGMQAYATRKYARLDLDHHIKATKTSDKVAMRVTNNKPSWIWIGAGEMAPNRPWGIKKRKRCPGTRKLATSFKKQEHTKVSFQDEWGTSITCANCHERFPRETKNHRFKICRNCIPKPIVGLPPIIVTNLSRQELKKERIVERAINPDRENIERLVPKIKVIFKTWSLTREYHELGDAAPEDMIEHVVIWHRDIVAAKNILFKGMCRLFGIPLPDSLKRPDNPHHANNVN

SEQ ID NO: 3318 - protein, 789 aa, Contarinia nasturtii
MSTTGETTAATAPRKKRYKFQTNAQKEKDADDDVNDNGLFAIKMRLNTILRPEFNHIVKPWIEQKSIMSTKITVLASLLFLDKVKSAQMNRQWEFFKNRTYPAKKGKKKGQLVEKNRGEEVIEQCFYAVLQKNKEGENMEPHFRQFVEELSPENNFTWPKNDYFGNHFKTLCQNHTRCLKTGQTTHCKKKLKNYLRMRAWQFNAVSTGWKFDKKDIDNAVDLMIRGYNAIRDTHQNADFKRHKRTLLTGMVTAIVREVGGPTNDHNIKDFSKGDYWFKATAMWLVMQTEIDEWHNWAQDNNVKIPNIKNLSVVPLPDYQRKAVFMCNDVFYRMLAESKQLPQVDGRQATESYIRQNKEFYWNQVFDLTTINRKLKKNKEFHYTIVSNGESVSIMYRMSKQYEQQMQNDDILRKQFIGGKFAYELGIDPGMKTWNATVRRNIETKKEVNMKTSSKKYHWLAKQKTRDVKAKRWTKQFTQEEQDDRNNRQLYQRMPSPLGILWIDYVHHRIKMLKKGMAVYTTPKYTLLQFDKYVESNRTVDKLTGNLVNHKAAIIHMGNAEISPNSCIRIKKHVRAPGTRKLLKGFRKRRNCRVRKTDEWGTSQHCAKCGRRFNPATRSHRFKVCENCGAEPDSIFAEYLPSKIVAQRSKRQLRYNKDDVELYLMRFWAEGLMTEQEFDIAAERLLSKVAVYPKNWQVNTVSGKLEYAQVDADAPYATVQQPYAVDDENELEIEDKQLLMAVHKTSWDRDIVAAKCILIKGHCELFGWDIPAGLDRRSPRQPAVQPNQQP

SEQ ID NO: 3319 - protein, 228 aa, Contarinia nasturtii
MECDCPKNHQYSQRSKYIFFFKVDEYFTSQTCAKCGGRFDPNTKSNRFKVCENCAPVPNSIMANFLPSKIVAQLSKRRLKYNKVYIEESLAVSLARGEMTEHDFDIIADRLLSKVAVYPKKWQVNAVSGVLEYADVKVDQQPHAVDDENAAEIDGEVAQQPCAVDDECVTEIDDKQQPMIVHQTTWDRDIVAAKCILIKGHCNLFGLDIPLTLQRPRRQQAVQNNQQP

SEQ ID NO: 3320 - protein, 720 aa, Contarinia nasturtii
MLFERSVQMTEVAALASLSILFILNEALDNDDRAFFLKPHPSLFIADCFRAVLNQHVNNINSQYRILPEFRFMVERNSEEQFRWPDDEKLGNGLRYFYKQYITNIQTNTNTWCEKRLENFFRMRCWYRNRFHNGSRFDNIDIRNAKEFSYRFKNLTNGNNVDPQRVEKFNILMRDLTEIGWSGTVSMKFFAKYRWFESLWLFGQMQRQIEVYHSHAEQWYTIHEMFRNNPNFQEPTINRPPKISSFALIPLCDYHLKNVRLDITDLYNKIVNELDLVPSFLNTQTNRMNKRNLKYYTQTDRSGLWNMLFDVGKINKLGKSKPFHHQILTDSVSISIMYKKPQRQQRPQRQQRPQQTTQANRGPEKLIGKKYIIGIDPNEKSWLTVVRRNIQKTPDEPAVEENIIIPNQRFHWETQQKKRDKEAKKLAGWFDIEEKEHLKTYPYRPPSPRNSTWKSYIEYRIKMLRKGMAAYATREYARLDLDHHIRSTRVNDQIAVRVTNNKPSLVQFGAWAMKPDRPFGIKKRKRCPGSRKFRVSIKKLGHSEVEMQDEWGTSQTCANCQERFPRHTKDDRFKVCYDCRAKKIDGLPDSVAGLPDIIVSTVNRRVLRRKRAIIKRQIIDGNREAVNEKIRTGRLMSKVKVTYKNWPLNVDDDDVVPQTVTWHRDIVAAKCIMLKGMNQLETEYSLFNVFALNYIGLCRIFDVPLPVSLLRPPDYNNNVN

SEQ ID NO: 3321 - protein, 746 aa, Contarinia nasturtii
MDDDELDDNQPEESKYVVIKCGLQTILRQQHERIERVGEVVTKMLFERSVQMTEVAALASLSILFILNEALDNDDRAFFLKPHPSLFIADCFRAVLNQHVNNIRSQYRILPEFRFMVERNSEEQFRWPDDEKLGNGLRYFYKQYITNIQTNTNTWCEKRLENFFRMRCWYRNRFHNGSRFDNIDIRNAKEFSYRFKNLTNGNNGNNVDPQRVEKFNILMRDLTEIGWSGTVSMKFFAKYRWFESLWLFGQMQRQIEVYHSHAEQWHTIHEMFRNNPNFQEPTINRPPKISSFALIPLCDYHLKNVRLDIKDLYYKIVNELDLVPSFLNTRTNRMNKRNLKYYTQTDRSGLWNMLFDVGEINKLGKSKSFHHQILTDSVSISIMYKKPQRQQRPQRQQRPQQTTQANRGPEKLIGKKYIIGIDPNEKSWLTVVRRNIQKTPDEPAVEENIIIPNQRFHWETKQKKRDKEAKKLAGWFDIEEKEHLKTYPYRPPSPRNSTWKSYIEYRIKMLRKGMAAYATREYARLDLDHHIRSTRVNDQIAVRVTNNKPSLVQFGAWAMKPDRPFGIKKRKRCPGSRKFRVSIKKLGHSEVEMQDEWGTSQTCANCQERFPRHTKDDRFKVCYDCRAKKIDGLPDSVAGLPDIIVSTVNRRVLRRKRAIIKRQIIDGNREAVNEKLRTGRLMSKVKVTYKNWPLNVDDDDVVPQTVTWHRDIVAAKCIMLKGLCRIFDVPLPVSLLRPPDQNNNVN

SEQ ID NO: 3322 - protein, 213 aa, Contarinia nasturtii
MKTNQVNDNIAVTVTNNGPSIIIFGASEMPPNRPFGLKRRKRCPGSRKFLVSVKKLGHSVVKMEDEWGTSQTCANCQERFPANTKPHRFKVCYGCKAKPIAGLPDSVASLPDIIVTTVSKRALQKGRKEIKRRIRNGNYQDVNEIIRNGRFMSKVKVTFKNWPLNVQGDVAAPQTVVWHRDIVAAKCVMLKGLCRMFGILVPDSLRRPPNNVN

SEQ ID NO: 3323 - protein, 318 aa, Contarinia nasturtii
MYLSMQREIEEFNLLRAHQEPPKKRKKRKHRRPKGKKRKWIIKRKQMLDDLEYLPCIRNLVVLPMCDFRRTHFKIDSSSMYQILSSQKLIPKQLTEDGKPSGKNISQTAFNENKDYIWNQYFYMRKIRWFVRRKNKFDFSINSDGIAVSLQYSTKKKETSNTQSGTSRLDIIDMLKAGKFKRLGGTDSGMRNWNTTTIHEIDTCKEINFVKKSKQFHWETHQNVRNAKAKRFTKNFIEKERQDRENRELYAMMPSPKGSQWLSYIKHRVKMTKHGIEAYSTAKYTRLALDKYIRSNKAIDGFVNKITNKEPTLLFHGR

SEQ ID NO: 3324 - protein, 278 aa, Contarinia nasturtii
MDFKSYPVIPSPRGSTWKAYILHRIKMLRMGMQAYATRKYARLDLDHHIKATKTSDKVAMRVTNNKPSWIWIGAGEMAPNRPWGIKKRKRCPGTRKLATSFKKQEHTKVSFQDEWGTSITCANCHERFPRETKNHRFKICRNCIPKPNIPPIIVTNLSRQELKKERIVERAINPDRENIERLVPKIKVIFKTWSLTREYHELGDAAPEDMIEHVVIWHRDIVAAKNILFKGMCRLFGIPLPDSLAMHLFWENCKLNSQPGLSNLHVFELGHVLIYVKT

SEQ ID NO: 3325 - protein, 263 aa, Contarinia nasturtii
MCYIAYYVKMMKPAMAVYTTRKFIRLRLDKYIEENRASDKIAASLTKKKSALVFIGAAQIAPNSPIGIKKRLRCPGLRRLLNSFKKLGNCIVRLVDEYNTSQTCAKCFRPFDRRTKSDRYKVCQHCIPSEDESSQWNLPNVIITMKSNRVYQQLRKYAVDFVNRLNAANPDHIPIDSDGLVSKLQVCFKNWQLNTGIWKDDRAPFQFKTYKGLCTVLGLDIHPQLLRPQNQNAAVQNQAADDEDSSDDEDYVYVLDVSDDDQF

SEQ ID NO: 3326 - protein, 733 aa, Contarinia nasturtii
MDDDELDDNQPEESKYVVIKCGLQTILRQQHERIERVGEAVTKMLFERSVQMTEVAALASLFILFILNEALDNDDRAFFLQPHPSLFIADCFRAVLNQHVNNINSQYRILPEFRFMVERNSEEQFRWPGDEKLGNGLRYFYKQYITNIQTNTNTWCEKRLENFFRMRCWYRNRFNNGSRFDSIDIRNAKEFSYRFKNLNGNNGNNVDPQRVEKFNILMRDLTEIGWSGTVSMKFFAKYRWFESLWLFGQMQRQIEVYHSHAEQWNTIHEMFRNNPNFQEPTINRPPKISSFALIPLCDYHLKNVRLDITDLYNKIVNKLDLVPSFLNTRTNRMNKRKVEYYTQTDRSGLWNMLFDVGKINKLGKSKPFHHQILTDSVSISIMYKKPQRQQRPQQTTQANRGPEKLIGKKYIIGIDPNEKSWLTVVRRNIQKTPDEPAVEENIIIPNQRFHWETQQKKRDKEAKKLAGWFDIEEKKHLKTYPYRPPSPRNSTWKSYIEYRIKMLRKGMAAYATREYARLDLDHNIRSTRVNDQIAVRVTNNKPSLVQFGAWAMKPDRPFGIKKLKRCPGSRKFRVSIKKLGHSEVEMQDEWGTSQTCANCQERFPRHTKDDRFKVCYDCRAKKIDGLPDSVAGLPDIIVSTVNRRVLRRKRAIIKRQIIDGNREAVNEKIRTGRLMSKVKVTYKNWPLNDDDDDVVPQTVTWHRDIVAAKCIMLKGLCRIFDVPLPVSLLRPPD

SEQ ID NO: 3327 - protein, 334 aa, Contarinia nasturtii
MYKKPQRQQRPQRQQRPQQTTQANRGASQHSKNPDEPAVEENIIIPNQRFHWETQQKKRDKEAKKLAGWFDIEEKEHLKTYPYRPLSPRNSTWKSYIEYRIKMLRKGMAAYATREYARLDLDHYIRSTRVNDQIAVCVTNNKPSLVQFGAWAMKPDRPFGIKKRKRCPGSRKFRVSIKKLGHSEVEMQDEWGTSQTCANCQERFPRHTKDDRFKVCYDCRAKKIDGLPDSVAGLPDIIVSTVNRRVLRRKRAIIKRQIIDGNREAVNEKLRTGRLMSKVKVTYKNWPLNVDDDDVVPQTVTWHRDIVAAKCIMLKGLCRIFDVPLPVSLLRPPD

SEQ ID NO: 3328 - protein, 297 aa, Contarinia nasturtii
MPSPLGILWIDYVHHRIKMLKKGMAVYTTPKYTLLQFDKYVESNRTVDKLTGNLVNHKAAIIHMGNAEISPNSCIRIKKHVRAPGTRKLLKGFRKRRSCRVRKTDEWGTSQHCAKCGRRFNPATRSHRFKVCENCGAEPDSIFAEYLPSKIVAQRSKRQLRYNKDEVELYLMRFWAEGLMTEQEFDIAAERLLSKVAVYPKNWQVNTVSGKLEYAQVNADAPYATVQQPYAVDDENELEIEDKQLLMAVHKTSWDRDIVAAKCILIKGHCELFGWDIPAGLDRRSPRQPAVQPNQQP

SEQ ID NO: 3329 - protein, 259 aa, Contarinia nasturtii
MDFKSYPVIPSPRGSTWKAYILHRIKMLRMGLQAYATRKYARLDLDHHIKATKTSDKVAMRVTNNKPSWIWIGAGEMAPNRPWGIKKRKRCPGTRKLATSFKKQEHTKVSFQDEWGTSITCANCHERFPRETKNHRFKICRNCIPKPIVGLPPIIVTNLSRQELKKERIVERAINPDRENIERLVPKIKVIFKTWSLTREYHELGDAAPEDMIEHVVIWHRDIVAAKNILFKGMCRLFGIPLPDSLKRPDNPHHANNVN

SEQ ID NO: 3330 - protein, 702 aa, Contarinia nasturtii
MSTTGETTAATAPRKKRYKFQTNAQKEKDADDDVNDNGLFAIKMRLNTILRPEFNHIVKPWIEQKSIMSTKITVLASLLFLDKVKSAQMNRQWEFFKNRTYPAKKGKKKGQLVEKNRGEEVIQQCFYAVLQKNKEGENMEPHFRQFVEELSPENNFAWPKNDYFGNHFKTLCQNHTRCLKTGQTTHCKKKLKNYLRMRAWQFNSVSTGWKFDKKDIDNAVDLMIRGYNAIRDTHQNADFKRHKRTLLTGMVTAIVREVGGPTNDHNIKDFSKGDYWFKATAMWLVMQTEIDEWHNWAQDNNVKIPNIKNLSVVPLPDYQRKAVFMCNDVFYRMLAESKQLPQVDGRQATESYIRQNKEFYWNQVFDFTTINRKLKKNKEFHYTIVSNGESVSIMYRMSKQHKQQMQNDDILRKQFIGGKFAYELGIDPGMKTWNATVRRNIKTKKEVNMKTSSKKYHWLAKQKTRDVKAKRWTKQFTQEEQDDRNNRQLYQRMPSPLGILWIDYVHHRIKMLKKGMAVYTTPKYTLLQFDKYVESNRTVDNLTGNLVNHKAAIIHMGNAEISPNSCIRIKKHVRAPGTRKLLKGFRKRRNCRVRKTDEWGTSQHCAKCGRRFNPATRSHRFKVCENCGAEPDSIFAEYLPSKIVAQRSKRQLRYNKDVVELYLMRFWAEGLMTEQEFDIAAERLLSKVAVYPKKLASKHSEW

SEQ ID NO: 3331 - protein, 433 aa, Contarinia nasturtii
MNKRNLKYYTQTDRSGLWNMLFDVGEINKLGKSKSFHHQILTDSVSISIMYKKPQRQQRPQRQQRPQQTTQANRGPEKLIGKKYIIGIDPNEKSWLTVVRRNIQKTPDEPAVEENIIIPNQRFHWETQQKKRDKEAKKLAGWFDIEEKEHLKTYPYRPPSPRNSTWKSYIEYRIKMLRKGMAAYATREYARLDLDHHIRSTRVNDQIAVRVTNNKPSLVQFGAWAMKPDRPFGIKKRKRCPGSRKFRVSIKKLGHSEVEMQDEWGTSQTCANCQERFPRHTKDDRFKVCYDCRAKKIDGLPDSVAGLPDIIVSTVNRRVLRRKRAIIKRQIIDGNREAVNEKIRTGRLMSKVKVTYKNWPLNVDDDDVVPQTVTWHRDIVAAKCIMLKGMNQLETEYSLFNVFALNYIGLCRIFDVPLPVSLLRPPDQNNNGN

SEQ ID NO: 3332 - protein, 522 aa, Contarinia nasturtii
MRCWYRNRFHNGSRFDNIDIRNAKEFSYRFKNLTNGNNVDPQRVEKFNILMRDLTEIGWSGTVSMKFFAKYRWFESLWLFGQMQRQIEVYHSHAEQWYTIHEMFRNNPNFQEPTINRPPKISSFALIPLCDYHLKNVRLDIKDLYYKIILTDSVSISIMYKKPQRQQRPQQQQRPQQTTQANRGPEKLIGKKYIIGIDPNEKSWLTVVRRNIQKTPDEPAVEENIIIPNQRFHWETQQKKRDKEAKKLAGWFDIEEKEHLKTYPYRPPSPRNSTWKSYIEYRIKMLRKGMAAYATREYARLDLDHYIRSTRVNDQIAVCVTNNKPSLVQFGAWAMKPDRPFGIKKRKRCPGSRKFRVSIKKLGHSEVEMQDEWGTSQTCANCQERFPRHTKDDRFKVCYDCRAKKIDGLPDSVAGLPDIIVSTVNRRVLRRKRAIIKRQIIDGNREAVNEKLRTGRLMSKVKVTYKNWPLNVDDDDVVPQTVTWHRDIVAAKCIMLKGLCRIFDVPLPVSLLRPPDQNNNVN

SEQ ID NO: 3333 - protein, 522 aa, Contarinia nasturtii
MRCWYRNRFHNGSRFDNIDIRNAKEFSYRFKNLTNGNNVDPQRVEKFNILMRDLTEIGWSGTVSMKFFAKYRWFESLWLFGQMQRQIEVYHSHAEQWYTIHEMFRNNPNFQEPTINRPPKISSFALIPLCDYHLKNVRLDITDLYNKIILTDSVSISIMYKKPQRQQRPQRQQRPQQTTQANRGPEKLIGKKYIIGIDPNEKSWLTVVRRNIQKTPDEPAVEENIIIPNQRFHWETQQKKRDKEAKKLAGWFDIEEKEHLKTYPYRPPSPRNSTWKSYIEYRIKMLRKGMAAYATREYARLDLDHHIRSTRVNDQIAVCVTNNKPSLVQFGAWAMKPDRPFGIKKRKRCPGSRKFRVSIKKLGHSEVEMQDEWGTSQTCANCQERFPRHTKDDRFKVCYDCRAKKIDGLPDSVAGLPDIIVSTVNRRVLRRKRAIIKRQIIDGNREAVNEKLRTGRLMSKVKVTYKNWPLNVDDDDVVPQTVTWHRDIVAAKCIMLKGLCRIFDVPLPVSLLRPPDQNNNVN

SEQ ID NO: 3334 - protein, 530 aa, Contarinia nasturtii
MRRKRAKNGRSASLKMTLNQVLREEYRAPFIDQVTYWCLSATMITTLASLLFLFKANKAFDDENVRFFKGESDEYTNDEFNKYVNGVIGECFTSVLQENYHKLPLAFRRTVEQACPDFLRPENWPAREGMGNAFNHLITQYITNVKNNIRVWAFSRIKKFFTLKRYELNLNRQGNLITELDVKRATKIVMFQSRVERNANIDLLLNEAVGIGLPINVHFQNLIRDRWFQTIPIFINIQRQIFDFHAKYEMLKQRWFHYRRDPNNNVMPTTPLPPKIKNFLVIPVHDFDMKHIRIDIHLFYSIASKFGALKLAKGKRGQPINIEKTEYDSNPAIYWDLIFDLPKISKLGNGKEFDFAVATDSVAVSLCFVKPERNTPELDNNTIKEKYNNFEFDYVLGIDPGVRTWNATVRKHVRSGNEENITIDGPKYHFKAKYGKRKRKFDQWTELLQKQRELDYKRYAFFPSPKGRSHWMCYIAYYVKMMKPAMAVYTTRKFIRLRLDKYIEENRASDKIAASLTKKSRRSFLLVQLK

SEQ ID NO: 3335 - protein, 718 aa, Contarinia nasturtii
MNVGINNGDFSFFANSGEEKINTCFSQVLAKHNPTNPKPKKTPKPKPKPEPKPKPEPEQPSKTKRKPRGPAKEIPPIDPEFKAIVEGLDEAHRFDWPSNKDFGNGLKHLCNQYIDNNVTNSQTHPDKHITQYLKMKVFQMNTNEAIEEKYLPSDIDCVVKLILKEKVIKVPASDPNKLYRCGVLYDIVNKLNVFPEIDLHDLTTNSKNWFKAVPMYLSMQREIEEFNLLRAHQEPPRKRKKRKRRRPKDKKRKWFIKRKQMLDDLKYLPCIRNLVVVPMCDFRRTHFKIDCSSMYQILSSQKLIPKQLTEDGKPSEKNISQKVFNENKDYIWNQYFYMRKIRWFVRRKKKFDFSINSDGIAVSLQYSTKKTETSNTQSGTSRLDIIDMLKAGKFKRLGGTDSGMRNWNTTTIHEIDTCKEINFVKKSKQFHWETHQNVRNAKAKRFTKNFIEKERQDRENRELYAMMPSPKGSQWLSYIKHRVKMTKHGIEAYSTAKYTRLALDKYIGSNKVIDGFVNKITNKEPTLLFHGADGEVPPDCPIKIKKHVRCPGVRKLMQAYKKRPYIVVVPVDEWGTSQTDARCMCRFQNQPKSAKFKMCRCIPNAITLLPTKIVSKFGKTDTSTYRQLQRTLNGAFEIEEELMSRVKPYYKKWQLDLECTVTWHRDVVAAKNILLKGLWTLLGLPIPAAINRYWNQINADAAVFDDDNDVDISEPEFE

SEQ ID NO: 3336 - protein, 220 aa, Contarinia nasturtii
MFIFVGDRFIAADSPARGYIRSKVRDLFEKLKRRRKCTVVEVDEFRTTKLCSLCFRELEKPTKRGKVKEKYRYLTCHGCEPLCGENVLGKAQGTIESRKSNRKLTQQRKHRPRTDGPRMASKFRKYEEKTRIGRTITWNRDANAGRNILYKGWCAVMNIELHPAFQRHVEEEEENAGGGDPPPAPQARARQSRRAASNQNQQTTQRTLRSHLDQARSSRP

SEQ ID NO: 3337 - protein, 519 aa, Contarinia nasturtii
MPMFLSMQREIEEYNLEWPYQHRSKRKKRKRKKSKRRPKRKQMLDDPNFRPFIRNLVVVPMCDFRRKHYKIDCSSMHQVLSSQELLPKVEVENKNGTTSMVILPQKDFNAARDHWWNQYFYMRKIRRFVRGKKKFDFSINTDGIAVSLQYSAKKKTNNTEYDRSRIVEMILDGKFENFAGVDTGLKSWNTTVTHNIITGTETNFVMSSKQFHWKTGQNVRNAKAKRWTKKFTEEERRDRENRELYPVMPSPKGSHWLDYIKHRIKMMKHGICAYSTAKYTRLALDKHIKSSSVVDNWVEKVTDKQPTLFLFGADGEVPPDSRISIKKHVRCPGVRLTLRSINKRRDCAIELVDEWGSSQTDARCMKRFQNQPKSARFKKCRCIPDARTLLPIKIVSKLGKKDLSEFRLLQRAMNEALEENEPLLSKVKSYYKNWQLNLECSVTWHRDVVAAKNILLKGLWTLLGLPIPDAINRYKARDAVAEAAEVAADVAEAAAAAAANVDNDVEMFEYDQQPADHAV

SEQ ID NO: 3338 - protein, 758 aa, Contarinia nasturtii
MSGRKRKGVGAICGSRPKRRKVGKLPEESGLLAIKVSAATAVKEEYHDIVLPWIAKKSIECTKICELASLLFLHKVKLANEEAILTNNWKFFDEGDGIHIIEGCFFAVLRKYKEENDMVPEFRDIVEALDGDNRFAWPNNDYFGNLMRYLFQQHARNAITNLTTHDDKRLREYLRLLVWEHNVDNLDPNDVFDEHDVNNAVKWAIERYDSTRGDAIRLDKRNRLLTCVRNIGGPKDDNIAKDTKENWFATLPMWLHMQKKIDDYHNWVQNNLENIPADIELPIIKNLSVLPICTHLRKNIKIDADILYRMMCETKIIPLDEYGRQVDGTHVCENKVHYFNEIFDMNKINGILNANKEFHYHVVTDGVSASILYDVSRNTLEQLVSDELIKKRYEDGVYIYELGIDPGMKTWNATVRRHIDSGKEMNFKTSSKKYHYLTKQGVRNRKAKRWTRGFVAFEQNDRNDRTRYPQMPSPKGENWRDYISHRLRIMKKAIDVYTSERYTRLRFDKYIESNRVCDKIAAMLTNGKPCIIFLGAANISPNSPIKIKKNIRCPGNRKLIKSFKKMLGNVVKMVNEFRTSRLCARCFEPFPLETLGHRFKVCEWCVPDNNDWPEGLKLPEKIVTMKSKRMLLSERQELRDAMVANPNQAVGFVSKVICYRKNWRQNAAYDAVNNVAQLPGIIRDENVIDFTEDYMLLDDDFYVAEEEDYLAVLNTIWHRDIAAAKLIMYKGHCGLFGFELHRNFTVERLVYPRWIRIH

SEQ ID NO: 3339 - protein, 230 aa, Contarinia nasturtii
MGMQAYATRKYARLDLDHHIKATKTSDKVAMRVTNNKPSWIWIGAGEMAPNRPWGIKKRKRCPGTRKLATSFKKQEHTKVSFQDEWGTSITCANCHERFPRETKNHRFKICRNCIPKPIVGQPPIIVTNLSRQELKKERIVERAINPDRENIERLVPKIKVIFKTWSLTREYHELGDAAPEDMIEHVVIWHRDIVAAKNILFKGMCRLFGIPLPDSLKRPDNPHHANNVN

SEQ ID NO: 3340 - protein, 789 aa, Contarinia nasturtii
MSTTGETTAATAPRKKRYKFQTNAQKEKDADDDVNDNGLFAIKMRLNTILRPEFNHIVKPWIEQKSIMSTKITVLASLLFLDKVKSAQMNRQWEFFKNRTYPAKKGKKKGQLVEKNRGEEVIEQCFYAVLQKNKEGENMEPHFRQFVEELSPENNFAWPKNDYFGNHFKTLCQNHTRCLKTGQKTHCKKKLKNYLRMRAWQFNAVSTGWKFDKKDIDNAVDLMIRGYNAIRDTHQNADFKRHKRTLLTGMVTAIVREVGGPTNDHNIKDFSKGDYWFKATAMWLVMQTEIDEWHNWAQDNNVKIPNIKNLSVVPLPDYQRKAVFMCNDVFYRMLAESKLLPQVDGRQATESYLRQNKEFYWNQVFDFTTINRKLKKNKEFHYTIVSNGESVSIMYRMSKQYEQQMQNDDILRKQFIGGKFAYELGIDPGMKTWNATVRRNIETKKEVNLKTSSKKYHWLAKQKTRDVKAKRWTKQFTQEEQDDRNNRQLYQRMPSPLGILWIDYVHHRIKMLKKGMAVYTTPKYTLLQFDKYVESNRTVDKLTGNLVNHKAAIIHMGNAEISPNSCIRIKKHVRAPGTRKLLKGFRKRRNCRVRKTDEWGTSQHCAKCGRRFNPATRSHRFKVCENCGAEPDSIFAEYLPSKIVAQRSKRQLRYNKDEVELYLMRFWAEGLMTEQEFDIAAERLLSKVAVYPKNWQVNTVSGKLEYAQVNADAPYATVQQPYAVDDENELEIEDEQLLMAVHKTSWDRDIVAAKCILIKGHCELFGWDIPAGLDRRSPRQPAVQPNQQP

SEQ ID NO: 3341 - protein, 259 aa, Contarinia nasturtii
MSVYSSRKYLRQRLDKYIEENRASDLIAAWLTLKKACLIFIGAAQMAPNSPIGIKKRLRCPGVRRLVRSFNKLGNCIIRYVDEFNTSQTCGKCFRPFDRRTKKDRYKVCQHCIPSGEVTNIWLLGKTVISKKSNREYQQQRQSVKADVQRRNQDPKMSYGLVSKLTISFKKWRLNDDNEWIDDRHPHQLKTVWHRDIVAAVCILYKGLCIVQGIDVHPQLSREHREQQAQNHGNDVENAVNADDSDSDDDYVLEVSDDE

SEQ ID NO: 3342 - protein, 742 aa, Contarinia nasturtii
MGRHKKADPNADQRCIKQGLPSIIRERYRDVIVAIISYLSVKATKIACLASLLFLMKVNEALDDFNYDFFETDEPSTIIHNCFKAVLVDNISNISLMLPGFRNIVDAAHIDWPTNGGFGNGFKYIWEQYYDNVKTNLTTHCESRLRKFFKMRAFELNDYAIKYNYFNNLYGMIEFELPYYDEEDIKNAINYTYRRRNTAIGDVEREMRLGELLDELRWLGAPDDCNIRDFVKEDWFKSIRMWSEIQRDIRNFHFAYEDRRDKPQIKNFVVVPMCTFQRRHIRIDTDALYVILSNAKLVPRKCGKRTRKDGTTNFKNITSNEFRTNKILSWNLFFDVEKILKLVHNKKEFDSQICSDGVSVSLMYKKPKVPPVETTDDEIKAMYDSNELKYAVGCDPGMRTWNASVRRDLHTKEEVNLRISSKRYHWDAKQGRRNAKAERITRLFTFEEQADRNRIAAMIGEMPSPKGPSWRSYIEHRLRVMNDGIETYSTKQYARLGLDKHIESVRAIDKTACKMVHNQPSIFYMGASGSTPANSPIKIKKHVRCPGTRKLLAAIMKRGNCIIRMVDEYMTSQHCPLCFKRFPVATRSHRYKVCVGCVPNPIVGLPRTIVTNVSKRLLQMRRTIERMWREMRDIGDVIAATLRDGPNAGRLVSKKQRFFKTWLPNVANVEIEGAAGAQPTLTTVWHRDIAAAKLILYKGECVVFKRTIHPNVRRPRRVDNNQPLPLYRGQNQNVNNGHLQPQ

SEQ ID NO: 3343 - protein, 617 aa, Contarinia nasturtii
MPPAFRNIVEAHIGEEDFAWPDKECLGNGFNYFYQDHIRNTQTNLNTHCSEHVESFFQMKRWYYNMNINGHQYNGSKFDGIDIRNAKVYATSNKDLTHGDVERTNKMKILLYELERIGWQCQKVHNEQLVPVTVNEFVKDNWFQSLWMFGQMQRQIEVFHQYAKQWHAFRRDGLITNNRPPKVNNFALVPLCRFQLKNVRLDMTDMYYLANTVLGVVPSSRNPLTNRMNKYTLDYYLYGHRDELWNLVFDMDKIKQIGKQKRFHSQIITNSVCVSILYEKPAKAWVENSEQATFNNMTYASAIDPNEKTWVAVVRRHIKSNIEENIKISNPRFHWQTEQKKRDRKADRLTWWFVEEEQMDFKSYPVIPSPRGSTWKAYILHRIKMLRMGMQAYATRKYARLDLDHHIKATKTSDKVAMRVTNNKPSWIWIGAGEMAPNRPWGIKKRKRCPGTRKLATSFKKQEHTKVSFQDEWGTSITCANCHERFPRETKNHRFKICRNCIPKPIVGLPPIIVTNLSRQELKKERIVERAINPDRENIERLVPKIKVIFKTWSLTREYHELGDAAPEDMIEHVVIWHRDIVAAKNILFKGMCRLFGIPLPDSLKRPDNPHHANNVN

SEQ ID NO: 3344 - protein, 498 aa, Contarinia nasturtii
MLKQRWFQYRRDPNNNVMPTTPLPPKIKNFLVIPVHDFDMKHIRIDIHLFYFIARKFGVLKLAKGKRGQPINIEKTEYDSNPAIYWDLIFDLPKISKLGNGKEFDFAVATDSVAVSLCFVKPERNTPELDNNTIKEKYNNFEFDYVLGIDPGVRTWNATVRKHVRSGNEENITIDGPKYHFKAKYGKRKRKSDQWTELLQKQRELDYKRYAFFPSPKGRSHWMCYIAYYVKMMKPAMAVYTTRKFIRLRLDKYIEENRASDKIAASLTKKKSALVFIGAAQIAPNSPIGIKKRLRCPGLRRLLNSFKKLGNCIVRLVDEYNTSQTCAKCFRPFDRRTKSDRYKVCQHCIPSEDESSQWNLPNVIITMKSNRVYQQLRKYAVDFVNRLNAVNPDHIPMDSDGLVSKLQVCFKNWQLNTGIWKDDQAPFQLKTVWHRDIVAAKNIMYKGLFTVLGLDIHPQLLRPQNQNAAVQNQAADDEDSSDDEDYVYVLDVSDDDQF

SEQ ID NO: 3345 - protein, 375 aa, Contarinia nasturtii
MIRRSRNVNTNNNNKNNDDDGDDDNNAVPNPEQPDPVPPIIQRAYDSGQIERIIGCDPGYREFVGVVRKDLATDNEENFLKSSKEWHHMTGFFDRQYKLKRFTGAFEKKCRKLRENREIYEETPSKKSADYHTYLDYQLDVFNESCEIKYQKRVVRLKFDAYTRTQVALHVLVKQMTKVDRRMSDAEKTVILAFGGAKFASNSPIKGYLRCPHRALQQMAREYVFVLPINEHNTSRKCSRSGRKLKKRRSVPERQSKDRFLVCPNCKPVEDGVFHDPIQWTGRVHRTFKKKHQEWKYRSICTFHRPVPEANPNPQPKQKKKRYKKQLEPKTTVIFNRDINAARNMIKKGLYMLDHLPMPNCFRPFGHQLHYYFNN

SEQ ID NO: 3346 - protein, 821 aa, Contarinia nasturtii
MCIRESSFSILNITSVVSINQFNMSTTGETSAAQAKKKRYKYQTKKQQEEEAEDENFNDNGLLAIKMRLTTIVRPEYHDVVIHWIEKKSVMSTKISVLASLLFLDKVKSAQNNRQWDFFTNRMYVNQKGKLVEKNRAEDVIERCFYAVLQKNKENEDMEPHIRHFVEQGLSRDNQFAWPNNNYFGNIMKSLCQSYTRQLKTNQTTHAKKRLRNYLQMRAWQFNAVSTGLRFDKKDVDNAIDWAIRRYDAIRDTHQNAPLKRYKRKLLLDMVRAIVEEVGGLANYDNIKQFSKGKYWFKATAMWLVMQSEIDEFHNWAQDNNVTIPKIKNLSVVPLPDYQRKAVFMCNDVFYRMLAEEKLLPKVEGKQVTETFIRENKEHFWNQIFDFDKINRILKKNKEFHYTIVSNGESVSVLYKLSKQHLQRLLDDDIVRKRYLDGTFVYELGIDPGMKTWNATVRRTISTRKEVNLKTSSKKYHWLTKYKMRDKKAKRWTKQFTLDEQNDRNNRQLYQRMPSPLGTLWTDYICHRIKMLKKGMDVYTTPKYARLKFDKYVESNSTIDKLCGTLVNHQAALIHLGNADMSPNSPIRIKKHVRCPGTRKLLKGFRKRGNCVVRKVDEYFTSQTCAKCGGRFDPNTKSNRFKVCENCAPVPNSIMANFLPSKIVAQFSKRRLKYNKVYIEESLAVFLARGEMTEHDFDIIADRLLSKVAVYPKKWQVNAVSGVLEYADVKVDQQPHAVDDENAAEIDGEVAQQPCAVDDECVTEIDDKQQPMIVHQTTWDRDIVAAKCILIKGHCNLFGLDIPLTLQRPRRQQAVQNNQQP

SEQ ID NO: 3347 - protein, 763 aa, Contarinia nasturtii
MDDDELDDNQPEESKYVVIKCGLQTILRQQHERIERVGEVVTKMLFERSVQMTEVAALASLSILFILNEALDNDDRAFFLKPHPSLFIADCFRAVLNQHVNNIRSQYRILPEFRFMVERNSEEQFRWPDDEKLGNGLRYFYKQYITNIQTNTNTWCEKRLENFFRMRCWYRNRFHNGSRFDNIDIRNAKEFSYRFKNLTNGNNVDPQRVEKFNILMRDLTEIGWSGTVSMKFFAKYRWFESLWLFGQMQRQIEVYHSHAEQWHTIHEMFRNNPNFQEPTINRPPKISSFALIPLCDYHLKNVRLDIKDLYYKIVNELDLVPSFLNTLTNRMNKRNLKYYTQTDRSGLWNMLFDVGEINKLGKSKSFHHQILTDSVSISIMYKKPQRQQRPQRQQRPQQTTQANRGPEKLIGKKYIIGIDPNEKSWLTVVRRNIQKTPDEPAVEENIIIPNQRFHWETKQKKRDKEAKKLAGWFDIEEKEHLKTYPYRPPSPRNSTWKSYIEYRIKMLRKGMAAYATREYARLDLDHHIRSTRVNDQIAVRVTNNKPSLVQFSAWAMKPDRPFGIKKRKRCPGSRKFRVSIKKLGHSEVEMQDEWGTSQTCANCQERFPRHTKDDRFKVCYDCRAKKIDGLPDSVAGLPDIIVSTVNRRVLRRKRAIIKRQIIDGNREAVNEKLRTGRLMSKVKVTYKNWPLNVDDDDVVPQTVTWHRDIVAAKCIMLKGMNQLETEYSLFNVFALNYIGLCRIFDVPLPVSLLRPPDQNNNGN

SEQ ID NO: 3348 - protein, 747 aa, Contarinia nasturtii
MRRKRAKNGRSTSLKMTLNQVLREGYRAPFIDQVTYWCLSATMITTLASLLFLFKANKAFDDENVRFFKGESDEYTNDEFNKYVNGVIGECFTSVLQENYHKLPLAFRRTVEQACPDFLRPENWPAREGMGNAFNHLITQYITNVKNNIKVWAFSRIKKFFTLKRYELNLNRQGNLITELDVKRATKIVMFQSRVERNANIDLLLNEAAGIGLPINVHFQNLIRDRWFQTIPIFINIQRQIFDFHAKYEMLKQRWFQYRRDPNNNVMPTTPLPPKIKNFLVVPIHDFDMKHIRIDIHLFYLIARKFGALKLAKGKRGQPINIEKTEYDSNPAFYWNLIFDMPKISKLGNGKEFDFAVATDSVAVSLCFVKPERNTPELDNNTIKEKYNNFEFDYVLGIDPGVRTWNATVRKHVRSGNEENITIDGPKYHFKAKYGKRKRKSDQWTELLQKQRELDYKRYAFFPSPKGRSHWMCYIAYYVKMMKPAMAVYTTRKFIRLRLDKYIEENRASDKIAASLTKKKSALVFIGAAQIAPNSPIGIKKRLRCPGLRRLLNSFKKLGNCIVRLVDEYNTSQTCAKCFRPFDRRTKSDRYKVCQHCIPSEDESSQWNLPNVIITMKSNRVYQQLRKYAVDFVNRLNAVNPDHIPMDSDGLVSKLQVCFKNWQLNTGIWKDDQAPFQLKTVWHRDIVAAKNIMYKGLCTVLGLDIHPQLLRPQNQNAAVQNQAADDEDSSDDENYVYVLDVSDDDQF

SEQ ID NO: 3349 - protein, 981 aa, Contarinia nasturtii
MSDTSSGDDDDGDEECGVERGNVVSNLANNQPVVRLERMSRDLLRQWNVPRPNVTQQTPARRSKRVQTVPSVARSSQPQDSSDDEPLAAKIRRTTQPSNSVSNLANNQPVVRLQRMSNDLLRQWNVPRPSVTQQTPARRSKRVQTVPSIARPLVSEPPPSRPVLRPAMRDEPSTSRGLTSAPRPSSSRFTQQTPARRSKRVQTVPSVARSLVQSPAIPSTSAAPAGAPLQPLRNERVCRRKGEQSDPNQETFTIKMSLRSFLRNGPNDPTRIGGKRNKDQMDAANADNANNRESDMKRRLMAIIDNAVIEMSDLTRLSAYYVHNELNRLVDSNNDAAIRAEFLAPFDAHKYFFALKHCQANVNCPLNPVFAQYLRDKNSPVQPHINNLTHPISFAYQQSATNMRNNTNMHGNDHIRNYFKRKNIMEQEIDVLMDYLQYEDSEVELYDGTRAHLTEYYDELHPLLPLDRIALYENDPENVVFQDDHLIPRGWLWTTTDDTKYYKHVHELIHLQRWIQQHNVANPNEQWRSFRAIPQSKNKRKHVQFDTEGFIDMTNLLYARREDKVRRSDKPNWDNNDYDTFWNRYVNLRKINRNGQIFGNYFTTDGVTACLRMIRRKRDATSAPTKTSKKNNKKKKGKKQYEKKEPPKCPEDIKAAFRAGQITKIIGDDPGAKVSRSTTSRDLKSTLEWSYKLTAKQWYAKSGARNRKHRLRRYTGVLEDELQQKRNDLHALYGEQPSSKSANHQLYLEYNLDSFMASRQVHYQRRVARLELDKHIRRQVAAHQVARDMTLLEKEIPKAQQTIVYALGDAKIGANSPIKGHCRTPQAFITHTIDRYCRIMAVHEPGTSMLCSRDHDILDQPLHRERPENMNPKDRFLVCNNCEPALNHVLPPPNEWIGKIHHTFRSKHRLELEPNLKHYGHSIANQQYNGRKQTIVFDRDLNASRNMIYKSLCMIQDIPINGDFNRSAAYLRQRAANAAAH

SEQ ID NO: 3350 - protein, 381 aa, Contarinia nasturtii
MYLSMQREIEEFNLLRAHQEPPKKRKKRKRRRPKGKKRQWIIKRKQMLDDLEYLPCIRNLVVVPMCDFRRTHFKIDCSSMYQILSSQKLIPKQLTEDGKPSDKNISQKVFNENKDYIWNQYFYMRKIRWFVRRKKKFDFSINSDGIAVSLQYSTKKKETSNTQSGTSRLDIIDMLKAGKFKRLGGTDSGMRNWNTITIHEIDTCKEINFVKKSKQFHWETHQNVRNAKAKRFTKNFIEKERQDRENRELYAMMPSPKGSQWLSYIKHRVKMTKHGIEAYSTAKYTRLALDKYIGSNKVIDGFVNKITNKEPTLLFHGADGEVPPDCPSKGILLKLLQINEKIKSLTELEKLFRTVVHAYFIRLQAVFQNNIFHTFVMNPFV

SEQ ID NO: 3351 - protein, 276 aa, Contarinia nasturtii
MCYIAYYVKMMKPAMAVYTTRKFIRLRLDKYIEENRASDKIAASLTKKKSALVFIGAAQIASNSPIGIKKRLRCPVLRRLLNSFKKLRNCIVRLVDEYNTSQTCAKCFRPFDRRTKSDRYKVCQHCIPSEDESSQWNLPNVIITMKSNRVYQQLRKYAVDFVNRLNAANPDHIPMDSDGLVSKLQVCFKNWQLNTGIWKDDRAPFQLKTVWHRDIVAAKNIMYKGLCTVLGLDIHPQLLRPQNQNAAVQNQAADDEDSSDDEDYVYFLDVSDDDQF

SEQ ID NO: 3352 - protein, 638 aa, Contarinia nasturtii
MVPEFRDIVEALDGDNRFAWPNNDYFGNLMRYLFQQHARNAITNLTTHDDKRLREYLRLLVWEHNVDNLDPNDVFDEHDVNNAVKWAIERYDSTRGDAIRLDKRNRLLTCVRNIGGPKDDNIAKDTKENWFATLPMWLHMQKKIDDYHNWVQNNLENIPADIELPIIKNLSVLPICTHLRKNIKIDADILYRMMCETKIIPLDEYGRQVDGTHVCENKVHYFNEIFDMNKINGILNANKEFHYHVVTDGVSASILYDVSRNTLEQLVSDELIKKRYEDGVYIYELGIDPGMKTWNATVRRHIDSGKEMNFKTSSKKYHYLTKQGVRNRKAKRWTRGFVAFEQNDRNDRTRYPQMPSPKGENWRDYISHRLRIMKKAIDVYTSERYTRLRFDKYIESNRVCDKIAAMLTNGKPCIIFLGAANISPNSPIKIKKNIRCPGNRKLIKSFKKMLGNVVKMVNEFRTSRLCARCFEPFPLETLGHRFKVCEWCVPDNNDWPEGLKLPEKIVTMKSKRMLLSERQELRDAMVANPNQAVGFVSKVICYRKNWRQNAAYDAVNNVAQLPGIIRDENVIDFTEDYMLLDDDFYVAEEEAILNTIWHRDIAAAKLIMYKGHCGLFGFELHRNFTVERLVYPRWIRIH

SEQ ID NO: 3353 - protein, 549 aa, Contarinia nasturtii
MLYDMVNDLNVFPEIDLHDLTTDEKHWFKAMPMFLSMQREIEEYNLEWPHQHRSKRKKRKRKKSKRRPKRKQMLDDLKFRPFIRNLVVVPMCDFRRKHFKIDCSSMHQVLSSQKLLPKVEVENKNGTTSMVILPQKGFNDARDHWWNQYFYMRKIRRFVRGKKKFDFSINTDGIAVSLQYSAKKKTNNTEYDRSRIVEMILDGKFENFAGVDTGLKSWNTTVTHNIITGTETNFVMSSKQFHWQTGQNVRNAKAKRWTKAFIEEERRDRENRELYPVMPSPKGSYWLNYIKHRVKMMKHGICAYSTAKYTRLALDKHIKSSSVVDNWVEKVTDKQSTLFLFGADGEVPPDSRISIKKHVRCPGVRLTLRSIKKRRDCAIELVDEWGSSQTDARCMKRFQNQPKSARFKKCRCIPDARTLLPIKIVSKLGKKDLSEFRLLQRAMNEALEENEPLLSKVKSYYKNWQLNLECSVTWHRDVVAAKNILLKGLWTLLGLPIPDAINRYKARDAVAEAAEVAADVAEAAAAAAANVDNDVEMFEYDQQPADHAV

SEQ ID NO: 3354 - protein, 741 aa, Contarinia nasturtii
MSGRKRNHESAFKPRKKIKIKEHQTIKKSARKGLKVNLPINTGKFAQLIDVYVLEMTRCYILGALNLHYFTSDHFKRSTDEQIEAFYSQFVDKNFFRDWFYGVQFIEHAFNDARESGYRLCYGIWYYCQKYGVRAPVIGGFGNVVEYAVQMFYTNYKNNICMHAHSRIRKFFTHQNASKAQIDDTMDFLFKQNSNCVPDLDLMWELENTLKPIRFDDGKGYFFAMESNWFKYIPIFLNLQQYIRNHERERKAALKRGERTELREYGNFTVVPTSSFERHYIRIDRRVFYRMLRQIECPHRLFRNKNGGPKQEKDIKNKEWDVLWRLYFDIDSIEREPRNKNDGHATIKFDNSIQTDGVGMSFLMERTKFIIEKDDEERMKETQEMLLKSQQVYGLDPGLRLVIGGVRINNFNDRNNRTETIIRLTSGQYQDMINSSRRNKWRKKLTTEIDEKMRLHRESFDEQPGPRAEDHKSYADHILRHFEEKFTAYTQYEYALQAFLQYIDTNRALDAYATKLIDGKQTFIFVGDRFIAADSPARGYIRSKVRDLFEKLKRRRKCTVVEVDEFRTTKLCSLCFRELEKPTKRGKVKEKYRYLTCHGCEPLCGENVLGKAQGPIESRKSNRKLTQQRKHRPRTDGPRMASKFRKYEEKTRIGRTITWNRDANAGRNILYKGWCAVMNIELHPAFQRHVEEEEENAGGGDPPPAPPARARQSRRAASNQNQQTTQRTLRSHLDQARSSRP

SEQ ID NO: 3355 - protein, 415 aa, Contarinia nasturtii
MKDMYYLANTVLGVVPSSRNPLTNRMNKYTLDYYMNGHRDELWNLVFDMDKIKQIGKQKRFHSQIITNSVCVSILYEKPAKAWVENSEQATFNNMTYASAIDPNEKTWVAVVRRHINSNIEENIKISNPRFHWQTEQKKRDRKADRLTWWFVEEEQMDFKSYPVIPSPRGSTWKAYILHRIKMLRMGMQAYATRKYARLDFDHHIKATKTSDKVAMRVTNNKPSWIWIGAGEMAPNRPWGIKKRKRCPGTRKLATSFKKQEHTKVSFQDEWGTSITCANCHERFPRETKNHRFKICRNCIPKPIVGLPPIIVTNLSRQELKKERIVERAINPDRENIERLVPKIKVIFKTWSLTREYHELGDAAPEDMIEHVVIWHRDIVAAKNILFKGMCRLFGIPLPDSLKRPDNPHHANNVN

SEQ ID NO: 3356 - protein, 202 aa, Contarinia nasturtii
MKPDRPFGIKKRKRCPGSRKFRVSIKKLGHSEVEMQDEWGTSQTCANCQERFPRHTKDDRFKVCYDCRAKKIDGLPDSVAGLPDIIVSTVNRRVLRRKRAIIKRQIIDGNREAVNEKLRTGRLMSKVKVTYKNWPLNVDDDDVVPQTVTWHRDIVAAKCIMLKGMNQLETEYSLFNVFALNYIGLCRIFDVPLPVSLLRPPD

SEQ ID NO: 3357 - protein, 723 aa, Contarinia nasturtii
MSRTRSREDQFNIPLERKDDIKNLVVIKQGVKSIIREEYRDRVIQFLDHRSYKMTLISSLASLLALYKIQEAIDDENRQFFLQNGKTFFIECFNGVLADKVDREELMPPAFRNIVEAHFGVENFEWPDKECLGNGFNYFYQDHIRNNQTNLNTHCSEHVESFFQMKRWYYNMNINGHQYNGSKFDGIDIRNAKVYATSNKDLTHGDVERTNKMNILLYELERIGWQCQKVHNEQLVPVTVNEFVKDNWFQSLWMFGQMQRQIEVFHQYAQQWHAFRRDGLITNNRPPKVNNFALVPLCRFQLKNVRLDMTDMYYLANTVLGVVPSSRNPLTNRMNKYTLDYYLYGHRDELWNLVFDMDKIKQIGKQKRFHSQIITNSVCVSILYEKPAKAWVENSEQATFNNMTYASAIDPNEKTWVAVVRRHINSNIEENIKISNPRFHWQTEQKKRDRKANRLTWWFVEEEQMDFKSYPVIPSPRGSTWKAYILHRIKMLRMGMQAYATRKYARLDLDHHIKATKTSDKVAMRVTNNKPSWIWIGAGEMAPNRPWGIKKRKRCPGTRKLATSFKKQEHTKVSFQDEWGTSITCANCHERFPRETKNHRFKICRNCIPKPIVGLPPIIVTNLSRQELKKERIVERAINPDRENIERLVPKIKVIFKTWSLTREYHELGDAAPEDMIEHVVIWHRDIVAAKNILFKGMCRLFGIPLPDSLKRPDNPHHANNVN

SEQ ID NO: 3358 - protein, 610 aa, Contarinia nasturtii
MDDDELDDNQPEESKYVVIKCGLQTILRQQHERIERVGEVVTKMLFERSVQMTEVAALASLSILFILNEALDNDDRAFFLKPHPSLFIADCFRAVLNQHVNNINSQYRILPEFRFMVERNSEEQFRWPDDEKLGNGLRYFYKQYITNIQTNTNTWCEKRLENFFRMRCWYRNRFHNGSRFDNIDIRNAKEFSYRFKNLTNGNNGNNVDPQRVEKFNILMRDLTEIGWSGTVSMKFFAKYRWFESLWLFGQMQRQIEVYHSHAEQWYTIHEMFRNNPNFQEPTINRPPKISSFALIPLCDYHLKNVRLDIKDLYNKIVNELDLVPSFLNTRTNRMNKRNLKYYTQTDRSGLWNMLFDVGEINKLGKSKSFHHQILTDSVSISIMYKKPQRQQRPQQTTQANRGPEKLIGKKYIIGIDPNEKSWLTVVRRNIQKTPDEPAVEENIIIPNQRFHWETQQKKRDKEAKKLAGWFDIEEKEHLKTYPYRPPSPRNSTWKSYIEYRIKMLRKGMAAYATREYARLDLDHHIRSTRVNDQIAVRVTNNKPSLVQFGAWAMKPDRPFGIKKRKRCPGSRKFRVSIKKLGHSEVEMQDEWGNITNMRELSGTFSKAHKR

SEQ ID NO: 3359 - protein, 498 aa, Contarinia nasturtii
MLKQHWFQYRRDPNNNVMPTTPLPPKIKNFLVVPIHDFDMKHIRIDIHLFYLIARKFGALKLAKGKRGQPINIEKTEYDSNPAIYWDLIFDLPKISKLGNGKEFDFAVATDSVAVSLCFVKPERNRPELDNNTFKEKYNNFEFDYVLGIDPGVRTWNATVRKHVRSGNEENITIDGPKYHFKAKYGKRKRKSDQWTELLQKQRELDYKRYAFFPSPKGRSHWMCYIAYYVKMMKPAMAVYTTRKFIRLRLDKYIEENRASDKIAASLTKKKSALVFIGAAQIAPNSPIGIKKRLRCPGLRRLLNSFKKLGNCIVRLVDEYNTSQTCAKCFRPFDRRTKSDRYKVCQHCIPSEDESSQWNLPNVIITMKSNRVYQQLRKYAVDFVNRLKAVNPDHIPMDSDGLVSKLQVCFKNWQLNTGIWKDDQAPFQLKTVWHRDIVAAKNIMYKGLCTVLGLDIHPQLLRPQNQKAAVQNQAADDEDSSDDEDYVYVLDVSDDDQF

SEQ ID NO: 3360 - protein, 716 aa, Contarinia nasturtii
MNVGINNGDFSFFANSGEEKINTCFSQVLAKHNPKNPKPKKTPKPKPKPQPKPEPEQPSKTKRKPRGPAKEIPPIDPEFKAIVEGLDEVHRFDWPSNKDFGNGLKHLCNQYIDNNVTNSQTHSDKHITQYLKMKVFQMNTNEAIEEKYLPSDIDCVVKLILKEKVIKVPASDPNKLYRCGVLYDIVNKLNVFPEIDLHDLTTSSKNWFKAVPMYLSMQREIEEFNLLRAHQEPPKKRKKRKRRRPKGKKRQWIIKRKQMLDDLEYLPCIRNLVVVPMCDFRRTHFKIDCSSMYQILSSQKLIPKQLTEDGKPSDKNISQKVFNENKDYIWNQYFYMRKIRWFVRRKKKFDFSINSDGIAVSLQYSTKKKETSNTQSGTSRLDIIDMLKAGKFKRLGGTDSGMRNWNTTTIHEIDTCKEINFVKKSKQFHWETHQNVRNAKAKRFTKNFIEKERQDRENRELYAMMPSPKGSQWLSYIKHRVKMTKHGIEAYSTAKYTRLALDKYIGSNKVIDGFVNKITNKEPTLLFHGADGEVPPDCPIRIKKHVRCPGVRKLMQAYKKRPYIVVVPVDEWGTSQTDARCMCRFQNQPKSAKFKMCRCIPNAITLLPTKIVSKFGKTDTSTYRQLQRTLNGAFEIEEELMSRVKPYYKKWQLDLECTVTWHRDVVAAKNILLKGLWTLLGLPIPAAINRYWNQINADAAVFDDDNDVDISEPEFE

SEQ ID NO: 3361 - protein, 490 aa, Contarinia nasturtii
MQRQIEVYHSHAEQWNTIHEMFRNNPNFQEPTINRPPKISSFALIPLCDYHLKNVRLDIKDLYYKIVNELDLVPSFLNTRTNRMNKRNLKYYTQTDRSGLWNMLFDVGKINKLGKSKPFHHQILTDSVSISIMYKKPQRQQRPQRQQRPQQTIQANRGPEKLIGKKYIIGIDPNEKSWLTVVRRNIQKTPDEPAVEENIIIPNQRFHWETQQKKRDKEAKKLAGWFDIEEKEHLKTYPYRPPSPRNSTWKSYIEYRIKMLRKGMAAYATREYARLDLDHHIRSTRVNDQIAVRVTNNKPSLVQFGAWTMKPDRPFGIKKRKRCPGSRKFCVIIKKLGHSEVEMQDEWGTSQTCANCQERFPRHTKDDRFKVCYDCRAKKIDGLPDSVAGLPDIIVSMVNRRVLRRKRAIIKRQIIDGNREAVNEKLRTGRLMSKVKVTYKNWPLNVDDDDVVPQTVTWHRDIVAAKCIMLKGLCRIFDVPLSVSLLRPPD

SEQ ID NO: 3362 - protein, 234 aa, Contarinia nasturtii
MRDLYEKLASKLKVVPSSLNTDTRRLNKYPEKYYKDHDRYCTPNQSGRATKMCIYRQTILVGKKYVIGINPNEKTWLAITRCNIPKTPDEPAVEENITIPNTRFYWGTRQKRREKEANKLAGWFDIEEKNHLKSYPFSPPSPRNSTWQWYIEYRIKMLRKGMSAYATRKYSRLDLDHYIKSNYVKYKIAVTVTNNMPSMIIFGASEMAPNQTFGVKKRKRCPGSRKFLVSVKKL

SEQ ID NO: 3363 - protein, 785 aa, Contarinia nasturtii
MANRKYKKLKNNKSGKLKSISVSAPKKPEKEEKIVGLATIKCKFKSIIRKEYRDVIYSAITEKSLEATKIAVLASQLFLFKVQSAMDYNNFGFFEQNGEKLIRKCFYAVLGKNIENCTMEPEFRQFAQNLDDDHRFEWPNNKHFGNAMGDIIDIYENNLITNLNTHPGKRLREYLNMKVYMINSNPYSVFKFQEKDVSACIRLAIYGNDVVIRGMDDVAKRERVQWLMDYIRRICWWDIPNDNLGLFTKKQWFKSLQIWLTMQREIDEFNIDQELREERKEQRQEQRKQRRQKRKQDGQQQSKSPEDNAKNNVPKIKNLTVIPICQFKRKYFPIDTFTLYKILCGLKLMPKNDNGIQLTSKEFQRDKEWYWDKIFDMPKIKRLGKRKKMFHYRIMSDGEGVSLLYDIEREPFKPIDKAAIRKRFVENGPDKIKKLLGIDPNEKTWNATVQRDVETGKEVNIKISSKHYHWIAKQKVRNKKAKRYTKSFTQEEQNDRNNRALYPAMPSPMGKHWLCYVHHRLKMLDKGMEAYASDKYTRLCFDKYVESNSAIDQIAGMLVNYEAAVVYFGAAEISPNLPFHIKKHVRCPGARKMKNAFKKRGDCVIVPTDEYYTSQTCPKCLERFDPRTKSHRFKVCQDCKPHPAAMLPSMIVTQMGTRKLQTFRKIDRIANAEAEANHQNAGPLLSKVVVYRKIWLVNPDSGVLEYADTDAAQQQPSAAEQLNALVAAIEVEFIDFEGRIKRKTVWHRDIAAAKCILIKGHFWLFDLEIPKTLQRPAPAAQNNQY

SEQ ID NO: 3364 - protein, 699 aa, Contarinia nasturtii
MYVNQKGKLVEKNRAEDVIERCFYAVLQKNKENEDMEPHIRHFVEQGLSRDNQFAWPNNNYFGNIMKSLCQSYTRQLKTNQTTHAKKRLRNYLQMRAWQFNAVSTGLRFDKKDVDNAIDWAIRRYDAIRDTHQNAPLKRYKRKLLLDMVRAIVEEVGGLANYDNIKQFSKGKYWFKATAMWLVMQSEIDEFHNWAQDNNVTIPKIKNLSVVPLPDYQRKAVFMCNDVFYRMLAEEKLLPKVEGKQVTETFIRENKEHFWNQIFDFDKINRILKKNKEFHYTIVSNGESVSVLYKLSKQHLQRLLDDDIVRKRYLDGTFVYELGIDPGMKTWNATVRRTISTRKEVNLKTSSKKYHWLTKYKMRDKKAKRWTKQFTLDEQNDRNNRQLYQRMPSPLGTLWTDYICHRIKMLKKGMDVYTTPKYARLKFDKYVESNSTIDKLCGTLVNHQAALIHLGNADMSPNSPIRIKKHVRCPGTRKLLKGFRKRGNCVVRKVDEYFTSQTCAKYGGRFDPNTKSNRFKVCENCAPVPNSIMANFLPSKIVAQLSKRRLKYNKVYIEESLAVFLARGEMTEHDFDIIADRLLSKVAVYPKKWQVNAVSGVLEYADVKVDQQPHAVDDENAAEIDGDVAQQPCAVDDECVTEIDDKQQPMIVHQTTWDRDIVAAKCILIKGHCNLFGVDIPLTLQRPRRQQAVQNNQQP

SEQ ID NO: 3365 - protein, 742 aa, Contarinia nasturtii
MGRHKKADPNADQRCIKQGLPSIIRERYRDVIVAIISYLSVKATKIACLASLLFLMKVNEALDDFNYDFFETDEPSTIIHNCFKAVLVDNIGNISLMLPGFRNIVDAAHIDWPTNGGFGNGFKYIWEQYYDNVKTNLTTHCESRLRKFFKMRAFELNDYAIKYNYFNNLYGMIEFELPYYDEEDIKNAINYTYRRRNTAIGDVEREMRLGELLDELRWLGAPDDCNIRDFVKEDWFKSIRMWSEIQRDIRNFHFAYEDRRDKPQIKNFVVVPMCTFQRRHIRIDTDALYVILSNAKLVPRKCGKRTRKDGTTNFKNITSNEFRTNKILSWNLFFDVEKILKLVHNKKEFDSQICSDGVSVSLLYKKPKVPPVETTDDEIKAMYDSNELKYAVGCDPGMRTWNASVRRDLHTKEEVNLRISSKRYHWDAKQGRRNAKAERITRLFTFEEQADRNRIAAMIGEMPSPKGPSWRSYIEHRLRVMNDGIETYSTKQYARLGLDKHIESVRAIDKTACKMVHNQPSIFYMGASGSTPANSPIKIKKHVRCPGTRKLLAAIMKRGNCIIRMVDEYMTSQHCPLCFKRFPQETRRDRYKTCVGCVPNPIVGLPRTIVTNVSKRLLQMRRTIERMWREMRDIGDVIAATLRDGPNAGRLVSKKQRFFKTWLPNVANVEIEGAAGAQPTLTTVWHRDIAAAKLILYKGECVVFKRTIHPNVRRPRRVDNNQPLPLYRGQNQNVNNGHLQPQ

SEQ ID NO: 3366 - protein, 321 aa, Contarinia nasturtii
MTYASAIDPNEKTWVAVVRRHIKSNIEENIKISNPRFHWQTEQKKRDRKADRLTWWFVEEEQMDFKSYPVIPSPRGSTWKAYILHRIKMLRMGMQAYATRKYARLDLDHHIKATKTSDKVAMRVTNNKPSWIWIGAGEMAPNRPWGIKKRKRCPGTRKLATSFKKQEHTKVSFQDEWGTSITCANCHERFPRETKNHRFKICRNCIPKPIVGLPPIIVTNLSRQELKKERIVERAINPDRENIERLVPKIKVIFKTWSLTREYHELGDAAPEDMIEHVVIWHRDIVAAKNILFKGMCRLFGIPLPDSLKRPDNPHHANNVN

SEQ ID NO: 3367 - protein, 321 aa, Contarinia nasturtii
MTYASAIDPNEKTWVAVVRRHINSNIEENIKISNPRFHWQTEQKKRDRKADRLTWWFVEEEQMDFKSYPVIPSPRGSTWKAYILHRIKMLRMGMQAYATRKYARLDLDHHIKATKTSDKVAMRVTNNKPSWIWIGAGEMAPNRPWGIKKRKRCPGTRKLATSFKKQEHTKVSFQDEWGTSITCANCHERFPRETKNHRFKICRNCIPKPIVGLPPIIVTNLSRQELKKERIVERAINPDRENIERLVPKIKVIFKTWSLTREYHELGDAAPEDMIEHVVIWHRDIVAAKNILFKGMCRLFGIPLPNSLKRPDNPHHANNVN

SEQ ID NO: 3368 - protein, 634 aa, Contarinia nasturtii
MRRKRAKNGRSTSLKMTLNQVLREEYRAPFIDQVTYWCLSATMITTLASLLFLFKANKAFDDENVRFFKGESDEYTNDQFNKYVNGVIGECFTSVLQENYHKLPLAFRRTVEQACPDFLRPENWPAREGMGNAFNHLITQYITNVKNNIKVWAFSRIKKFFTLKRYELNLNRQGNLITELDVKRATKIVMFQSRVERNANIDLLLNEAAGIGLPINVHFQNLIRDRWFQTIPIFINIQRQIFDFHAKYEMLKQRWFQYRRDPNNNVMPTTPLPPKIKNFLVVPIHDFDMKHIRIDIHLFYLIARKFGALKLAKGKRGQPINIEKTEYDSNPAFYWNLIFDMPKISKLGNGKEFDFAVATDSVAVSLCFVKPERNTPELDNNTIKEKYNNFEFDYVLGIDPGVRTWNATVRKHVRSGNEENITIDGPKYHFKAKYGKRKRKSDQWTELLQKQRELDYKRYAFFPSPKGRSHWMCYIAYYVKMMKPAMAVYTTRKFIRLRLDKYIEENRASDKIAASLTKKKSALVFIGAAQIAPNSPIGIKKRLRCPGLRRLLNSFKKLGNCIVRLVDEYNTSQTCAKCFRPFDRRTKSDRYKVCQHCIPSEDESSQWNLPNVIITQVSIIHFSKSVHALLTLFV

SEQ ID NO: 3369 - protein, 742 aa, Contarinia nasturtii
MGRHKKADPNADQRCIKQGLPSIIRERYRDVIVAIISYLSVKATKIACLASLLFLMKVNEALDDFNYDFFETDKPSTIIHNCFKAVLVDNIGNISLMLPGFRNIVDAAHIDWPTNGGFGNGFKYMWEQYYDNVKTNLTTHCESRLRKFFKMRAFELNDYAIKYNYFNNLYGMIEFELPYYDEEDIKNAINYTYRRRNTAIGDVEREMRLGELLDELRWLGAPDDCNIRDFVKEDWFKSIRMWSEIQRDIRNFHFAYEDRRDKPQIKNFVVVPMCTFQRRHIRIDTDALYVILSNAKLVPRKCGKRTRKDGTTNFKNITSNEFRTNKILSWNLFFDVEKILKLVHNKKEFDSQICSDGVSVSLMYKKPKVPPVETTDDEIKAMYDSNELKYAVGCDPGMRTWNASVRRDLHTKEEVNLRISSKRYHWDAKQGRRNAKAERITRLFTFEEQADRNRIAAMIGEMPSPKGPSWRSYIEHRLRVMNDGIETYSTKQYARLGLDKHIESVRAIDKTACKMVYNQPSIFYMGASGSTPANSPIKIKKHVRCPGTRKLLAAIMKRGNCIIRMVDEYMTSQHCPLCFKRFPQETRRDRYKTCVGCVPNPIVGLPRTIVTNVSKRLLQMRRTIERMWREMRDIGDVIAATLRDGPNAGRLVSKKQRFFKTWLPNVANVEIEGAAGAQPTLTTVWHRDIAAAKLILYKGECVVFKRTIHPNVRRPRRVDNNQPLPLYRGQNQNVNNGHLQPQ

SEQ ID NO: 3370 - protein, 468 aa, Contarinia nasturtii
MWIHIQREIQWYHNEYKCRRDAPQIKNFVVVPMCRFQRRHIRIDTDALYTILASVKLVPLKCGLKKRKDKTTNSINITSNEFRRNKILSWNLFFNVEKIQQLVHFKKYFDFQICSDGVSVSMMYKKPKLPPVEMSDAEIMKMYKGNKLKYAIGCDPGMKTWNASVRRDLDTKEEVNLRISSKRYHWDAKQGRRDAKAERITRLFTYDEKADRNRVAATLGTMPSPRETSWRSYIEHRLRVMNDGIETYTCKQYARLGLDKHIDSVRAIDKTACKLTRNQPSIFYMGASGSTPANSPIKIKKHVRCPGTRKLIAAIMKRGNCIIRMVDEYITSQHCPLCFKRFPQETRRDRYKKCVGCVPNPIVGLPRTIVTNVSKRLLQMRRTIERMWREMRDIGDVIAATLRDGPNAGRLVSKKQRFFKTWLPNVAHVEIEGAAGAKPSLTTVWHRDIAAAKLILYKDMQLIEIDTN

SEQ ID NO: 3371 - protein, 415 aa, Contarinia nasturtii
MPRDPWTHAQHNAFWRRFVNLDKINKPSQQFDFSFTTDGCSAHLKMIRRTRNVNTNTNNNNNNDDAVPNPEQPDPVPPIIQRAYDSGQIERIIGCDPGYREFVGVVRKDLATDNEENFLKSSKEWHHMTGFFDRQYKLKRFTGEFEKKCRKLRENREMYEEMPSKKSADYRTYLDYQLDIFNESCEIKYQKRVVRLKFDAYTRTQVALHVLVKQMTKVDRRMSDAEKTVILAFGGAKFASNSPIKGYLRCPHRALQQMAREYVFVLPINEHNTSQKCSRSGRKLKKRRSVPERQSKDRFLVCPNCKPVEDGVFHDPIQWTGRVHRTFKKKHPKWKYRSICTFHRPVPEAEANPNPPPRQKKKRYQKQLERKTTVIFNRDINAARNMIKKGLYMLNHLPMPNCFRPFRHQLHYYYN

SEQ ID NO: 3372 - protein, 549 aa, Contarinia nasturtii
MLYDMVNDLNVFPEIDLHDLTTDEKHWFKAMPMFLSMQREIEEYNLEWPHQHRSKRKKRKRKKSKRRPKRKQMLDDLKFRPFIRNLVVVPMCDFRRKHFKIDCSSMHQVLSSQKLLPKVEVENKNGTTSMVILPQKGFNDARDHWWNQYFYMRKIRRFVRGKKKFDFSINTDGIAVSLQYSAKKKTNNTEYDRSRIVEMILDGKFENFAGVDTGLKSWNTTVTHNIITGTETNFVMSSKQFHWQTGQNVRNAKAKRWTKAFIEEERRDRENRELYPVMPSPKGSYWLNYIKHRVKMMKHGICAYSTAKYTRLALDKHIKSSSVVDNWVEKVTDKQSTLFLFGADGEVPSDSRISIKKYVRCPGVRKTLRSIKKRRNCVIDLVDEWGSSQTDARCMKRFQNQPKSARFKKCRCIPDARTLLPIKIVSKLGKKDLSEFRLLQRAMNEALEENEPLLSKVKSYYKNWQLNLECSVTWHRDVVAAKNILLKGLWTLLGLPIPDAINRYKARDAVAEAAEVAADVAEAAAAAAANVDNDVEMFEYDQQPADHAV

SEQ ID NO: 3373 - protein, 213 aa, Contarinia nasturtii
MESNQVNDNIAVTVTNNEPSIIIFGASEMPPNRPFGLKRRKRCPGSRKFLVSVKKLGHSVVKMEDEWVTSQTCANCQERFPANTKPHRFKVCYGCKAKPIARLPDSFASLPDIIVATVSKRALQKGRKEIKRRIRNGNYQDVEKILRNGRLMSKVKVTYKNWPLNVQGDVASPQTAVWHRDIVAAKCIMLKGLCRMFGVPVPDSLRRPPNNVN

SEQ ID NO: 3374 - protein, 221 aa, Contarinia nasturtii
MVRNEPSIFYMGASGSTPANSPIRIKKYYSIITHNISKCNCIIRMVDEYMTSQHCPLCFKRFPQDTRRDRYKKCVGCVPNPIVGLPRTIVTNVSKRLLQMRRVIERMWREMQEMGDEIAATLRDGPNAARLVSKKQRFFKTWLPNVANVEMLHRDIAAAKPILYKGECVVLKRIIHPNVRRPPRVVNNQHLPLYCGQNQNINNGQSNHNLKISYNNYLLVR

SEQ ID NO: 3375 - protein, 226 aa, Contarinia nasturtii
MCGMVLSDSNIGQQSKYNTYKNHHATHCNAGNLVNHHQSSQILQLTSSVSRTPKPEIENTELHRQRIKQKLENNEYKYIVAIDPGMKTYLAGIRRNIEDRTEENFKISSKSYHWGAGQKVRDKMGKRMTARFTQREQLDRESYPSIPSPRGIRWRNYVRHRLTMVKDAVAAYARRRYARLSFDKYIGSQGEKDCLAKVITKNEPSLINIGAVDMAPNSLIGIKKGK

SEQ ID NO: 3376 - protein, 549 aa, Contarinia nasturtii
MLYDMVNDLNVFPEIDLHDLTTDEKHWFKAMPMFLSMQREIEEYNLEWPHQHRSKRKKRKRKKSKRRPKRKQMLDDLKFRPFIRNLVVVPMCDFRRKHFKIDCSSMHQVLSSQKLLPKVEVENKNGTTSMVILPQKGFNDARDHWWNQYFYMRKIRRFVRGKKKFDFSINTDGIAVSLQYSAKKKTNNTEYDRSRIVEMILDGKFENFAGVDTGLKSWNTTVTHNIITGTETNFVMSSKQFHWQTGQNVRNAKAKRWTKAFIEEERRDRENRELYPVMPSPKGSYWLNYIKHRVKMMKHGICAYSTAKYTRLALDKHIKSSSVVDNWVEKVTDKQSTLFLFGADGEVPSDSRISIKKYVRCPGVRKTLRSIKKRRNCVIDLVDEWGSSQTDARCMKRFQNQPKSARFKKCRCIPDARTLLPIKIVSKLGKKDLSEFRLLQRAMNEALEENEPLLSKVKSYYKNWQLNLECSVTWHRDVVAAKNILLKGLWTLLGLPIPDAINRYKARDAVAEAAEEAADVAEAAAAAAANVDNDVEMFEYDQQPADHAV

SEQ ID NO: 3377 - protein, 664 aa, Contarinia nasturtii
MEPEFRQFAQNLDDDHRFEWPNNKHFGNAMGDIIDIYENNLITNLNTHPGKRLREYLNMKVYKINSNPYSVFKFQEKDVSACIRLAIYGNDVVIRGMDDVAKRERVQWLMDYIRRICWWDIPNNNLGLFTKKQWFKSLQIWLTMQREIDEFNIDQELREERKEQRQEQRKQRRQKRKQDGQQQSNSSEDNAKNNVPKIKNLTVIPICQFKRKYFPIDTFTLYKILCGLKLMPKNDNEIQLTSKEFQRDKEWYWDKIFDMPKIKRLGKRKKMFHYRIMSDGEGVSLLYDIEREPFKPIDKAAIRKRFVENGPDKIKKLLGIDPNEKTLNATVQRDVETGKEVNIKISSKHYHWIAKQKVRNKKAKRYTKSFTQEEQNDRNNRALYPVMPSPMGKHWLCYVHHRLKMLDKGMEAYASDKYTRLCFDKYVESNSAIDQIAGMLVNYEAAVVYFGAAEISPNLPFHIKKHVRCPKMKNAFKKRGDCVIVPTDEYYTSQTCPKCLERFDPRTKSHRFKVCQDCKPHPAAMLPSMIVTQMGTRKLQTFRKIDRIANAEAEANHQNAGPLLSKVVVYRKIWLVNPDSGVLEYADTDAAQQQLSAAEQLNALVAAIEVEFIDFEGRIKRKTVWHRDIAAAKCIPIKGHFWLFDLEIPKTLQRPAPAAQNNQY

SEQ ID NO: 3378 - protein, 545 aa, Contarinia nasturtii
MVNDLNVFPEIDLHDLTTDEKHWFKAMPMFLSMQREIEEYNLEWPYQHRSKRKKRKRKKSKRRPKRKQMLDDPNFRPFIRNLVVVPMCDFRRKHYKIDCSSMHQVLSSQELLPKVEVENKNGTTSMVILPQKDFNAARDHWWNQYFYMRKIRRFVRGKKKFDFSINTDGIAVSLQYSAKKKTNSTEYDRSRIVEMILDGKFENFAGVDTGLKSWNTTVTHNIITGTETNFVMSSKQFHWKTGQNVRNAKAKRWTKKFTEEERRDRENRELYPVMPSPKGSHWLDYIKHRIKMMKHGICAYSTAKYTRLALDKHIKSSSVVDNWVEKVTDKQPTLFLFGADGEVPPDSRISIKKHVRCPGVRLTLRSIKKRRDCAIELVDEWGSSQTDARCMKRFQNQPKSARFKKCRCIPDARTLLPIKIVSKLGKKDLSEFRLLQRAMNEALEENEPLLSKVKSYYKNWQLNLECSVTWHRDVVAAKNILLKGLWTLLGLPIPDAINRYKARDAVAEAAEEAADVAEAAAAAAANVDNDVEMFEYDQQPADHAV

SEQ ID NO: 3379 - protein, 716 aa, Contarinia nasturtii
MNVGINNGDFSFFANSGEEKINTCFSQVLAKHNPTNPKPKKTPKPKPKPEPKPEPEQPSKTKRKPRGPAKEIPPIDPEFKAIVEGLDEVHRFDWPSNKDFGNGLKHLCNQYIDNNVTNSQTHADKHITQYLKMKVFQMNTNEAIEEKYLPSDIDCVVKLILKEKVIKVPASDPNKLYRCGVLYDIVNKLNVFPEIDLHDLTTNSKNWFKAVPMYLSMQREIEEFNLLRAHQEPPKKRKKRKRRRPKGKKRQWIIKRKQMLDDLEYLPCIRNLVVVPMCDFRRTHFRIDCSSMYQILSSQKLIPKQLTEDGKPSDKNISQKVFNENKDYIWNQYFYMRKIRWFVRRKKKFDFSINSDGIAVSLQYSTKKKKTSNTQSGTSRLDIIDMLKAGRFKRLGGTDSGMRNWNTTTIHEIDTCKEINFVKKSKQFHWETHQNVRNAKAKRFTKNFIEKERQDRENRELYAIMPSPKGSQWLSYIKHRVKMTKHGIEAYSTAKYTRLALDKYIGSNKVIDGFVNKITNKEPTLLFHGADGEVPPDCPIRIKKHVRCPGVRKLMQAYKKRPYIVVVPVDEWGTSQTDARCMCRFQNQPKSAKFKMCRCIPNAITLLPTKIVSKFGKTDTSTYRQLQRTLNGAFEIEEELMSRVKPYYKKWQLDLECTVTWHRDVVAAKNILLKGLWTLLGLPIPAAINRYWNQINADAAVFDDDNDVDISEPEFE

SEQ ID NO: 3380 - protein, 276 aa, Contarinia nasturtii
MCYIAYYVKMMKPAMAVYTTRQFIRLRLDKYIEENRASDKIAASLTKKKSALVFIGAAQIAPNSPIGIKKRLRCPGLRRLLNSFKKLGNCIVRLVDEYNTSQTCAKCFRPFDRRTKSDRYKVCQHCIPSEDESSQWNSPNVIITMKSNRVYQQLRKYAVDFVNRLNAANPDHIPMDSDGLVSKLQVCFKNWQLNTGIWKDDRAPFQLKTVWHRDIIAAKNIMYKGLCTVLGLEIHPQLLRPQNQNAAVQNQAADDEDSSDDEDYVYVLDVSDDDQF

SEQ ID NO: 3381 - protein, 723 aa, Contarinia nasturtii
MSRTRSREDQFNIPPERKDDIKNLVVIKQGVKSIIREEYRDRVIQFLDHRSYKMTLISSLASLLALYKIQEAIDDGNQQFFVQNGKTFFIECFNGVLADKVDREELMPPAFRNIVEAHFGVENFEWPDKECLGNGFNYFYQDHIRNNQTNLNTHCSEHVESFFQMKRWYYNMNINGHQYNGSKFDGIDIRNAKVYATSNKDLTHGDVERTNKMNILLYELERIGWQCQKVHNEQLVPVTVNEFVKDNWFQSLWMFGQMQRQIEVFHQYSQQWHAFRRDGLITNNRPPKVNNFALVPLCRFQLKNVRLDMTDMYYLANTVLGVVPSSRNPLTNRMNKYTLDYYLYGHRDELWNLVFDMDKIKQIGKQKRFHSQIITNSVCVSILYEKPAKAWVENSEQATFNNMTYASAIDPNEKTWVAVVRRHIKSNIEENIKISNPRFHWQTEQKKRDRKADRLTWWFVEEEQMDFKSYPVIPSPRGSTWKAYILHRIKMLRMGMQAYATRKYARLDLDHHIKATKTSDKVAMRVTNNKPSWIWIGAGEMAPNRPWGIKKRKRCPGTRKLATSFKKQEHTKVSFQDEWGTSITCANCHERFPRETKNHRFKICRNCIPKPIVGLPPIIVTNLSRQELKKERIVERAINPDRENIERLVPKIKVIFKTWSLTREYHELGDAEPENMIEHVVIWHRDIVAAKNILFKGMCRLFGIPLPDSLKRPDNPHHANNVN

SEQ ID NO: 3382 - protein, 226 aa, Contarinia nasturtii
MASRQVHYQRRVARLELDKHIRRQVAAHQVARDMTLLEKEIPKAQQTIVYALGDAKIGANSPIKGHCRTPQAFITHTIDRYCRIMAVHEPGTSMLCSRDHDILDQPLHRERPENMNPKDRFLVCNNCEPALNHVLPPPNEWIGKIHHTFRSKHRLELEPNLKHYGHSIANQQYNGRKQTIVFDRDLNASRNMIYKSLCMIQDIPINGDFNRSAAYLRQRAANAAAH

SEQ ID NO: 3383 - protein, 367 aa, Contarinia nasturtii
MERHRSQTRSIRQRENITIDGPKYHFKAKYGKRKRKSDQWTELLQKQRELEYKRYAFFPKGRSHWMCYIAYYVKIMNPAMAVYTARKFIRLHLDKYIEENQASDKIAASLTKKKSALVFIGAAQIAPNSPIGIKKGLRCPGLRRLLNSFKKLGNCIVRLVDEYNTSQTCAKCFRPFDRRTKSDRYKVCQHCIPSEDESSQWNLPNVIITMKSNRVYQQLRKYAVDFFNRLNVANPDHIIMDSDGLVSKLQVCFKNWQLNTGIWKDDRAPFQLKTVRHRDIVAAKNIMYKGEKISLKLKMFKNVLANNLLFTILFLGLCTVLGLDIHPQLLRSQNQNAAVQNQAADDGDSSDDEDYVYVLDVSDDDQF

SEQ ID NO: 3384 - protein, 678 aa, Contarinia nasturtii
MSTTGETTAATAPRKKRYKFQTNAQKEKDADDDVNDNGLFAIKMRLNTILRPEFNHIVKPWIEQKSIMSTKITVLASLLFLDKVKSAQMNRQWEFFKNRTYPAKKGKKKGQLVEKNRGEEVIEQCFYAVLQKNKEGENMEPHFRQFVEELSPENNFAWPKNDYFGNHFKTLCQNHTRCLKTGQKTHCKKKLKNYLRMRAWQFNAVSTGWKFDKKDIDNAVDLMIRGYNAIRDTHQNADFKRHKRTLLTGMVTAIVREVGGPTNDHNIKDFSKGDYWFKATAMWLVMQTEIDEWHNWAQDNNVKIPNIKNLSVVPLPDYQRKAVFMCNDVFYRMLAESKQLPQVDGRQATESYIRQNKEFYWNQVFDLTTINRKLKKNKEFHYTIVSNGESVSIMYRMSKQYEQQMQNDDILRKQFMGGKFAYELGIDPGMKTWNATVRRNIETKKEVNLKTSSKKYHWLAKQKTRDVKAKRWTKQFTQEEQDDRNNRQLYQRMPSPLGILWIDYVHHRIKMLKKGMAVYTTPKYTLLQFDKYVESNRTVDKLTGNLVNHKAAIIHMGNAEISPNSCIRIKKHVRAPGTRKLLKGFRKRRNCRVRKTDEWGTSQHCAKCGRRFDPATRSHRFKVCENCGAEPDSIFAEYLPSKIVAQRSKRQLRYNKDVVELYLMRFWAEGLMTEQEFE

SEQ ID NO: 3385 - protein, 766 aa, Contarinia nasturtii
MDDDELDDNQPEESKYVVIKCGLQTILRQQHERIERVGEVVTKMLFERSVQMTEVAALASLSILFILNEALDNDDRAFFLKPHPSLFIADCFRAVLNQHVNNIRSQYRILPEFRFMVERNSEEQFRWPDDEKLGNGLRYFYKQYITNIQTNTNTWCEKRLENFFRMRCWYRNRFHNGSRFDNIDIRNAKEFSYRFKNLTNGNNGNNVDPQRVEKFNILMRDLTEIGWSGTVSMKFFAKYRWFESLWLFGQMQRQIEVYHSHAEQWHTIHEMFRNNPNFQEPTINRPPKISSFALIPLCDYHLKNVRLDIKDLYYKIVNELDLVPSFLNTRTNRMNKRNLKYYTQTDRSGLWNMLFDVGEINKLGKSKSFHHQILTDSVSISIMYKKPQRQQRPQRQQRPQQTTQANRGPEKLIGKKYIIGIDPNEKSWLTVVRRNIQKTPDEPAVEENIIIPNQRFHWETKQKKRDKEAKKLAGWFDIEEKEHLKTYPYRPPSPRNSTWKSYIEYRIKMLRKGMAAYATREYARLDLDHHIRSTRVNDQIAVRVTNNKPSLVQFGAWAMKPDRPFGIKKRKRCPGSRKFRVSIKKLGHSEVEMQDEWGTSQTCANCQERFPRHTKDDRFKVCYDCRAKKIDGLPDSVAGLPDIIVSTVNRRVLRRKRAIIKRQIIDGNREAVNEKLRTGRLMSKVKVTYKNWPLNVDDDDVVPQTVTWHRDIVAAKCIMLKGMNQLETEYSLFNVFALNYIGLCRIFDVPLPVSLLRPPDQNNNVN

SEQ ID NO: 3386 - protein, 789 aa, Contarinia nasturtii
MSTTGETTAATAPRKKRYKFQTNAQKEKDADDDVNDNGLFAIKMRLNTILRPEFNHIVKPWIEQKSIMSTKITVLASLLFLDKVKSAQMNRQWEFFKNRTYPAKKGKKKGQLVEKNRGEEVIEQCFYAVLQKNKEGENMEPHFRQFVEELSPENNFTWPKNDYFGNHFKTLCQNHTRCLKTGQTTHCKKKLKNYLRMRAWQFNAVSTGWKFDKKDIDNAVDLMIRGYNAIRDTHQNADFKRHKRTLLTGMVTAIVREVGGPTNDHNIKDLSKGDYWFKATAMWLVMQTEIDEWHNWAQDNNVKIPNIKNLSVVPLPDYQRKAVFMCNDVFYRMLAESKQLPQVDGRQATESYIRQNKEFYWNQVFDLTTINRKLKKNKEFHYTIVSNGESVSIMYRMSKQYEQQMQNDDILRKQFIGGKFAYELGIDPGMKTWNATVRRNIKTKKEVNMKTSSKKYHWLAKQKTRDVKAKRWTKQFTQEEQDDRNNRQLYQRMPSPLGILWIDYVHHRIKMLKKGMAVYTTPKYTLLQFDKYVESNRTVDKLTGNLVNHKAAIIHMGNAEISPNSCIRIKKHVRAPGTRKLLKGFRKRRNCRVRKTDEWGTSQHCAKCGRRFNPATKSHRFKVCENCGAEPDSIFAEYLPSKIVAQRSKRQLRYNKDVVELYLMRFWAEGLMTEQEFDIAAERLLSKVAVYPKNWQVNTVSGKLEYAQVNADAPYATVQQPYAVDDENELEIEDKQLLMAVHKTSWDRDIVAAKCILIKGHCELFGWDIPAGLDRRSPRQPAVQPNQQP

SEQ ID NO: 3387 - protein, 789 aa, Contarinia nasturtii
MSTTGETTAATAPRKKRYKFQTNAQKEKDADDDVNDNGLFAIKMRLNTILRPEFNHIVKPWIEQKSIMSTKITVLASLLFLDKVKSAQMNRQWEFFKNRTYPAKKGKKKGQLVEKNRGEEVIEQCFYAVLQKNKEGENMEPHFRQFVEELSPENNFAWPKNDYFGNHFKTLCQNHTRCLKTGQKTHCKKKLKNYLRMRAWQFNAVSTGWKFDKKDIDNAVDLMIRGYNAIRDTHQNADFKRHKRTLLTGMVTAIVREVGGPTNDHNIKDFSKGDYWFKATAMWLVMQTEIDEWHNWAQDNNVKIPNIKNLSVVPLPDYQRKAVFMCNDVFYRMLAESKQLPQVDGRQATESYIRQNKEFYWNQVFDLTTINRKLKKNKEFHYTIVSNGESVSIMYRMSKQYEQQMQNDDILRKQFIGGKFAYELGIDPGMKTWNATVRRNIETKKEVNLKTSSKKYHWLAKQKTRDVKAKRWTKQFTQEEQDDRNNRQLYQRMPSPLGILWIDYVHHRIKMLKKGMAVYTTPKYTLLQFDKYVESNRTVDKLTGNLVNHKAAIIHMGNAEISPDSCIRIKKHVRAPGTRKLLKGFRKRRNCRVRKTDEWGTSQHCAKCGRRFNPATRSHRFKVCENCRAEPDSIFAEYLPSKIVAQRSKRQLRYNKDEVELYLMRFWAEGLMTEQEFDIAAERLLSKVAVYPKNWQVNTVSGKLEYAQVNADAPYATVQQPYAVDDENELEIEDKQLLMAVHKTSWDRDIVAAKCILIKGHCELFGWDIPAGLDRRSPRQPAVQPNQQP

SEQ ID NO: 3388 - protein, 548 aa, Contarinia nasturtii
MKVFQMNTNEAIDEKYLPSDIDCVVKLILKEKVIKVPASDPNKLYRCGVLYDIVNKLNVFPEIDLHDLTTNSKNWFKAVPMYLSMQREIEEFNLLRAHQEPPKKRKKRKRRRPKGKKRQWIIKRKQMLDDLEYLPCIRNLVVVPMCDFRRTHFKIDCSSMYQILSSQKLIPKQLTEDGKPSDKNISQKVFNENKDYIWNQYFYMRKIRWFVRRKKKFDFSINSDGIAVSLQYSTKKKETSNTQSGTSRLDIIDMLKAGRFKRLGGTDSGMRNWNTTTIHEIDTCKEINFVKKSKQFHWETHQNVRNAKAKRFTKNFIEKERQDRENRELYAIMPSPKGSQWLSYIKHRVKMTKHGIEAYSTAKYTRLALDKYIGSNKVIDGFVNKITNKEPTLLFHGADGEVPPDCSIKIKKHVRCPGVRKLMQAYKKRPYIVVVPVDEWGTSQTDARCMCRFQNQPKSAKFKMCRCIPNAITLLPTKIVSKFGKTDTSTYRQLQRTLNGAFEIEEELMSRVKPYYKKWQLDLECTVTWHRDVVAAKNILLKGLWTLL

SEQ ID NO: 3389 - protein, 726 aa, Contarinia nasturtii
MSGRKRNHESAFKPRKKIKIKEHQTIKKSARKGLKVNLPINTGKFAQLIDVYVLEMTRCYILGALNLHYFTSDHFKRSTDEQIEAFYTQFVDKKFFRDWFYGVQFIEHAFNDARESGYRLCYGIWYYCQKYGVRAPVIGGFGNVVEYAVQMFYTNYKNNICMHAHSRIRKFFTHQNASKAQIDDTMDFLFKQNSNCVPDLDLMWELENTLKPIRFDDGKGYIRNHERERKAALKRGERTELREYRNFTVVPTSSFERHYIRIDRRVFYRMLRQIECPHRLFRNKNGGPKQEEEIKNKEWDVLWRLYFDIDSIEREPRNKNDGHATIKFDNSIQTDGVGMSFLMERTKFIIEKDDEERMKETQEMLLKSQQVYGLDPGLRLVIGGVRINNFNDRNNRTETIIRLTSGQYQDMINSSRRNKWRKKLTTEIDEKMRLHRESFDEQPGPRAEDHKSYADHILRHFEEKFTAYTQYEYALQAFLQYIDTNRALDAYATKLIDGKQTFIFVGDRFIAADSPARGYIRSKVRDLFEKLKRRRKCTVVEVDEFRTTKLCSLCFRELEKPTKRGKVKEKYRYLTCHGCEPLCGENVLGKAQGPIESRKSNRKLTQQRKHRPRTDGPRMASKFRKYEEKTRIGRTITWNRDANAGRNILYKGWCAVMNIELHPAFQRHVEEEEENAGGGDPPPAPPAPPAPPARARQSRRAASNQNQQTTQRTLRSHLDQARSSRP

SEQ ID NO: 3390 - protein, 545 aa, Contarinia nasturtii
MVNDLNVFPEIDLHDLTTDEKHWFKAMPMFLSMQREIEEYNLEWPYQHRSKRKKRKRKKSKRRPKRKQMLDDPNFRPFIRNLVVVPMCDFRRKHYKIDCSSMHQVLSSQELLPKVEVENKNGTTSMVILPQKDFNAARDHWWNQYFYMRKIRRFVRGKKKFDFSINTDGIAVSLQYSAKKKTNSTEYDRSRIVEMILDGKFENFAGVDTGLKSWNTTVTHNIITGTETNFVMSSKQFHWKTGQNVRNAKAKRWTKKFTEEERRDRENRELYPVMPSPKGSHWLDYIKHRIKMMKHGICAYSTAKYTRLALDKHIKSSSVVDNWVEKVTDKQPTLFLFGADGEVPPDSRISIKKHVRCPGVRLTLRSIKKRRDCAIELVDEWGSSQTDARCMKRFQNQPKSARFKKCRCIPDARTLLPIKIVSKLGKKDLSEFRLLQRAMNEALEENEPLLSKVTSYYKNWQLNLECSVTWHRDVVAAKNILLKGLWTLLGLPIPDAINRYKARDAVAEAAEVAADVAEAAAAAAANVDNDVEMFEYDQQPADHAI

SEQ ID NO: 3391 - protein, 653 aa, Contarinia nasturtii
MIANDQFEWPSRYQMGNAFEYLNQQYLSNVTTNLTTHLDNILENFLQMIRYKLNEDPNRLIKFDGIDIRNAKNNLMFNQDCTGGDQHRTNKMNELYEQVAVRCLPSFRERLSMIEYIEKKWFESLWFFIFIQREISIFLEEHHDLVQLWLRHQRHPLFYCKPSKPLPPKIRNFTVIPICDSKLKHIKFDQDDLMSLLAQWKVVPKIFNNDHGGHNMYSRNYYKENEDEAWVILFNMDKINEIKKPNQQFHHMIVCDSVSASVVYRTPKPEIENTELHRQRIKQKLENNEYKYIVAIDPGMKTYLAGIRRNIEDRTEENFKISSKSYHWGAGRKVRDKMGKRMTARFTQREQLDRESYPSIPSPRGIRWRNYVRHRLTMVKDAVAAYARRCYARLSFDKYIGSQGEKDWLAKVITKNEPSLINIGAVDMAPNSPIGIKKGKRCPGTRHLQCSVKKLGHSDVHKVNEDFTSQHCANCQKKFPIQTQKYRFKVCRNCTRDAPIPQEIEPYISLPRLIVTKKSQRRKKKDSCVKKLIARGIMDPANQPAEFQPGRLESKKMYFLKNWLLNPVNAIQMGGDADKYPEQQKQQQHQKRFCTVWHRDIVAARCIMYKGLCYIFNLEMHNSYVRAPAPPRPPLRRGQPARKRANANVVPDQ

SEQ ID NO: 3392 - protein, 354 aa, Contarinia nasturtii
MSFWMERTKFVVVKDENEIMRETQEKLLKAQQVYGLDPGLRLVIGGVCVTNYNDPNKENRREKLVRLISGQYNHMIGYRKRNKWRKKLTFNIDEKMRIHRESFDEQPSPHSDNIDRYVDHFLRHFNEKFEAYTQYEYALQDFLQYIDTNKTLDNLADWLIDGKETFVFVGENFIAADSEAKGYIRSKVRDLFEKMKRRRNCAVVKVDEFRTTKVCSLCFKDLEFPKKGDRVKMKYRYFTCRGCEPLPEGNKPHGPIDSRKGNHLLTKQRKHRPRPGPRMASKFRRYEEKRTIGRTIKWNRDTNAGRNILYKGRCAVMNEELHPVFQRPTVPIQNQQPIQGTSRSIQDQAQNSRP

SEQ ID NO: 3393 - protein, 245 aa, Contarinia nasturtii
MEWYIEYRIKMLRKGMSAYATRKYSRLDFDYYMKSNQVNDNIAVTVTNNEPSIIVFGASEMPPNRPFGLKRRKRCPGSRKFLVSVKKLGHSVVKMEDEWGTSQTCANCQERFPANTKPHRFKVCYGCKAKPIAGLPDSVASLPDIIVATVSKRALQKGRKEIKRRIRNGNYQDVDEIIRNGRLMSKVKVTYKNWPLNVQGDVAAPQTVVWHRDIVAAKCIMLKGLCRMFGVLVPDSLRRPPNNVN

SEQ ID NO: 3394 - protein, 259 aa, Contarinia nasturtii
MYKKPKVPPVETTDDEIKAMYDSNELKYAVGCDPGMRTWNASVRRDLHTKEEVNLRISSKRYHWDAKQGRRNAKAERITRLFSFEEQADRNRIAAMIGERPSLKGPSWRSYIEHRLRVMNDGIETYSTKQYARLGLDKHIESVRAIDKTACKMVHNQPSIFYMGASGSTPANSPIKIKKHVRCPGTRKLLAAIMKRGNCIIRMVDEYMTSQHCPLCFKRFPQQTRRDRYKTCVGCVPNPIVGLPRTIVTNVSKRLLQMR

SEQ ID NO: 3395 - protein, 285 aa, Contarinia nasturtii
MIGEMPSPKGPSWRSYIEHRLRVMNDGIETYSTKQYARLGLDKHIESVRAIDKTACKMVHNQPSIFYMGASGSTPANSPIKIKKHVRCPGTRKLLAAIMKRGNCIIRMVDEYMTSQHCPLCFKRFPQETRRDRYKKCVGCVPNPIVGLPRTIVTNVSKRLLQMRRTIERMWREMRDIGDVIAATLRDGPNAGRLVSKKQRFFKTWLPNVANVEIEGAAGAQPTLTTVWHRDIAAAKLILYKGECVVFKRTIHPNVRRPRRVDNNQPLPLYRGQNQNVNNGHLQPQ

SEQ ID NO: 3396 - protein, 396 aa, Contarinia nasturtii
MYRMSKQHKQQMQNDDILRKQFIDGKFAYELGIDPGMKTWNATVRRNIETKKEVNMKTSSKKYHWLAKQKTRDVKAKRWTKQFTQEEQDDRNNRQLYQRMPSPLGILWIDYVHHRIKMLKKGMAVYTTPKYTLLQFDKYVESNRTVDKLTGNLVNHKAAIIHMGNAEISPNSCIRIKKHVRAPGTRKLLKGFRKRRNCRVRKTDEWGTSQHCAKCGRRFNPATRSHRFKVCENCGAEPDSIFAEYLPSKIVAQRSKRQLRYNKDEVELYLMRFWAEGLMTEQEFDIAAERLLSKVAVYPKNWQVNTVSGKLEYAQVNADAPYATVQQPYAVDDENELEIEDKQLLMAVHKTSWDRDIVAAKCILIKGHCELFGWDIPAGLDRRSPRQPAVQPNQQP

SEQ ID NO: 3397 - protein, 200 aa, Contarinia nasturtii
MRVTNNKPSWIWIGAGEMAPNRPWGIKKRKRCPGTRKLATSFKKQEHTKVSFQDEWGTSITCANCHERFPRETKNHRFKICRNCIPKPIVGLPPIIVTNLSRQELKKERIVERAINPDRENIERLVPKIKVIFKTWSLTREYHELGDAEPEDMIEHVVIWHRDIVAAKNILFKGMCRLFGIPLPDSLKRPDNPHHANNVN

SEQ ID NO: 3398 - protein, 651 aa, Contarinia nasturtii
MEPHFRQFVEELSPENNFAWPKNDYFGNHFKTLCQNHTRCLKTGQKTHCKKKLKNYLRMRAWQFNAVSTGWKFDKKDIDNAVDLMIRGYNAIRDTHQNADFKRHKRTLLTGMVTAIVREVGGPTNDHNIKDFSKGDYWFKATAMWLVMQTEIDEWHNWAQDNNVKIPNIKNLSVVPLPDYQRKAVFMCNDVFYRMLAESKLLPQVDGRQATESYLRQNKEFYWNQVFDFTTINRKLKKNKEFHYTIVSNGESVSIMYRMSKQYEQQMQNDDILRKQFIGGKFAYELGIDPGMKTWNATVRRNIETKKEVNLKTSSKKYHWLAKQKTRDVKAKRWTKQFTQEEQDDRNNRQLYQRMPSPLGILWIDYVHHRIKMLKKGMAVYTTPKYTLLQFDKYVESNRTVDKLTGNLVNHKAAIIHMGNAEISPNSCIRIKKHVRAPGTRKLLKGFRKRRNCRVRKTDEWGTSQHCAKCGRRFNPATRSHRFKVCENCGAEPDSIFAEYLPSKIVAQRSKRQLRYNKDEVELYLMRFWAEGLMTEQEFDIAAERLLSKVAVYPKNWQVNTVSGKLEYAQVNADAPYATVQQPYAVDDENELEIEDEQLLMAVHKTSWDRDIVAAKCILIKGHCELFGWDIPAGLDRRSPRQPAVQPNQQP

SEQ ID NO: 3399 - protein, 750 aa, Contarinia nasturtii
MRYLFSDEAENPNFYKKKPQSKRPPRKKANDDEAAKRKKRQNEKKVKKPKRKRDPILLTPAIERLLKRIQTDFNPMDFEANRRGYFNKLTTNWYRHVPFFVRLQQYCRARNRERCLMINKQMDEDEKNQPAEVAAAKAKLQAEAAAKIHKTITQNKSKSKSICRPIAEYVPRKRLPGVKYTWVRCAPNLTVYQVIPEARFGHIYIQIDKRGLFEILKRLKNPKEPEMKKNNGSNKRWEQPFNGNKELWDRMWRKYFGISKIERHSAGLTFANRIQTDGNAFVFLMNKEKKTKKKNDATDAETKERLQNILRHCDREVSFDVGDREIIAGQIIDREKDDTGAVKVKSVRNFKISSKQYHWMTKLPQFKKQRDRLVGTLEDDRADDRERIERECENHVQPSSRTIDFKTYADHTLRFFNRAMDVYGSEAYVLTNFLHWIEIHRTIGELVRMIVAQGHGKHTFVFVGKAPFTHANSPCKGYVRTSVRLLFKALEQHPQCTVRYVDEYRTTKLCSRCFNVLENGSRNGRKTTKSRFKVCRQCKPSPEALPDGGSFIYSHKNSKKLKKQKKYRPRYSNEDGRQPKVELKRFNMVDGMLVPAAENAAIVKRPRTHLRRRRLDVIAWKYIRNDDDIGDTTKVRSVTLNRDTNAGRNIRLRGHYELFGIKLPDAFTVDAETQNQHAERRFKQFDENKRKKQQKYQTSKNSNEAEYDSDQSWWSSSSEEDAIDLSNSELSDNSDDSNDSGSGSDDDGEN

SEQ ID NO: 3400 - protein, 773 aa, Contarinia nasturtii
MRRKRAKNGRSTSLKMTLNQVLREEYRAPFIDQVTYWCLSATMITTLASLLFLFKANKAFDDENVRFFKGESDEYTNDEFNKYVNGVIGECFTSVLQENYHKLPLAFRRTVEQACPDFLRPENWPAREGMGNAFNHLITQYITNVKNNIKVWAFSRIKKFFTLKRYELNLNRQGNLITELDVKRATKIVMFQSRVERNANIDLLLNEAAGIGLPINVHFQNLIRDRWFQTIPIFINIQRQIFDFHAKYEMLKQRWFQYRRDPNNNVMPTTPLPPKIKNFLVVPIHDFDMKHIRIDIHLFYLIARKFGALKLAKGKRGQPINIEKTEYDSNPAFYWNLIFDMPKISKLGNGKEFDFAVATDSVAVSLCFVKPERNTPELDNNTIKEKYNNFEFDYVLGIDPGVRTWNATVRKHVRSGNEENITIDGPKYHFKAKYGKRKRKSDQWTELLQKQRELDYKRYAFFPSPKGRSHWMCYIAYYVKMMKPAMAVYTTRKFIRLRLDKYIEENRASDKIAASLTKKKSALVFIGAAQIAPNSPIGIKKRLRCPGLRRLLNSFKKLGNCIVRLVDEYNTSQTCAKCFRPFDRRTKSDRYKVCQHCIPSEDESSQWNLPNVIITMKSNRVYQQLRKYAVDFVNRLNAVNPDHIPMDSDGLVSKLQVCFKNWQLNTGIWKDDQAPFQLKTVWHRDIVAAKNIMYKGEKISLKLKMFKNVLANNLLFTILFLGLCTVLGLDIHPQLLRPQNQNAAVQNQAADDEDSSDDEDYVYVLDVSDDDQF

SEQ ID NO: 3401 - protein, 232 aa, Contarinia nasturtii
MLRKGMAAYATREYARLDLDHHIRSTRVNDQIAVRVTNNKPSLVQFGAWAMKPDRPFGIKKRKRCPGSRKFCVSIKKLGHSEVEMQDEWGTSQTCANCQERFPRHTKDDRFKVCYDCRAKKIDGLPDSVAGLPDIIVSTVNRRVLRRKRAIIKRQIIDGNREAVNEKLRTGRLMSKVKVTYKNWPLNVDDDDVVPQTVTWHRDIVAAKCIMLKGLCRIFDVPLPVSLLRPPD

SEQ ID NO: 3402 - protein, 723 aa, Contarinia nasturtii
MSRTRSREDQFNIPPERKDDIKNLVVIKQGVKSIIREEYRDRVIQFLDHRSYKMTLISSLASLLALYKIQEAIDDGNQQFFVQNGKTFFIECFNGVLADKVDREELMPPAFRNIVEAHFGVENFEWPDKECLGNGFNYFYQDHIRNNQTNLNTHCSEHVESFFQMKRWYYNMNINGHQYNGSKFDGIDIRNAKVYATSNKDLTHGDVERTNKMKILLYELERIGWQCQKVHNEQLVPVTVNEFVKDNWFQSLWMFGQMQRQIEVFHQYSQQWHAFRRDGLITNNRPPKVNNFALVPLCRFQLKNVRLDMTDMYYLANTVLGVVPSSRNPLTNRMNKYTLDYYLYGHRDELWNLVFDMDKIKQIGKQKRFHSQIITNSVCVSILYEKPAKAWVENSEHATFNNMTYASAIDPNEKTWVAVVRRHIKSNIEENIKISNPRFHWQTEQKKRDRKADRLTWWFVEEEQMDFKSYPVIPSPRGSTWKAYILHRIKMLRMGMQAYATRKYARLDLDHHIKATKTSDKVAMRVTNNKPSWIWIGAGEMAPNRPWGIKKRKRCPGTRKLATSFKKQEHTKVSFQDEWGTSITCANCHERFPRETKNHRFKICRNCIPKPIVGLPPIIVTNLSRQELKKERIVERAINPDRENIERLVPKIKVIFKTWSLTREYHELGDAAPEDMIEHVVIWHRDIVAAKNILFKGMCRLFGIPLPDSLKRPDNPHHANNVN

SEQ ID NO: 3403 - protein, 510 aa, Contarinia nasturtii
MQRQIEVYHSHAEQWNTIHEMFRNNPNFQEPTINRPPKISSFALIPLCDYHLKNVRLDIKDLYYKIVNELDLVPSFLNTRTNRMNKRNLKYYTQTDRSGLWNMLFDVGKINKLGKSKPFHHQILTDSVSISIMYKKPQRQQRPQRQQRPQQTTQANRGPEKLIGKKYIIGIDPNEKSWLTVVRRNIQKTPDEPAVEENIIIPNQRFHWETQQKKRDKEAKKLAGWFDIEEKEHLKTYPYRPPSPRNSTWKSYIEYRIKMLRKGMAAYATREYARLDLDHHIRSTRVNDQIAVCVTNNKPSLVQFGAWAMKPDRPFRIKKRKRCPGSRKFRVSIKKLGHSEVEMQDEWGTSQTCANCQERFPRHTKDDRFKVCYDCRAKKIDGLPDSVAGLPDIIVSTVNRRVLRRKRAIIKRQIIDGNREAVNEKLRTGRLMSKVKVTYKNWPLNVDDDDVVPQTVTWHRDIVAAKCIMLKGMNQLETEYSLFNVFALNYIGLCRIFDVPLPVSLLRPPD

SEQ ID NO: 3404 - protein, 723 aa, Contarinia nasturtii
MSRTRSREDQFNIPPERKDDIKNLVVIKQGVKSIIREEYRDRVIQFLDHRSYKMTLISSLASLLALYKIQEAIDDGNQQFFVQNGKTFFIECFNGVLADKVDREELMPPAFRNIVEAHFGVENFEWPDKECLGNGFNYFYQDHIRNNQTNLNTHCSEHVESFFQMKRWYYNMNINVHQYYGSKFDGIDIRNAKVYATSNKDLTHGDVERTNKMNILLYELERIGWQCQKVHNEQLVPVTVNEFVKDNWFQSLWMFGQMQRQIEVFHQYSQQWHAFRRDGLITNNRPPKVNNFALVPLCRFQLKNVRLDMKDMYYLANTVLGVVPSSRNPLTNRMNKYTLDYYLNGHRDELWNLVFDMDKIKQIGKQKRFHSQIITNSVCVSILYEKPAKAWVENSEQATFNNMTYASAIDPNEKTWVAVVRRHINSNIEENIKISNPRFHWQTEQKKRDRKADRLTWWFVEEEQMDFKSYPVIPSPRGSTWKAYILHRIKMLRMGMQAYATRKYARLDLDHHIKATKTSDEVAMRVTNNKPSWIWIGAGEMAPNRPWGIKKRKRCPGTRKLATSFKKQEHTKVSFQDEWGTSITCANCHERFPRETKNHRFKICRNCIPKPIVGLPPIIVTNLSRQELKKERIVERAINPDRENIERLVPKIKVIFKTWSLTREYHELGDAAPEDMIEHVVIWHRDIVAAKNILFKGMCRLFGIPLPDSLKRPDNPHHANNVN

SEQ ID NO: 3405 - protein, 323 aa, Contarinia nasturtii
MLREIGCPHPRLIRRDGTPKQCKELKAADWDVLWRTYFDIGAIERTPQNDNRATLIFKNSIQTDGMAMSFWMERTKFVVVKDENEIMRETQEKLLKAQQVYGLDPSLQLVIGGVCVINYNDPNKENRREKLVQLTSGQYNHMISYRKRNKWRKKLTFNIDEKMRIHREYFDEQPGPHSDNIDRYVDHILRHFNEKFEAYTQYEYALQDVVQYIDTNTTLDKLADWFIDGKETFVFVGENFIAADSEAKGYIRSKVRDLFEKMKRRRNCTVVKVDEFRTTKVCTTGIKIPTLRRKTDNWSYYHMESWYKRRSQYTLQRTVCCNK

SEQ ID NO: 3406 - protein, 766 aa, Contarinia nasturtii
MDDDELDDNQPEESKYVVIKCGLQTILRQQHERIERVGEVVTKMLFERSVQMTEVAALASLSILFILNEALDNDDRAFFLKPHPSLFIADCFRAVLNQHVNNIRSQYRILPEFRFMVERNSEEQFRWPDDEKLGNGLRYFYKQYITNIQTNTNTWCEKRLENFFRMRCWYRNRFHNGSRFDNIDIRNAKEFSYRFKNLTNGNNGNNVDPQRVEKFNILMRDLTEIGWSGTVSMKFFAKYRWFESLWLFGQMQRQIEVYHSHAEQWHTIHEMFRNNPNFQEPTINRPPKISSFALIPLCDYHLKNVRLDIKDLYYKIVNELDLVPSFLNTRTNRMNKRNLKYYTQTDRSGLWNMLFDVGEINKLGKSKSFHHQILTDSVSISIMYKKPQRQQRPQRQQRPQQTTQANRGPEKLIGKKYIIGIDPNEKSWLTVVRRNIQKTPDEPAVEENIIIPNQRFHWETQQKKRDKEAKKLAGWFDIEEKEHLKTYPYRPPSPRNSTWKSYIEYRIKMLRKGMAAYATREYARLDLDHHIRSTRVNDQIAVCVTNNKPSLVQFGAWAMKPDRPFGIKKRKRCPGSRKFRVSIKKLGHSEVEMQDEWGTSQTCANCQERFPRHTKDDRFKVCYDCRAKKIDGLPDSVAGLPDIIVSTVNRRVLRRKRAIIKRQIIDGNREAVNEKLQTGRLMSKVKVTYKNWPLNVDDDDVVPQTVTWHRDIVAAKCIMLKGMNQLETEYSLFNVFALNYIGLCRIFDVPLPVSLLRPPDQNNNVN

SEQ ID NO: 3407 - protein, 723 aa, Contarinia nasturtii
MSRTRSREDQFNIPPERKDDIKNLVVIKQGVKSIIREEYRDRVIQFLDHRSYKMTLISSLASLLALYKIQEAIDDENRQFFLQNGKTFFIECFNGVLADKVDREELMPPAFRNIVEAHFGVENFEWPDKECLGNGFNYFYQDHIRNNQTNLNTHCSEHVESFFQMKRWYYNMNINGHQYNGSKFDGIDIRNAKVYATSNKDLTHGDVERTNKMNILLYELERIGWQCQKVHNEQLVPVTVNEFVKDNWFQSLWMFGQMQRQIEVFHQYAQQWHAFRRDGLITNNRPPKVNNFALVPLCRFQLKNVRLDMTDMYYLANTVLGVVPSSRNPLTNRMNKYTLDYYLYGHRDELWNLVFDMDKIKQIGKQKRFHSQIITNSVCVSILYEKPAKAWVENSEQATFNNMTYASAIDPNEKTWVAVVRRHIKSNIEENIKISNPRFHWQTEQKKRDRKADRLTWWFVEEEQMDFKSYPVIPSPRGSTWKAYILHRIKMLRMGMQAYATRKYARLDLDHHIKATKTSDKVAMRVTNNKPSWIWIGAGEMAPNRPWGIKKRKRCPGTRKLATSFKKQEHTKVSFQDEWGTSITCANCHERFPRETKNHRFKICRNCIPKPIVGLPPIIVTNLSRQELKKERIVERAINPDRENIERLVPKIKVIFKTWSLTREYHELGDAAPEDMIEHVVIWHRDIVAAKNILFKGMCRLFGIPLPDSLKRPDNPHHANNVN

SEQ ID NO: 3408 - protein, 730 aa, Contarinia nasturtii
MDDDELDDNQPEESKYVVIKCGLQTILRQQHERIERVGEVVTKMLFERSVQMTEVAALASLSILFILNEALDNDDRAFFLKPHPSLFIADCFRAVLNQHVNNINSQYRILPEFRFMVERNSEEQFRWPDDEKLGNGLRYFYKQYITNIQTNTNTWCEKRLENFFRMRCWYRNRFHNGSRFDNIDIRNAKEFSYRFKNLTNGNNGNNVDPQRVEKFNILMRDLTEIGWSGTVSMKFFAKYRWFESLWLFGQMQRQIEVYHSHAEQWYTIHEMFRNNPNFQEPTINRPPKISSFALIPLCDYHLKNVRLDIKDLYYKIVNELDLVPSFLNTRTNRMNKRNLKYYTQTDRSGLWNMLFDVGEINKLGKSKSFHHQILTDSVSISIMYKKPQRQQRPQRQQRPQQTTQANRGPEKLIGKKYIIGIDPNEKSWLTENIIIPNQRFHWETQQKKRNKEAKKLAGWFDIEEKEHLKTYPYRPPSPRNSTWKSYIEYRIKMLRKGMAAYATREYARLDLDHHIRSTRVNDQIAVCVTNNKPSLVQFGAWAMKPDRPFGIKKRKRCPGSRKFRVSIKKLGHSEVEMQDEWGTSQTCANCQERFPRHTKDDRFKVCYDCRAKKIDGLPDSVAGLPDIIVSTVNRRVLRRKRAIIKRQIIDGNREAVNEKLRTGRLMSKVKVTYKNWPLNVDDDDVVPQTVTWHRDIVAAKCIMLKGLCRIFDVPLPVSLLRPPDQNNNVN

SEQ ID NO: 3409 - protein, 718 aa, Contarinia nasturtii
MNVGINNGDFSFFANSGEEKINTCFSQVLAKHNPTNPKPKKTPKPKPKPEPEPKPEPELPSKTKRKPRGPAKEIPPIDPEFKAIVEGLDEVHRFDWPNNKDFGNGLKHLCNQYIDNNVTNSQTHADKHITQYLKMKVFQMNTNEAIEEKYLPNDIDCVVKLILKEKVIKVPASDPNKLYRCGVLYDIVNKLNVFPEIDLHDLTTNSKNWFKAVPMYLSMQREIEEFNLLRAHQEPPKKRKKRKRRRPKGKKRQWIIKRKQMIDDLEYLPCIRNLVVVPMCDFRRTHFKIDCSSMYQILSSQKLIPKQLTEDGKPSDKNISQKVFNENKDYIWNQYFYMRKIRWFVRRKKKFDFSINSDGIAVSLQYSTKKKETSNTQSGTSRLDITDMLKAGKFKRLGGTDSGMRNWNTTTIHEIDTCKEINFVKKSKQFHWETHQNVRNAKAKRFTKNFIEKERQDRENRELYAMMPSPKGSQWLSYIKHRVKMTKHGIEAYSTAKYTRLALDKYIGSNKVIDGFVNKITNKEPTLLFHGADGEVPPDCPIRIKKHVRCPGVRKLMQAYKKRPYIVVVPVDEWGTSQTDARCMCRFQNQPKSAKFKMCRCIPNAITLLPTKIVSKFGKTDTSTYRQLQRTLNGAFEIEEELMSRVKPYYKKWQVDLECTVTWHRDVVAAKNILLKGLWTLLGLPIPAAINRYWNQINADAAVFDDDNDVDISEPEFE

SEQ ID NO: 3410 - protein, 1126 aa, Contarinia nasturtii
MTKIIASNAAHRQIVETIANELSTQLNQFTRNIKLNSNVKRKVEDLVEKFERSHVEALQRLRNGFGICVDTNTTAASTVADRNDVSTPTSSGDTVASGTRPKQSQSNDSNARQKTIPAKRKKRAKTITNAPAPKKRTTRATSMPNTSNNDYVSDDFDFNDGDDDGDNGDEDSERYQSIKMGKRKSFNENLQNKDELASIINKIVTDMSHNWRLGALNVHCSLMRIIQSNSEAAIRTEFWNSTCEYNRNYFDGYFRGVYGNCINGKTKLRKTWKLDQAIIKFCQKHKVIEKNAIGYGNIFTYATRQYFTNFMMCIIRSLYNNVRAYLNHCVISEELANHAKSNEPVASTSRTKKPPLPPQKCRTLKQIRKANYQLITNTMRYLFSDEAENPDFYKKKPQSKRPPRKKANDDEAAKRKKRQNEKKVKKPKRKRDPILLTPAIERLLKRIQTDFNPMDFEANRRGYFSKLTTNWYRHVPFFVRLQQYCRARNRERCLMINKQMDEDEKNQPAEVAAAKVKLQAEAAAKIHNKSKAKSKSICRPIAEYVPRKRLPGVKYTWVRCAPNLTVYQVIPEARFGRIYIQIDRRGLFEILKRLKNPKEQEMKKNNGSNKPWQQPFNGNKELWDRMWRKYFGISKIERHSAGLTFANRIQTDGNAFVFLMNKEKKTKKKNDATDAETKERLQNILRHCDREVSFDVGDREIIAGQIIDREKDDTGAVKVKSVRNFKISSKQYHWMTKLPQFKKQRDRLVGTLEDDRADDRERIERECENHVQPSSRTIDFKTYADHTLRFFNRAMDVYGSEAYVLTNFLHWIEIHRTIDELVRMIVAQGHGKHTFVFVGKAPFTHANSPCKGYVRTSVRLLFKALEQHPQCTVRYVDEYRTTKLCSRCFNVLENGSRNGRKTTKSRFKVCRQCKPSPEALPDGGSFIYSHKNSKKLKKQKKYRPRYSNEDGRQPKVELKRFNMVDGLLVPGAENAEIVKRPRTHLRRRRLDVIAWKYIRNDDDIGDTTKVRSVTLNRDTNAGRNIRLRGYHELLGIKLPDAFTVDAKIQDQHAERRFKQFDENKRKKQQKYQTSKNSIEAEYDSDQSWWSSSSEEDAIDLSNSELSDNSDDSNDSGSGSSSDDGEN

SEQ ID NO: 3411 - protein, 766 aa, Contarinia nasturtii
MDDDELDDNQPEESKYVVIKCGLQTILRQQHERIERVGEVVTKMLFERSVQMTEVAALASLSILFILNEALDNDDRAFFLKPHPSLFIADCFRAVLNQHVNNINSQYRILPEFRFMVERNSEEQFRWPDDEKLGNGLRYFYKQYITNIQTNTNTWCEKRLENFFRMRCWYRNRFHNGSRFDNIDIRNAKEFSYRFKNLTNGNNGNNVDPQRVEKFNILMRDLTEIGWSGTVSMKFFAKYRWFESLWLFGQMQRQIEVYHSHAEQWYTIHEMFRNNPNFQEPTINRPPKISSFALIPLCDYHLKNVRLDIKDLYNKIVNELDLVPSFLNTRTNRMNKRNLKYYTQTDRSGLWNMLFDVGEINKLGKSKSFHHQILTDSVSISIMYKKPQRQQRPQRQQRPQQTTQANRGPEKLIGKKYIIGIDPNEKSWLTVVRRNIQKTPDEPAVEENIIIPNQRFHWETQQKKRDKEAKKLAGWFDIEEKEHLKTYPYRPPSPRNSTWKSYIEYRIKMLRKGMAAYATREYARLDLDHHIRSTRVNDQIAVRVTNNKPSLVQFGAWAMKPDRPFGIKKRKRCPGSRKFRVSIKKLGHSEVEMQDEWGTSQTCANCQERFPRHTKDDRFKVCYDCRAKKIDGLPDSVAGLPDIIVSTVNRRVLRRKRAIIKRQIIDGNREAVNEKIRTGRLMSKVKVTYKNWPLNVDDDDVVPQTVTWHRDIVAAKCIMLKGMNQLETEYSLFNVFALNYIGLCRIFDVPLPVSLLRPPDYNNNVN

SEQ ID NO: 3412 - protein, 281 aa, Contarinia nasturtii
MPSPRETSWRSYIEHRLRVMNDNIETYTCKQYARLGLDKHIDSVRAIDKTACKLTRNQPSIFYMGASGSTPANSPIKIKKHVRCPGTRKLIAAIIKRGNCIVRMVDEYMTSQHCPLCFKRFPQETRRDRYKKCVGCVPNPIVGLPRTIVTNVSKRLLQMRRTIERMWREMRDIGDVIAATLRDGPNAGRLVSKKQRFFKTWLPNVANVEIEGAAGAHPTLTTVWHRDIAAAKLILYKGECVVFKRTIHPNVRRPRRVDNNQPLPLYRGQNQNVNNGHLQPQ

SEQ ID NO: 3413 - protein, 636 aa, Contarinia nasturtii
MVERNSEEQFRWPDDEKLGNGLRYFYKQYITNIQTNTNTWCEKRLENFFRMRCWYRNRFNNGSRFDSIDIRNAKEFSYRFKNLTNGNNVDPQRVEKFNILMRDLTEIGWSGTVSMKFFAKYRWFESLWLFGQMQRQIEVYHSHAEQWNTIHEMFRNNPNFQEPTINRPPKISSFALIPLCDYHLKNVRLDITDLYNKIVNELDLVPSFLNTRTNRMNKRKVKYYTQTDRSGLWNMLFDVGKINKLGKSKPFHHQILTDSVSISIMYKKPQRQQRPQQTTQANRGPEKLIGKKYIIGIDPNEKSWLTVVRRNIQKTPDEPAVEENIIIPNQRFHWETQQKKRDKEAKKLAGWFDIEEKEHLKTYPYRPPSPRNSTWKSYIEYRIKMLRKGMAAYATREYARLDLDHHIRSTRVNDQIAVRVTNNKPSLVQFGAWAMKPDRPFGIKKRKRCPGSRKFRVSIKKLGHSEVEMQDEWGTSQTCANCQERFPRHTKDDRFKVCYDCRAKKIDGLPDSVAGLPDIIVSTVNRRVLRRKRAIIKRQIIDGNREAVNEKLRTGRLMSKVKVTYKNWPLNVDDDDVVPQTVTWHRDIVAAKCIMLKGMNQLETEYSLFNVFALNYIGLCRIFDVPLPVSLLRPPD

SEQ ID NO: 3414 - protein, 844 aa, Contarinia nasturtii
MTIDTRPSNQSVQSARPPQNHSSAAKRIKRSMTIDTRPSNQSVQSARQPQNHSVARRPPPVLPSTSTSTSAAQKGTKTYLFHPRICRRRGEQAKENIETFTIKMRLNQFLRSNANDEGRVGGSDNRRKINDARIAATIARRNDAARNQGNNQGNNVDQKSRLIKIINDKVTQMSDMIRLASLHLHNSLNRLVADGTNEEIRAEFGNEFNPRKHFYAQKQCQRNLDYPMNRDFENMLRERHIPVKPKIKNTGQCIKYAYLICATNMYVNVKMHCCRHIKDKFFKRLSNDEAAIDATMNYLKCADSVDRPDAYLLDQYFEHLRPLLDEERIDDYNYNYGGEEHIIPRGWLETTEDEKKYYKHVFELMNLLRYICEHNAQNPDKQWKLFRPIPQSHNKRHHIAIDTEAFILFTNLLFAINEGKTNLRAKDNWNEQEYCRFWNRFVNLRKVNRRSQEFDYRFTTDGETACLKMIRKTRGLGNSNAQETVTNSINHANESAIVPDDIQAAFDAGQIKKIIGNDPGAKVLIAANTLDLDRKTEVSYRLKAKQWHHRVGTHKRKKKLKEYTGAYENECRLLRENRNIYIETPSPSSLNYDLYLRYQLDIFQAASEVKYRPCVAKLKFDKYVQTQKTAHQIAREVTQMEKEIPREQQTIVYAHGNAKIAANSPIKGHLRTPEAAITHTIDRYAMRIDINERGTSMYCSRCQQMTQRPIDVRVRKGFTRHNIKDRFLVCQNCESGRNAVLPVPREYTVKTHRSYRKKIPVVGARPKTRTFETPADNPNRIRSVVMDRDHNASRNMIYKAKCMLSGIPINPVFNMSAVAYRQQNPDRVIRPNRPNHANRRNQAA

SEQ ID NO: 3415 - protein, 357 aa, Contarinia nasturtii
MLYDMVNDLNVFPEIDLHDLTTDEKYWFKAMPMFLSMQREIEEYNSMWPHQDRPKRKKRKRKKSKKKRKWCPKRKQMLDDPNFRPFIRNLVVVPMCDFCRKHFKIDCSSMHQVLSSQKLLPKVEVENKNGKTSIINIPQKDFNDASDHWWNQYFYMRKIRRFVRGKKKFDFFINTDGIAVSLQYSAKKKTNNEEIDRSRRIVQMIMDGKFKKFAGIDTGVRSWNTTVTHKIKSGKEINFVMSSKQFHWQTGLNVRNAKAKRWSKKFVQEERRDRENREIYPVMPSPKGSQWLNYVKHRSKMMKHGICAYSTAKYTRLALDKHIKSSSVVDNWVEKVTDKQPTLFFLVLMVKYHLTAQ

SEQ ID NO: 3416 - protein, 742 aa, Contarinia nasturtii
MKRRRAKINSAFKKNTAKLNDNEELRSIKLSAPSVFKSEYSEALTQHFFHKCYNGTVICYLGSTLFLYVVNLAADNDDRQYFIDSDGKNVIRECFAAVSRENLENPKQPKIPRGFLEMIADDQFEWPNNILESFLQMIRYQLNEDPNRLIKFDGIDIRNAKNNLMFNQDCTGGDQHRTNKMNELYEQVAVRCLPSFREYLSMIEYIEKKWFESLWFFIFIQREISIFLEEHHDLVQLWLRHQRHPLFYCKPSKPLPPKIRNFTVIPICDSKLKHIKFDQDDLMSLLAQWKVVPKIFNNDHGGHNMYSRNYYKENEDEAWAILFNMDKINEIKKPNQQFHHMIVCDSVSASVLYRTPKPEIENTELHRQRIKQKLENNEYKYIVAIDPGMKTYLAGIRRNIEDRTEENFKISSKSYHWGAGQKVRDKMGKRMTARFTQREQLDRESYPSIPSPRGIRWRNYVRHRLTMVKDAVAAYARRRYARLSFDKYIGSQGEKDWLAKVITKNEPSLINIGAVDMAPNSPIGIKKGKRCPGTRHLQCSIKKLGHSDVHKVNEDFTSQHCANCQKKFPIQTQKYRFKVCRNCTRDAPIPQEIEPYISLPRLIVTKKSQRRKKKDSCVKKLIARGIMDPANQPAEFQPGRLESKKMYFLKNWLLNPVNAIQMGGDADKYPEQQQQQQHQKRFCTVWHRDIVAARCIMYKGLCYIFNLEMHNSYVRAPAPPRPPLRRRQPARRRANANVVPDQ

SEQ ID NO: 3417 - protein, 534 aa, Contarinia nasturtii
MKFFAKYRWFESLWLFGQMQRQIEVYHSHAEQWNTIHEMFRNNPNFQEPTINRPPKISSFALIPLCDYHLKNVRLDIKDLYYKIVNELDLVPSFLNTRTNRMNKRNLKYYTQTDRSGLWNMLFDVGKINKLGKSKPFHHQILTDSVSISIMYKKPQRQQRPQRQQRPQQTTQANRGPEKLIGKKYIIGIDPNEKSWLTVVRRNIQKTPDEPAVEENIIIPNQRFHWETQQKKRDKEAKKLAGWFDIEEKEHLKTYPYRPPSPRNSTWKSYIEYRIKMLRKGMAAYATREYARLDLDHHIRSTRVNDQIAVRVTNNKPSLVQFGAWAMKPDRPFGIKKRKRCPGSRKFRVSIKKLGHSEVEMQDEWGTSQTCANCQERFPRHTKDDRFKVCYDCRAKKIDGLPDSVAGLPDIIVSTVNRRVLRRKRAIIKRQIIDGNREAVNEKIRTGRLMSKVKVTYKNWPLNVDDDDVVPQTVTWHRDIVAAKCIMLKGMNQLETEYSLFNVFALNYIGLCRIFDVPLPVSLLRPPDQNNNVN

SEQ ID NO: 3418 - protein, 300 aa, Contarinia nasturtii
MQRQIEVYHSHAEQWNTIHEMFRNNPNFQEPTINRPPKISSFALIPLCDYHLKNVRLDITDLYNKIVNKLDLVPSFLNTRTNRMNKRKVEYYTQTDRSGLWNMLFDVGKINKLGKSKPFHHQILTDSVSISIMYKKPQRQQRPQQTTQANRGSEKLIGKKYIIGIDPNEKSWLTVVRRNIQKTPDEPAVEENIIIPNQRFHWETQQKKRDKEAKKLAGWFDIEEKEHFKTYPYRPPSPRNSTWKSYIEYRIKMLRKGMAAYATREYARLDLDHHIRSTRVNDQIAVRVTNRRWFNLVLGR

SEQ ID NO: 3419 - protein, 739 aa, Contarinia nasturtii
MSGRKRKGVGAICGSRPKRRKVGKLPEESGLLAIKVSAATAVKEEYHDIVLPWIAKKSIECTKICELASLLFLHKVKLANEEAILTNNWKFFDEGDGIHIIEGCFFAVLRKYKEENDMVPEFRDIVEALDGDNRFAWPNNDYFGNLMRYLFQQHARNAITNLTTHDDKRLREYLRLLVWEHNVDNLDPNDVFDEHDVNNAVKWAIERYDSTRGDAIRLDKRNRLLTCVRNIGGPKDDNIAKDTKENWFATLPMWLHMQKKIDDYHNWVQNNLENIPADIELPIIKNLSVLPICTHLRKNIKINADILYRMMCETKIIPLDEYGRQVDGTHVCENKVHYFNEIFDMNKINGILNANKEFHYHVVTDGVSASILYDVSRNTLEQLVSDELIKKRYEDGVYIYELGIDPGMKTWNATVRRHIDSGKEMNFKTSSKKYHYLTKQGVRNRKAKRWTRGFVAFEQNDRNDRTRYPQMPSPKGENWRDYISHRLRIMKKAIDVYTSERYTRLRFDKYIESNRVCDKIAAMLTNGKPCIIFLGAANISPNSPIKIKKNIRCPGNRKLIKSFKKMLGNVVKMVNEFRTSRLCARCFEPFPLETLGHRFKVCEWCVPDNNDWPEGLKLPEKIVTMKSKRMLLSERQELRDAMVANPNQAVGFVSKVICYRKNWRQNAAYDAVNNVAQLPGIIRDENVIDFTEDYMLLDDDFYVAEEEAILNTIWHRDIAAAKLIIYKGNLFIELKLDSE

SEQ ID NO: 3420 - protein, 315 aa, Contarinia nasturtii
MNFKTSSKKYHHLTKQGVRNRKAKRWTRGFVAFEQNDRNDRTRYPQMPSPKGENWRDYISHRLRIMKKAIDVYTSERYTRLRFDKYIESNRVCDKIAAMLTNGKPCIIFLGAANISPNSPIKIKKNIRCPGNRKLIKSFKKMLGNVVKMVNEFRTSRLCARCFEPFPLETLGHRFKVCEWCVPDNNDWPEGLKLPEKIVTMKSKRMLLSERQELRDAMVAYSNQAVGFVSKVICYRKNWRQNAAYDAVNNVAQLPGIIRDENVIDFTEDNMLLDDDFYVAEEEAILNTIWHRDIAAAKLIIYKGNLFIELKLDSE

SEQ ID NO: 3421 - protein, 585 aa, Contarinia nasturtii
MGRHKKADPNADQRCIKQGLPSIIREQYRDVIVAIISYLSVKATKIACLASLLFLMKVNEALDDFNYDFFETDEPSTIIHNCFKAVLVDNIGNISLMLPGFRNIVDAAHIDWPTNGGFGNGFKYIWEQYYDNVKTNLTTHCESRLRKFFKMRAFELNDYAIKYNYFNNLYGMIEFELPYYDEEDIKNAINYTYRRRNTAIGDVEREMRLGELLDELRWLGAPDDCNIRDFVKEDWFKSIRMWSEIQRDIRNFHFAYEDRRDKPQIKNFVVVPMCTFQRRHIRIDTDALYVILSNAKLVPRKCGKRTRKDGTTNFKNITSNEFHTNKILSWNLFFDVEKILKLVHNKKEFDSQICSDGVSVSLLYKKPKVPPVETTDDEIKAMYDSNELKYAVGCDPGMRTWNASVRRDLHTKEEVNLRISSKRYHWDAKQGRRNAKAERITRLFTFEEQADRNRIAAMIGEMPSPKGPSWRSYIEHRLRVMNDGIETYSTKQYARLGLDKHIESVRAIDKTACKMVHNQPSIFYMGASGSTPANSPIKIKKHVRCPGTRKLIAAIMKRGNCIVWMVDENVWVVYQIQLLDYHEPS

SEQ ID NO: 3422 - protein, 440 aa, Contarinia nasturtii
MCDFRRTHFKIDCSSMYQILSSQKLIPKQLTEDGKPSDKNISQKVFNENKDYIWNQYFYMRKIRWFVRRKKKFDFSINSDGIAVSLQYSTKKKETSNTQSGTSRLDIIDMLKAGKFKRLGGTDSGMRNWNTTTIHEIDTCKEINFVKKSKQFHWETHQNVRNAKAKRFTKNFIEKERQDRENRELYAMMPSPKGSQWLSYIKHRVKMTKHGIEAYSTAKYTRLALDKYIGSNKVIDGFVNKITNKEPTLLFHGADGEVPPDCPIRIKKHVRCPGVRKLMQAYKKRPYIVVVPVDEWGTSQTDARCMCRFQNQPKSAKFKMCRCIPNAITLLPTKIVSKFGKTDTSTYRQLQRTLNGAFEIEEELMSRVKPYYKKWQLDLECTVTWHRDVVAAKNILLKGLWTLLGLPIPAAINRYWNQINADAAVFDDDNDVDISEPEFE

SEQ ID NO: 3423 - protein, 648 aa, Contarinia nasturtii
MVERNSEEQFRWPDDEKLGNGLRYFYKQYITNIQTNTNTWCEKRLENFFRMRCWYRNRFNNGSRFDNIDIRNAKEFSYRFKNLTNGNNVDPQRVEKFNILMRDLTEIGWSGTVSMKFFAKYRWFESLWLFGQMQRQIEVYHSHAEQWYTIHEMFRNNPNFQEPTINRPPKISSFALIPLCDYHLKNVRLDIKDLYYKIVNELDLVPSFLNTQTNRMNKRNLKYYTQTDRSGLWNMLFDVGKINKLGKSKPFHHQILTDSVSISIMYKKPQRQQRPQRQQRPQQTTQANRGPEKLIGKKYIIGIDPNEKSWLTVVRRNIQKTPDEPAVEENIIIPNQRFHWETQQKKRDKEAKKLAGWFDIEEKEHLKTYPYRPPSPRNSTWKSYIEYRIKMLRKGMAAYATREYARLDLDHHIRSTRVNDQIAVRVTNNKPSLVQFGAWAMKPDRPFGIKKRKRCPGSRKFRVSIKKLGHSEVEMQDEWGTSQTCANCQERFPRHTKDDRFKVCYDCRAKKIDGLPDSVAGLPDIIVSTVNRRVLRRKRAIIKRQIIDGNREAVNEKIRTGRLMSKVKVTYKNWPLNVDDDDVVPQTVTWHRDIVAAKCIMLKGMNQLETEYSLFNVFALNYIGLCRIFDVPLPVSLLRPPDYNNNVN

SEQ ID NO: 3424 - protein, 741 aa, Contarinia nasturtii
MGRHKAADPNADQRCIKQGLPSIIRERYRDVIIAIISILSIKATKIACLASLLFLMKVNEAVDHFDDEFFVWDDGSSMIKRCFKAVLRDNIGKVFLMLPDFRQLVDAARIDWPTNGGFGNSFKYLYEQYEDNVRTNLKTHCESRLRKFFKLKTFQLNDNAIRYNYFNNLYGSPNELPYYDETDIKNAVNYAYHRKDNTSDDVERQLRLGELLDELRWLGAPEDCNIKEYVSENWFHSIRMWIHIQREIQWYHNEYKCRRDAPQIKNFVVVPMCSFQRRHIRIDTDALYTILASVKLVPLKCGLKKRKDKTTNSINITSNEFRRNKILSWNLFFNVEKVQQLVHFKKYFDFQICSDGVSVSMMYKKPKLPPLEISDAEIMKMYKGNKLKYAIGCDPGMKTWNASVRRDLDTKEEVNLRISSKRYHWDAKQGRRNAKAERITRLFTYDEKADRNRVAATLGTMPSPRETSWRSYIEHRLRVMNDGIETYTCKQYARLGLDKHIDSVRAIDKTACKLTRNQPSIFYMGASGSTPANSPIKIKKHVRCPGTRKLIAAIMKRGNCIVRMVDEYMTSQHCPLCFKRFPQETRRDRYKKCVGCVPNPIVGLPRTIVTNVSKRLLQMRRTIERMWREMRDIGDVIAATLRDGPNAGRLVSKKQRFFKTWLPNVANVEIEGAAGAQPTLTTVWHRDIAAAKLILYKGECVVFKRTIHPNVRRPRRVDNNQPLPLYRGQNQNVNNGHLQPQ

SEQ ID NO: 3425 - protein, 723 aa, Contarinia nasturtii
MSRTRSREDQFNIPPERKDDIKNLVVIKQGVKSIIREEYRDRVIQFLDHRSYKMTLISSLASLLALYKIQEAIDDGNQQFFVQNGKTFFIECFNGVLADKVDREELMPPAFRNIVEAHFGVENFEWPDKECLGNGFNYFYQDHIRNNQTNLNTHCSVHVESFFQMKRWYYNMHINGHQYNGSKFDGIDIRNAKVYATSNKDLTHGDVERTNKMNILLYELERIGWQCQKVHNEQLVPVTVNEFVKDNWFQSLWMFGQMQRQIEVFHQYSQQWHAFRRDGLITNNRPPKVNNFALVPLCRFQLKNVRLDMTDMYYLANTVLGVVPSSRNPLTNRMNKYTLDYYLYGHRDELWNLVFDMDKIKQIGKQKRFHSQIITNSVCVSILYEKPAKAWVENSEQATFNNMTYASAIDPNEKTWVAVVRRHIKSNIEENIKISNPRFHWQTEQKKRDRKADRLTWWFVEEEQMDFKSYPVIPSPRGSTWKAYILHRIKMLRMGMQAYATRKYARLDLDHHIKATKTSDKVAMRVTNNKPSWIWIGAGEMAPNRPWGIKKRKRCPGTRKLATSFKKQEHTKVSFQDEWGTSITCANCHERFPRETKNHRFKICRNCIPKPIVGLPPIIVTNLSRQELKKERIVERAINPDRENIERLVPKIKVIFKTWSLTREYHELGDAAPEDMIEHVVIWHRDIVAAKNILFKGMCRLFGIPLPDSLKRPDNPHHANNVN

SEQ ID NO: 3426 - protein, 741 aa, Contarinia nasturtii
MGRHKAADPNADQRCIKQGLPSIIRERYRDVIIAIISILSIKATKIACLASLLFLMKVNEAVDHFDDEFFVWDDGSSMIQRCFKAVLRDNIGKVFLMLPDFRQLVDAARIDWPTNGGFGNSFKYLYEQYEDNVRTNLKTHCESRLRKFFKLKTFQLNDNAIRYNYFNNLYGSPNELPYYDETDIKNAVNYAYHRKDNTNDDVERQLRLGELLDELRWLGAPEDCNIKEYISENWFHSIRMWIHIQREIQWYHNEYKCRRDAPQIKNFVVVPMCSFQRRHIRIDTDALYTILASVKLVPLKCGLKKRKDKTTNSINITSNEFRRNKILSWNLFFNVEKIQQLVHFKKYFDFQICSDGVSVSMMYKKPKLPPVEISDAEIMKMYKGNKLKYAIGCDPGMKTWNASVRRDLDTKEEVNLRISSKRYHWDAKQGRRNAKAERITRLFTYDEKADRNRVAATLGTMPSPRETSWRSYIEHRLRVMNDGIETYTCKQYARLGLDKHIESVRAIDKTACKLTRNQAAIFYMGASGSTPANSPIKIKKHVRCPGTRKLIAAIMKRGNCIIRMVDEYMTSQHCPLCFKRFPQETRRDRYKKCVGCVPNPIVGLPRTIVTNVSKRLLQMRRTIERMWREMRDIGDVIAATLRDGPNAGRLVSKKQRFFKTWLPNVANVEIEGAAGAQPTLTTVWHRDIAAAKLILYKGECVVFKRTIHPNVRRPRRVDNNQPLPLYRGQNQNVNNGHLQPQ

SEQ ID NO: 3427 - protein, 716 aa, Contarinia nasturtii
MNVGINNGDFSFFANSGEEKINTCFSQVLAKHNPKNPKPKKTPKPKPKPEPKPEPEQPSKTKRKPRGPAKEIPPIDPEFKAIVEGLDEVHRFDWPSNKDFGNGLKHLCNQYIDNNVTNSQTHSDKHITQYLKMKVFQMNTNEAIEEKYLPSDIDCVVKLILKEKVIKVPASDPNKLYRCGVLYDIVNKLNVFPEIDLHDLTTNSKNWFKAVPMYLSMQREIEEFNLLRAHQEPPKKRKKRKRRRPKGKKRKWIIKRKQMLDDLEYLPCIRNLVVVPMCDFRRTHFKIDSSSMYQILSSQKLIPKQLTEDGKPSGRNISEKVYNENKDYIWNQYFYMRKIRWFVRRKKKFDFSINSDGIAVSLQYSTKKKETSNTQSGTSRLDIIDMLKAGKFKRLGGTDSGMRNWNTTTIHEIDTCKEINFVKKSKQFHWETHQNVRNAKAKRFTKNFIEKERQDRENRELYAMMPSPKGSQWLSYIKHRVKMTKHGIEAYSTAKYTRLALDKYIRSNKAIDGFVNKITNKEPTLLFHGADGEVPPDCPIRIKKHVRCPGVRKLMQAYKKRPYIVVVPMDEWGTSQTDARCMCRFQNQPKSAKFKMCRCIPNAITLLPTKIVSKFGKTDTSTYRQLQRTLNGAFEIEEELMSRVKPYYKKWQLDLECTVTWHRDVVAAKNILLEGLWTLLGLPIPAAINRYWNQINADAAVFDDDNDVDISEPEFE

SEQ ID NO: 3428 - protein, 626 aa, Contarinia nasturtii
MGWDDGSSMIKRCFKAVLRDNIGKVFLMLPDFRQLVDAARIDWPTNGGFGNSFKYLYEQYEDNVRTNLKTHCESRLRKFFKLKTFQLNDNAIRYNYFNNLYGSPNELPYYDETDIKNAVNYAYHRKDNMNDDVERQLRLGELLDELRWLGAPEDCNIKAYVSENWFHSIRMWIHIQREIQWYHNEYKCRRDAPQIKNFVVVPMCSFQRRHIRIDTDALYTILASVKLVPLKCGLKKRKDKTTNSINITSNEFRRNKILSWNLFFNVEKIQQLVHFKKYFDFQICSDGVSVSVMYKKPKLPPLEISDAEIMKMYKGNKLKYAIGCDPGMKTWNASVRRDLDTKEEVNLRISSKRYHWDAKQGRRDAKAERITRLFKQYARLGLDKHIDSVRAIDKTACKLTRNQPSIFYMGASGSTPANSPIKIKKHVRCPGTRKLIAAIMKRGNCIIRMVDEYMTSQHCPLCFKRFPQETRRDRYKKCVGCVPNPIVGLPRTIVTNVSKRLLQMRRTIERMWREMRDIGDVIAATLRDGPNAGRLVSKKQRFFKTWLPNVANVEIEGAAGAQPTLTTVWHRDIAAAKLILYKGECVVFKRTIHPNVRRPRRVDNNQPLPLYRGQNQNVNSVHLQPL

SEQ ID NO: 3429 - protein, 427 aa, Contarinia nasturtii
MNKRNLKYYTQTDRSGLWNMLFDVGKINKLGKSKPFHHQILTDSVSISIMYKKPQRQQRPQQTTQANRGPEKLIGKKYIIGIDPNEKSWLTVVRRNIQKTPDEPAVEENIIIPNQRFHWETQQKKRDKEAKKLAGWFDIEEKEHLKTYPYRPPSPRNSTWKSYIEYRIKMLRKGMAAYATREYARLDLDHHIRSTRVNDQIAVRVTNNKPSLVQFGAWAMKPDRPFGIKKRKRCPGSRKFRVSIKKLGHSEVEMQDEWGTSQTCANCQERFPRHTKDDRFKVCYDCRAKKIDGLPDSVAGLPDIIVSTVNRRVLRRKRAIIKRQIIDGNREAVNEKIRTGRLISKVKVTYKNWPLNVDDDDVVPQTVTWHRDIVAAKCIMLKGMNQLETEYSLFNVFALNYIGLCRIFDVPLPVSLLRPPDYNNNVN

SEQ ID NO: 3430 - protein, 778 aa, Contarinia nasturtii
MCIRESSFSILNITSVVSINQFNMSTTGETSAAQAKKKRYKYQTKKQQEEEAEDENFNDNGLLAIKMRLTTIVRPEYHDVVIHWIEKKSVMSTKISVLASLLFLDKVKSAQNNLQWDFFTNRMYVNQKGKLVEKNRAEDVIERCFYAVLQKNKENEDMEPHIRHFVEQGLSRDNQFAWPNNNYFGNIMKSLCQSYTRQLKTNQTTHAKKRLRNYLQMRAWQFNAVSTGLRFDKKDVDNAIDWAIRRYDAIRDTHQNAPLKRYKRKLLLDMVRAIVEEVGGLANYDNIKQFSKGKYWFKATAMWLVMQSEIDEFHNWAQDNNVTIPKIKNLSVVPLPDYQRKAVFMCNDVFYRMLAEEKLLPKVEGKQVTETFIRENKEHFWNQIFDFDKINRILKKNKEFHYTIVSNGESVSVLYKLSKQHLQRLLDDDIVRKRYLDGTFVYELGIDPGMKTWNATVRRTISTRKEVNLKTSSKKYHWLTKYKIRDKKAKRWTKQFTLDEQNDRNNRQLYQRMPSPLGTLWTDYVCHRIKMLKKGMDVYTTPKYARLKFDKYVESNSTIDKLCGTLVNHQAALIHLGNADMSPNSPIRIKKHVRCPGTRKLLKGFRKRGNCVVRKVDEYFTSQTCAKCGGRFDPNTKSNRFKVCENCAPVPNSIMANFLPSKIVAQLSKRRLKYNKVYIEESLAVFLARGEMTEHDFDIIADRLLSKVAVYPKKWQVNAVSGVLEYADVKVDQQLHAVDDENAAEIDGEVAQKPCAVDDECVTEIDDKQQPMIVHQTT

SEQ ID NO: 3431 - protein, 592 aa, Contarinia nasturtii
MGRRAKINSAFKKNTAKLNDNEELRSIKLSAPSVFKSEYSEALTEHFFHKCYNGTVICYLGSTLFLYVVNLAADNDDRQYFIDSDGKNVIRECFAAVSRENSENPKQPKIPRGFLEMIADDQFEWPNNILESFLQMIRYQLNEDPNRLIKFDGIDIRNAKNNLMFNQDCTGGDQHRTNKMNELYEQVAVRCLPSFREYLSMIEYIEKKWFESLWFFIFIQREISIFLEEHHDLVQLWLRHQRHPLFYCKPSKPLPPKIRNFTVIPICDSKLKHIKFDQDDLMSLLAQWKVVPKIFNNDHGGHNMYSRNYYKENEDEAWAILFNMDKINEIKKPNQQFHHMIVCDSVSASVLYRTPKPEIENTELHRQRIKQKLENNEYKYIVAIDPGMKTYLAGIRRNIEDRTEENFKISSKSYHWGAGQKVRDKMGKRMTARFTQREQLDRESYPSIPSPRGIRWRNYVRHRLTMVKDAVAAYARRRYARLSFDKYIGSQGEKDWLAKVITKNEPSLINIGAVDMAPNSPIGIKKGKRCPGTRHLQCSVKKLGHSDVHKVNEDFTSQHCANCQKKFPIQTQKYRFKVCRNCTRDAPMHHKK

SEQ ID NO: 3432 - protein, 415 aa, Contarinia nasturtii
MTDMYYLANTVLGVVPSSRNPLTNRMNKYTLDYYLYGHRDELWNLVFDMDKIKQIGKQKRFHSQIITNSVCVSILYEKPAKAWVENSEQATFNNMTYASAIDPNEKTWVAVVRRHIKSNIEENIKISNPRFHWQTEQKKRDRKADRLTWWFVEEEQMDFKSYPVIPSPRGSTWKAYILHRIKMQRMGMQAYATRKYARLDLDHHIKATKTSDKVAMRVTNNKPSWIWIGAGEMAPNRPWGIKKRKRCPGTRKLATSFKKQEHTKVSFQDEWGTSITCANCHERFPRETKNHRFKICRNCIPKSIVGLPPIIVTNLSRQELKKERIVERAINPDRENIERLVPKIKVIFKTWSLTREYHELDDAAPEDMIEHVVIWHRDIVAAKNILFKGMCRLFGIPLPDSLKRPDNPHHANNVN

SEQ ID NO: 3433 - protein, 757 aa, Contarinia nasturtii
MDDDEFDDNQPEESKYVVIKCGLQTILRQQHERIERVGEAVTKMLFERSVQMTEVAALASLFILFILNEALDNDDRAFFLKPHPSLFIADCFRAVLNQHVNNINSRYRILPEFRFMVERNSEEQFRWPDDEKLGNGLRYFYKQYITNIQTNTNTWCEKRLENFFRMRCWYRNRFNNGSRFDNIDIRNAKEFSYRFKNLTNGNNVDPQRVEKFNILMRDLTEIGWSGTVSMKFFAKYRWFESLWLFGQMQRQIEVYHSHAEQWNTIHEMFRNNPNFQEPTINRPPKISSFALIPLCDYHLKNVRLDIKDLYYKIVNELDLVPSFLNTRTNRMNKRNLKYYTQTDRSGLWNMLFDVGKINKLGKSKPFHHQILTDSVSISIMYKKPQRQQRPQQTTQANRGPEKLIGKKYIIGIDPNEKSWLTVVRRNIQKTPDEPAVEENIIIPNQRFHWETQQKKRDKEAKKLAGWFDIEEKEHLKTYPYRPPSPRNSTWKSYIEYRIKMLRKGMAAYATREYARLDLDHYIRSTRVNDQIAVCVTNNKPSLVQFGAWAMKPDRPFGIKKRKRCTGSRKFRVSIKKLGHSEVEMQDEWGTSQTCANCQERFPRHTKDDRFKVCHDCRAKKIDGLPDSVAGLPDIIVSTVNRRVLRRKRAIIKRQIIDGNREAVNEKLRTGRLMSKVKVTYKNWPLNVDDDDVVPQTVTWHRDIVAAKCIMLKGMNQLETEYSLFNVFALNYIGLCRIFDVPLPVSLLRPPDYNNNVN

SEQ ID NO: 3434 - protein, 742 aa, Contarinia nasturtii
MGRHKKADPNADQRCIKQGLPSIIRERYRDVIVAIISYLSVKATKIACLASLLFLMKVNEALDDFNYDFFETDEPSTIIHNCFKAVLVDNIGNISLMLPGFRNIVDAAHIDWPTNGGFGNGFKYIWEQYYDNVKTNLTTHCESRLRKFFKMRAFELNDYAIKYNYFNNLYGMIEFELPYYDEEDIKNAINYTYRRRNTAIGDVEREMRLGELLDELRWLGAPDDCNIRDFVKEDWFKSIRMWSEIQRDIRNFHFAYEDRRDKPQIKNFVVVPMCTFQRRHIRIDTDALYVILSNAKLVPRKCGKRTRKDGTTNFKNITSNEFRTNKILSWNLFFDVEKILKLVHNKKEFDSQICSDGVSVSLMYKKPKVPPVETTDDEIKAMYDSNELKYAVGCDPGMRTWNASVRRDLHTKEEVNLRISSKRYHWDAKQGRRNAKAERITRLFTFEEQADRNRIAAMIGEMPSPKGPSWRSYIEHRLRVMNDGIETYSTKQYARLGLDKHIESVRAIDKTACKMVHNQPSIFYMGASGSTPANSPIKIKKHVRCPGTRKLLAAIMKRGNCIIRMVDEYMTSQHCPLCFKRFPQETRRDRYKTCVGCVPNPIVGLPRTIVTNVSKRLLQMRRTIERMWREMRDIGDVIAATLRDGPNAGRLVSKKQRFFKTWLPNVANVEIEGAAGAQPTLTTVWHRDIAAAKLILYKGECVVFKRTIHPNVRRPRRVDNNQPLPLYRGQNQNVNNGHLQPQ

SEQ ID NO: 3435 - protein, 763 aa, Contarinia nasturtii
MDDDELDDNQPEESKYVVIKCGLQTILRQQHERIERVGEVVTKMLFERSVQMTEVAALASLSILFILNEALDNDDRAFFLKPHPSLFIADCFRAVLNQHVNNIRSQYRILPEFRFMVERNSEEQFRWPDDEKLGNGLRYFYKQYITNIQTNTNTWCEKRLENFFRMRCWYRNRFHNGSRFDNIDIRNAKEFSYRFKNLTNGNNVDPQRVEKFNILMRDLTEIGWSGTVSMKFFAKYRWFESLWLFGQMQRQIEVYHSHAEQWYTIHEMFRNNPNFQEPTINRPPKISSFALIPLCDYHLKNVRLDITDLYNKIVNELDLVPSFLNTQTNRMNKRNLKYYTQTDRSGLWNMLFDVGKINKLGKSKPFHHQILTDSVSISIMYKKPQRQQRPQRQQRPQQTTQANRGPEKLIGKKYIIGIDPNEKSWLTVVRRNIQKTPDEPAVEENIIIPNQRFHWETQQKKRDKEAKKLAGWFDIEEKEHLKTYPYRPPSPRNSTWKSYIEYRIKMLRKGMAAYATREYARLDLDHHIRSTRVNDQIAVRVTNNKPSLVQFGAWAMKPDRPFGIKKRKRCPGSRKFRVSIKKLGHSEVEMQDEWGTSQTCANCQERFPRHTKDDRFKVCYDCRAKKIDGLPDSVAGLPDIIVSTVNRRVLRRKRAIIKRQIIDGNREAVNEKIRTGRLMSKVKVTYKNWPLNVDDDDVVPQTVTWHRDIVAAKCIMLKGMNQLETEYSLFNVFALNYIGLCRIFDVPLPVSLLRPPDQNNNVN

SEQ ID NO: 3436 - protein, 250 aa, Contarinia nasturtii
MINSSRRNKWPEDHKSYADHILRHFEEKFTAYTQYEYALQAFLQYIDTNRALDAYATKLIDGKQTFIFVGDRFIAADSPARGYIRSKVRDLFEKLKRRRKCTVVEVDEFRTTKLCSLCFRELEKPTKRGKVKEKYRYLTCHGCEPLCGENVLGKAQGPIESRKSNRKLTQQRKHRPRTDGPRMASKFRKYEEKTRIGRTITWNRDANAGRNILYKGWCAVMNIELHPAFQRHVEEEEENAGGGDPPQSLK

SEQ ID NO: 3437 - protein, 545 aa, Contarinia nasturtii
MVNDLNVFPEIDLHDLTTDEKHWFKAMPMFLSMQREIEEYNLEWPYQHRSKRKKRKRKKSKRRPKRKQMLDDPNFRPFIRNLVVVPMCDFRRKHYKIDCSSMHQVLSSQELLPKVEVENKNGTTSMVILPQKDFNAARDHWWNQYFYMRKIRRFVRGKKKFDFSINTDGIAVSLQYSAKKKTNNTEYDRSRIVEMILDGKFENFAGVDTGLKSWNTTVTHNIITGTETNFVMSSKQFHWKTGQNVRNAKAKRWTKKFTEEERRDRENRELYPVMPSPKGSHWLDYIKHRIKMMKHGICAYSTAKYTRLALDKHIKSSSVVDNWVEKVTDKQPTLFLFGADGEVPPDSRISIKKHVRCPGVRLTLRSIKKRRDCAIELVDEWGSSQTDARCMKRFQNQPKSARFKKCRCIPDARTLLPIKIVSKLGKKDLSEFRLLQRAMNEALEENEPLLSKVKSYYKNWQLNLECSVTWHRDVVAAKNILLKGLWTLLGLPIPDAINRYKARDAVAEAAEVAADVAEAAAAAAANVDNDVEMFEYDQQPADHAV

SEQ ID NO: 3438 - protein, 773 aa, Contarinia nasturtii
MRRKRAKNGRSTSLKMTLNQVLREEYRAPFIDQVTYWCLSATMIMTLASLLFLFKANKAFDDENVRFFKGESDEYTNDEFNKYVNGVIGECFTSVLQENYHKLPLAFRRTVEQACPDFLRPENWPAREGMGNAFNHLITQYITNVKNNIKVWAFSRIKKFFTLKRYELNLNRQGNLITELDVKRATKIVMFQSRVERNANIDLLLNEAAGIGLPINVHFQNLIRDRWFQTIPIFINIQRQIFDFHAKYEMLKQRWFQYRRDPNKNVMPTTPLPPKIKNFLVVPIHDFDMKHIRIDIHLFYLIARKFGALKLAKGKRGQPINIEKTEYDSNPAFYWNLIFDMPKISKLGNGKEFDFAVATDSVAVSLCFVKPERNTPELDNNTIKEKYNNFEFDYVLGIDPGVRTWNATVRKHVRSGNEENITIDGPKYHFKAKYGKRKRKSDQWTELLQKQRELDYKRYAFFPSPKGRSHWMCYIAYYVKMMKPAMAVYTTRKFIRLRLDKYIEENRASDKIAASLTKKKSALVFIGAAQIAPNSPIGIKKRLRCPGLRRLLNSFKKLGNCIVRLVDEYNTSQTCAKCFRPFDRRTKSDRYKVCQHCIPSEDESSQWNLPNVIITMKSNRVYQQLRKYAVDFVNRLNAANPDHIPMDSDGLVSKLQVCFKNWQLNTGIWKDDRAPFQLKTVWHRDIVAAKNIMYKGEKISLKLKMFKNVLANNLLFTILFLGLCTVLGLDIHPQLLRPQNQNAAVQNQAADDEDSSDDEDYVYVLDVSDDDQF

SEQ ID NO: 3439 - protein, 772 aa, Contarinia nasturtii
MDDDELDDNQPEESKYVVIKCGLQTILRQQHERIERVGEVVTKMLFERSVQMTEVAALASLSILFILNEALDNDDRAFFLQPHPRLFIADCFRAVLNQHVNNINSQYRILPEFRFMVERNSEEQFRWPDDEKLGNGLRYFYKQYITNIQTNTNTWCEKRLENFFRMRCWYRNRFNNGSRFDSIDIRNAKEFSYRFKNLTNGNNGNNVDPQRVEKFNILMRDLTEIGWSGTVSMKFFAKYRWFESLWLFGQMQRQIEVYHSHAEQWNTIHEMFRNNPNFQEPTINRPPKISSFALIPLCDYHLKNVRLDIKDLYNKIVNELDLVPSFLNTRTNRMNKRNLKYYTQTDRSGLWNMLFDVGKINKLGKSKSFHHQILTDSVSISIMYKKPQRQQRPQRQQRPQRQQRPQQTTQANRGPEKLIGKKYIIGIDPNEKSWLSVVRRNIQKTPDEPAVEENIIIPNQRFHWETQQKKRDKEAKKLAGWFDIEEKEHLKTYPYRPPSPRNSTWKSYIEYRIKMLRKGMAAYATREYARLDLDHHIRSTRVNDQIAVCVTNNKPSLVQFGAWAMKPDRPFGIKKRKRCPGSRKFRVSIKKLGHSEVEMQDEWGTSQTCANCQERFLRHTKDDRFKVCYDCRAKKIDGLPDSVAGLPDIIVSTVNRRVLRRKRAIIKRQIIDGNREAVNEKLRTGRLMSKVKVTYKNWPLNVDDDDVVPQTVTWHRDIVAAKCIMLKGMNQLETEYSLFNVFALNYIGLCRIFDVPLPVSLLRPPDQNNNVN

SEQ ID NO: 3440 - protein, 762 aa, Contarinia nasturtii
MKKRRAKINSAFKKNTAKLNDNEELRSIKLSAPSVFKSEYSEALTEHFFHKCYDGTVICYPGSTLFFYVVNIAADNDDRQYFIDSVGKNVIRECFAAVSRENLENPNQPKIPRGFLEMIADDQFEWPSRYQMGNAFEYLNQQYLSNVTTNLTTHLDNILENFLQMIRYQLNEDPNRLIKFDGIDIRNAKNNLMFNQDCTGVDQHRMNKMNELYEQVAVRCLPSFRNHLSMIEYIEKKWFESLWFFIFIQREISIFLEEHHDLVQLWLRHQRHPLFYCKPSKPLPPKIRNFTVIPICDSQLKHIKFDQVDLMSLLAQWKVVPKIFNNDDGGHNMYSRNYYKENEDEAWAILFNMDKINEIKKPNQQFHHMIVCDSVSASVLYRTPKPEIENTELHRQRIKQKLENNEYKYIVAIDPGMKTYLAGIRRNIEDRTEENFKISSKSYHWGAGQKVRDKMGKLMTARFTQREQLDRESYPSIPSPRGIRWRNYVRHRLTMVKDARRRYSRLSFDKYIGSQGEKDWLAKVITKNEPSLINIGAVDMAPNSPIGIKKGKRCPGTRHLQCSVKKLGHSDVHKVNKDFTSQHCANCQKKSPIQTQKYRFKVCHCTRDAPIPQEIEPYISLPRLIVTKKSQRRKKKDSCVKKLIARGIMDPANQPAEFQPGRLESKKMYFLINWLLNSVNAIQMGGDADKYPEQQQQHQKRFCTVWHRDIVAARCIMYKGLCYIFNLEMHNSYVRAPAPPRPPLRRRQPARRRANANVVPDQ

SEQ ID NO: 3441 - protein, 491 aa, Contarinia nasturtii
MTTADNWFKYVPIFLHLQRYICDHQRNREAALRRGERTEPRDYRNFTVFPVSTFKRHHIRIDNKGLYFMLREIGCPNPRLIRRDGTTKQCKELKAADWDVLWRTYFDIDAIERTTQNDNCATIKFRNSIQTDGVAMSFWMERTKFVVVKDENEIMRETQEKLLKAQLVYGLDPGLQLVIGGVCVTNYNDPNKENRREKLVRLTSGQYNHMIGYCKRNKWRKKLTFNIDEKMRIHRESFDEQPGPHSDNIDRYVDHILRHFNEKFEAYTQYEYALQDFLQYIDTNKTLDKLADWLIDGKETFVFVGENFIAADSEAKGYIRSKVRDLFEKMKRRRNCIVVKVDEFRTTKVCSYCFKDLEFPKIGDRVKMKYRYSTCRGCEPLPVGNKPHGPIDSRKSNHLLTKQRKHRPHPGPRMASKFRRYEEKRTIGRTITWNRDTNAGRNILYKDIGRCAVMNEELHPVFQRPTAPIQNQQPIQGTSRSIQDQVRNSRP

SEQ ID NO: 3442 - protein, 637 aa, Contarinia nasturtii
MVERNSEEQFRWPDDEKLGNGLRYFYKQYITNIQTNTNTWCEKRLENFFRMRCWYRNRFHNGSRFDNIDIRNAKEFSYRFKNLTNGNNGNNVDPQRVEKFNILMRDLTEIGWSGTVSMKFFAKYRWFESLWLFGQMQRQIEVYHSHAEQWHTIHEMFRNNPNFQEPTINRPPKISSFALIPLCDYHLKNVRLDIKDLYNKIVNELDLVPSFLNTRTNRMNKRNLKYYTQTDRSGLWNMLFDVGKINKLGKSKSFHHQILTDSVSISIMYKKPQRQQRPQRQQRPQRQQRPQQTTQANRGPEKLIGKKYIIGIDPNEKSWLSVVRRNIQKTPDEPAVEENIIIPNQRFHWETQQKKRDKEAKKLAGWFDIEEKEHLKTYPYRPPSPRNSTWKSYIEYRIKMLRKGMAAYATREYARLDLDHHIRSTGVNDQIAVRVTNKKPSLIQFGAWAMKPDRPFGIKKRKRCPGSRKFCVSIKKLGHSEVEMQDEWGTSQTCANCQERFPRHTKDDRFKVCYDCRAKKIDGLPDSVAGLPDIIVSTVNRHVLRRKRAIIKRQIIDGNREAVNEKLRTGRLMSKVKVTYKNWPLNVDDDDVVPQTVTWHRDIVAAKCIMLKGLCRIFDVPLPVSLLRPPNQNNNGN

SEQ ID NO: 3443 - protein, 639 aa, Contarinia nasturtii
MVERNSEEQFRWPDDEKLGNGLRYFYKQYITNIQTNTNTWCEKRLENFFRMRCWYRNRFNNGSRFDSIDIRNAKEFSYRFKNLTNGNNGNNVYPQRVEKFNILMRDLTEIGWSGTVSMKFFAKYRWFESLWLFGQMQRQIEVYHSHAEQWHTIHEMFRNNPNFQEPTINRPPKISSFALIPLCDYHLKNVRLDITDLYNKIVNKLDLVPSFLNTRTNRMNKRKVKYYTQIDRSGLWNMLFDVGKIYKLGKSKPFHHQILTDSVSISIMYKKPQRQQRPQQTTQANRGPEKLIGKKYIIGIDPNEKSWLTVVRRNIQKTPDEPAVEENIIIPNQRFHWETQQKKRDKEAKKLAGWFDIEEKEHLKTYPYRPPSPRNSTWKSYIEYRIKMLRKGMAAYATREYARLDLDHHIRSTRVNDQIAVRVTNNKPSLVQFGAWAMKPDRPFGIKKRKRCPGSRKFRVSIKKLGHSEVEMQDEWGTSQTCANCQERFPRHTKDDRFKVCYDCRAKKIDGLPDLVAGLPDIIVSTVNRRVLRRKRAIIKRQIIDGNREAVNEKIRTGRLMSKVKVTYKNWPLNVDDDDVVPQTVTWHRDIVAAKCIMLKGMNQLETEYSLFNVFALNYIGLCRIFDVPLPVSLLRPPD

SEQ ID NO: 3444 - protein, 711 aa, Contarinia nasturtii
MKRRRAKINSAFKKNTAKLNDNEELRSIKLSAPSVFKSEYSEALTEHFFHKCYNGTVICYLGSTLFLYVVNLAADNDDRQYFIDSDGKNVIRECFAAVSRENLENPKQPKIPRGFLEMIADDQFEWPSRYQMGNAFEYLNQQYLSNVTTNLTTHLDNILENFLQMIRYKLNEDPNRLIKFDGIDIRNAKNNLMFNQDCTGGDQHRTNKMNELYEQVAVRCLPSFRERLSMIEYIEKKWFESLWFFIFIQREISIFLEEHHDLVQLWLRHQRHPLFYCKPSKPLPPKIRNFTVIPICDSKLKHIKFDQDDLMSLLAQWKVVPKIFNNDHGGHNMYSRNYYKENEDEAWAILFNMDKINEIKKPNQQFHHMIVCDSVSASVLYRTPKPEIENTELHRQRIKQKLENNEYKYIVAIDPGMKTYLAGIRRNIEDRTEENFKISSKSYHWGAGQKVRDKMGKRMTARFTQREQLDRESYPSIPSPRGIRWRNYVRHRLTMVKDAVAAYARRRYARLSFDKYIGSQGEKDWLAKVITKNEPSLINIGAVDMAPNSPIGIKKGKRCPGTRHLQCSVKKLGHSDVHKVNEDFTSQHCANCQKKFPIQTQKYRFKVCRNCTRDAPIPQEIEPYISLPRLIVTKKSQRRKKKDSCVKKLIARGIMDPANQPAEFQPGRLESKKMYFLKNWLLNPVNAIQMGGDADKYPEQQQQQQHQKRFD

SEQ ID NO: 3445 - protein, 519 aa, Contarinia nasturtii
MFNQDCTGGDQHRTNKMNELYEQVAVRCLPSFRERLSMIEYIEKKWFESLWFFIFIQREISIFLEEHHDLVQLWLRHQRHPLFYCKPSKPLPPKIRNFTVIPICDSKLKHIKFDQDDLMSLLAQWKVVPKIFNNDHGGHNMYSRNYYKENEDEAWAILFNMDKINEIKKPNQQFHHMIVCDSVSASVLYRTPKPEIENTELHRQRIKQKLENNEYKYIVAIDPGMKTYLAGIRRNIEDRTEENFKISSKSYHWGAGQKVRDKMGKRMTARFTQREQLDRESYPSIPSPRGIRWRNYVRHRLTMVKDAVAAYARRRYARLSFDKYIGLQGEKDWLAKVITKNEPSLINIGAVDMAPNSPIGIKKGKRCPGTRHLQCSVKKLGHSDVHKVNEDFTSQHCANCQKKFPIQTQKYRFKVCRNCTRDAPIPQEIEPYISLPRLIVTKKSQRRKKKDSCVKKLIARGIMDPANQPAEFQPGRLESKKMYFLKNWLLNPVNAIQMGGDADKYPEQQQQQQHQKRFD

SEQ ID NO: 3446 - protein, 1288 aa, Bradysia coprophila
MKNTKELSDSDTDIEKRQRKWQHQRQQKGNKKPKKRGQSNGNGNGKDSDDDFVSTKKVYNSPPKLPNVAAVGRRKNVIPKKPPVSSNVNVNVLDSPPKLPNVAAAPKKPPVSSAAINAALLNATTKDRSSSPSNATAASNPAINITSHRNTTSSIIGSGRTGSTQEVAHPLPIRQSPPPMEYGSEWDTDGEATIAQLKQMQRKRPSKKAHSTSTKPEVKQTPVQSNRKRAASTDEASDAVEATTKRSTSTKRSKASKRSKATKTQQDSADEAGDADEETTKRSTSTKRSKASKRSKVTKTQQDSADEAGDADEATTKRSTSTKRSKASKAQQRKDDDENGNRAVIQTQLEEIIFLGNVFDKSIRRFTCPFATCNVNYSTFLNLKNHVKKTHEETLQKPIETDTNNWRRIQNANNRFDITTVKQKLRPLIIDGETIIKKQRVLEPLATEKTEVATKVFDIMNKQAVELSKLAILFSSLVYFDVYNTISDPENGNEIDRIFEEEFNWKEMILEFKQFQRNTAKAKKPRPDKHNTFFDLCRKYDVETYFTETSQNAWNSIVDTFATNFKTNITTHLYSRIRKWLAFKLRDGKKKKDVCGKENRKDINNKIYHTIKFLFDSEKCTQAEEVQHELICELQKICQFPNFNHGGRSYFERLRYDFKEDGDDDLGKPKRKRKCAAPKKTTKKSKKKKKKTQNNGPRLNWFQMVPAMVRLQRRIYEINLSRKQTLIDAGIIKEKKKRKRKRKRKRKRKNESKPEPSSTENKRQAGGTKKKREIDPEATHYAKLPNFIVVPQNSFHTMHFPIDTKALFDILKNLPQFMAILNQAEFLELQIDDDPNRKTTNPFWYFLFNIQKMETATKKFGGRITTNGSDVSIQYCKLRKEKELTKAEILEMASNRKRKHDVIDSDSESESEDDDDDDDDNAKTIKTDPAIVSALTNITNMEDLSVSGVDLGVRNVAATVIRKWSKSSDGYEVHESNVLHKSKDYHYKAGFARRQRKGKKLHGEFDERYQKDRQSQPIEPSQRSPDYIKFLDSRLKWFNEGTATYMQRVVTNVKFDKFRSTQKQMMAMAKEIVGDINVHDKATTQPSKIRVVFVGNCSTPANSTIKGHRRSPGNAPIVRYLKQIPQTYVDATIDEYCTTKKCSRCYETLDDVEFSKERLKLCHNCKLAENSTSTNLVSTYQRKKVIAEAMIPITEDYPKPTQFERAQRVAMERTKRWSFGDKMRMAARIKLKSTTYTVNTTATLKHLYWNRDGNAARNIMQLGLCQYNDCLPIEFNKDEAFQRPKKKD

SEQ ID NO: 3447 - protein, 327 aa, Bradysia coprophila
MRTNEETLFRLTSRKFHNMCQQNIRDRKAKRYTSQLETEMAHDREVNFGGTIASPMSATNYMLFIDHRLKHFNSCIALYTQNKYTELAFHKHVHTQKAMDGIVNELLPSSRSHERSLLVIGGTEFNPSAPIKKYRRCPGVRQLVKFVRKRTGCDIVYADEYNTSQVCGRCQRRFKTSDDETIQHKRWERKGARMRLCSNCTPNDNIIPLPTTINTRMSPRAQHLHRLTITNRLFFNVAAYSMEDAKRESDNIHYIAENCCYDMSHDKHTFDPNDRTTQLKCVWNHDISAARNILIKGVASITGIPAPRTLYRQTQINEENSSDESMD

SEQ ID NO: 3448 - protein, 209 aa, Bradysia coprophila
MIIPRCVFRNVAATVIRKWSKSSDGYEVHESNVLHKSKDYHYKAGFARRQRKGKKLHGEFDERYQKDRQSQPIEPSQRSPDYIKFLDSRLKWFNEGTATCMQRVVTNVKFDKFRSTQKQMMAMAKEIVGDINVHDKATTQPSKIRVVFVGNCSTPANSTIKGHRRSPGNAPIVRYLKQIPQTYVDATIDEYCTTKKCSRCYETLDDVVF

SEQ ID NO: 3449 - protein, 1110 aa, Bradysia coprophila
MEYGSEWDTDGEATIAQLKQMQRKRPSKKAHSTSTKPEVKQTPVQSNRKRAASTDEASDAVEATTKRSTSTKRSKASKRSKATKTQQDSADEAGDADEETTKRSTSTKRSKASKRSKVTKTQQDSADEAGDADEATTKRSTSTKRSKASKAQQRKDDDENGNRAVIQTQLEEIIFLGNVFDKSIRRFTCPFATCNVNYSTFLNLKNHVKKTHEETLQKPIETDTNNWRRIQNANNRFDITTVKQKLRPLIIDGETIIKKQRVLEPLATEKTEVATKVFDIMNKQAVELSKLAILFSSLVYFDVYNTISDPENGNEIDRIFEEEFNWKEMILEFKQFQRNTAKAKKSRPDKHNTFFDLCRKYDVETYFTETSQNAWNSIVDTFATNFKTNITTHLYSRIRKWLAFKLRDGKKKKDVCGKENRKDINNKIYHTIKFLFDSEKCTQAEEVQHELICELQKICQFPNFNHGGRSYFERLRYDFKEDGDDDLGKPKRKRKCAAPKKTTKKSKKKKKKTQNNGPRLNWFQMVPAMVRLQRRIYEINLSRKQTLIDAGIIKEKKKRKRKRKRKRKRKNESKPEPSSTENKRQAGGTKKKREIDPEATHYAKLPNFIVVPQNSFHTMHFPIDTKALFDILKNLPQFKAILNQAEFLELQIDDDPNRKTTNPFWYFLFNIQKMETATKKFGGRITTNGSDVSIQYCKLRKEKELTKAEILEMASNRKRKHDVIDSDSESESEDDDDDDDDDNAKTIKTDPAIVSALTNITNMEDLSVSGVDLGVRNVAATVIRKWSKSSDGYEVHESNVLHKSKDYHYKAGFARRQRKGKKLHGEFDERYQKDRQSQPIEPSQRSPDYIKFLDSRLKWFNEGTATYMQRVVTNVKFDKFRSTQKQMMAMAKEIVGDINVHDKATTQPSKIRVVFVGNCSTPANSTIKGHRRSPGNAPIVRYLKQIPQTYVDATIDEYCTTKKCSRCYETLDDVEFSKERLKLCHNCKLAENSTSTNLVSTYQRKQVIAEAMIPITEDYPKPTQFERAQRVAMERTKRWSFGDKMRMAARIKLKSTTYTVNTTATLKHLYWNRDGNAARNIMQLGLCQYNDCLPIEFNKDEAFQRPKKKD

SEQ ID NO: 3450 - protein, 1290 aa, Bradysia coprophila
MKNTKELSSDSDTDIEKRQRKWQHQRQQKGNKKPKKRGQSNGNGNGKDSDDDFVSTKKVYNSPPKLPNVAAVGRRKNVIPKKPPVSSNVNVNVLDSPPKLPNVAAAPKKPPVSSAAINAALLIATTKDRSSSPSNATAASNPAINITSHRNTTSSIIGSGRTGSTQEVAHPLPIRQSPPPMEYGSEWDTDGEATIAQLKQMQRKRPSKKTHSTSTKPEVKQTPVQSNRKRAASTDEASDAVEATTKRSTSTKRSKASKRSKATKTQQDSADEAGDADQETTKRSTSTKRSKASKRSKVTKTQQDSADEAGDADEATTKRSTSTKRSKASKAQQRKDDDENGNRAVIQTQLEEIIFLGNVFDKSIRRFTCPFATCNVNYSTFLNLKNHVKKTHEETLQKPIETDTNNWRRIQNANNRFDITTVKQKLRPLIIDGETIIKKQRVLEPLATEKTEVATKVFDIMNKQAVELSKLAILFSSLVYFDVYNTISDPENGNEIDRIFEEEFNWKEMILEFKQFQRNTAKAKKPRPDKHNTFFDLCRKYDVETYFTETSQNAWNSIVDTFATNFKTNITTHLYSRIRKWLAFKLRDGKKKKDVCGKENRKDINNKIYHTIKFLFDSEKCTQAEEVQHELICELQKICQFPNFNHGGRSYFERLRYDFKEDGDDDLGKPKRKRKCAAPKKTTKKSKKKKKKTQNNGPRLNWFQMVPAMVRLQRRIYEINLSRKQTLIDAGIIKEKKKRKRKRKRKRKRKNESKPEPSSTENKRQAGGTKKKREIDPEATHYAKLPNFIVVPQNSFHTMHFPIDTKALFDILKNLPQFKAILNQAEFLELQIDDDPNRKTTNPFWYFLFNIQKMETATKKFGGRITTNGSDVSIQYCKLRKEKELTKAEILEMASNRKRKHDVIDSDSESESEDDDDDDDDDNAKTIKTDPAIVSALTNITNMEDLSVSGVDLGVRNVAATVIRKWSKSSDGYEVHESNVLHKSKDYHYKAGFARRQRKGKKLHGEFDERYQKDRQSQPIEPSQRSPDYIKFLDSRLKWFNEGTATYMQRVVTNVKFDKFRSTQKQMMAMAKEIVGDINVHDKATTQPSKIRVVFVGNCSTPANSTIKGHRRSPGNAPIVRYLKQIPQTYVDATIDEYCTTKKCSRCYETLDDVEFSKERLKLCHNCKLAENSTSTNLVSTYQRKQVIAEAMIPITEDYPKPTQFERAQRVAMERTKRWSFGDKMRMAARIKLKSTTYTVNTTATLKHLYWNRDGNAARNIMQLGLCQYNDCLPIEFNKDEAFQRPKKKD

SEQ ID NO: 3451 - protein, 830 aa, Bradysia coprophila
MNKQAVELSKLAILFSSLVYFDVYNTISDPENGNEIDRIFEEEFNWKEMILEFKQFQRNTAKAKKPRPDKHNTFFDLCRKYDVETYFTETSQNAWNSIVDTFATNFKTNITTHLYSRIRKWLAFKLRDGKKKKDVCGKENRKDINNKIYHTIKFLFDSEKCTQAEEVQHELICELQKICQFPNFNHGGRSYFERLRYDFKEDGDDDLGKPKRKRKCAAPKKTTKKSKKKKKKTQNNGPRLNWFQMVPAMVRLQRRIYEINLSRKQTLIDAGIIKEKKKRKRKRKRKRKRKNESKPEPSSTENKRQAGGTKKKREIDPEATHYAKLPNFIVVPQNSFHTMHFPIDTKALFDILKNLPQFKAILNQAEFLELQIDDDPNRKTTNPFWYFLFNIQKMETATKKFGGRITTNGSDVSIQYCKLRKEKELTKAEILEMASNRKRKHDVIDSDSESESEDDDDDDDDDNAKTIKTDPAIVSALTNITNMEDLSVSGVDLGVRNVAATVIRKWSKSSDGYEVHESNVLHKSKDYHYKAGFARRQRKGKKLHGEFDERYQKDRQSQPIEPSQRSPDYIKFLDSRLKWFNEGTATYMQRVVTNVKFDKFRSTQKQMMAMAKEIVGDINVHDKATTQPSKIRVVFVGNCSTPANSTIKGHRRSPGNAPIVRYLKQIPQTYVDATIDEYCTTKKCSRCYETLDDVEFSKERLKLCHNCKLAENSTSTNLVSTYQRKKVIAEAMIPITEDYPKPTQFERAQRVAMERTKRWSFGDKMRMAARIKLKSTTYTVNTTATLKHLYWNRDGNAARNIMQLGLCQYNDCLPIEFNKDEAFQRPKKKD

SEQ ID NO: 3452 - protein, 1289 aa, Bradysia coprophila
MKNTKELSSDSDTDIEKRQRKWQHQRQQKGNKKPKKRGQSNGNGNGKDSDDDFVSTKKVYNSPPKLPNVAAVGRRKNVIPKKPPVSSNVNVNVLDSPPKLPNVAAAPKKPPVSSAAINAALLNATTKDRSSSPSNATAASNPAINITSHRNTTSSIIGSGRTGSTQEVAHPLPIRQSPPPMEYGSEWDTDGEATIAQLKQMQRKRPSKKAHSTSTKPEVKQTPVQSNRKRAASTDEASDAVEATTKRSTSTKRSKASKRSKATKTQQDSADEAGDADEETTKRSTSTKRSKASKRSKVTKTQQDSADEAGDADEATTKRSTSTKRSKASKAQQRKDDDENGNRAVIQTQLEEIIFLGNVFDKSIRRFTCPFATCNVNYSTFLNLKNHVKKTHEETLQKPIETDTNNWRRIQNANNRFDITTVKQKLRPLIIDGETIIKKQRVLEPLATEKTEVATKVFDIMNKQAVELSKLAILFSSLVYFDVYNTISDPENGNEIDRIFEEEFNWKEMILEFKQFQRNTAKAKKSRPDKHNTFFDLCRKYDVETYFTETSQNAWNSIVDTFATNFKTNITTHLYSRIRKWLAFKLRDGKKKKDVCGKENRKDINNKIYHTIKFLFDSEKCTQAEEVQHELICELQKICQFPNFNHGGRSYFERLRYDFKEDGDDDLGKPKRKRKCAAPKKTTKKSKKKKKKTQNNGPRLNWFQMVPAMVRLQRRIYEINLSRKQTLIDAGIIKEKKKRKRKRKRKRKRKNESKPEPSSTENKRQAGGTKKKREIDPEATHYAKLPNFIVVPQNSFHTMHFPIDTKALFDILKNLPQFKAILNQAEFLELQIDDDPNRKTTNPFWYFLFNIQKMETATKKFGGRITTNGSDVSIQYCKLRKEKELTKAEILEMASNRKRKHDVIDSDSESESEDDDDDDDDNAKTIKTDPAIVSALTNITNMEDLSVSGVDLGVRNVAATVIRKWSKSSDGYEVHESNVLHKSKDYHYKAGFARRQRKGKKLHGEFDERYQKDRQSQPIEPSQRSPDYIKFLDSRLKWFNEGTATYMQRVVTNVKFDKFRSTQKQMMAMAKEIVGDINVHDKATTQPSKIRVVFVGNCSTPANSTIKGHRRSPGNAPIVRYLKQIPQTYVDATIDEYCTTKKCSRCYETLDDVEFSKERLKLCHNCKLAENSTSTNLVSTYQRKKVIAEAMIPITEDYPKPTQFERAQRVAMERTKRWSFGDKMRMAARIKLKSTTYTVNATATLKHLYWNRDGNAARNIMQLGLCQYNDCLPIEFNKDEAFQRPKKKD

SEQ ID NO: 3453 - protein, 1285 aa, Bradysia coprophila
MKNTKELSSDSDTDIEKRQRKWQHQRQQKGNKKPKKRGQSNGNGNGKDSDDDFVSTKKVYNSPPKLPNVAAVGRRKNVIPKKPPVSSNVNVNVLDSPPKLPNVAAAPKKPPVSSAAINAALLNATTKDRSSSPSNATAASNPAINITSHRNTTSSIIGSGRTGSTQEVAHPLPIRQSPPPMEYGSEWDTDGEATIAQLKQMQRKRPSKKAHSTSTKPEVKQTPVQSNRKRAASTDEASDAVEATTKRSTSTKRSKASKRSKATKTQQDSADEAGDADEETTKRSTSTKRSKASKRSKVTKTQQDSADEAGDADEATTKRSTSTKRSKASKAQQRKDDDENGNRAVIQTQLEEIIFLGNVFDKSIRRFTCPFATCNVNYSTFLNLKNHVKKTHEETLQKPIETDTNNWRRIQNANNRFDITTVKQKLRPLIIDGETIIKKQRVLEPLATEKTEVATKVFDIMNKQAVELSKLAILFSSLVYFDVYNTISDPENGNEIDRIFEEEFNWKEMILEFKQFQRNTAKAKKPRPDKHNTFFDLCRKYDVETYFTETSQNAWNSIVDTFATNFKTNITTHLYSRIRKWLAFKLRDGKKKKDVCGKENRKDINNKIYHTIKFLFDSEKCTQAEEVQHELICELQKICQFPNFNHGGRSYFERLRYDFKEDGDDDLGKQKRKRKCAAPKKTTKKSKKKKKKTQNNGPRLNWFQMVPAMVRLQRRIYEINLSRKQTLIDAGIIKEKKKRKRKRKRKNESKPEPSSTENKRQAGGTKKKREIDPEATHYAKLPNFIVVPQNSFHTMHFPIDTKALFDILKNLPQFKAILNQAEFLELQIDDDPNRKTTNPFWYFLFNIQKMETATKKFGGRITTNGSDVSIQYCKLRKEKELTKAEILEMASNRKRKHDVIDSDSESESEDDDDDDDDNAKTIKTDPAIVSALTNITNMEDLSVSGVDLGVRNVAATVIRKWSKSSDGYEVHESNVLHKSKDYHYKAGFARRQRKGKKLHGEFDERYQKDRQSQPIEPSQRSPDYIKFLDSRLKWFNEGTATYMQRVVTNVKFDKFRSTQKQMMAMAKEIVGDINVHDKATTQPSKIRVVFVGNCSTPANSTIKGHRRSPGNAPIVRYLKQIPQTYVDATIDEYCTTKKCSRCYETLDDVEFSKERLKLCHNCKLAENSTSTNLVSTYQRKKVIAEAMIPITEDYPKPTQFERAQRVAMERTKRWSFGDKMRMAARIKLKSTTYTVNATATLKHLYWNRDGNAARNIMQLGLCQYNDCLPIEFNKDEAFQRPKKKD

SEQ ID NO: 3454 - protein, 340 aa, Bradysia coprophila
MVGVDPGYKLYIAALIKDTRTNTEKHIKISSKSFYSMTRQNYRDKKSKKWTAEYETAAKLDREDVNVYDEYPSSLTPQYMNYISHCMKFFHRGHEIYTTRKYSRLQLDQYIRTQQSMDSIVHTLTDNVGNGRILVCIEGKPFNPSSPIRKYRRCPGIRKLFQCLKKVPVCDVMFVDEYNTSKACGCCYRSFDQPKHKHWDTRKIRHRVCDDCHPDAEIISLPNTIIAPKSQRQLQTEKREVRHLIYQDNPSISWNESAQLANLKFAFLPEHKKHNQFQKVPFNPAIHKAVQKTVWNRDISAARNMIVKGVCALSNIATPASLTRATTATVADSDTSDEDY

SEQ ID NO: 3455 - protein, 607 aa, Bradysia coprophila
MYETNFKNNVKTHAQKRIVRLFKLWFIEANGVKPSSRHMKVLKNAATFMFKRKSTVPRNPYLTQRLMMYMPPQIVAMVANSNERGFMNKLHNAFNWFRMVPLYLRIQSDIDQYQATCRAADEPIHVRNFHVVPLHNSKTKYIRIDSATLKLMLQHLKIHPTKPSLKQPNKRVCLTNAEFEDAVDPTGTFNPNWFNYFKWSAVKKMQRHKEFDYQFLTNGVAVSLQFIVDQPPEPETFEKVMEKQKIKYRKFGQRFNNNQYKTIIGIDPGYKLYLAAVSKDMRTNEETLFRLTSRKFHNMCQQNIRDRKAKRYTSQLETEMAHDREVNFGGTIASPMSATNYMLFIDHRLKHFNSCIALYTQNKYTELAFHKYVHTQKAMDGIVNELLPSSRSHERSLLVIGGTEFNPSAPIKKYRRCPGVRQLVKFVRKRTGCDIVYADEYNTSQVCGRCQRRFKTSDDETIQHKRWERKGARMRLCSNCTPNDNIIPLPTTINTRMSPRAQHLHRLAITNRLFFNVAAYSMEDAKRESDNIHYIAENCCYDVSHDKHTFDPNDRTTQLKCVWNRDISAARNILIKGVASITGIPAPRTLYRQTQINEENSSDESMD

SEQ ID NO: 3456 - protein, 1287 aa, Bradysia coprophila
MKNTKELSSDSDTDIEKRQRKWQHQRQQKGTKKPKKRGQSNGNGNGKDSDDDFVSTKKVYNSPPKLPNVAAVGRRKNVIPKKPPVSSNVNVNVLDSPPKLPNVAAAPKKPPVSSAAINAALLNATTKDRSSSPSNATAASNPAINITSHRNTTSSIIGSGRTGSTQEVAHPLPIRQSPPPMEYGSEWDTDGEATIAQLKQMQRKRPSKKAHSTSTKPEVKQTPVQSNRKRAASTDEASDAVEATTKRSTSTKRSKASKRSKATKTQQDSADEAGDADEETTKRSTSTKRSKASKRSKVTKTQQDSADEAGDADEATTKRSTSMKRSKASKAQQRKDDDENGNRAVIQTQLEEIIFLGNVFDKSIRRFTCPFATCNVNYSTFLNLKNHVKKTHEETLQKPIETDTNNWRRIQNANNRFDITTVKQKLRPLIIDGETIIKKQRVLEPLATEKTEVATKVFDIMNKQAVELSKLAILFSSLVYFDVYNTISDPENGNEIDRIFEEEFNWKEMILEFKQFQRNTAKAKKPRPDKHNTFFDLCRKYDVETYFTETSQNAWNSIVDTFATNFKTNITTHLYSRIRKWLAFKLRDGKKKKDVCGKENRKDINNKIYHTIKFLFDSEKCTQAEEVQHELICELQKICQFPNFNHGGRSYFERLRYDFKEDGDDDLGKPKRKRKCAAPKKTTKKSKKKKTQNNGPRLNWFQMVPAMVRLQRRIYEINLSRKQTLIDAGIIKEKKKRKRKRKRKRKRKNESKPEPSSTENKRQAGGTKKKREIDPEATHYAKLPNFIVVPQNSFHTMHFPIDTKALFDILKNLPQFKAILNQAEFLELQIDDDPNRKTTNPFWYFLFNIQKMETATKKFGGRITTNGSDVSIQYCKLRKEKELTKAEILEMASNRKRKHDVIDSDSESESEDDDDDDDDNAKTIKTDPAIVSALTNITNMKDLSVSGVDLGVRNVAATVIRKWSKSSDGYEVHESNVLHKSKDYHYKAGFARRQRKGKKLHGEFDERYQKDRQSQPIEPSQRSPDYIKFLDSRLKWFNEGTATYMQRVVTNVKFDKFRSTQKQMMAMAKEIVGDINVHDKATTQPSKIRVVFVGNCSTPANSTIKGHRRSPGNAPIVRYLKQIPQTYVDATIDEYCTTKKCSRCYETLDDVEFSKERLKLCHNCKLAENSTSTNLVSTYQRKKVIAEAMIPITEDYPKPTQFERAQRVAMERTKRWSFGDKMRMAARIKLKSTTYTVNTTATLKHLYWNRDGNAARNIMQLGLCQYNDCLPIEFNKDEAFQRPKKKD

SEQ ID NO: 3457 - protein, 1289 aa, Bradysia coprophila
MKNTKELSSDSDTDIEKRQRKWQHQRQQKGNKKPKKRGQSNGNGNGKDSDDDFVSTKKVYNSPPKLPNVAAVGRRKNVIPKKPPVSSNVNVNVLDSPPKLPNVAAAPKKPPVSSAAINAALLNATTKDRSSSPSNATAASNLAINITSHRNTTSSIIGSGRTGSTQEVAHPLPIRQSPPPMEYGSEWDTDGEATIAQLKQMQRKRPSKKAHSTSTKPEVKQTPVQSNRKRAASTDEASDAVEATTKRSTSTKRSKASKRSKATKTQQDSADEAGDADEETTKRSTSTKRSKASKRSKVTKTQQDSADEAGDADEATTKRSTSTKRSKASKAQQRKDDDENGNRAVIQTQLEEIIFLGNVFDKSIRRFTCPFATCNVNYSTFLNLKNHVKKTHEETLQKPIETDTNNWRRIQNANNRFDITTVKQKLRPLIIDGETIIKKQRVLEPLATEKTEVATKVFDIMNKQAVELSKLAILFSSLVYFDVYNTISDPENGNEIDRIFEEEFNWKEMILEFKQFQRNTAKAKKPRPDIHNTFFDLCRKYDVETYFTETSQNAWNSIVDTFATNFKTNITTHLYSRIRKWLAFKLRDGKKKKDVCGKENRKDINNKIYHTIKFLFDSEKCTQAEEVQHELICELQKICQFPNFNHGGRSYFERLRYDFKEDGDDDLGKPKRKRKCAAPKKTTKKSKKKKKKTQNNGPRLNWFQMVPAMVRLQRRIYEINLSRKQTLIDAGIIKEKKKRKRKRKRKRKRKNESKPEPSSTENKRQAGGTKKKREIDPEATHYAKLPNFIVVPQNSFHTMHFPIDTKALFDILKNLPQFKAILNQAEFLELQIDDDPNRKTTNPFWYFLFNIQKMETATKKFGGRITTNGSDVSIQYCKLRKEKELTKAEILEMASNRKRKHDVIDSDSESESEDDDDDDDDNAKTIKTDPAIVSALTNITNMEDLSVSGVDLGVRNVAATVIRKWSKSSDGYEVHESNVLHKSKDYHYKAGFARRQRKGKKLHGEFDERYQKDRQSQPIEPSQRSPDYIKFLDSRLKWFNEGTATYMQRVVTNVKFDKFRSTQKQMMAMAKEIVGDINVHDKATTQPSKIRVVFVGNCSTPANSTIKGHRRSPGNAPIVRYLKQIPQTYVDATIDEYCTTKKCSRCYETLDDVEFSKERLKLCHNCKLAENSTSTNLVSTYQRKKVIAEAMIPITEDYPKPTQFERAQRVAMERTKRWSFGDKMRMAARIKLKSTTYTVNTTATLKHLYWNRDGNAARNIMQLGLCQYNDCLPIEFNKDEAFQRPKKKD

SEQ ID NO: 3458 - protein, 272 aa, Bradysia coprophila
MDRQSGNEEPSSKNPDYRQYLTSRLKWFNEATQAYMHRQVTNLQFAKYRSTQTAMTQMAREIVGEVDVVGHKLEEKSCRIVFMGNCSTPANSTIRGHRRAPTGKKLSRYLQQRRNVIIISTPETNSTKNCSRCYEPLDNVESSKERLKICTKFCTPARDSMPAHHITTYTSKRSIKRKMKKVGTKPSQSERKSRVSMNRIDRWSIDDKIRIAKRLTLKRTIYVGPIPARHNILWNRDINAARNIGYLGLCRYGKFIDSSLNTTENTAFSRST

SEQ ID NO: 3459 - protein, 1110 aa, Bradysia coprophila
MEYGSEWDTDGEATIAQLKQMQRKRPSKKAHSTSTKPEVKQTPVQSNRKRAASTDEASDAVEATTKRSTSTKRSKASKRSKATKTQQDSADEAGDADEETTKRSTSTKRSKASKRSKVTKTQQDSADEAGDADEATTKRSTSTKRSKASKAQQRKDDDENGNRAVIQTQLEEIIFLGNVFDKSIRRFTCPFATCNVNYSAFLNLKNHVKKTHEETLQKPIETDTNNWRRIQNANNRFDIATVKQKLRPLIIDGETIIKKQRVLEPLATEKTEVATKVFDIMNKQAVELSKLAILFSSLVYFDVYNTISDPENGNEIDRIFEEEFNWKEMILEFKQFQRNTAKAKKSRPDKHNTFFDLCRKYDVETYFTETSQNAWNSIVDTFATNFKTNITTHLYSRIRKWLAFKLRDGKKKKDVCGKENRKDINNKIYHTIKFLFDSEKCTQAEEVQHELICELQKICQFPNFNHGGRSYFERLRYDFKADGDDDLGKPKRKRKCAAPKKTTKKSKKKKKKTQNNGPRLNWFQMVPAMVRLQRRIYEINLSRKQTLIHAGIIKEKKKRKRKRKRKRKRKNESKPEPSSTENKRQAGGTKKKREIDPEATHYAKLPNFIVVPQNSFHTMHFPIDTKALFDILKNLPQFKAILNQAEFLELQIDDDPNRKTTNPFWYFLFNIQKMETATKKFGGRITTNGSDVSIQYCKLRKEKELTKAEILEMASNRKRKHDVIDSDSESESEDDDDDDDDDNAKTIKTDPAIVSALTNITNMEDLSVSGVDLGVRNVAATVIRKWSKSSDGYEVHESNVLHKSKDYHYKAGFARRQRKGKKLHGEFDERYQKDRQSQPIEPSQRSPDYIKFLDSRLKWFNEGTATYMQRVVTNVKFDKFRSTQKQMMAMAKEIVGDINVHDKATTQPSKIRVVFVGNCSTPANSTIKGHRRSPGNAPIVRYLKQIPQTYVDATIDEYCTTKKCSRCYQTLDDVEFSKERLKLCHNCKLAENSTSTNLVSTYQRKKVIAEAMIPITEDYPKPTQFERAQRVAMERTKRWSFGDKMRMAARIKLKSTTYTVNTTATLKHLYWNRDGNAARNIMQLGLCQYNDCLPIEFNKDEAFQRPKKKD

SEQ ID NO: 3460 - protein, 519 aa, Mercenaria mercenaria
MNRKRSLSPLTLWKAAHVFKHQNLECWFQFAKDGESHNKVFASDFERTRKRAKLEDEKTFMTTFSVGIRPTRNQKRVLNEMLRVSNHAYNWCNYLVCEKNLKPKEYDLQKYVSKTNSSDVPTDFRMNNNDDWYFNNKMTKIRDAACKDFCTMYKSALTNQRKKKKYIKTVSLKDKDDMNPSHGAFEIQKALIRKLKETDSDDYDILNNCLSVMADNFTMRRKDVRNRFLRLSKPVSKLPPLEHAVKIVKTAKGKFVLHIPCEPTYTRSKRYDEPFDSLCGIDPGGRTFLTIYDPSKPRAFQIASRCKAPSKPVRKRTKKKGEKWHRKKKSQRRVGSTIDKIDSLHAKKDYVNSKMQAAIRRKQPQAKKDRQRQLQKVYYQLGNVIRWVHLRCTYNLMQYSYVAIGKIGIPSIIRRQCNGKRRRINKKSVRHLTVWNHCKFRERLVYRAKGTKTNVIVQDESYTSKTCSECGTINSKLGGSETFKCTNPSCDYITNRDVNGAKNILRKSLGIGSIKTYRA

SEQ ID NO: 3461 - protein, 478 aa, Mercenaria mercenaria
MKRKREQMTLWKAAFVNGRETFKSWIDKARMLELNCDISSASSTHYSDLDLKSKCAKIEDKFMCTFSVGIRPTSKQNRTLNQMLKVSNYAYNWCNHLVKEKDFKPKQFDLQRVVTKTNSHDVPAEYRLPGDDWFFDNKMSSIKLTACKNFCTMYKSARTNQKKTKVDLRNKDTALLREGSFEVQRQYVRLLTEKDIPDERIRQSRIALMADNFSKSKKDWKERFLRLSKNVSKIPPLNHDMKVCKRPNGKFILQIPCDPICTRQIQVHTSDSICSIDPGGRTFATCYDPSNIKTFQIGPEADKKEIIHKFHNKIDNVHRLLSYAQKKKQTQAVQDRIGQLKKLHLKLKTYVDDVHLKLCSYLVKNYKLVVLGRISVSSIVRKDRPNHLAKKGNRDLLCWQHFRFRQRLLHRVRGTDCEAIAQDERYTSKTCGNCGVQNNKLGGNETFHCKSCNYKTHRDVNGARNILCKYLGHFPFAT

SEQ ID NO: 3462 - protein, 463 aa, Mercenaria mercenaria
MKRKREQMTLWKAAFVNGRETFKSWIDKVRMLELNCDISSASSTHYSDLNLKTKCAKTEDKFMCTYSVGIRPTSKQKRTLNQMLKVSNYAYNWCNYLVKEKDFKPKQFDLQRVVAKTNSTDVPAEYRLPGDDWSFDNKMSGIKLTACKNFCTMYKSAQTNQKKTKVDLRNKDIVQLREGSFEVQSKYVSLLTEKDIPGERIRQLRIALMPDSFSKSKKDWKERFLRLSKNVSKIPPLSHDMKVCKRPDGKFILQIPCDPICTRQIQVQTSDSICSIDPGGRTFATCYDPSNIKAFQIGPEADKKEIIHEFHNKIDYVHRLLSHAQEKKQTQAVQDRIGQLKKLHLKLKTYVDDVHLKLCSYLVKNYKLVVLGKISVSSIVRKDRPNHLGKKGNRDLLCWGHYRFRQRLLHRVRGTDCEAITQDERYTSKTCGNCGVKNNKLGGKETFTYMKNKHLNVLDKTLT

SEQ ID NO: 3463 - protein, 478 aa, Mercenaria mercenaria
MKRKREQMTLWKAAFVNGRETFKSWIDKARMLELNSDVSSASSTHYSDLNLKSKCARIEDKFMCTFSVGIRPTSKQKRTLNQMLKVSNYAYNWCNYLVKEKDFKPKQFDLQRVVTKTNSTDVPAEYRLSGDDWFFDNKMSSIKLTACKNFCTMYKSAQTNQKKTKVDLRNKDITQLREGSFEVQKLFVRLLTEKDIPDELVRQSRIALMPANFSKYMKDWKERFLRLSKNVSKIPPLSHDMKVCKRPNGKFVLQIPCDPKYTRRIQVHTSDSICSIDPGGRTFATCYDPSNIKTFQIGPEADKKEIIHKFHNKIDQVHRLLSYAQKKKQTQAVQDRIGQLKKLHLKLKTYVDDVHLKLCSYLVKNYKLVVLGKISVSSIVRKDRPNHLAKSANRDLLCWQHFRFRQRLLHRVRGTDCEAIAQDERYTSKTCGNCGVKNNKLGGKETFICESCNYKTHRDVNGARNIMCKYLELFPFAA

SEQ ID NO: 3464 - protein, 478 aa, Mercenaria mercenaria
MKRKREQMTLWKAAFVNGQETFKSWIDKARMLELNCDVSSASSTHYSDLNLKTKCAKTDDKFMCNYSVCIRPTSKQKRTLNQMLKVSNYAYNWCNYLVKEKDFKPKQFDLQRIVAKTNSTDVPAEYRLPGDDWFFDNKMSSIKLTACKNFCTMYKSTQTNQKKTKVDLRNKDIVQLREGSFEVQSKYVRLLTEKDIPGERIRQSRIALMPDSFSKSKKDWKERFLRLSKNVSKIPPLSHDMKVCKRPNGKFILQISCDPICTRQIQVQTSDSICSIDPGGRTFATCYDPSNIKTFQIGPEADKKEIIHEFHNKIDYVHRLLSHAQEKKQTQAVQDRIGQLKKLHLKLKTYVDDVHLKLCSYLVKNYKLVVLGKISVSSIVRKDRPNHLAKSANRDLLCWQHYRFRQRLLHRVRGTDCEVIIQDERYTSKTCGNCGEKNNKLGGKETFTCESCNYKTHRDVNGARNILCKYLGLFPFAA

SEQ ID NO: 3465 - protein, 272 aa, Aphidius gifuensis
MKKNKNVAVGDANANDASGDSAGGGGGGGGALVVSAVPAPLAPAVVGESDNNKIKITKHQQKKENKVIKQQKLAEEYKKKFTPEELLQRSENRKQEQLKKKMYKKLRAEKYAEKSKEFLKKQLEDREAREQKKLFYQENPNYQQQQLQDNTNNNKIWTIVFIGQTKIMKKMKGYRKPPLRQLEKKLLMLENVIVIRVDEYYTTQNCSLCFQQAIVSQAGHRYTFCPHCKITWHRDINAARNIAKIGLAYSGINPNKTPKDFPTFDRKWRKKN

SEQ ID NO: 3466 - protein, 260 aa, Mayetiola destructor
MTTDGVSAHFVMRNKQKQKSKREVVDVNGDVLTPEIVGFIDDRIVREISDEMRQKYNNNEYKTIIGYDPGYKLPVAIVRKDIATGDETNFTMNWYEFRKLCGDVERKQKRYRVAAAGDFKFSANSPIRGSVRCPMRSLFNLLAQQYCDVVEIDEHLTSKLCSICGSRMIKKGTRKDRYFICKNKMPATSILPQAPAWTTKRHIDRIRDEFNELPLAGLFIHQDNGGRRIKRTIDLPTERRFHSNELDDHHYQLQQHEIIN

SEQ ID NO: 3467 - protein, 398 aa, Rhizopus delemar
MKYANQIASYEVVKIVTAYLNGVKNQGAENRDEEKRGTEKEIEATVKTITEQISKVKLAISSRIVEDMPKEFSSSNDLNKIRNLFDSYSTDYRFAKGSIYYDCKANPLKHIKSYYRLSSMCEALQNKSFNCFPLRKGFIPSYMTIDTYILNAQILKNSIIGHLDQEVVWGAVLNVTSKAIKPQGERKFMKFRGTIYTDGVDVSILKQNQDTKKKGDSSGGKPKSIKADEFQHIEKLGKEDLLAGIGKCCAAELFLSHFKSSAVNKDKFVEYLQERAEVTPVMKVYYLNEDRPAAEDQGAGGFLPFRKMKLSNFINQQQADKRLAKKLRERFGNDAILMLGNWSAGKVKYHEPIRGVGMRRMLAKEGFQVYLLDEFRTSSLCPSCQNSELETFKNSTKP

SEQ ID NO: 3468 - protein, 879 aa, Rhizopus delemar
MDRKVTGHKIDIIIDSFKLYVEDNSDDDFQPVAISRKRKSRENIPQSGSPKRLKGKGKATDSEVTTTSSIGISTTDEPIVFNKITLEDNDLEYSSDDFDAPVVKRPFLGESTKSAFGITKSTSAAVGSSTTTPKTSLTPPKPNEPVPTAFKSAAASVKSSDIKEDSKKMSKRVMTIKTTVKNIWKPAYLQPLYDLIHTTNLLVTHTFAFTKYIYLQSLAANENFELNNFVTKDFFVEVFLSLVLSKGGNSTRLKDTTKNYRRLISKYKEAYFEDASYSPTNLPYAQQIALYECTKIQTAYYNNIKAHFGNRLRSLINKLFKKKEKTESLRGEMQANKSSSKVIKEAIRKTIYRPCNRVKLAIAKKEMPEVGLLDDFLSSYPEDYTFQKNSIYYDVMASPKNHFKAFLRLAQLSEAEQTKQFACFPLRSTFIPCYMTLDSKIIHYHILKSKKNPKTGSKFETWGAAVDLNKKAFKNQGFQKSLRFQGTLETDGVGVSIIKQNTDTSRKSPKPNTEKKVDGNQTEHIEGLTQAELKSTEGKCVLIDPGRQDLMYCMKETSTVEEKQTLIFTKNNRSKCSRHFRYLRKNTQPFVVQKAEAVLSRSESNSDYYGNETYFPESEFDFRVDQKCNLYYVNLFTTKIRGFFPQPENYSTDSSVNSQLYATYLQIMLQQKHISERLDDSGKSKVLGLAKEMCRRSQKGNYKKTISTALEKLQLLPFRKLKFSSKLFFDQNDQKLVRSLRAKFGQDAVLVFGDWSAPNVKYQESTRSKGLIRMLKKNGFVVYLINEYKTSSHCPTCENELEKFKTVPNPRPYQRKKKPDVLCNGLLRCKGLSCLKQQTTGIKRRLWNRDQAAVLNFLKILSSLRKTGEHPSLFTRKYL

SEQ ID NO: 3469 - protein, 323 aa, Rhizopus delemar
MTIDTYILNTQNLKNSIISHLDKKVVWGAVLDVTSKAMKPQRERRFMKFRGTIYTDGIGVSVLKQNYDMKKKGGSSGEKSKSMEADEFQDEVIAAELFLPYFKSSTANKDKFVEYLQERTKVTPVMKACYLNEDRPAAEDQGAGGFLTFRKMKLSSFINQQQADKRLAKKLIERFGNDAILILGNWSAEKIKYHEPIRGVGMRKMLTKEGFQVYLLDELRTSSLYPSCQNGELEVFKKVQSPRPYQRENYPIADRPGPLRYENQQCLKVVTSTIEATAKFPLRRFWNRDIAATLNFRHILFSLRANSERPERFCRLKTSLHQL

SEQ ID NO: 3470 - protein, 1073 aa, Rhizopus delemar
MNRTKAKQSSRFVGTSTLPPRRKHHSNSKRPRPPSPGEGTSDSKRKRIQFSDTELDTFFFLSMENQLKENIRTVVCKNNKKMNEQLVALKQKLSTAKKLLRGIITGAAKLAESTYNEPSQADLILRQMRSFMDNRVGKKNEIEWQEFVVKKFDTFKNEETNLAKSAQLESNDTDRDSVPDADCPAVDENSYRACTASINKLIREDLDPSIKDLIMKKLQRAMIGSTDYILYFSSLIQMMMICLKTNQFFLDGDVINTRKVNGFDITTIVPSEFHTDSPKYTITPLAMDVSDSPAFDADFSQLFQEQHFSLISTKYFGNRGSQGQTLNAHPIQTALFKLMDAEDIKKETFPVENVPSSLMSLALKIYMTNFKNMWADKTMINKLLDKLLVTLLRLHLASKRELQRRQNILNYISQKPEEKRPSKNYGRYILRAEKKKLARYKEKVREAEADSDLLLKRIRAVKMAETRIRSLEEKFAQDLVTEKDVNDEFPDATRKEVSVCLLIINTLKKFVPVRSKYHILPYQLLFCIFANDLLHYNEYSKFTRKLCPSMSSAHINALNIDALSLFQIMKSKTDDNQGQVEGMSTELTIYGYNEEPLSSVEIARRNKDAVFNSLFDMEKVRHTCESNGLKFGQRMSILPKLKVVRILGVKKTTVPPVKPQKISYLKRILRDPNILREGQKPLEDLKAETAKLEKEVKSLDQEREKALKCQKEQDSIKKIKALRKEWHNKVDKQTLYQRIEEERHLRDKTYLKINDIEDQLMEKKQVFEACVLRDFEDFTFCGTDNGLVNMTAAVPFSLKRFSFHLKLHNYYSVLDDDNKAAPVVQDIELQKYLKIPKATIISANEIDFGCGAFKQRVKRQTGKKLTRKGKEVQLIENSLSQKVTSTSNVSVEQFKHNFDAHVEHRKKLRDFYNTGNRMNERRHREIQKHRFTHRICTKERKALSQTSGNSPSTKKKLVMFIGDRGTGVGSRIKGFKKYGGRWKEVIHSEAANVCITNENLTSKIFLSKCAAKSRDSLSALAIGIVGLSTILFGAPLPAFKSHKISKFEAEKYITLTSPSRFEEETGSYAVVLE

SEQ ID NO: 3471 - protein, 227 aa, Rhizopus delemar
MKVYYLNEDRPAEEDQGAGGFLPFRKMKLSSFINQQQVDKRLAKKLSERFGNDAILILGNWSAGKIKYHEPIRGVGMRRMLAKEGFQVYLLDEFRTSSLCPSCQNGELETFKKVQNPRPYQREKYSVVDRHGLLRCKNQQHLKVVTSTIEATDKVSLHRLWNHDMAATLDFRHIFFSLRANGERPERFCKSKKPLSTGSKRKNMSSSSASTSQPTKRPNNPLWLQLH

SEQ ID NO: 3472 - protein, 667 aa, Rhizopus delemar
MKGKQKDTLFSSNQKKPSKSENDSFELYVEDNPDDDYQPVSGSQKRLKGKVKAIDSEVTTTSSTDISTTDEPTVFNKITLEDYDLEYSSDDFDAPAIKSPFLDESSKSASRITKTTSAAVESSTAASKASINSPKPSKLVPTAFKSVATSVKSSFCPVPVDKASDIKEGPKKISKRVMTIKTTQIALYECTKIQTAYYNNIKVHFGNRLRSLINKLFKKKEKAESLRGEMQANKSSSKVIKEAIRKTIYRPCNRVKLAIAKKEMPEVGLLDDQSRTQFNDFLSSYPEDYTFQKNSIYYDVMASPKNHFKAFFRLAELSEVEQMKQFACFPLHSTFIPCYMTLDSKIIHYHILKSKKNPKTGSKFETWGAAVDLNKKAFKNQGFQKSLRFQGTLETDGVGVSIIKQNIDTSRKSPKTNTEKKVDARINGFFPQPMNHYTDSSVKSQLYDTYLQIMLQRKHISERLDDSEKSKALGLAKEMYRRSQKSNYKKTISTTLEKLQLLPFRKLKFSSKLFFDQNDQKLVRSLRAKFGQDAVLVSGDWSAPNAKYQESTRSKGLIRMLKRNGFVVYLINEYKTSSHCPTCENELEKFKTVPNPRPYQRKKKPDVLCNGLLRCKSSSCLKQQTTGIKRRIWNRDQAAVLNFLKILNSLRKTGERPSLFTRKYPLD

SEQ ID NO: 3473 - protein, 337 aa, Rhizopus delemar
MTIDTYILNTQILKNSIISHLDKEVLWGAVLDVTSKAMKPQGERKYMKFRGTIYTDGVGVSVLKQSYDTMKKGGSSGGKPNSIEADEFQYIEKLGKEDLLTGVGKCVLIDPGRRDLLYYKFVEYLQERAKVTPVMKAYYLNEDRPAAEDQGAADKRLAKTLRERFGNDAILILGNWSAGNVKYHEPIRGVGMRRMLAKEGFQVYLFDEFRTSSVCPSCHNGGLETFKKVQNPRPYQREKYPVVDRHGHLRCKNQQCLNDVMSTMEATAKVPLHRLWNRDMAATLNFRHILFSLRANGERPEHFCRSKKPLSTGSKRKNMSSSSASTSRPTKRPNNPL

SEQ ID NO: 3474 - protein, 1269 aa, Rhizopus delemar
MTLPRLLKESRTSMKVNCTAKLNKYFLTDNSISVDYVWKHANHDLPMMLKILYNLVCLPSSVALCCEEYVEDTEKYLSMYNSIVKRKLNEVKGDVENLDQLLSYTMNRTKAKQSSRFVGTSTLPPRRKHRSNSKRPRSSSPGEGASDNKRKRIQFSDTELDAFFFLSMENKLKESIRTVVRKNNKKMNGQLAALKQKLSTAKKLPIGIITGDAKLAESTYNEPSQADLILRQIRSFMDNRVGKKNEIEWQEFVVKNFDTFKNEETNLAKSAQPESNDTDRDSVPDADRPVVDENSYRTCTASINKLIREDLDPSIKDLIIKKLQRAMIVPSEFHTDSPKYTITPLAMDVSDSLAFNADFSQLFQEQHFSLISTKYFSNRGSQDQTLNEHPIQTALFKLMDAENIKKETFPVGNVLSSLMSLALQIYVTNFKNMWADKIIVNKLLDKLLVILLPLHLAPKRELQRRQNILNYISRKPEEKRPSKSYGRYILRAEKKKLARYKEKVREAEADSELLLKRIRAVKMAETRIRSLEEKFAQKQDASSSIREKSVESTTTAKKETTPCDDLSRGRISQLKSGAKHLIFSKDLVTEKDVKDEFPDATRKEVSVCLLIINTLKKFVPVRSKYHILPYQLLFCIFANDVLHYAEYSKFTRKLCPAMLSAHVNALNIDAPSLFQIMKSKTDDNQGQVEGMSAELTIYSYNKEPLPSVEIARRNKDAVFNSLFDMEKVRHTCESNGLKFGQRMSVLPKLKVVRILGVKKTTAPPVKLQNMSYLKRILRDPNILREGQKSLEDLKAETAKIEKEVKSLDQEREKALKCQKEQDSMKKIKALRKEWHNKVDKQTLYQRIEEERHLRDKTYLKINDIEDQLMEKKQVLYYQRMAIRHNSRIHTVDTASAPPTTKKELKKDSRALVHSEACVLRDFEDFTFCGTDNGLVNMTAAVPFSLKRFSFHLKLHNYYSVLDDDNKAAPVVQGIELQKYLKTPKATTISASEIDFGCGAFKQRVKRQTGKKLTRKGKEVQLIENSLSQKVTSTSNVSVEQFKYNFEHRKKLRDFYNTGNRMNERRHREIQKHRFTHRICTKERRALSQTFGNNLSTKKKLVMFIEDRGTGVGSRIKGFKKYGGRWKEVIHSEAANVCVTNENLTSKTCIFCFRRLTHPRISVTKNGEVFSRKVKGSFYCTNPLCVSVLSKCAAKSRDSLSALAIGIVGLSTILFGVPLPAFKSHKISNIEAEKYIILTSPSRFEEENGSYAVVLEVRKDQARLITQKQN

SEQ ID NO: 3475 - protein, 1133 aa, Rhizopus delemar
MNKTKAKQSSRFVGTSTLSDVFFLVVNSKRPRSSSPGEGTSDNKHKRIQFSDIELDAFFFLSTENKLKESIRTVVCKNNKKMNEQLVALKQKLSTAKKLLRGIITGAAKLAESTYNEPSQADLILRQMRSFMDNRVGKKNEIEWQEFVVKKFDTFKNEEINLAKSAQLESNDADCDSVPDADCPAVDENSYRTCTASINRLIREDLDPSIKDLIMKELQRAMIGSTDYILDSPAFDADFSQLFQGQHFSLISTKYFNNRGSQDQTLNAHPIQTALFKLMDAEDIKKETFPVENVPSSLMSLALQIYMTNFKNMWADKTMINKLLDKLLVTLLRLHLAPKRGLQRRQNILNYISRKSEEKRPSKNYGHYILSAEKKKLARYKEKVREAEAGSCLLLKRIRAVKMAETRIRSLEEKFAQKQDASSSSREKSVESTTTTKKETTPCDGLSRGRISQLKSGAKHLIFSKDLVTEKDVNDEFPDATRKEVSVCLLIINTLNKFVPVRSKYHILSYQLLFCIFVNDVLHYAEYSKFTRKLCLAMSSAHVNALNIDAPSLFQIMKSKTDGNQGQVEGMSTELTIYGYNEEPLSSVETARRNKDAVFNSLFDMGKVRLTCESSGLKFGQRMSVLPKLKVVRILGVKKTNAPPVKPQKMFYLKRILRDPNVLREGQKPLEDLKAETAKLEKEVRGSKKRDIWDKTYLKINDIEDQLMEKKQVLYYQRMAIRHNSRIHIVDTASAPPTTKKELKKDSCGLVHTEACVLRDFEDFTFCGTDNGLVNMTAAVPFSFKRFSFQLKLHNYYSVLDDDNKAAPVVQNIELQKYLKTPKATTISASEIDFDCGAFKQRVKRQTGKKLTRKGKEVQLIENSLSQKVTSTSNVSVEQFKHNFDAHVEHRKKLRDFYNTGNGMNERRHREIQKHRFTHRICTKERKALSQTSGNSPSTKKKLVMFIGDRGAGVGSCIKGFKRYGGRWKEAIHSEAANVCVTNENLTSKACIFCFRRLTHPRISVTKNGEVFSRKVKGNIYCTNPLCVSVLSKCAAKSRDSLSALAIGIVGLSTILFGVPLPAFKSHKISNIEAEKYTILTSPSRFEEENGSYVVVLEARKGSSKVDHPEAKLKFIYLIVTVFYDGSFNVAPR

SEQ ID NO: 3476 - protein, 1052 aa, Rhizopus delemar
MTPNDVKDIVQSRLSAEVKRWIEEHVDDAINTSIDNDNSSSATLCCEEYVEDTEKYLSMYNSIVKRKLNEVKGDVENLDQLLSYTMNRTKAKQSSRFVGTSTLSDVFFLVVNSKRPRSSSPGEGTSDNKHKRIQFSDIELDAFFFLSMENKLKESIRTVVCKNNKKMNEQLVALKQKLSTAKKLLRGIITGAAKLAESTYNEPSQADLILRQMRSFMDNRVGKKNEIEWQEFVVKKFDTFKNEEINLAKSAQLESNDTDCDSVPDADCPAVDENSYRTCTASINRLIREDLDPSIKDLIMKELQRAMIGSTDYILDSPAFDADFSQLFQGQHFSLISTKYFNNRGSQDQTLNAHPIQTALFKLMDAEDIKKETFPVENVPSSLMSLALQIYMTNFKNMWADKTMINKLLDKLQVTLLRLHLAPKRGLQRRQNILNYISRKSEEKRPSKNYGHYILSAEKKKLARYKEKVREAEAGSCLLLKRIRAVKMAETRIRSLEEKFAQKQDASSSSREKSVESTTTTKKETTPCDGLSRGRISQLKSGAKHLIFSKDLVTEKDVNDEFPDATRKEVSVCLLIINTLNKFVPVRSKYHILSYQLLFCIFVNDVLHYAEYSKFTRKLCPAMSSAHVNALNIDAPSLFQIMKSKTDGNQGQVEGMSTELTIYGYNEEPLSSVETARRNKDAVFNSLFDMGKVRLTCESSGLKFGQRMSVLPKLKVVRILGVKKTNAPPVKPQKMSYLKRILRDPNVLREGQKPLEDLKAETAKLEKEVRGSKKRDIWDKTYLKINDIEDQLMEKKQVLYYQRMAIRHNSRIHIVDTASAPPTTKKELKKDSRGLVHSEACVPRDFEDFTFCGTDNGLVNMTAAVPFSLKRFSFQLKLHNYYSVLDDDNKAAPVVQNIELQKYLKTPKATTISASEIDFDCGAFKQRVKRQTGKKLTRKGKEVQLIENSLSQKVTSTSNVSVEQFKHNFDAHVEHRKKLRDFYNTGNGMNERRHREIQKHRFTHRICTKERKALSQTSGNNPSTKKKLVMFIGDRGAGVGSRIKGFKRYGGR

SEQ ID NO: 3477 - protein, 1043 aa, Rhizopus delemar
MNEQLAALKQKLATAKKLPSGIITGAAKLAESAYNEPSQADFILQQMRSFMDNRVGKKNEIEWQEFVVKNFDTFKNEETNLAKSAQPESNDTDRDSVSDADCPIVDENSYRTCTASINKLIREDLDPSIKGLIMKKLQRAMIGSTDYILYFSSLIQMMMICLKTNQFFLDGDVINTRKVNGFNITSIVPSEFHTDSPKYTITPLAMDVRDSPAFDADFSQLFQEQHLSLISTKYFDNRGSQDQTLNAHPIQTALFKLMDVEDIKKETFPVENVPSGRMSLALQIYMTNFKNMWAGKTMINRLLDKLLVILLRLHLAPKRELQRRQNILNYISRKSEEKRSSKNYGRYILRAEKKKLARYKEKVREAEADSGLLLKRIRAVKMAETRIKSLEEKFAQKQDASSSSREKSVESTATTKEETTPCGDLSRGRISQLKSGAKHLIFSKDLVTEKDVNDEFPDAMRKEVSVCLLIINTLKKFVPARSKYHILSYQLLFCIFANDVLHYAEYSKFTRKLCPAMSSAHVNALNIDVPSLFQIMKSKIDDNQGQIEGMSTELTIYGYNTEPLFSVEIARRNKDAWFEIWSTNVSPSQIESGTNSWRKDETSKLEKEVKSLDQEREKALKYQKEQDSIKKIKALRKEWHNKVDKQTLYQRIEEERHLRDKTYLKINDIEDQLMEKKQVLYYQRMTIRHNSRIDTVDTASAPPTTKKELKKDSRGLVHSEACVLRDFEDFTFCGTDNGLVNMTAAVPFSLKRFSFHLKLYNYYSVLDDDNKAAPVVQDIELQKYLKTPKATIISASEIDFGCGAFKQRIKRQTGKKLTRKMNERRHREIQKHRFTHRICIKERKALSQTSGNNPSTKKKSVMFIGDRGTGVGSRIKGFKRYGGRWKEVIHSEAANICVTNENLTSKACVFCFRRLTHPLISVTKNGDVFSRKVKVSFYCTNPLCVSVLSKCAAKSRDSLSELANGIVGLSTILFGNPLPAFKPHKISNIEAEKYIILTSPSRFEEETGSHAVVLEVRKGSSKVDHPEIKIYLSDSDGILRRVV

SEQ ID NO: 3478 - protein, 256 aa, Rhizopus delemar
MNTNNITNMSDNLKTFHAIPLPAMANALCDIDEAENLCLAEYLENIQKYHNSFNSIYQQKMSKIKSDMRMHTLNNPSTKKKLAMFIGDRGTRVGSRIKGFKKYGGRWKEVIHSEATNVCVTNENLTSKTCIFCFRRLTHPRISVTKNGEVFSRKVKGSFYCTNPLGVSVLSKCAAKSRDSLSALAIGIVGLSTILFGAPLPAFKSHKISKIEAEEYIILTSPSRFEEETGSYAVVLEVRKGSSKVDHPEAKLNLFV

SEQ ID NO: 3479 - protein, 1277 aa, Rhizopus delemar
MFNIQSAFTYRTVPDYAEEYIKLSLQKEIDVKKEPAENDSPSSVKRIRTSMKVNCTAKLNKYFLTDNSISVDYVWKHVNHDPLHDVKDIVQSRLPTEVKRWIEEHVDDAINTSIDNDNSNSIALRCEEYVEDTEKYLSMYNSIVKRKLNEVKGDVENLDQLLIVTSYTMNRTEAKQSSRFVGTSTLLPRRKHHSNSKRPRSSSPGEETSDNKRKRIQFSDTELDTFFFLSMENKLKESTRTVVRKNNKKMNEQLAALNQADLVLQQMRSFMDNRVGKKNEIEWQGLVVKKFDAFKNEETNLAKSAQPESNDTGRDSVSDADCPAVDEDLYRTCTAPINKLIREDLDPSIKDLIMKKLQRVMIGSTDYILYLSSLIQMMMICLKTNQFFLDGNVINTRKVNGFDITTIVPSEFHTDSPKYTITPLAMDVSDSSAFDADFSQLFQEQHFSLISTKYFGNRGSQDQTLNAHPIQTALFKLMDAEDIKKETFPVENVPSSLMSLALQIYVTNFKNMCADKTMINKLLDKLLVILLRLHLAPKRELQRRQNILNYISRKPEEKRPSKNYGRYILRAEKKRLARYKEKVREAEANSDLLLKRIRAVKMAETRIRSLEEKFAQDASTSSREKSVESTTTTKKETTPCDDLSRGRINVNDEFPDATRKEVSVCLLIINTLNKFVPVRSKYHILPYQLLFCIFVNDVLHYAEYSKFTRNLYPAMSSAHVNALNIDSPSLFQIMKSKIDDNQGQVEDMSTELTIYGDNEEPLSSVEIARRNKDAVFNSLFDMEKVRHTCESNGLKFGQRMSVLPKLKVVRILGVKKTTVPPVKPQKMSYLKRILRKPNFLREGQKPLEDLKAETAKLEKEVKSLDQEREKVLKYQKEQDSIKKIKALRKEWHNKLDKQTLYQRIEEERQLRDKTYLKINDIEDQLMEKKQVLYYQRMAIKHNSRIHTVDTASALPTTKTELKKDSRGLVHSEACVLRDFEDFTFCGTDNGLVNMTAAVPFSLKRFSFHLKLHNYYSVLDDDNKAAPVVQVIEIQKYLKTPKATTISASEIYFGCGAFKQRVKRQTGKKLTRKGKEVQLPENSLSQKVISTSNVSVEQFKHNFDAHVEHRKKLRDFYNTGNRMNERRHREIQKHRFTHRICTKERRALSQTFGNNLSTKKKLVMFIEDRGTGVGSRIKGFKRYGGRWKEVIHSEEANVCVTNENLTSKTFLSKCAAKSRDSRLALAIGIVGLSTILFGAPLPAFKSHKISKIEAEKCITLTSPSRFEEETGSYAVVLE

SEQ ID NO: 3480 - protein, 267 aa, Rhizopus delemar
MAIRHNSRIHTVDTASTLPTTKKELKKDSRGLVHSEACVLRDFEDFTFCGTDNGLVNMTADVPFSLNRFSFHLKLHNHYSVLDDDNKAAPVVQDIELQKYLKTPKATIISASEIDFGCGAFKQRVKRQTGKKLTRKGKEVQLIENSLSQKVISTSNVSVEQLKHNFDAHVEHRKKLRGFYNTGNRMNERRHREIQKHRFTHRICTKERKALSQTSGNNPSTKKKLVMFIGDRGTEVGSHIKGFKNTVDGEKRSSTPKEQTFALPMRT

SEQ ID NO: 3481 - protein, 508 aa, Rhizopus delemar
MSSPFYCKGLSVAQRKALSHYVYTLKQKQQSIWPSSLERNQCLEETIEKMNALWSRYQTMNCDAEDLYSKPHEFFKWLFYLQQKINEKVNIMEEKPATFASKSYIYRKLKELTFTSILNRRSFKSLQEQVLQSINSKIPLVLGKKLGKLEPHLPALLKFITSIQSRIEDGTFTPAKYTDRRGYRFFSILPVYSFAMKSIQIDAQAFWRLLQQSGIENIPKGVKDKSALSDFYYRVRKKKQIDTLLGKQPEDFLEDIENGCEIWGVDPGIATLVTAVDTSGRQRTTSLDEYYHLCGYNDANSIRKKHQEQHKAQFLKVSNLSSLKTSDMAEFLKACKERLSLYDDITSYYNEKSWSSKLKFKCYMRKQKGVHEICKRFIHGSAKYDEKATTGKTIIAFGDGMFGSSLRGNKSAPVRMIKKALKKYCGKQLDICMVDEYLTSQICNKCKTRNVDNVVTAKSKRRVHTVLKCKQNNCNIIWNRDIMAAHNILDIFLFAAKNKNQRLDAFVR

SEQ ID NO: 3482 - protein, 460 aa, Rhizopus delemar
MASPKNHVKAFFRLAELSEAEYTKQFAYFTLRSTFIPCYMTLVSKIIHYHILKSKKNPKTGSKFETWGAVVDLNKKAFKHQRFQKSLQFQGTLETDRVGVSIIKQNTDTSRKPPNPNIEKKVDGNQTEHIEGLDQADLKSTEGKCVLIDPGKRNMMYCMKETNTIEEKQTLIFTKNNRSKCSRHFRYLRKRTQPLAVQKAEAILSRSESSSVNLRRFVQYIQTRASVKHTLYEYYGNETTKSKETYFPESEFDFRVDQKCNLYYGSLFIAKIRDFFPQPENYSTDSFVKSQPYATYLQIMLQQKHISERLDDSEKSKALGLAKEMYRQSQKSNYKKTISTALEKLQLLPFRKLKFSSKLFFDQNDQKLVRILRAMFGQDAVLVFGDWSASNVKYQESTRSKGLIRMLKRNGFVVYLINEYKTSSHCPACENELEKFKTVPNPRPYQRKKKPDVLCNGLLR

SEQ ID NO: 3483 - protein, 379 aa, Rhizopus delemar
MAIRHNSIHTVDTASAPPTTKKELKKASRGLVNSEACVLRNFEDFTFCGTDNGLVNMTAAVPFSLKRFSFHLKLHNYYSVLDDDNKAAPVVQDIELQKCLKTPKATIISANEIDFGCGAFKQRVKRQTGKKLTGKGKEVQLIENSLSQKVTSTSNVSVEQFKHNFDAHVEHRKKLREFYNTGNRMNERRHREIQKHRFTHRIYTKERKALSQTSGNNPSTKKKLVMFIGDRGTGVGSCIKGFKKYGGRWKEVIHSEAANACITNENLTSKTCIFCFRRLTHPRISVTKNRGIFSRKVKSSFYCTNPLCVSVLSKCAAKSRDSLSALAIGIVGLSTILFGAPLPAFKSHKISNNETEKYTILTSPSRFEEETGSYAVVLE

SEQ ID NO: 3484 - protein, 291 aa, Rhizopus delemar
MDRNVTDYKIEIIIDSFELYVEDNSDDDFQPVITARKRKSRENTPQSGSQKRLKDKGKAIGSEVTTRSSTGISTTDEPTVFNKITLKDNDLEYSSDDFDAPVIKRPFLGESTKSASRITKSTSAAQSNYKKIIGTPLEKLKILPFRKLKFSTKFGQDAVLVFGDWSAPDVKYQESTRSKGLIKMLKKNGFANYLINEYKTSSPCPTCENELEKFKTAPKPHPHQRKKKPYVLCNGLLRYKSLSCLKQQTTGIKRRFWNRDQAAVLDFLKTLNSLRKTGERPSLFTKKYSLD

SEQ ID NO: 3485 - protein, 708 aa, Rhizopus delemar
MAETRIKSLEEKFAQKQDASSSSREKSVESTTTIKEETTPCDDLSRGRISQLKSGAKHFIFSKDLVTEKDVNDEFPDATRKEVSVCLLIINSLKKFAPFTRKLCPAMSSAHVNALNIDAPSLFQIMKSKTGDNQGQVEGMSTELTIYGYNEEPLPSVEIARRNKDAVFNSLFDMEKVRHTCESNGLKFGQRMSVLPKLKVVRILGVKKTTVPLVKPQKMSYLKRILRDPNILREGQTPLEDLKAETAKLEKEVKSLDQERERALKYQKEQDSIKKIKALRKEWHNKVDKQILYQRIEEERHLRDKTYLKINDIEDQLMEKKQVLYYQRMAIRHNSRIHTIDTASAPPTTKKELKKASRGLVNSEACVLRDFEDFTFCGTDNGLVNMTAAVPFSLKRFSFHLKLHNYYSVLDDDNKAAPVVQVIEIQKYLKTPKATTISASEIDFGCGAFKQRIKRQTGKKLTRKGKEVQLIENSLSQKVRSTSNVSVEQFKRNFDAHVEHRKKLRDFYNTGNRMNERRHREIQKYRFTHRICTKERKALSQTSGNNPSTKKKLVMFIGDRGTGVGSCIKGFKRYGGQWKEVIHSEAANVCVTNENLTSRTCVFCFRRLTHPCISVTKNGELFSRKVKGSIYCTNPVCVSVLSKCAAKSRDSLSALAIGIVGLSTILFGAPLPAFKSHKISNIEAEKYTILTSPSRFEEETGSYAVVLE

SEQ ID NO: 3486 - protein, 411 aa, Rhizopus delemar
MKIVLLIINIYWLYITSTVASAAFYGLNYGINRDACPNLDKLDSDFKALSQYASHVRIYSVKDCDLGENALLAAQANGVKLYMGMWIDKTDSFLQELVSLKKLVSDYNVQNIEAIIVGSEVIYRGDVSSDQLTEYINQVKEVVHPLGIQVTTSDVYYKFEPNVVSAVDFIMMNAFPYWEGTNISEAPNTLFEHYMHVKSLSNGKVVRISETGWPEEGAVFGDSIPRSDYQKEKLRNNLKRDEVIVAELSLLHFKSSTVNKDRFVEHLQERVKVTSVMKAYYLTEDHSVEEEQCAGGFLSFRKMKLSSFINQQQADKRLAKKLREKFGKDTILILSNWLAGNVKHHEPMRDVGMRRMLAKDGLQVYLFDEFQTSSLCPSCRNGELETFKKVQNPRPYQREKHLIADHHGLLS

SEQ ID NO: 3487 - protein, 322 aa, Rhizopus delemar
MTAAVPFSLKRFSFHLKLHNYYSVLDDDNKAAPVVQDIELQKYLKTPKATTISTNEIDFDCNAFKQRVKRQTGKKLTRKGKDVQLIENSLSQKVTSTSNVSVEQFKHNFDAHVEHRKKLRDFYNTGNRMNERRHREIQKHKFTHRICTKERKAPSQTSDNPSTKKKLVVFIGDRGARVGSRIKGFKKYGGRWKEVIHSEAANVCVTNETLTSKTCIFCFRRLTHPRISVTKNGEAFSRKVKGSFYCTNPLCVSVLSKCAAKSRDSLSVLVIGIVGLSTILFGAPLPAFKSHKISNIEAEKYIILTSPSRFEEETGSYAVVLE

SEQ ID NO: 3488 - protein, 1081 aa, Mucor irregularis
MWSSLKEEALRKKNPTKARHKLGTTLDALVVRYIEEESNHMYESKWKKFKKVEKNKKKTVDDFKATLSMKEIPTGVVPVVKARVEQMLREGEVAGLSANDIPKSGAWLGKKVHTLKKQGKLSVEGLIYGFINILKNDQNNEDPVESQEYEDEPSVSEAIDEDENSYRTVSRSLKRTINHSFDYNTLNTRLDDLQDSCTRVIAGLSKSVHILINLIISGKICTDEGDERKFFKLNDIDLNANGIGKDESDIYLPSKEVLKNIETHDLFSFRGFWMILSTCVGEKSVKKKGNIVLNAIISELEDSDKHDFTTTPAIQHACKQFYTNFCNMWTKESYKQDLRVAVTLLLRINLAKKRFFKPKRKNKGKVAESVTRILVSKNKNSKKDMEALFELLMEFQGGKHRKFHCIQKVLKKIFNAQDVVHANTESSKELRDHEDQELSDGDEDFLNDKELLVPDNETDDVDLTGREINALVSVVVMLCGSESIIGKISPEYIQKQLYTDKKETIPFGALATCAKIVNTLRSITLKENDEASFMNCYPVCHLRNVLARFAGPKTRFNDRKMCPILNDSKKSSVFVTPATLYLLFCKDHNMFDSQNNPFTSYSSIKSDIDKQSLFRNFFDSSTVDRILKEQKLKPCYSFYYSNRYDIKFLGTKAVVKTNKEEVVEVPGIGIKGDEDKDLTSDDKKQLRARINELNILVKNGKKEYSALIKELRPAEDLRMNVARSFRAKMKNNPNWDADSYLELKRARTTCDNIYNKLSSLNVRVKDAQHQMYSMNKKLHSQATISNQLDTLQIPEDVASNLSKGRTLIQGLDPGIVTTAAINCIKPQTLFESINRFEVLNITSMDAPKHLPVKEVVFDFSAKRVDNAVLSQAHRLEREEKQRKNKRLDIKNLQKRATTRKIRLGRYYKKSLSHDRDEAFRLQNVEKENGSLLTFVGNWSGCSPFLRGHSRRSLKPIVERLAAVEGDHVFTIDEFRSTVTCNSCFQLTTKQVVRVGEEKKKKRVKGAVTCTNKNCPRRKTTRATTTNRDQNGAKNIALIGFSRMVSEDGLCLPPFRRKNKSNKYNLSQTYSVHQTGNTRISC

SEQ ID NO: 3489 - protein, 208 aa, Mucor irregularis
MKTRQGKRLPSASIPLYKTLASGFDLDARVHKVDKSLDDLTRQKRYYLKKKEQVAARAVFTIVVKTAEGSQRTLQASIHCGNRPLQSAVVMRLMSHIFAFGAAQFGTLRGNVPAPTKALKKALNHFIKLPPILTQGLHLYNRRFLVMVDEYLTSQICPRCQTRTVARARDPVNNRSILSVLNCEACGVHALEQGPYGQSFGFNPYGVK

SEQ ID NO: 3490 - protein, 560 aa, Mucor irregularis
MHKTLHYDNKQISSKDKATAAKDAVFGSFFDLVKINNVFEKYKLDFGHRLTLLPDMKTVRLMGTKKNIPVVITDEQGHINQTVAVKHTKAEKTMDLRKKYTIEIEALKLQRENTLTARKNFTKDQLIRCNKKLWGCATSEESRREHYLAVQKAKKERDLLMEKVYDIDIKISDINQKRSSVFQQYIPTTRRTLQPHKFLCLLDAGKVLLKPEIINNEIRFSGTDNGVISMTETTSFDIEKFDFHVKLFYLYSTLQADGEVYFEEEKKMISVPKPFVVKSETVKNSSGGYTRDRLLREKKSGSEEGKQVSRNESQLQQFSVAKSTSMVDLVASYDANKSCQHLLRSFYYSKLMLKQKRRADIDNGVISMTETTSFDIEKFDFHVKLFYLYSTLQADGEVYFEEEKKMISVPKPFVVKSETVKNSSGGYTRDRLLREKKSGSEEGKQVSRNESQLQQFSVAKSTSMVDLVASYDANKSCQHLLRSFYYSKLMLKQKRRADIGIKGAKDRICAMERNATGGFSPPIMFVGDRGYGQAIKGHLKYGGTWKQTIHSRYTSVFVTN

SEQ ID NO: 3491 - protein, 793 aa, Mucor irregularis
MPNKVINAKRVIIVSKKRDVIKKWEAEGDTVDDDDRFKDIFCVDCEEQGHASKNHFKCPFYKEASASDGEYLTFGTSKKRKQSFAVKAEKQNAKRQAVASTSSSSSTVKCKSCKEVGHGSSNSKNCKNHNPTKKEVLLTNLGENYQAFNRKTPFDTLVKQEFKTNLRNKILESSRYIRQIMIRAMMFTNFYMINNVDDATNSIFQQNYWYSVCQLVNGRKVTNGKMTSPAMMTKWTSFKNTYANAVYNPNLPTGASSCLSSACVEAATIYTNHIVENFEIRLLKFLKYRLQNKFAKIAIIAEKYCYQYICGGSPKWDDSFELSDENKKEVEDLCAHLKSFLPMEATLVTLSKHTEKFLPLLSYIISFYETEHKEHKPYDVRRTPLPRLFGLFPSPSLHFRSITVNCDTLCAFIKKPRSNTFAGQLETFQKVIDFYKLRFKDTDLKPNENNKVLFGNLIRSNGLKLKITDFALEEVKQHYEPIFIDPRRTSIFTGAKGLDIKNHSLLRCSTKEYYHYTGSTKFSVAQNKLKQERGIDKIESAIPTPKTVNLESYKHYCEYLFANLDALLDFYSYKTTKDRFFLYQGRQRAPALMTNMLVDGGLKYNRSEEYKKKQVKRKEKKNKNKQEANKKAYKKKRKKKDSNPQGRSPQNRVQADNKKLDRWRPLPYHLDESRVPLIVFGDGMFGKDRVKLKGHRNGVVEKLYRTLKSKEAEGQLIVVTIVEYKTSKTCSLCFHDDVRIISSKTFRGVGVVSCSQCSKLWQRDSNAANNMMTISKSIWSGQGRPSVFTPKEN

SEQ ID NO: 3492 - protein, 655 aa, Mucor irregularis
MSKDPGSEKKKLEKRISTIKTSIQNIEWKKDYKENLHELVLKVNLLVTHAYAFSKYIFIKELETDPTFDLNSSISSKFFTEVFITLTNTKQLVNRVNPETAIIRTLLWKHREDYLRHSKFRPPSFSYAQQNALYEAQKIFTAYTNNISGNFGNILRKFINKLLRKEERVKELKLRMEKSNYSKKQIDNMIRTTITNVCTKVKLSISKKDINQIPKDFLTEDKLKLLQEFISAYPLNYQFDKDSIYYDVKSRPENHFKPFFVLSKLCELHDISVPVCFPLRKTNIPCHITIDTKILKEQIIKAPKSVQGARTKSILVKFQGMILTDGISVSIIKQNFEPGKGSLGGKSSVDKVEETSTYVEDVDISNTEGKCVLIDPGRRDLMFCIHENSTPTNPQMLRYTQNTRAYETKSRHYRKIRQSLKPDEIETLELELSKVPSSTVNVSKYETYLQTRGRVDELLKRYYSCESQAAYDAFRFEDYGVSLKVDENCCLVFQAQHKSNSRKRNAMTITYIKGYYPRNRNNDHNDSAYNLGLALMEPHFTNRMTEEDKVEAQMLVEKFYDKSLSLKEFEDLSSLILKKLLLIPFRKLRFSTYVNGRKSDQLLVKNMQTKFNQDAILIYGNWSAGNSKYHEPTNIKPPLSAHSASVQTENVWSQT

SEQ ID NO: 3493 - protein, 678 aa, Mucor irregularis
MYKSLILNKIEQVRTVGTSGKRQSFQVKQDKRDAKKQRVDIDQNATCASCKRRGHKSSRSPKCPDHKASKLEVMADNLGEGFQMFTRKIPLDNCVKEQYKSVLKNRILSASEDVRQLLFRAQLFNFWYFMCQLINNKRITNSKDIPSGLLDDWNNFRRQHPAVLYPIQLASGNSQCVTEACIQVATTYLNAIVETFEKRVLSYLYYLIQNICVSMKPEQVKLIVEEYCYQYVCRGEPKWPTSIDLSEENKLRIIDHCNTLRNLSDESISLKSLSASPGNYVRWFSYILSVYEEDHRAHSLYDVRRLPLPKRFSITPVPSFRCKFVTVSANALSSFIKGTRPTGYEGQLELFYRVFDFTKLRFKDISELKPGGDNTVLFNNIVRSDGFAVDFVFCRKKQESVIGAHDLRLDDFSYDEIESVYRPAFIDPGRKSVFTAAVGLGDNHQVRRCSTKEYYDLTGSTKYAIKLQKLKNEAGITPIETNTPTAKTCLASVYDTYVTYMLLHRQVLFNFYGYQKAKDRFYLYQGRQKAPQIMNMVIPQTVAKKKWRPAKFEQDMRKVPLIIFGDGMFGKDSVKLKGNRTGVTGVLWRAIKKREREGDLLAITIDEFKTSRICYKCYDDSLEKVDNVRGVGVLGCKNCQTLWQRDVNAAKNMQLISSYIWNGLDRPIMFCRRSTATS

SEQ ID NO: 3494 - protein, 1039 aa, Mucor irregularis
ISELTPNGSNEVLFGNIVRTDGFAVDFLFYKRNQVGSGSDLNNFDLALEDFTYNEVAQDYHPIFVDPGRKSVFTAVSGLDEAHHPVLRCTTKEYYHLTGSTNFSIEQNKMKARLGITAIESAIPTAKATNPGHFEEYARYMFENLDTLFSFYNSKTANKRFRLYQGRQRATEAMVNYLTNGGDKYNRGRRPKVKKKRKKNRRRPAAHNEPSAKDKWKPCKFQYDKKKVPLIVFGNGMFNKDTAKIKTLKHGATGVLWRALKKREAARQLIAVTVDEFRTSRVCSKCKTLTLANFSPASRASVLSCASCRTLWQRDVNASRNMMFISLCLWQGQERPAPFLRSNATTTTAISTTSTIATPPPLTSSQQYTRMSDLRSRTNNKKVKKAETPKSAPANPGAASSDLNAVNAAQALLNESGTATLSLVSAFRILFIMRCFSALYRILDDCDEVYNYWEPTHYLLQGYGRETWEYSTDYKIRSWAYIFVHAIVGVLTSIITSTKLQTFYLIRMALGAACSYVEARFYRTVTEEINPHVGRYVFAILFFAAGMFNASTAFLPSSFAMYCVFMAFSYALRPVSDIDYSRTYKVVFWIGLGALGGWPFAALVGVPFAIEEVVVFGRDTMTEKDGTVVRSVAGSNWRLRRVIRLIEASLIVGSGIVFLLVLMDQMFYRQYTIVAWNIIKYNIFAGAEGRGPELYGTEPWYYYILNGVLNFNIVFILALGSAVCVLITAYIDRNRVPGSTKMDAVWPYVVLGLKLIPFYIWFLVFTLQAHKEERFMYVAYPLVALNAAISIFLVRSWASRFAGVMGANVNVRVIVLRYTSVAILSVFALLSASRIIAILTRYRAPFVVYSSIWREQAPDQLVNRNYIQEDFPDNVDLKIKNVCIGKEWHRFPSQFFLPSDTRIQFLKSNFDGQLPQTFEEDFAIDSYLGPNGVPVQYRRRLYGWLGARTAPAGFNDLNLENPNVYVREEECDYLVDVDFPLRAQSPLEPSYIRDTKNWEIMDCHPYLDAENSHRLLRAFWIPGNAGLQWGEYCMLKRKN

SEQ ID NO: 3495 - protein, 1833 aa, Mucor irregularis
MKRRLTEQGVRDLTRRKRDSQPENTPLNLDPLQFQCDTKVPVASSADNPASVASYQSAVDNYERSFSESLSETKSYLKRFKIQVWNAKLSAKHTLSATYLIHVLNKKVESNIKMTSNMHPNVAVTPKDDLLVFAFCQIYKCRIFLFSSRAKPEIVTPKDNHNSAAIPSFAVLKHCNSFIGKTTWYELKFNNNLKDRSRVDETLATEDTLFAQKRGVGESKPKLKGHTLGSSVDGQILQLLREEVFSIFDKRWLAFVKKHTNLTNEETISSFLSTLPAKSLPNGVVPIVKAKIEKMLRDNEIPGSVPQSPMWVHKRIDTMKKKNEVSIEGFINDFATNLDVSKVRPPIQVAEHADQDADGNTGEDAAGEVSEDFEVDKDDFRVVGRTLKRVINSHVPYDEVIEKFDSLQANCEEVITGLSKAVKILTAMVLSGDKSITNGADASLFNLNKLDLHKNNIFLGKEKIAILDDTSIKYIEKSNIFHYGQFWNIMSTCVGEKSSQKDKHPIINAIKNKMKKEDIVKFTTTPALASACKSYHTNVTNMWTADRVQSDLRVVIILLLRIHLAPKRFFRQKSKKKSLESINQNNVVNASASNCKIGKTKAMRDLFHLLQRHNGDNFGNKLQVLQKLVDIIMKEKVKIPSAQKVEETSPVDVVDDLEKDVSDDEDEEDIYLVKDDFEDLTSGEIKALTSVSLMLVQSNSITGKINEMYIQKQLYGDKRESIPLRGLQICAEIINALREIVPVKGSAYSLANCCQVRHVRNLLVEFSGTKTRFRQHRLTAEKNQSNSSKMGILINHVTLYLLFQKEYNMYKEDGSSFTAYQSIKTWEDKKAIFSNFFKFDVINKIMAERQLAFKFSFLFKDRYSLHFLGQLDDLVAEEPNKSTSTAEISPPTKTAGGVKEEIDALVAEVKKNSSLLKELRKELKEAEVKRMDLANTFRKQEKSSWDQDMYNELKSQRNACNTLYSDIDRLSSAIKNARMKMYELNKGLYSQKQPVTQIRPTADRNRMVQKLKEGNVIVQGMDPGIVTTAAVNSRSSKLLFESLNRFAALQSNEEPVNLTTPSTDNKQVAFSLTAGLVNSANFSTIHRMKREHRKLQGMDPGIVTTAAVNSRSSKLLFESLNRFAALQSNGEPVNLTTPSTDNKQVAFSLTAGLVNSANFSTIYRMKREHRKRKGLELDHTYLAKRTLTRKIRTNKAYQHIYATQRDGLYKQLNLNKKTTPVCVFLGNWHQQSTYIKGHSRRSLKPYLSRVNSYKFDYFEVVDEYNSTLKCNSCYRSTMKQAIRTGHLTRRIKGAVVCMNKDCPKRKSDRSTTCNRDQNGAMNIAMIGFSALVSQDGLALPPFRRGFYAELDDVLNQPYSSEEDVQRITSHYIRFLSRYQQDFLQSAVEFAQVAYKLIDSKVCLDFSTVVLGHILNKHALKSNNTTELLVSYSLLLYAGKDEPRWMDFILLESIRNRKNRLFCKIMTEVRQAKVETNDLNLLDTTLVNHFLDLVEETRGDSDESFNYDVIRLVMVINEQYMMSGLDVNLVLDVLSERMGSSDTFSANLIFMLNRSNDTCVQMLILKLLYGVFTTPKLYEYFYTNDLYVLVDISLRELCDLGDTKEAQTLRDAYLRVMEPLLENTQLRLRPYKKHETYKVFQSLLNPGMQRKVNSTTKRLVKRIIENWWEGVCGGFYKENNHSSPNLTHTLSSCSSSSENCPSTPDAVDEIAAVIPRKDVEKKLLEQEQHNNPKGIVIVRKRRLGSATTYARQSRFGKNNCYNWWEGVCGGFYKENNHSSPNLTHTLSSCSSSSENCPSTPDAVDEIAAVIPRKDVEKKLLEQEQHNNPKGIVIV

SEQ ID NO: 3496 - protein, 635 aa, Mucor irregularis
MLLYDPSCTASLLKDRLYEATEKEIATIKLLFKFFKPYIPQKEDRLSIDYAKFVRKLFPVPKFSRLHALEVNSTALYQILTARPSPLKIADFDHFEIESTDFARSNVAAVMNSIFDLNVVNQVCESHRLVFADRIMVMPGLKTARLLGTRKDIKNSLEEPSAPSLVDRILTNTSIVEEAKKEFNVLKREVDTLETNLKTLQNDLKVLLKKNEPLELSAKIKEKKKERNNCEDQGLRGEMLAEIVLLKNKRFEEYRKIQASQKAVSDAKQSLHFRRMAMRYHHRLRRSAPATTDPEERPELSKNTIGLFKATECKIKKPADFVFSGTDNGLVNMSTTTPFTLDRFKFHLELYNRYQVLSEENVEIDESDDEVEQFFKLPKPSVINAADVDIGCGYRKVRLKLEREKKSSTSGKAVSDAEKELSKKPLNVNLTIPEYLENKEVHVGQSATIRPFYGSAKRATKSRTVEIQKQKFTNRLVSKEKESIKRAVGKRKIVQFVGDRGTGVGSRIKGFRKYGGKWLEVLRSYQNIVCITNEHNTSQLCIYCFEKVCHPRSSNKKISKGALQCVNPGCVSVKAGKAIKSRDALSSLAIGLSGLCSCLLGVTMPHFSPNKISQFDTDNFKNISLAFVKEEQERQ

SEQ ID NO: 3497 - protein, 278 aa, Mucor irregularis
QIRPTADRNRMVQKLKEGNVIVQGMDPGIVTTAAVNSRSSKLLFESLNRFAALQSNEEPVNRTTPSTDNKQVAFSLTAGLVNSANFSTIHRMKREHRKRKGLELDHTYLAKRTLTRKIRTNKAYQHIYTTQRDGLYKQLNLNKKTTPVCVFLGNWHQQSTYIKGHSRRSLKPYLSRVNSYKSDYFEVVDEYNSTLKCNSCYRTTIKQAIRTGHQTRRIKGAVVCVNNDCRRRKFNRSTTCNRDQNGAMNIAMIGFSALVSQDGLALPPFRRGYNNSNK

SEQ ID NO: 3498 - protein, 972 aa, Mucor irregularis
MQANREANIRHTTIVKVNSSVVESSITLSSSDDDFQPVTSSTRKRKSKENTSVAESFKKLKGTEKTSHAQITIDDYDLVESSEDSLFEFIFDKPALHDSRNLRAESSKSAAVGSSQGLKQISMNTSESSNSDSSKSKPVSNTPNTTAASPEPGSSHDPIDETSGDATKNSEETVDRVITVKATISSIWNKQYLEPLYDLVNTTNLVSVYVSHAQITIDDYDLVESTESSKSAAVGSSQGLKQISMNTSESSNSDSSKSKPVSNTPNTTAASPEPGSSHDPIDETSGDATKNSEETVDRVITVKATISSIWNKQYLEPLYDLVNTTNLVVTHTFAFAKYIFLKEIEADENFSMKEYVSRDFFVEVFLSLIIGGGSKPAKIKDVTREYRQVISKHKNSYCECAQYVPPKLLYAQQIALYECTKIHTAYHNNIKAHFGSRLRNILNKLFKKKEKMEDIRGRMNATNATKEEINKALRDQVYKPCDQMKLSVSRKEMPPVSLLDIQSIHQLKAFFSCYPDDYIFQKDPIYYDVKIKPEYHFKAFFKMAEMLETQKNETFACFPLRTTFIPCYMTIDSKIVHHHILNNKTQLKAESKYETWGTVVNLRKKAFKSQGPKKSLQFRGTMETDGVGVSVIKQNMDTNRKILRKRNVQLATNDTFKYIEELGQDVLKKTEGKCVLVDPGRRDLLFCMKESSEPSDKKIIIHRKINRNKIARHFKHLRQKTKPESIKIAEASLSKFTPHSVNITVFTNYIKEKASVEDLLRGYYGNETHITNETYFPDVCTEFTVSNKGDLYFGHLFVTRIANSATILDQTYASYLNILLEQPHIKSRLKNEDIIQAKQIISRMTMTDEGELLKKEISCLLKRLQLLPFRKMKFSSKIYYDQNDQELVKKIKNKFGQESVIILGNWSAPHVKFQEPTKNKGFIKLLKKNGFEVYLMDEFRTSSHCLINDEANPASSVTGYSGVQTLPVIKKK

SEQ ID NO: 3499 - protein, 486 aa, Mucor irregularis
MFDMNNNPFTSYQGIQSDEQKEALFSNFFNWKKIQRITKEQKLKPSFLISFNNQYDLQLYGKKPAPQEQEGSNEATRQKEPPTKVSQLEIKSLNEKIKVDRTEYRQLVAKLKIEEANRMDLGREFRTKEKKEKIWDVALYRKLKNKRNDCNEIYDKMQELNRRIKRNQCQMYLMNKSRAGQEVKVDENEFATSTKILSEIRKGNVLVQGIDPGIVTTASVNCTKSSTLFNSINRFQCLEDGETELVHQHDEEDLKNFRYDITARRVNQIVLSTHHRLQRERKQKLSESIEKKNLEKKTVTRKIRLKRYYKKYISSNRNLMFQHFQTRKEKGSLITFLGNWSRVGSYIKGHTRRSLGPVMNRLKSVEKDSVYTTDEFRSTVTCNSCFSITTKQLMRVGDNRTRRIKGAVVCSNKHCPRRIKSNSTTVNRDQNGAINIALIGFSKIVSVDGQALPPFRRNYKSSKYTLLNNFIGTRMVTAASPPAGGN

SEQ ID NO: 3500 - protein, 594 aa, Mucor irregularis
MADTNIGIPAGLITAWDDFRSRHPNAQVQISLLPGASQCISEACTEIETLYNNNVVETFEMKLEKFLRYKIQMALPYIDDKSLISSLSHNYCYQFICQGDPVWPENSLVNDEVKAVVESICVPLRQTLNKKVTLKELARSPSTFVKFLLHINTQFEREIELHNASDVRRLPLPKLFNVLPSPTTHWRFITISMNALSSFARKPLTQGYQNQLQLFYEVFNFKKLRYNNISELTPNGSNEVLFGNIVRTDGFAVDFLFYKRDQVGSGSDLNNFDLALEDFTYNEVAQDYHPIFVDPGRKSVFTAVSGLDETRHPVLRCTTKEYYHLTGSTNFSIEQNKMKARLGITSIESAIPTAKATNPGHFEEYARYMFENLDTLFSFYNSKTANKRFRLYQGRQRAAEAMVNYLTNGGDKYNRGRRPKVKIKRKKNRRRLAAHNEPSAKDKWKPCKFQYDKKRVPPIVFGNGMFNKDTAKIKTLKHGATGVLWRALKKREAARQLIAVTVDEFRTSRVCSKCRTLTLANFSPASRASVLSCASCHTLWQRDVNASRNMMFISLCLWQGQERPAPFLRSNATTTTAISTTSTIATLPPLTSSQ

SEQ ID NO: 3501 - protein, 464 aa, Mucor irregularis
MAHRFIEFDNLRLNEAREYLYPRVQLDLLHATLANSYGVDIMTTDEAFRNLFRLRVNQIDGLYGDQGEVHAVALRNFFRAQFDRWRNTFANTKLEVITDFSYATPARVATILQFYAALLNDIGLHNLNVKRWSLIPIATHQMENEVNRDRPYQLAYGFKTDGHMISMHFYKDLQGRPPIPFDMGELRTMARKIDVSRWENGMVELIKEPIGLPNDCRIVGVDPGVRDLLCAVERVNVEGQEVNRKAFSISNAEYQVRSGRQWAQMKELQSREHAHIQEVYDLIASPKVHTITDFSLYVRSISQTHNRIFDFNRSYRHREIKGYLYSAKKITLDYIADNIIGLYPLRVDNKTYSKVMLPHKSTKKERRRARKQFRNEITAFRPPTQRTIVAFGDASINSSMKGHPPIPHQQQQRAIARKALLVRVDEYNTSQTCNVCHSHLENVYARENVCFEHRYQDTNFHYYP

SEQ ID NO: 3502 - protein, 375 aa, Mucor irregularis
MKQQKTLLNLANWTKGLYPLYKNPFGITLEDRIIGIDPGIRDIVCGVDCDHDGLTNKQSTKVHSFSVSNASYSIRSGMQWLKQKELRNRAVSNIQTSYDRLKSRKTCTNEGVMQYLNSLASERTRIHDFMKSYCHRENKGYAFSDRKMAQDYVARVVLGRTVVGEDYKLAHNSSSGSRRERRMLFRLNHLDDIRPYDDTRRTVVAYGDASIQGTYRKNTPIPVKQVQRAIAEKAVVLTVDEFRTSVTCCHCYGRLENVLQTVHVCNHRKKRHRSTGVGENVAERRSTMKCYDNENHILHRTSACPERRPFDNRVNYPLKLCPQCPVNNNNRLFWNRDVNAAANIRSILVNYINQGFNLQSRPAALSRGHQDQGVL

SEQ ID NO: 3503 - protein, 866 aa, Mucor irregularis
MILSTCVGEKSVKKKGNIILNTIISELEDSDKHDFTTTPAIQHACKQFYTNFCNMWTKESYKQDLRVAVTLLLRINLAKKRFFKPKRKSKGKEAESVTHTLASKNKNSKKDMEALFELLMEFQGGKHRKFHCIQKVLKKIFNAQDVVHANTESSKELRDHEDEVPSDGDEDFLNDKELLVPDNETDDIDLTGREINALVSVVVMLCGSESIIGKISPEYIQKQLYTDKKETIPFGALATCAKIVNTLRSITLKENDEASFMNCYPVCHLRNVLARFAGPKTRFNDRKMCPILNDSKKSSVFVTPATLYLLFCKDHNMFDSQNNPFTSYSSIKSDIDKQSLFRNFFDSSTVDRILKEQKLKPCYSFYYSNRYDIKFLGTKAVVKTNKEEVVEVPGIGIKGDEDKDLTSDDKKQLRARINELNILVKNDPVESQEYEDEPSVSEGPPPFIYYSFLGTKAVVKTNKEEVVEVPGIGIKGDEDKDLTSDDKKQLRARINELNILVKNGKKEYSALIKELRPAEDLRMNAARSFRAKMKNNPNWDADSYLELKGARATCDNIYNKLSSLNVRVKDAQHQMYSMNKKLHSQATISNQHDTLQIPEDVASNLSKGRTLIQGLDPGIVTTAAINCIKPQTLFESINRFEVLNIRSMDAPKHLPVIEVAFDFSAKRVDNAVLSQAHRLEREEKQRKNKRLDIKNLQKRATTRKIRLGRYYKKSLSHDRDEAFRLQNVEKENGSLLTFVGNWSGCSPFLRGHSRRSLKPIVERLASVEGDHVFTIDEFRSTVTCNSCFHLTTKQVVRVGEEKKKKRVKGAVTCTNKNCPRRKSTRATTTNRDQNGAKNIALIGFSKMVSEDGLCLPPFRRKNKSNK

SEQ ID NO: 3504 - protein, 774 aa, Mucor irregularis
MSVKAPIHKVFKPEFIQPTIKLAETVNDITTHTYSFLKYIFIKEVKDDRNFELSSFLNKSFFIEVFLSLVERQVRDGVRSGSGNSSIKETTTTYRNLILKHKEKYCRYSGYVPPKLTHAKQNADYECTKINTAYINNIKAHFGDRLKQVVNIICGKQNKIRELEEKMKAARYTAEAIKGLIKNTVITPCANVKISVSKKQVPSDNFLGEKEKAFIRRILFSYPQDYTFMKDSIYYDVKVNPLNHYKAFIQLEEIIEELTYDKEKQTCKSFVVYPLRTSFIPAHVTMDTTIMNYHILGAKSYKEEKSNIWPKIMNMDYKALKKQKTDKSLCFHGMIQTDGVTVTVLKQNFETGRRQQSRNSKPADDDDGFTYIESMTKEQLEQTKEKCVLVDPGRRDILYCMKESSTPKNRQCFRFTKNTRSKKSRRFRYLRNQLKPDSIKSAEGQLSKFRSNTLDPDKFIEYLEARRDVGTQLKVYYSNETYDETPDYYPEPLDFVVGRKGDIYYGRRLLFIKRVENARRGVADLHSYLRYLAMLMSSKHLVKRLTRQDTDNLSRIISDTTKCLDEDQLSPEEVNTKHREVKQQVHKIVSKLLLLPFRRMKFTSKIYYDNCDMTLAKDLKEKFGNDFILIIGDWSAPTQKFHEPTRNKGLLKFLKKSGFPIYLIDEYKTSTCCPFCFSSNLEKFKEVQNPRPYQREKHPLVKCHGLLRCKSESCLAIGKRRIMNRDTAAVLNFRLILNSLREEGSRPPRFCRSAPKRQLTDEGGSQRKSQRRKQ

SEQ ID NO: 3505 - protein, 552 aa, Mucor irregularis
MAHRFIEFDNLRLNEAREYLYPRVQLDLLHATLANSYGVDIMTNIKLHLTRNIPVYQKRILKGFFMRYKIDNGLENFNPGQLADEAFRNLFRLRVNQIDGLYGDQGEVHAVALRNFFRAQFNRWRTTFANTKLEVITDFSYATPARVATILQFYAALLNDIGLHNLNVKRWSLSVLRVNQIDGLYGDQGEVHAVALRNFFRAQFNRWRTTFANTKLEVITDFSYATPARVATILQFYAALLNDIGLHNLNVKRWSLIPIATHQMVHVNFSGPVIVYILLQRLRNRGPLPDIELQHETGILRFNQGTTRAEFLRHYRIPEFKEHLWQQIFRLDKLVKNRRLENEVNRDRPYQLAYGFKTDGHMISMHFYKDMQGRPPIPFDMGELRTMARNLDVSHWENGMVELIKEPIGLPNDCRIVGVDPGVRDLLCAVERVNVEGQEVNRKAFSISNAEYQVRSVSMHFYKDMQGRLGVDPGVRDLLCAVERVNVEGQEVNRKAFSISNAEYQVRSGRQWAQMKELQSREHAHIQEVYDLIASPKVHTITDFSLYNLRLQ

SEQ ID NO: 3506 - protein, 2177 aa, Mucor irregularis
MTRKRKQETGDEKGPQKKKGKEKDLTSTGLIPPVDDDDDDFQTPMPMPLPRQHPRIGTSSRPTAEVSGTSSGSSRSAQLETLPSILPAEADASIDEEFAISLHAPPIISSRFTPETYEEERAFQIAIQESRQQALQSSTPGESSTSARARPAEPFQDVPVPTYGDAPQPRIRFAVPDRPVRRSNNGSSTSSMSVTFATPETPSSFSRRSSTTSITGNLQDIAVRSDTGSIPSGTESSEETAPTAEGTPAQTAEATPASTGKAAKRKARAEALKKAREEDARNKIKGTSKESSKRAQKAQRDRVKEKYTIKSSVATMIRPPTDTLSMFLNDDQRNAFVTHLRRAVEHVRDVSYAVSLLVNWHCLYKIENNQPIPRLSQNYLYHFASLIVGLGRSADPDVRNSYNTFTAQMGPAFDQTRQFENLRYSTLLSSVMRSYEVMINNHVGLNFEKRTLRYLFTRFSSTGDQFYLQLPVGVTRNLAQRAYTAIASRAEMTYPDDLEITDAQRNSIRALIAECLARLGDLPLNEENVYANAHLYLPFLHHVLQRMEENISIMNPVPDVTASIAYVHRRMYDLVANYSTLRRRFRSALEHHVRDAINSAEPTETFLTRPLPVVTGRNRNSLDRRQRRQDTLTVAQRIRIQEFVQNTRDSIAARTFRPERYTDPRGARLFTLLPVYSMQMRYIPMTEQALNRILRLSGALTGGVTDMVQLCWRLFRMNLLGFDTVRQLTGNDESKAFTGAFRTDGVAIDFIFDRPKQRPAEALAPADVARLVDLNEATIWGVDPGQKDVFVASDGDSSNTHRIRRTSTSEYYFMAGYKAANIKRAKYAANNIELRQLISAAGSLKTASRNNLEETLRTTFRNFLQVRNFYNFGQRSLRFTLYNKRRRALTELCKRLLTGSEKYTNLPPIQQSNALKWKPVTPSDQRHEQQRPIIIAFGAAQFGALRGNIPAPTKALKEALNHFVKTPPLHTQGPHPYDRRFLVMVDEYLTSQICPLCQTRTVANVRDALNNRSVHSVLNCQTCGTHWNRDHLASMNIRSVFLHMANNQNERPPPFQRSISTMFGKGIHRAAKLSSRNPIEMIAGILILSSFSYFYLFNLARNSDIFSGTVTRLYPTFVYADKNSDGFQQLTRNAMTLNNGKEEVASNAIKIQLKQVSIVDKENNLLDKDTLQSILNFEHTIQRTLLEDHMGSHFGYNALCFKNEQGECFSQAVSDIVDWDHLATTDLHKAINAHPELAQAIFGNLNLNATTASSLLLSYAFNASTAYRQELSHVWEQKVATLSSGGNLVSLSDSGNQEDVFTWMFIITRNIVFRIKELIEMADNIDIIVILAGYVMMITTFVSLFMNMRSMGSRYTLATAIVVNGFFSFMFALLTVNALGVDVYPVVLAEAIPFLAVTIGFERHFKLTKRVFEFSKETPLTKQEIRKTIVRAVDSVAPSISRDCIMEITVLALGAKSGISGLREFCLLSAILLAYDFISMFTWYTAVLALKLELLRIREINGTTSAKKGSVTTSKTTGTSYIRSTVVKAFSDTTASNNRNVKHDEPIIGRVKLLMIVGFVAMQLFKVCTTFQGSSGPQVSISEPGVSNVLEKLLQQHRASNAGHLPLLVEVFPPLPFHVASSVSSSFIPESIRKPLDYLLETYAVYIQHPVISKWITLALFVSLFLNTYLFKVAKEPTKVAPAAAAAAAAPVAAVAPVAVEQPVVVAAKKQVVVQEKKHRQHHQHHHHGAMRTLEECMALTQTPDALSDEEVILLVQKGKMASYALEKVLGDLERAVSIRRALISRASITQTLETSLLPLHNYHYDKVMGACCENVIGYMPIPVGVAGPMNIDGDMIHIPMATTEGCLIASTARGCKAINLGGGASTIITADGMTRGPCVEFPSIIGAAACKKFIEEEGAEIITAAFNSTSRFARLRKLKVALAGKLVFIRFSTTTGDAMGMNMISKGCEKALSVLSEHFPDMQIISLSGNYCTDKKPAAINWIEGRGKSVVTEAVIPGHVVEKVLKTSVSALVELNISKNLIGSAMAGSVGGFNAHAANILTAVYLATGQDPAQNVESSNCITLMKAVNDGQDLHISCSMPSIEVGTIGGGTILPPQQSMLDMLGVRGPHPTEPGKNAQRLARIICASVMAGELSLCAALAAGHLVKAHMAHNRNTAAPAPAAVAAAPVPGSCIKS

SEQ ID NO: 3507 - protein, 553 aa, Mucor irregularis
NESTATEQNEVVSDVRTPTKLIVYGYSQKPIYSIQESRQHKDATFNSFFDMSSITRKCASYKLKFAHGITCLPGLKVARILGTRLKKKARVEEPVKLTQEQRVIRDQSIIMEAKNSSENLRSRSVDVQNNIKKLELELKNALKTNQDVECSAKIKELKNEWKDSSNDDHYLNVNSMKTKLSKNRRLLYNIQMAIRYKSKLEVAEVPPAITRNNIEVDGKGISKAESRKMNSPEDFVYAGTDNGLVKMTASTPFDHEREDEEPKFTEEDNKFLNLPPAITTSAADVDLGCGHLLNRQYLERKKKSAEGRIIKQIEAVISEDNKTIPASTQEQLSKFKQHLTFREQLRDFYNAKKLLNKKRHTKVQKAHFCAALCREERSQLRKASGLSKTKKLLLFIGDRGTGVGSRIKGFRRYGGTWKEKVHGDAVNVIITNENKTSQTCIYCYEKLINPKVKKMVSANGENKAVYRTRKGTFICTNPLCFSVIKQRACKSRDALSAMAIGIVGFCTVKFGVSPPPFNIISNSNTESFNKLTFSFLNASEDRQLRCSSGVDCP

SEQ ID NO: 3508 - protein, 475 aa, Mucor irregularis
MIRTTITSVCTKVKLAISKKDINQIPKDFLTEDKLKLLQEFISAYPLNYQFDKDSIYYDVKSRPENHFKPFFVLSKLCECHDISVPVCFPLRKTNIPCHITIDTKILKEQIIKAPKSKDNKMEAWARVVNLGCKAFKEQGQKSTLVKFQGMILTDGISVSIIKQNFEPGKGSLGGKSSVDRVGETSTYVEDVDISNTEGKCVLIDPGRRDLMFCIHESSTPTNPQMLRYTQNTRAYETKSRHYRKIRQSLKPDEIETLELELSKVPSSTVNVSKYETYLQTRGRVDELLKRYYSCESQAAYDAFRFEDYGVSLKVDENCCLVFLAQHKSNSRKRNAMTITYIKGYYPRNRNNDDNDSAYNLGLALMEPHFTNRMTEEDKVEAQMLVEKFYDKSLSLEEFEDLSSLILKKLLLIPFRKLRFSTYVNGRKSDQLLVKNMQTKFNQDAILIYGNWSAGNSKYHEPVQNFYSSYSAGAD

SEQ ID NO: 3509 - protein, 937 aa, Mucor irregularis
MFRSYQFVVDGVNNISFRQTPGFDLKSIMPSSTNDLESCFTVQPLDDRLLETASLFNDFSQLFTSQHFGVLFSHFFGSRGVNALHSTTHPVQNALFTSLEEAGINKQAFTLTMPCAEAMTDALDKFVVNFENMWSAKKTINKLLDKVILVLLRSHLAAARESKRKLNTTQRRPKISQDRKNLKNRSRLVYRREKKKLRKLKKRKREASLSERHEWISRISKSERRISALRETFKKKLAQLRESSASAVEEDHENQSDDQEEETLGDDVSRRRIAQLKSVVKHLIFSESKVVSESDLKVELPTATQKEITACITIINCVKKFLPARKNYHITAFQLHFCIFANDVLRYTKYQKFTRSLSPVTSMATINAFHLSASTLFQILTQEHNESTATEQNEVVSDVTTPTKLIVYGYSQKPIYSKQESRQHKDATFNSFFDMSSITRKCASYKLKFAHGITCLPGLKVARILGTRLKKKARVEEPVKLTQEQRVIRDQSIIMEAKNSSENLRSRSVDVQNNIKKLELELNNALKTNQDIECSAKIKELKNEWKDSSNDDHYLNVNSMKTKLSKNRRLLYNIQMAIRYKSKLEVAEVPPAITRNNIEVDGKGVSKAESRKMNSPEDFVYAGTDNGLVKMTASTPFDHEREDEEPKFTEEDNKFLNLPPAITTSAADVDLGCGHLLNRQYLIRKKKSVQGEKIKQIEAVMSEDNKTIPVSTQEQLSTFKKHLTFREQLRDFYNAKKLLNRKRHTEVQKAHFCAALCREERSQLRKASGLSKTKKLPLFIGDRGTGVGSRIKGFRRYGGTWKEKVHGDAVNVIITNENKTSQTCIYCYEKLINPKVKKMVSANGENKAVYRTRKGTFICTNPLCFSVIKQRACKSRDALSAMAIGIVGFCTVKFGVSPPPFNIISNSNTESFNKLTFSFLNASEDRQLRCSSGVDCP

SEQ ID NO: 3510 - protein, 809 aa, Mucor irregularis
MSSFEALTQNLIKYITVLDIDDGLEDFQQPIKSIKRRRVTTPDGRNLGDGSGDDFVDNIFKKSTICKPSSSTSSESMIVSKSVSGPDDAATPEDITKASSASASPANSSKRILAIKTTVDNIWKKGYLRPLYNLVEEVNTLVTHTFGFSKYIFLKEMSASTDFNLADCVNKDFFVEVFLALIDRVSLDKNVKARTANFRHLISRHKTSYCQDADYAPRSFKYAQQVALYECTKISTAYRNNIIAQFGNKFRMFLNKLCKKNEKVDTLNQRMKEVGATEKALKAARQNEIFKHIANVKEALSRKQAPNTEFLDEKAISWIKAFLATYPRTYQFEKNSIYYDVKAHPENHFKAFYVIVKFLENEHGSKINCFPLRTSFIPSYITLDSKIVHHNLLQKAKTYKADDKWKTWENVAYKDKKAFKAQGTDKTVRFQGTLETDGVGVSILKQNFEVGKRVSNKKTKERVSDDELKYIERVNQEELKSNKGKYVLIDPGRRDILFCMKETSNKKERQVLIYSKNSRTRLARHFKVLSKTLKPGIVRDAENDLSKTVSATINIEKFRNYIKARALATPVLKEYYGNETMKHNRRYFPDYLNEFSIQGKGNLYFGDLFVAHIRGYFPQKESADESGTLDLYANYLDIMLKQSHISIRLDDSVKNTLIGLIGQIFDDNDSDNNLKQVASQLLQELKLLPFRKMKFSSKIYYDKDDLDLVRRLRRKFKEGSMLVIGNWSAPNVKFQEPTRNKGLIRMLKKNGFPVFLIDEFKTSSFCPECEHALEKFKTIPNPRPHKRTVAPKVVCHGLLRYVIRVGLKR

SEQ ID NO: 3511 - protein, 1146 aa, Mucor irregularis
MKSRKRKQKETFSKDDYKDNPVPIWRSSAKRANEQSAAGPSNKRLSKEERDLRDEKLQQALNKEMIDRLTKKIHDVLIDNDDTGTLKTDCLKMSKIERGMVSNAEEKNGLPVGSITTFIRHNKKSNISFWHDVVNKHFDDLVRKEMDEKTKSDSLLHFNDAEEIESNTSSMNKSHSSESDVTRTISSPLLPLLRKDLTQDMKNWIIKILDVNIEKTTDYLSGLSIRVYKLLLLFTQYSFKLNDDESFELKKTHGLKMKEIIPSFSQSGDTFFSPPWNQACLQNDVFQKQLQELFSFNHLQFIHSCYFGVRGVTNESLDKNPLRKAIFQVIPRIKEEVKSDTDASAMQNALFGYSVNLSNMWSEPKRYYKLLNKLLQVLLNVHLAPTRHQKYKEYLDAKSKANDERTSSSPMKFANKTRNSKRRIFQNERKRANTYEEKARKQPHRDLLAQQSDQLPDSQSTSKDDLATATEVEELENEFEDTSTDLPRRRLNALQRILRALLLKGDYRSVTGEQLTAMNEGLEDNEAAVLAMLYNFIAPYIPERSNRRYFPYQIPFLLMCNQVFRATDSFKFVTKLCPLIKPGSLCALKLDAATLYSLFCSRTAKQQISVFDHENIQIPSMQMAIRRKDAMFGSFFDLQQMFTILDMHSLRFDHYMIVLPGVKLLRLIGHKKTYPPQHTCMENEVEVKKPVADEIKNDYQDPNVLLEDANETLLLQELKMATKERNEFILQQKLRSLKKNWHDHEDKNKVYQSINEYKSERDKLYKRVFQASKDLKNLRRQKYQFQTIDNSEKKWLITKENYKCYQKAEDVKITDEVLTDSLHLSGTDNGIVTMSETCGFNLERFAFHLKLYNKYSALADLSIAEEDQKFLSIPQTIKLTSSRVQYQSGGLRARHLLNRKKKKDKAILEVEKNLSKSSLTGAENPKHLDELYEVHLANREKLRDFYYSNAMIKAKRRSELLLNRTKDRVAALERKFVAGKCNPIMFVGDRGYGIGSTIKGHVKYGGSWKAQVHQRYTSVVITNEHNTSQTCLFCFQKLQHPLKVIIKNEQRYVRSVNGTFVCNNSLCPLKQLNSTHKGRDAVSALAIGISGAATTMLEYPLPVFDPQRDTSQFNTGKFNISAEEFLKRIASRPATVGGITSRHMDE

SEQ ID NO: 3512 - protein, 468 aa, Mucor irregularis
MHTLQLVSIADEAFRNLFRLRVNQIDALYGDQGEVHAVALRNFFRAQFNRWRNTFANTKLEVITDFSYATPARVATILQFYAALLNDIDLHNLNVKRWSLIPIATHQMGILYNLANACKCSGPMIYILLQRLRNRGPLPDIELQHETGTLRFNQGTTRAEFTRHYRIPEFKEHLWQQIFRLDKLVKNRRLENEVNRDRPYQLAYGFKTDGHMISMHFYKDLQGRPPIPFDMGELRTMARKIDVSRWENGMVELIKEPIGLPDDCRIVGVDPGVRDLLCAVERVNVEGQEVNRKAFSISNAEYQVRSGRQWAQMKELQSREHREIKGYLYSARRMTLDYIADNIIGLYPLRVDNETYCKVMLPHKSTKKERRRARKRFRNEITGFRPPTQRTIVAFGDASINSSMKGHPPIPHQQQQRAIARKALLVRVDEYNTSQTCNVCHSHLENVYARENVCFEHRYQDTNFHYYP

SEQ ID NO: 3513 - protein, 232 aa, Mucor irregularis
MNSDLLLQDFDFDEVKSDYNPISIDPGRKPVFTAALGIDENVQIRRCTTEEYYHNTGSTTFSIKINIEKSKAGIDIVESRIPSYKTSDFSKSDKWNPGASKYDRTKIPLIVFGAGMFGKDLFKLEGNRCGVTGVLFRSLKKREITGDLIVVTIDEYKTSKTCSLCFDDNVSVISKSGFRGVGVVECKKCRKLLQRDNNAAINMMTVLKEIWSGRGRPAVFQPKKKEPEQSNL

SEQ ID NO: 3514 - protein, 628 aa, Mucor irregularis
MATINAFHLSASTLFQILTQEHNESTATEQNEVVSDVRTPTKLIVYGYSQKPIYSIPESRQHKDATFNSFFDMSSVTRKCASYKLKFAHGITCLPGLKVARILGTRLKKKARVEEPVKLTQEQRVIRDQSIIMEAKNSSENLRSRSVDVQNNIKKLELELKNALKTNQDVECSAKIKELKNEWKDSSKDDHYLNVNSMKTKLSKNRRLLYNIQMAIRYKSKLEVTEVPPAIARNDIEVDGKGVSKAESRKMNSSEDFVYAGTDNGLVKMTASTPFDHEREDEEPKFNEEDNKFLNLPPAITTSAADVDLGCGHLLNRQYLIRKKKSVEGEKIKQIEAVMSEDNKTIPVSTQEQLSKFKQHLTFREQLRDFYNAKKLLNKKRHTEVQKAHFCAALCREERSQLRKASGLSKTKKLLLFIGDRGTGVGSRIKGFRRYGGTWKEKVHGDAVNVIITNENKTSQTCIYCYEKLINPKVKKMVSANGENKAHSESESEEEFIIHENLHKRAKAEEESYNKPVQHSSSNTKSEETSTEGAGWNDWNKASFGGDDAKKNKFLRLLGAKKSDNKSSLSQSFTPAKKSGGGLYGGLKSAIDEDEKRRITNDLEKQFDHGLQFKKQMQMGRRGGLGFN

SEQ ID NO: 3515 - protein, 344 aa, Mucor irregularis
MRISSVTPRNSFLSRKLKEDAYLIDPGRRDLLYCMKETSTARDKQIVVHTKINRNKLQRHYRWLRQKTKPEAVQNAEVILSSAKSHSLKLEDYVHYIKTRAAVNDVLREYYGSETYNASRNYYPDVRFIFWVKHSGDLHFGNTFITRRRELRSGIDGANYSQMFPTYLDLLIQQKHIFNRFKEEERAEINGIVLHMMVTPEIGGLIERASQILDKLQLVPFRKMKFSGKIFHDQNDAQLLKKMKAKFGKDFIIIIGDWSAPNIKFQEPTRNKGFIEMFKKDGFETYLIDEFKTSSVCPDCESHLENLKNPESKTFHAKKNPTVICHGLLRYVIIPDYKLVSENV

SEQ ID NO: 3516 - protein, 503 aa, Mucor irregularis
MNDLCWELFNMQHIRFSERNYLESKPNSDKSFTGAIRTDGIVLEFICERLVLVPEIPVTPAEVGERVDLNTATIWGLDSGLRDVFAASDDAVAGIEDVPRRHRIRKALIAEYYQLAGFKSATIKRAKHDHNNRDARNIISNCPSLKTSNLETLNLAARYVFQNFATIKGYYTFRLKKLKYHGYRNKQEALSELCKRWKPFTPVDHRDEANAPIIVAFGASQFGVLRGNVPRPTKKFEEALKNYVKATNRADTPVNKFVVMIDEYYTSQVCPLCRTRTTENERDARNNRIHPVLKFEIKKKDAQTDKTDEEATEYHEDEQNKINETEGDESVKVAPWIMENGINVTTLFTEYYKRVEQFVKTEGLIPIETHVQELSALNHILVLKPLQHSKMIREVFTDENIKYVTNEQLKTSMNSSLDFTSDELKQLNLVLKHLTNQTQSVHNIATKLMVFSNSLGYEKRRVIIGIAMLVLKLSKDPIVDITTISESELWSIYFDPFLSAISD

SEQ ID NO: 3517 - protein, 1144 aa, Mucor irregularis
MTRSKKRKQISQYVGNTTLAPELRDDESDNKRIGKRIKTMHEISYLPFFTRSMTEKLNSLIISKISKSDSKTLEKNIKKLKEYIINRKTLPPGLLQQASEYANEAILHQTGERSTLTSGAYKNRLDNEVPRKLIDIWNEYATEDRFDNIVNQEKSRVNVAIREQGSSSTAAQGLHSSVSREEVLQYRTCPVSFEKIIRKDLPDAVNNAVRSKLTDAIENSSDFQAHFLSIIEMFTIIFKTYGLSMDSGATRTSVDILDILPNNFIKDKQLKSTLSASPLPERVKLKYRDELISLFTEQHLQLIQSYYFGARGSNEETLEKHPLQNLLFEIMASEGIQRGSFKQKCKSEEMINVMTKIMTNIKNMWSTNNIFQKLLDKVLLVLLRQHLAPQRETLKQEEVKKKKRDKAHPSLHKRNVVHYEKKKLKKLTKKLNNAAPQERAKLVERFEKSKPKKGETKKKWPEKEEKPNEALDEFVKDATSARILAVRSVLKHMLLYDPSCTASLLKERLYEATEKEIATIKLLFKFFKPYIPQKEDRLSIGHQLPLCILANDVLSILDYAKFVRKLFPVPKFSRLLALEVNSTALYQILTARPSPLKIADFDHFEIESVDFARSNAAAVMNSIFDLNVVNQVCESHGLVFANRIMVIPGLKTARLLGTRKDSKNSLEEPSAPSLVDRILTNTSIVEEAKKVFNVLKREVDTLEGNMKTLQNDLKVLLKKNEPLGLSAKIKEKKKERNDCEDQGLRGEMLAEIVLLKNKRFEEYRKIQASQKAVSDAKQSLHFRRMAMRYHHRLRRSAPATTDPEERPELSKNTIGLFKATECKIKKPADFVFSGTDNGLVNMSTTTPFTLDRFKFHLELYIRYQVLSEENVEIDESDDEVEQFFKLPIPLVINAADVDIGCGYRKARLKLEREKKSSTSGKAVSDAEKELSKKPLNVNLTIPEYLENKEVHIGQSATIRNFYGSAKRATKSRTVEIQKQKFTNRLVSIEKESIKRTVGKRKIVQFVGDRGTGVGSRIKGFRKYGGKWLEVLRSYQNIVCITNEHNTSQLCIYCFEKLCHPRSSNKKISKGALQCVNPGCVSVKAGKAIKSRDALSSLAIGLSGLCSCLLGVTMPHFSPNKISQFDTDNFKNISLAFVKEEQERQ

SEQ ID NO: 3518 - protein, 1095 aa, Mucor irregularis
MYELKWRKFKKVEKNKKKTVDDFKATLSMKEIPTGVVPVVKARVEQMLREGEVAGLSANEIPKSGAWLRKKVHTLKKQGKLSVEGLIDGFINILKNNQNNEDPVESQDYRTVSRSLKCTINHSFDYNTLNTRLDDLQDSCTRVVAGLSKSVLILINLIISGKICTNEGDERKFFKLNDIDLNANGIGKDESDIYLPSREVLKNIETHDLFSFRGFWMILSTCVGEKSVKKKGNIILNIIISELEDSDKHDFTTTPAIQHACKQFYTNFCNMWTKESYKQDLRVAVTLLLRINLAKKRFFKPKRKNKGKEAESVTHTLVSKNKNSKKDMEALFELLMEFQGGKHRKFHCIQKVLKKIFNAQDVVHASTESRKELRGHEDEVPSDGDEDFLNDKELLVPDNETDDVDLTGREINALVSVVVMLCGSESIIGKISPEYIQKQLYTDKKETIPFGALATCAKIVNTLRSITLKENDEASFMNCYPVCHLRNVLARFAGPKTRFNDRKMCPILNDGKKSSVFVTPATLYLLFCKDHNMFDSQNNPFTSYSSIKSDIDKQSLLGNFFDSSTVDRILKEQKLKPCYSFYYSNRYDIKFLGTKAVVKTNKEEVVEVPGIGIKGDEDNLASDDKKQLRARINELNILVKNGKKEYSALIKELRPAEDLRFKWCRYYSIFGDAKFNRYDIKFLGTKAVVKTNKEEVVEVPGIGIKGDEDNLASDDKKQLRARINELNILVKNGKKEYSALIKELRPAEDLRMNAARTFRAKMKNNPNWDADSYLELKGARATCDNIYSKLSSLNVRVKDAQHQMYSMNKKLHSQATISNQHDTLQIPEDVASNLSKGRTLIQGLDPGIVTTAAISCIKPQTLFESINRFEVLNIRSMDAPKHLPVKEVAFDFSAKRVDNAVLSQAHRLEREEKQRKNKRLDIKNLQKRATTRKIRLGRYYKKSLSHDRDEAFRLQNVEKENGSLLTFVGNWSGCSPFLRGHSRRSLKPIVERLASVEGDHVFTIDEFRSTVTCNSCFHLTTKQVVRVGEEKKKKRVKGAVTCTNKNCPRRKTTRATTTNRDQNGAKNIALIGFSRMVSEDGLCLPPFRRKNKSNK

SEQ ID NO: 3519 - protein, 1204 aa, Mucor irregularis
MSRRKRKQDSLYTGTSTLAPEVKNSDEERIIKRPKVQHQLKYVPFFNQAMRAFLWGAIKKKLDNIGKKDVKADLEKMKKDLLEAKRLPSGIIKSAAIFAREALSNQMPSSASYLTDNAYRNQLNNESTELLIESWRNYVEKEFSSIVANLQKATEQTDTEQSTSSAVASTPVNTTSVTEEKLYRTCSIASNKVFRKDIPKHILNIIIEKLKDTMINSSNLQALGMEEGTLEITKLLPAEYVAKNNLSRCFSASPLPADVKETFKSDLDTLFTAQHLMLIYSFFCGPRGSSDLNLLAHPLQNLLFKKLVVNGIPSGSYQQDLQSEEAQNVLSGIITNVENMWQSTQIFNKLLDKLLLVLLKLHLSPKRTNEYKRFTEKKTKSKKKSNRKHQLLYFEKKKLRKFEKKLENVTGAQKDNVEIQRDKSKARLDYLKSLPRSAFLVSVDTNVVSQAMPRTEASSSSSALSPAQPSAKISAQPSGEPSGEPFGETSGEPSGGPSCGPSGRSFGEPSAARFAENVEMEELEIDISRAPDYSGFRIDSVEFARSNGSAVINSIFNMGTIHAACADANLDFENHVHILPGMKLVRLLGSRLVQTTPEATKFTSATSDILSNKEVQKEGGKSIDILTTEIQAAEALLVEHEINLKKLLKEDNYGRTTNTIREKKFARRECAEEDKKKLTDEINVLKNERFVAHQALVNQRREVSEIKQSTFFKRMALRYHTKLSRETTPDAQQPPRQPLSATEHKLFKTSECLVEDPHLFGFSGTDNGLVNMSTTVPFTAERFKFHLALYNRYQLLQEDNVDIDDADHMKYLDLPKKFVINSADVDIGCGHKKARKRLEREKRKTKQGRKVLKAELALSKSSLNSCPTIQDFTNACDTHLKESKILRKFYSSANRARMSRFIETQKDRYSDTIVNKEKVFLTDANDVKTLVQFVGDRGTGVGSTLKGFRRYGGKWLEELRSKRSTVCITNEHNTSQGRKVLKAELALSKSSLNSCPTIQDFTNACDTHLKESKILRKFYSSANRARMSRFIETQKDRYSDTIVNKEKVFLTDANDVKTLVQFVGDRGTGVGSTLKGFRRYGGKWLEELRSKRSTVCITNEHNTSQLCLFCFQKLTHPKGKNQKPIKGSFLCINPACVSVKNGKAAKSRDALSSLAIGISGLSHCLFGTYMPAFSPSKISQFNTDKFKSLSTAFLNEETVRQQRF

SEQ ID NO: 3520 - protein, 445 aa, Mucor irregularis
MDPGTLKTISKVYCYQYICRGEPVWPANIVVPPNFTEEMLKAGVDRECQRFQTLIGEKVTLHTLSKDPQIVYRCLEHILNQYEDEHSRHSSFDVRRLPLPRLFTLLPKPSVRWRFVTISANALCCFLKRPFPNGYVNQLQFFSSVFDFKKLRYHSIDELLPNGENEVLFGNIVKSDGFAVDLLFYRRVSDESNDQRVMESHDLSVSDFSIDEVTEMYRPSFIDPGRKTVFTAAMGLDLNHHEIRRCNTKEYYHLTGSTVYTKKLAERKTRTGIAAIEAATPSSKTARTFSYWRFANYMLANMGALFSFYGFSTAKHRFNLYQGRQRAPEMMVNMLLDGGSKTRKWSPAKFTKQDKEKVPLIVFGNGIFGKDLVKLKGLRCGVVGVLWRCLKKREAAGELLVVPIDEFNTSKSAADVLRNPCQDIQTSEVPVYLSAIHVIHFGSET

SEQ ID NO: 3521 - protein, 1145 aa, Mucor irregularis
MSRRKRKQDSSYTGTSTLAPEVKNSDEERIIRRPKVQHQLKYVPFFNQAMRAFLWGAIKKKLDNIGKKDVKADLEKIKKDLLEAKRLPSGIIKSAAIFAREALSNQMPSSASYLTDNAYRNQLNNESPELLIESWRNYIDKEFSSIVANLQKATEQTDTEQSTSSAVASTPVNTTSVTEEKVYRTCSIASNKVFRKDIPKHILDIIIKKLKDTMINSSNLQAYILCILEMMTILLKKNKFVLKNNRLGMEEGTLEVTKLLPAEYVAKNNLSRCFSASPLPADVKETFKSDLDTLFTAQHLMLIYSFFCGPRGSSDLNLLAHPLQNLLFKKLVVNGIPSGSYQQDLQSEEAKSVMSALVTNVENMWQSTQIFNKLLDKLLLVLLKLHLSPKRTNEYKRFTEKKTKYKKKSNRKRQVLYFEKKKLRKFEKKLKNVTGAQKDKVEIQCVKINLMKASIDTNVVSQNMPRTEASSSSSALFPAQSSAQISAQPSDEPSGEPSGRSFGEPPAARSAENVEMEELEIDISRARINAIKSIAKKFLYSKEPLSETMIKNELHQASRKEIETITSVVNNLKDYIPAKEDRFVIAHQLPLCILANDVFSLTNNVKFIRKLFPAPSFSQLSVLKINPVSLYQTLTKAPQPLNIADYSGFRIDSVEFARSNGSAVINSIFNMGTIHAACADANLDFENHVQILPGMKVVRLLGSRLVPTTPEATKFTSATSDILSNKEVQKEGEKSIDILTTEIQAAEALLVEHEINLKKLLKEDNYGRTTNTIREKKFARRECAEEDKKKLTDEINVLKNERFVAHQALVNQRKEVSEVKQSTFFKRMALRYHTKLSRETKPDEQQSPRQPLSATEHKLFKTSECLVEDPHLFGFSGTDNGLVNMSTTVPFTAERFKFHLALYNRYQLLQEDNVDIDDADHMKYLDLPKKFVINSADVDIGCGHKKARERLEREKRKTKQGRKVLKAELALSKSSLKSCPTIQDFTNACDTHLKESKILRKFYSSANRARMSRFIETQKDRYSDTIVNKEKAFLTDANDVKTLVQFVGDRGTGVGSTLKGKNQKPIKGSFLCINPACVSVKNGKAAKSRDALSSLAIGISGLSHCLFGTYMPAFSPSKISQFNTDKFKSLSTAFLNEETVRQQRC

SEQ ID NO: 3522 - protein, 747 aa, Mucor irregularis
MFNVSVNSSTGTDWPEDSLEPTAEANARALEIQQQCKLGPEPVTMAHISANPELYLRKMHEFLARMEEYNDGRVRTRDEVQVECTYAWVKRVITGTDVFQVLNRKRRIRLAFQIFCSIRDSVPFENRMRLNNPQLSFVRRLITETTQQIQNSRLYLAAEDHNQVNIGDCFRPDMSTSIKKFKLFSLVPLYRYTRQYVEIDSAHMRSLLLKVERELPESNVISEGDSENRHDQATYMFSQVLDFEAVRLNVNYNGKCMFTNLIRTDGYGIDFVLARPKNQRASLPDLELSDFTADEVQERFHLWGADPGANVVFTASDGHDNDPHQIRKYSIAEYYTRAGFKKTNKRILQFKNNDRAFLRVERGIPSHKTANLTTYAAFIEYLLLNLPALFQFYDDRFTSLRFLNYIGRQRADAEMVNIFVTGGKKYLHKQFKQTGRNQDKRGPRKKRKKREKRSDAKRDKGKGREKTRKHRPLPFEQDNRIPLIALGDAVFPSTMRGTIPGVAKRLPRLLKKAELEGLLVIVPATEYMTSKTCSNCSLANTEYVQRFIAPESMNCSAPDTGNMEVFAKYGTPAQKEKWLKPLLDGKIRSAFAMTEPRVASSDATNIETGDKGKGREKTRKHRPLPFRQDNRIPLIALGDAVFPSTMRGTIPGVARRLPRLLKKAELEGLLVIVPATEYMTSRTCSNCSLANTDYVRVDGVSLFGVLRCQNPVCHTLWQRDVNASRNIHNIAWNVITNGHIPARFQRG

SEQ ID NO: 3523 - protein, 1134 aa, Mucor irregularis
MTIWPNSNQSDGLPSFHVLEHKSSYLHSCAYYALKPMSKKINRPRVILQSEETTTVVAIKRKDNEKKPVSSRHSLGGALDDLVLQQLDEESSKMYSRKWLKFQNDDKSKKKTLDDFVKTLSTKSIPTGVIPLVKTKVEQLMKDNKIENLTAKNIPTSALWMHHIVEKLKKKGQLTIELLIENFVKMTKSKIQDDREVDDSTENSNFGEVTHVTEEKEYIRTVGKTLKGVINPKFDYDELLGRLDQLQHESNLAIFGLSKAIQTLFELLLSGKIQALPDSNVSFRIRNLDYNNDGLGKDEPDLTIISEEGKKVFQDEKIFAYSGFWLILSRCVASKNPHKNTPLIKEISEKMSQEDIYAFTTSPAMGSACKQYYTNFNNMWLEEKYRDDLRVAITLLLRINLARKRYFKHRKPSPQSSTTPSPLKKNKSLSGSMKLLFELLLKFQKSKHRKVHSIEKVVEAIFCGDEKPTVAQHQAIEQDEDGMFQKQESDDEDEGLVPGGEKEKETDNTLENDRDLTSREIKALVAVVTMLCGSDSIVGTVKPDFVKKQLYLDKQETIPERALVLCSKIVNSLRAISLKKNKDPSFMECYPIRCVRNALVKFSGYRTKFGERRLWPAKDKEHASSIFVDYRSLYLLFCKDYNIVKTEDAFFTSNQEIKNDQDKRMVFENFFDHKTIDRILKEQHLEPSYSFVYSNQHDLNFLGFKTSTPLGQQPTTSNEVETPGPVVDKASIDNDIKVVNSKIKIHRKEYAPLLKSIHEEEWRRMDLARSFRKKEKEKQPWDAESYKILKQKRNECDAIYSRLQESNGSIKNLQSKMYLLNKSKRGQKFPSTTNTMMIPKRIEQGIMDGSTLVQGLDPGVVTTAAVSCLSTQTLFESVNRYKVLEVGETVKLDAVTAKYKNHEYTYTAGKINRAVLSTAHRLLREKKQRDDVQIRPKVLQKQAVTRKIRLKRFHQLFHSSQRSKMFEHHQVQEKAGAVCSFVGNWSRQAMYIRGHILRKLDPILERFNSFQDHACLVDEFRSTITCSSCFQVTSKQLVRVQETKKKRIKGAVTCNNKNCPRRAARMTTINRDMNGAANIALIGFSSLISQENLPLPPFQKSRNETTKYNLAERYQGARMATLIHRIEFETDHTS

SEQ ID NO: 3524 - protein, 1327 aa, Mucor irregularis
MPRKKAEQHSSFEGNSVPIPISALETTQPFEQTRRKWRSQSREAFLMAFEKAFEDHIREWISNNRKKISSGKAILKAGRSLPRGFLTKVDHIADLEKGESSMRFKDDNGLPLAPAVWNQHLDSKYDSILNQYQASSTPSSFVNDLSLNSPMSEGTPGGSSSVGNPGSTSSVTSGGEEELDYNQLFSALEAIEDQEDEEYYAVTTVRLNSILRGDITEDLRKKFIKKMEDLIPMISDFTIDFQMIVFFTMSLFRTHSVMEDGEKIFLQSNQGFETKSIFPSDFNMLKQLEYSSGPPPSTQSTTANLEMTYLFSEGHLEMLLSEYYGIKGMKTSSKVKHPLVANLMENSKLELQEHLKFKKDALPRPCYAAAVTKFQVNLQNMWSNNKMFNILLDKLLLVLLRSHLAPNREGKRRDAIKSWEENKKKSGTAPQSQKLEATSSDSNCRSTFRGLNYRYKQCNRKKKEENDKWARKALKLKERLDLLKASLKKADATGKRKMLSSGSNNPNKALAIFSPEKPGVPVRLPQSNTPAVNESDDQNDSDEEELTPAEVGQDTSSKRITNLKGFIKSLLFNEESISEQLVERERTDLSRQEKSIILLIATKLKPYIPTKENGVHIAYQLPFVILANDLLRCAGYEKFTRKICPTPSTRLNAFRLDVTSLYALFCQHGQDRLRFFHYNGQLFRSLREVFSHKDTVFNSFFDIEKIQAACKRSDLKFSHNITILPGSKYVRILGVRQKTPKKTTASLSDKKKRKQNIPESKWNLILNQADKDKKTLRKEINELQEKINALSKELKSFYKAMKDGNFAAKIKLAKSFWKSPFDPMELSDVSKLQSTTNMLESIVQTGMDSSDNRNNLNRQTESSAQGGIKMKANAVPGSSSVLPQKEIAIQGGLSSQQGLKGVEVIRKNIYTFINKLKDLRYKAHLDIQGCRRELSHTKSEQYIRRKALYLPKRNQAMQARNVTKIEKNDCEKGSITHTENASLVPDAAAISKDFIFSGTDYGIAKMSVSVPVTIEKYKYHLSLYNRFSALDTPSEELEPDFEPLPKIVTVAAQDVHFGSREFSHREKLAELKKTNQKVLDTEKKMAEQSLSQATNQDEIWKAYNCTQDSRETLRNFYQSPRMNAWSMRRENFKRKAKDRICVRERKSLNPTRKKAKNDDRKGKGRQTHETSKNLIMMIGDKGKGVGSTIKGHLRYGGNWKQDIHARHTTVCITNEDYTSQTCIYCYEKLHHPTQKVKKKDKTINKTIKGTFICYNPKCPSVRKGYATSSRDQMSALAIAISGITVLLFQEMLPPFTSNVSHSNTELNKKLEPFCIGSGAKAGSSESL

SEQ ID NO: 3525 - protein, 425 aa, Mucor irregularis
MRLNNPQLNFVRRLITETTQQIQNSRLYLAAEDHNQVNIGDCFRPDMSTSIKKFKLFSLVPLYRYTRQYVEIDSVHMKSLLLQVERELPESNVIFEGDSENRHDQATYMFSQVFDFDAVRLNINYNGKCMFTNLVRTDGYGIDFILARPKNQRASLPDLELSDFTADEVQERFHLWGADPGANVVFTASDGHDNNPHQIRKYSIAEYYTRAGFKKTNKRILQFKNDDEAFLRVERGIPSHKTANLTTYAAFIEYLLLNLPALSQFYDDRFTSLRFLNYIGRQRADAEMVNIFVTGGKKYLHKQFKQTGRNQDKRGPRKKRKKREKRSDAKRDKGKGREKTRKHRPLPFEQDNRIPLIALGDAVFPSTMRGTIPGVAKRLPRLLKKAELEGLLVIVPATEYMTSKTCSNCSLANTEYVQVDGVSLP

SEQ ID NO: 3526 - protein, 751 aa, Mucor irregularis
MSKDPGSEKKKLEKRISTIKTSIQNIEWKKDYKDNLHELVLKVNLLVTHAYAFSKYIFIKELETDPTFDLNSSISSKFFTEVFITLTNTKQLVNRVNPETAIIRTLLWKHREDYLRHSKFRPTSFSYAQQNALYEAQKIFTAYTNNISGERVKELRLRMEKSNYSKKQIDNMIRTTITNVCTKVYKPKMFGVKHEIVESRYILRKFINKLLRKEERVKELRLRMEKSNYSKKQIDNMIRTTITNVCTKVKLSISKKDINQIPKDFLTEDKLKLLQEFISAYPLNYQFDKDSIYYDVKSRPENHFKPFFVLSKLCECHDISVPVCFPLRKTNIPCHITIDTKILKEQIIKAPKSKDNKMEAWARVVNLGCKAFKEQGQKRSLGGKSSVDKVGEISTYVEDVDISNTEGKCVLIDPGRRDLMFCIHESSTPTNPQMLRYTQNTRAYETKSRHYRKIRQSLKPDEIETLELELSKVPSSTVNVSKYETYLQTRGRVDELLKRYYSCESQAAYDAFRFEDYGVSLKVDENCCLVFQAQHKSNSRKRNAMTITRIKGYYPRNRNNDDNDSAYNLGLALMEPHFTNRMTEEDKVEAQMLVEKFYDKSLSLKEFEDLSSLILKKLLLIPFRKLRFSTYVNGRKSDQLLVKNMQTKFNQDAILIYGNWSAGNSKYHEPIRGKDEYKTSTFCPQCKFSPVEKFKKIDNPRKHNRHKMPQVLCHGLLRCTNRKCLESNMRLWNRDVVGALNFRHILNELRS

SEQ ID NO: 3527 - protein, 1166 aa, Mucor irregularis
MNRKKTHQESFFEGVNTPPPLLTEQRPKRAAPVADSSENDSSKRQRLESSFVQSIKDRLKSMVLSETKKKKPDLVKLKDNLLNKKTLPPVPNAAKLASCDLHEMNKYLEHRYVRTNKQEWQAAVYKHFDEYAQSSSNLSAEPSSSSASTSHAEPLEEEEEQYSVFTVPIYEIIRKDLSTEVHRLIMTKISTSMIRTTDFVVCFSSLIQMIINMFRSYQFVVDGVNNISFRQTPGFDLKSIMPSSTNDLESCFTVQPLDDRLLETASLFNDFSQLFTSQHFGVLFSHFFGSRGINALHSTTHPVQNALFTSLEEAGINKQAFTLTMPCAEAMTDALDKFVVNFENMWSAKKTINKLLDKVILVLLRSHLAAARESKRKLDTTQRRPKISQDRKNLKNHSRLVYRREKKKLRRLKKRKREASLSERHKWISRISKSERRISALRETFKKKLAQLRESSASAVEEDHENQSDDQEEETLGDDVSRRRIAQLKSVVKHLIFSESKVVSESDLKVELPTATQKEITACITIINCVKKFLPARKNYHITAFQLHFCIFANDVLRYTKYQKFTRSLSPVTSMATINAFHLSASTLFQILTQELNESTATEQNEVVSDVRTPTKLIVYGYSQKPIYSIQESRQHKDATFNSIFDMSSITRKCASYKLKFAHGITCLPGLKVARILGTRLKKKARVEESVKLTQEQRVIRDQSIIMEAKNSSENLRSRSVDVQNNIKKLELELKNALKTNQDVECSAKIKELKNEWKDSSNDDKGIIYKRIQEFKKKRIDHYLNVNSMKTKLSKNRRLLYNIQMAIRYKSKLEVAEVPPAITRNNIEVDGKGVSKAESRKMNSSEDFVYAGTDNGLVKMTASTPFDHEREDEEPKFNEEDSKFLNLPPAITTSAADVDLGCGHLLNRQYLERKKKAVEGRKIQQIEAVISEDNKTIPASTQEQLSKFKQHLTFREQLRDFYNAKKLLNKKRHTEVQKAHFCAALCREERSQLRKASGPSKSKKLLLFIGDRGTGVGSRLKGFRRYGGTWKEKVHGDAVNVIITNENKTSQTCIYCYEKLINPKIKKLVSTNGENKEVYRTRKGTFICTNPLCFSVIKQRACKSRDALSAMAIGIVGFCTVKFGVSPPPFNIISNSNTESFNKLTFSFLNASEDRQLRCSSGVDCP

SEQ ID NO: 3528 - protein, 687 aa, Mucor irregularis
MPTRYMTVKCAVPDAMVEEGGFEPELVSRSAEGDVTFAREVQRVTQQHLMDYVEYVNYVTRAAYAFCRYIFLRIVGERQIQVNTLVDRKFFKQVWLSLTTVRSSGRAQAETVRHRDLIGRFKADFINLTQINLTTFRCPDQQATYSSTRIEADYLNNIELHFGNRLRQVINHILDLRAVKAAATERLRRSTASAAQIRQFIQEHITDPANRFKDTIAAGNQEALRLGEFGVFNGYRESFAFFFDSYHEGYTFANGNVFYDVKANPANHFLAFFNLARHLQSISETNVSLFQVCPLQSKNYPLYVQLDTRIICMEFFRLSLQMSRQFTNSLINKRAAWSKVFNLGAAMFQDQRYGIFSEILRFRGTIYTDGVGLSILKSNTDTTAGSMRMQANRQVDEFKFITEANTPSETELLARNCVLIDPGRRDILFCMHEGSTREVPLVCRFTKSRLQRKSYLKRARRITRQALRGAPHVRHAQDRLNVFSAKTTIPEQFNNYLDAHFTSEHARIVRDFWSNTLTPRTAQPLFRSLKLKITTKMNREYQRLANELRDFYPEGETSPPTLVIGNWSAPNARFHEPTPGITLKRKLRSLGLPVFLIDEYRSSSTCPQCQQRSVAPFMYTRNPRPHRREARPWVQCYGVLMCNTPACIESGTYIFHRDFLACQNFRHALIEVRQTGEMPQRFRRENQ

SEQ ID NO: 3529 - protein, 1373 aa, Mucor irregularis
MKRRLTEQGVRDHTRRKRHSQPENTPPNPDPLQFQCDTKVPVASSADNPASVASYQSAVDNYERSFGESLSEAKSYLKRFRIQVWNAKLSAKHTLSATYLIHALNKKVESNIKMTSNMHPNVAVTPKDDLLVFAFCQVYKCRIFLFSSRAKPEIVTPKDNHNSAAIPSFALLKHCNSFIGKTTWYELKFNNNLKDRSRVDETLATEDTLFAQKRGAEESKPRLKKHTLGSSVDGQILQLLREEVFSIFDKRWLAFVKKQTNLTDEETISSFLSTLPAKSLPNGVVPIVKAKIEKMMRDNEIPGSVPQSPMWVHKRIETMKKKNEVSIEGFINDFATNLDVSKVRPPIQVAEHADQDAGGNTGEDAAGEVSEEFEVDKDDFRVVGRTLKRVINNHVPYDEVIEKFDSLQANCEEVITGLSKAVKILTTMVLSGDKSITNGADASLFDLNKLDLHKNNIFPGKEKIAILDDASIKYIEKSNIFHYGQFWNIMSTCVGEKSLQKDKHPIINAIKNKMKKEDTVKFTTTPALASACKSYHTNVTNMWTADRVQSDLRVVIILLLRIHLAPKRFFRQKSKKKSLESINQNNVVNTSASNCKIGKTKAMRDLFHLLQRHNGDNFGNKLQVLQKLVDVIMKEKVKIPSAQKVEETAPVDVVDDLEKDISDDEDEEDIYLVKDDFEDLTSGEIKALTSVSLMLVQSNSITGKINEIYIQKQLYGDKRESIPLRGLQICAEIINALREIVPVKGSAYSLANCCQVRHVRNLLVEFSGTKTRFRQHRLTAEKNQSNSNKMGILINHVTLYLLFQKEYNMYKEDGSPFTSYQSIKTWEDKKAIFSNFFKFDVINKIMAERQLAFKFSFLFKDRYSLHFLGQLDDMVAEEPNKSTSTAETSPPTKTAGGGKEEIDALVAEVKKNSLLLKELRKDFKEAEVKRMDLANTFRKQEKISWDQDMYNELKSQRNTCNTLYSDIDRLSSAIKNARMKMYDRIVGRTLKRVINNHVPYDEVIEKFDSLQANCEEVITGLSKAVKILTTMVLSGDKSITNGADASLFNLNKLDLHKNNIFPGKEKIAILDDASIKYIEKSNIFHYGQFWNIMSTCIRPTADRNCMVQKLKEGNVIVQGMDPGIVTTAAVNSRSSKLLFESLNRFAALQSNGEPVNLTTPSTDNKQIAFSLTAGLVNSANFSTIYRMKREHRKRKGLELDHTYLAKRTLTRKIRTNKAYQHIYATQRDGLYKQLNLNKKTTPVCVFLGNWHQQSTYIKGHSRRSLKPYLSRVNSYKSDYFEVVDEYNSTLKCNSCYRSTMKQAIRTGHQTRRIKGAVVCMNKDCPKRKSDRSTTCNRDQNGAMNIAMIGFSALVSQDGLALPPFRRGYNNSNK

SEQ ID NO: 3530 - protein, 1152 aa, Mucor irregularis
MKRSQNDQGSSHPRKRVQYSEGGFDHHYEDSKSYKMVEDAKKHFGDKHLLGDGKLYSNLLGFGHVGDGNLHIMANLKGFDRHGQEAMDEFVFDWTMRHNGSITAEHGVGVSKVGYMKRAKSNVQLDLMRIIKNAIDPNDVVVAKLRGAEEKKPRKAKHKLGTTLDALVVNYIEEEANRMYESKWKKFKKVEKNKKKTVDDFKATLSMKEIPTGVVPVVKARVEQMLREGEVAGLSANDIPKSGAWLGKKVHTLKKQGKLSVEGLIDGFINILKNNQNNEDPVEIQEYEDEPSVSEVIGEDENDYRTVSRSLKRTINHSFDYNTLNTRLDDLQDSCTRVIAGLSKSVHILINLIISGKICTDEADGGKFFKLNDIDLNANGIGKDESDIYLPSKEVLKNIETHDLFSFRGFWMILSTCVGEKSVKKKGNMVAVTLLLRINLAKKRFFKPKRKNKGKEAESVTRTLVSKNKNSKKDMEALFELLMEFQGGKHRKFHCIQKVLKKIFNAQDVVYANTERSKELRDHEDEEPSDGDEDFLNDKELLVPDNETDDIDLTGREINALESVVVMLCGSESIIGKISPEYIQKQLYTDKKETIPFGALATCAKIVNTLRSITLKENDEASFMNCYPVCHLRNVLARFAGPKTRFNDRKMCPILNDSKKSSVFVTPATLYLLFCKDHNMFDSQNNPFTSYSSIKSDIDKQSLFRNFFDSSTVDRILKEQKLKPCYSFYYSNRYDIKFLGTKAVVKTNKEEVVEVPGIGIKGDEDKDLASDDKKQLRARINELNILVKNGKKEYSALIKELRPAEDLRMNVARSFRAKMKNNPNWDADSYLELKGARTTCDNIYNKPSSLNVRVKDAQHQMYSMNKKLHSQATISNQLDTLQIPEDVASNLSKGRTLIQGLDPGIVTTAAINCIKPQTLFESINRFEVLNITSMDAPKHLPVKEVVFDFSAKRVDNAVLSQAHRLEREEKQRKNKRLDIKNLQKRATTRKIRLGRYYKKSLSHDRDEAFRLQNVEKEYGSLPTFVGNWSGCSPFLRGHSRRSLKPIVERLASVEGDHVFTIDEFRSTVTCNSCFHLTTKQVVRVGEEKKKKRVKGAVTCTNKNCPRRKTTRATTTNRDQNGAKNIALIGFSRMVSEDGLCLPPFRRKNKSNK

SEQ ID NO: 3531 - protein, 1116 aa, Mucor irregularis
MSRRKRKQDSLYTGTLTLAPEVKNSDQERIIKRPKVQHQLKYVPFFNQAMRAFLWGAIKKRLDNIGKKDVKADLEKMKKDLLEAKRLPSGIIKSAAIFAREALSNQMPSSASHLTDGAYRNQLNNESAELLIESWRNYVEKEFLSIVANLQKATEQTATEQSTSSTVTSTPVNTTSATEEKLYRTCSIASNKVFRKDIPKHILDIIIKKLKDTMINSSNLQAYILCILEMMTILLKKNKFVLKNNRLGMEEGTLEVTKLLPAEYVAKNNLSRCFSASPLPADVKETFKSDLDTLFTAQHLMLIYSFFCGPRGSSDLNLLAHPLQNLLFKKLVVNGIPSGSYQQDLQSEEAKSVMSALVTNVENMWQSTQIFNKLLDKLLLKLKNVTGAQKDKVEIQCVKSKARLDYLKSLPRSAFLVSVDTNVVSQAMPRTEASSSSSALSPAQPSAKISAQPSGGPSGRSFGEPPAARSAEMVEMEELEIDISRARINAIKSIAKKFLYSKEPLSETMIKNELHQASRKEIETITSVVNNLKDYIPAKEDRFVIAHQLPLCILANDVFSLTNNVKFIRKLFPAPSFSQLSVLKINPVDNIAPQPLNIADYSGFRIDSVEFARSNGSAVINSIFNMGTIHAACADANLDFENHVQILPGMKVVRLLGSRLVQTTAEATKFTSATSDILSNKEVQKEGEKSIDILTTEIQAAEALLVEHEINLKKLLKEDNYGSITNTIREKKFARRECAEGDKKKLTDKINVLKNERFVAHQALVNQRKEVSEIKQSTFFKRMALRYHTKLSRETTPDAQQPPRQPLSATEHRLFKTSECLVEDPHLFGFSGTDNGLVNMSTTVPFAAERFKFHLALYNRYQLLQEDDVNKENEDHMKYLDLPKKFVINSADVDIGCGHKKARKRLEREKRKSKQGRKVLKAELALSKASLKSCPTIQDFTNACDTHLKESKILRKFYSSANRARMSRFIETQKDRYSDEIVNKEKAFLTDANGKSQNPSQVQFVGDRGTGVGSTLKGFRRYGGKWLEELRENQKPVKGSFLCINPACVSVKNGKAAKSRDALSSLAIGISGLSHCLFGTYMPAFSPSKISQFNTDKFKTLSTAFLNEETVRQQRC

SEQ ID NO: 3532 - protein, 316 aa, Mucor irregularis
MYLMNKSRAGQEVKVDEKEFATSTKILSEIRKGNVLVQGIDPGIVTTASVNCTKSSTLFNSINRFQCLEDGETELVHQHDEEDLKNLRYNITARRVNQIVLSTHHRLQRERKQKLSESIEKKSLEKKTVTRKIRLKRYYKKYISSNRDLMFQHFQTKKEKGSLITFLGNWSRVGSYIKGHTRRSLGPVMDRLKSVEKDSLYTTDEFRSTVTCNSCFSITTKQLMRVGDNRTRRIKGAVVCSNKHCPRRINSNSTTVNRDQNGAINIALIGFSKIVSVDGQALPPFRRNYKSSKYTLLNDFIGTRMVTAASPPAGGN

SEQ ID NO: 3533 - protein, 717 aa, Mucor irregularis
MHRIKRNNSIIISNKKKAIWNQRKDKAATDKFKDVQCKDCAEVGHYSKAYFKCKLYEEDDGNKVGSSSKKRKKAQNEVTKMNKKIARQHSTDQSSAVCKSCKQKGHSSSRSPQCKNHTQSKDEIMKAHLGSDYITRTVKLPFKNCVHDNYAHVLRSKILTTSDDIRHIVFRAKIFVNYFVLSTSNQQNHTGLFQQNFWYSICQLVNDRQHTNKKILDQNILTHWHVFKEKFPKIVYPKSLQPGASACLTETCKEIATSYLNHIVEGFEPKLCAFVRYHIRQKFGDDLNSHLLNGIVDNYCYQYICRGSPQWPDHELLNESMKTYINRFCYPLRELLNTRVSLTELSAAPEKFIPFLFHLVRLQENQSESLSENDIKPRSISALPRPKLHWRFITVNLQALTAFVGVGTRPSGYVDQLKLFYRVFDFHRLRYKSIDELLPTHDSDTLFNNMIRSDGSTVDFLFCKKKPIGYVDENHLENLDLELGDFHHSEIESTFHPIALDPGRKSVFQATTNSTNGQHFRRCTTREYYTLTRSSKHLKKVQSAKKVDGTQDVESKMPSCNTAKSLLLAKKDLTSTKVSNQQQMKWPSKYKPAQFELSSSKVPLVVFGDGMFGKDNVKLKGNRCGVTGKLWKALKRREKFGNLVAVTVDEYLTSQICSKCKKRRLVDAGNKGRSTLICLECMTIWQRDVNAARNMLEKAESVWKTGEVPEEFQRKKK

SEQ ID NO: 3534 - protein, 266 aa, Mucor irregularis
MNLLGFDTVRQLTGNDESKAFTGAFRTDGVAIDFIFDRPRQRPAEALAPADVARLVDLNEATIWGVDPGQKDIFVASDGDSSNTHRIRRTSTSEYYFMAGYKAANIKRAKYAANNIELRQLISAAGSFKTASRNNLEETLRTTFQNFLQVRNFYNFGQKSLRFTLYNKRRRALTEICKRLLTGSEKYTNLPPIQQSNPLKWKPVTPSDQRHEQQRPIIIAFGAAQFGALRGNIPAPTKALKKALNHFVKAPHYILRAHIRMVEDFW

SEQ ID NO: 3535 - protein, 525 aa, Mucor irregularis
MATINAFHLSASTLFQILTQEHNESTATEQNEVVSDVTTPTKLIVYGYSQKPIYSKQESRQHKDATFNSFFDMSSITRKCASYKLKFAHGITCLPGLKVARILGTRLKKKARVEEPVKLTQEQRVIRDQSIIMEAKNSSENLRSRSVDVQNNIKKLELELNNALKTNQDVECSAKIKELKNEWKDSSNDDHYLNVSSMKTKLSKNRRLLYNIQMAIRYKSKLEVAEVPPAITRNNIEVDGKGVSKAESRKMNSPEDFVYAGTDNGLVKMTASTPFDHEREDEEPKFTEEDNKFLNLPPAITTSAADVDLGCGHLQNRQYLERKKKSVEGEKIKQIEAVMSEDNKTIPVSTQEQLSTFKKHLTFREQLRDFYNAKKLLNRKRHTEVQKAHFCAALCREERSQLRKASGLSKTKKLLLFIGDRGTGVGSRIKGFRRYGGTWKEKVHGDAVNVIITNENKTSQTCIYCYEKLINPKEGNFYLHKSSLFFGHQAKGMQVARRVVRNGDWDSWVLHSEVWSEPSTIQYNQ

SEQ ID NO: 3536 - protein, 970 aa, Mucor irregularis
MSRNDLSANEHRSRIVSNKKEIVFNNRLPPDLEANSKCVDCEEVGHFDKNYYRCKYYKEASADDVGGSNNKRKQSTTIKQEKKASKRQKYATENPVGMHCKKCGGDNHNSARSALCPFNILPKAKVLEQNLGSQHYKAFTRKLPFDQCINQPYHNIKNKITQTCAAVREITFRAKIFVNFYILSNANNDEAYKGIFNKNFWYSICQLVNGQRVTNQSGIPAGLITAWDDFRSRHPNAQAQISLLPGASQCISEACTEIETLYHNNVVETFEMKLEKFLRYKIQMALPYIDDKSLISSLSHDYCYQFICQGDPVWPENNLVNDEVKAVVESICVPLRQTLNKKVTLKELARSPSTFVKFLLHINTQFEREIELHNAYDVRRLPLPKLLNVLPSPTTHWRFITISMNALSSFARKPLTQGYQNQLQLFYEVFNFKKLRYNNISELTPNGNNEVLFGNIVRTDGFAVDFLFYKRNQVGSGSDLNNFDLALEDFTYDEVAQDYHPIFVDPGRKSVFTAVSGLDEAHHPVLRCTTKEYYHLTGSTNFSIEQNKMKARLGITAIESAIPTAKATNPGHFEEYASKTANKRFRLYQGRQRAAEAMVNYLANGGDKYNRGRRPKVKKKRKKNRRRPAAHNEPSAKDKWKPCKFQYDKKKVPLIVFGNGMFNKDTAKIKTLKHGATGVLWRALKKREAARQLIAVTVDEFRTSRVCSKCGHFAVACTEPERLCYNCKQPGHVTSECTSERVKSCFVCGEVGHLIADCPERANAAASSLSKARCFNCQQLGHLARNCTNETQPRSVEIQQGEEQVTQDAPYFRGNGHMHNSSSSSRGRGGRGGRVGRGGRGRGGRGGFRSTVPPAVRRNQIVCDHCGGLNHFAKDCQASDIVCHNCSKHGHIARDCPVPYTMESHHHRSNTTIKTCYACGKPGHIARNCLTARRERDDDEESEGADTTDSDASSSGSAVTDSEEESESDA

SEQ ID NO: 3537 - protein, 263 aa, Mucor irregularis
MQLFVKSLAGNTLALEVAPSTSVENVKAMIAAREGIDADFQCLSFAGKSLQNSEALALYGVQDNSTLHLNAELLGGGKKRKKKTYTTPKKIKHKRTKVKMAILKYYKVDESGKITRLRRECPNATCGAGVFMAKHKDRQYCVFVSEKYTTLPPIQQSNPLKWKPITTSDQRHEQQRPIIIAFGAAQFGALRGNVPAPPPIPTQDPHPYNNGRFLVMVNEYLTSQICPRCQTRIVVRARNDMNKRSAHSVLNCETCGTHWNRDH

SEQ ID NO: 3538 - protein, 498 aa, Mucor irregularis
MPGLKTARLLGTRKDIKNSLEEPSAPSLVDRILTNTSIFEEAKKEFNVLKREVDTLETKLKTLQNDLKVLLKKNEPLELSAKIKEKKKERNNCEDQGLRGEMLAEIVLLKNKRFEEYRKIQASQKAVSDAKQSLHFRRMAMRYHHRLRRSAPAATNPEERLDLSKNTIGLFKATECNIKKPVDLVFSGTDNGLVNMSTTTPFTLDRFKFHLKLYNRYQVLSEENVEIDESDEKDEEFFKLPKPSVINAADVDIGCGYRKVRLKLEREKKSSTSGKAVSDAEKELSKKPLNVNLTIPEYLENKEVHVGQSATIRNFYGSAKRATKSRTVEIQKQKFTNRLVSKEKESIKRAVGKRKIVQFVGDRGTGVGSRIKGFRKYGGKWLEVLRSYQNIVCITNEHNTSQLCIYCFEKLCHPRSSNKKISKGALQCVNPGCVSVKAGKAVKSRDALSSLAIGLSGLCSCLLGVTMPHFSQNKISQFDTDNFKNISLAFVKEEQDRQ

SEQ ID NO: 3539 - protein, 1840 aa, Mucor irregularis
MSKRKRKQDSLYTGTSTLAPEVKNSDEERIIKRPKVQHQLKYVPFFNQAMRAFLWGAIKKKLDNIGKKDVKADLEKIKKDLSEAKRLPSGIIKSAAIFAREALSDQMPSSGSYLTDNAYRNQLNNESPELLIESWRNYIDKEFSSIVANLQKATEQADTEQSTSSAVASTPVNTTSVTEEKLYRTCSIASNKVFREDIPKHILNIIIKKLKDATINSSNLQAYISCILEMMIILLKKNKFVWNNNRVGMEEDTLEVTKLLPAEYVAKNNLSRCFSASPLPADVKETFKSDLDTMFTAQHLMLIYSFFCGPRGSSDLNLLAHPLQNLLFKKLVVKGIPSGSYQQDLQSEEAQSVMSALITNVENMWQSTQIFNKLLDKLLLVLLRLHLSPKRTNEYKRFTEKKTKNKKKSNRKRQVLYFEKKKLRKFEKKRKNVTGAQKDKVEIQRDRSKARLDYLKSLPRSAFLVSIDTNVASQTMPRTEASSSSSALFPAQSSAQISAQTSGEPSGEPSGRSFGEPPAARSAENVEMEELEIDISRARINAIKSVAKNLLYSKEPLSETMIKNKLHQVTRKEIETITLVVKNLTDYIPAKQDRFVIAHQLPLCILANGVFSLTNSVKFIRKLFPAPSFSQLSVLKINPVSLYQTLTKAPQPLNIADYSGFRIDSVEFARSNGSAVINSIFNMGIIHAACADANLDFENHVQILPGMKVVRLLGSRLAQATPEFSKFTSTTKIQAAEALLVEHEVNLKKLLKEDNYGRTTNTIREKKFARRECAEGDKKKLTDEINVLKNERFVAHQSLLSGETTPDAQQPPRQPLSATEHKLFKTSECLVEDPYLFGFSGTDNGPVHMSTTVPFTAERFKFHLALYNRYQLLQEDDVNIDDADHMKYLDLPKKFVINSADVDIGCGHKKARKRLEREKRKSRQGRKVLKAELALSKSSLNSCRTIQDFTNACDTHQKESKILRKFYRSANRARMSRFIETQKDRYSDKIVNKEKAFLTDANDVKTLVQFVGVRGTGVGSTLEGKNQKPIKGSFLCINPACVSVKSGKAAKSRDVLSSLAIGIFGLSHCLFGKYMPASSPSKISQFNTDRFKSLSTAFLNEETNLIRYKHLLSLKFIIMSSGIAEIMRKRLMDSIRSIQPAGKWKIIVVDSKSSLILNAACKMYDILEENVTLVENIEKKRQPYPTLEAMYFLTPCRESVLRLVDDFSTKPPAYKAAHVHFTSGLSDQLFDDLNRRLKSSGAAEYILSLKELYVDFMVAESSVFTVDPTTSFLSVFGEDPRADPDASLKTTAKQLLSVCATLGEDPIIRYQAQSEGGIHPQGSPAGKLAHMVQQEVDGFCRLNPNFPPPRQPPQPRATLLIVDRSIDPAAPLLHEFTYQAMINDLLPVEDTENGTGIKYSYEFHQADGSMGSKDVLLDEDDNVYKSIRHMHIAECSDRLIEKFNEFLSENKAATGDRNSTSGAPKNSAKSLKEMKEMLTNLPQFQDLKAKYSAHLSIAQECMSFFERHKLNSVGNLEQNMVTGETADGETPKTIVLDMVPLLDDPHVSQADKARLLMLYIIWKEGGIFEDDKRKLIEHAKLKGEYRDAVNNLPLIGVKLTRLRSKEKSSFLKKRKPKKNKDEESPYELSRYVPTLKKIMDAHVSNTLDPIQFAFTRKSDMEPTEDHGHAPGQGGIPASGVSLRTTKPTWSKRTNSTTGPLPVNNGAKLIVFVIGGATYSEIRSTYEISEAYNRDVYIGTTEILRPTHFIHELGSLRQPVPAPRSVIAPYVAPPPPQMQKHDSSMSKTASLMSHMHISSSSSNSSPHLSNKSSSMSLDKMSQNTEDSKEKKKKKGLARLFG

SEQ ID NO: 3540 - protein, 342 aa, Mucor irregularis
KGTSSKNPKLKEIDNAKVARLQAEVKAIEKDLQDLIKKKTDFLIGNRIRLIKKGWVKVEGTGATSSNQIDHNKSIFDRVEQLKRTRNDLNFSISMKKDELQKARKSVYLARSTRFDDDANLKSQPKYRVTSENYKAIGKAEEFEIEDTFLESDDLTFSGTDNGLVTMTESVGISLERFRFHIELHNRFATLEEEQTSPPTEEFQEEIPYYTLPKSHKINAKAIHYGTGASQRQKKLERDKKKSKLGIITIEKAMRDNSTEGAKTIQDLEHCYQQQIKDRGNFREFYYSKKRAKDQYTFELRKRKFIDKLCSQERKFLKNGKKSLIMFVGDRGTGVGSRLKGS

SEQ ID NO: 3541 - protein, 1080 aa, Mucor irregularis
MTAKGKTKRKPQTQAGPSTSKRTRSKPTQPEQPSPQASPSPSSPGSAPPSPPPPPDTTLKTQFVNRKCKLGPILRQDYSQYKNYFRTIAEEYSILRKDAINFTLLMLIQFFNTQQVENVRQYTTQIPVAQRSINRLNHYTRLADQLLAELLALLANIDQNIATGFENVTIALQNLRAPIDMRLNQLRPAILELNVIVQQMHTAITEENVDVALIDDLHNRLNHCVVNLRPQITAIQEHITQLLQNLRQIKTQLQNNLNTIVNGLPQEESTIVNNIFQTKDIRDRIENGRRTIQNRLDELRRGDMSEDEALLRAQLNTQMRIFIQNQQAVLTAYEQYQNLHQEAIQNNENIRQSLNLDTNIRQLHGIEDQNSSLFQLAEIASQQLSLAVANPEGNQFFPKVTDDTFWSHVYRRVAIDTDGLNRTIQFNQSIQRNFPDFEISRKIAGSEEYAYEIPALDPLHIAISMNYGSTVVQNVVMHFLNTRLWVVRIFKGYFLRQQHPPQQEQRPEEQQTRGPQRRTLPIMTLAKKAADSIVNHRLFNQIAFRDENDEEVLEELPVFDGLNELYNRVRFIYEAEFAGLTYDRVNEYNHASSHPLKYLRISYRLLQLATSLPDTPIKLWSLIPESSHSILHVPLSGAKAIYHLLKRAHSLNLQVPNNLTNVEAVFIRLTDFQDLYFGDNKRILWNTIFNIEKFESEGLQLGFGLQTDGNMISILFEKTALTFVPENKKELHMQKTRKNIINWTKGMYPLYKNPYGITMEDRIIGIDPGVRDIIYAVDCDADQLTNKQTTKAHSLSISNASYKVRSGMSWLKDKELNNRAATTIQLAYDRLTTRKTCSNEGIMTYLNSLSVERTEIFQFMKRWRHRENKGYAYSNRKMAFSYISRVVLGTTKVGEKFKLAHDSSKAFGENKGKRTVVAYGDASIRGTYKSNTPVPVKKIQRAIAEKAIVIPVDEFRTSVTCCHCQRRLNNVTAELNTCNHLKKKHRTIGVDKRFRTKCIDEEGNVLHLSSLCPDRRVVRRENVIYPLKLCNQCPVNGNNDLHWQRDVNAATNIRSILVEYVRSDYDIASRPAALSRGQQD

SEQ ID NO: 3542 - protein, 921 aa, Mucor irregularis
MTRSKKRKQITQYVGNTTLAPELRDDESENKRIGKRIKIMHEISYLPFFTRSMTEKLNSLIISKISKSDSKTLEKNIKKLKEYIINRKTLPPGLLQQASEYANEAILHQTGEQSTLTSAAYKNRLDNEVPRKLIDIWNEYATEDRFDTIVNQEKSRINVDIREQGSSSTASQGLHSSVSREEVLQYRTCPVSFEKIIRKDLPKAVNNALKAGTDKKTTATTGDLKKEDQPKKDETKKKKWPEKEEKPNEALDEFVKDATSARILAVRSVLKHMLLYDPSCTASLLKDRLYEATEKEIATIKLLFKFFKPYIPQKEDRLSIGHQLPLCILANDVLSILDYAKFVRKLFPVPKFSRLLALEVNSTALYQILTARPSPLKIADFDHFEIESVDFARSNAAAVMNSIFDLNLVNQVCESHRLVFANRIMVMPGLKTARLLGTRKDSKNSPEESSAPSLVDRILTNTSIVEEAKKEFNVLKREVDTLEGNMKTLQNDLKVLLKKNEPLELSAKIKEKKKERNDCEDQGLRGEMLAEMVLLKNKRFEEYRKIQASQKAVSDAKQSLHFRRMAMRYHHRLRRSAPATTDPEERPELSKNTIGLFKATEYKIKKPADFVFSGTDNGLVNMSTTTPFTLDRFKFHLKLYNRYQVLSEENVGSDEKDEEFFKLPKPSVINAADVDIGCGYRKVRLKLEREKKSSTSGKAVSDAEKELSKKPLNVNLTIPEYLENKEVHVGQSATIRNFYGSAKRATKSRTVEIQKQKFTNRLVSKEKESIKRTVGKRKIVQFVGDRGTGVGSRIKGFRKYGGKWLEVLRSYQNIVCITKEHNTSQLCIYCFEKLCHPRSSNKKISKGALQCVNPGCVSVKAGKAVKSRDALSSLAIGLSGLCSCLLGVTMPHFSPNKISQFDTDNFKNISLAFVKEEQDRQ

SEQ ID NO: 3543 - protein, 342 aa, Rhizomucor miehei
MSKILQRFEAKVYITEEKTEDYVTKAFVHRNVKECPLQFAKGTSTAGYCLGSALRLSRSFTKPLPETAMNQLSSLIEKTTQELKDGTFNLKSTPIPKEQGVYDSTCVQFPSQTHNDRFTSIRETTVAKWIEKSWDCIRTDGYDVEFIFKKPKKTPIPEVTPSMFRHLATDPQTVIWGVDLGFDKVFVAVEAEANTPYRIRQLTAEEYYDTCSYNKARHTRTKYLNEDPAMKLIADKISSLKTSSLANLTEALEYRFEHHKEICEVCDKDFRKKDANQAVPLDGNNQTQPATTKLKKWRRKASDDNPETDIGKATIIAYGKGTFSSSMEGKITAPTKCIFKAL

SEQ ID NO: 3544 - protein, 269 aa, Rhizomucor miehei
MQIPPRQVARRPPEADSSNSNSNSVRQMCILLWNKQPRHHPCRNTVLPVQQEDDHHVVDHRILYSTGGPCTDRRYIQQTAMTTMQRTRQNSPSPMLLPAAKASKRPSRGKTQTSAVNFVSYWTGRNSHAKGHHHGGSLSKLKATMDAQKEDALLVVDEFKSTKTYNFCFQPTVIHKYRHDGKFVSVKSALRCNNTDCPSRHLKLKQTTRSRDAAAAAAANIAVVGLPKALFADGKPLPVFRLGNTKDTRYNLAPHFQSSLHRNQSGYRL

SEQ ID NO: 3545 - protein, 487 aa, Rhizomucor miehei
MQRRMPDLQYGLARKIANEYVYENLAGGNPSVPEYLQDCSEDMRAAIMNAQEAIRNYIPEPYSSAEMSARPGPFIPALRFILQQYTADHMAAEQNEKSKTLPRLFSLTPKPSLHWRFIDIDAKTLASLNAQVFKTVFDFDQYRFFDSDDCLFTNLITTNGYQASIHFARPAKSPAVDLQLDDFEQNEIEEYFTPCALDPGRRDIFQAAYGAGDTPHEIRHCSTKEYYQLTGSPDRNKKLQNEKKRLGIEYIESSFPTAKTADIAQHKEYRAREELDEYDYKWWKEIQQEEEEEKKHEPRKRRDLTGLRLPIQPESAVRSTLQRENSESAAERKWKKAKFKTNTDGKLPLIAFGNGMFGKDNAPIKGYRSGLVNVLYRMLKRREARGELVVVTIDEYLTSQICHSCLTRNLKNVTTADGVYHHGLQRIMEERHYRKDIRVIHDRPRHQSGKWNTYRLQPLLPLLIDKSFALAGALHRKGQVCDIIVSL

SEQ ID NO: 3546 - protein, 398 aa, Rhizomucor miehei
MATEPSVFETKLAGSPSNVGKTMPQLPWRHPVKQGFATVGINRLRKATPVSIKDHSPQDYVSWAYVHRILLRWSSKRCLYLNQLLQSLKAAVRKAIDFDGSLTVLKMFARPLPSDIYTQVTKFIDETRKALEEKTFRPEKYTDPRGAQTFTIFPVYSFQPRHVTLYAQSSTKLLGINKVSVAAGGADGCHHNRKLSSKEYYDICGYNQINRNGAKYTRSKILKSSKLSPSVGARNIGLSRHNLVLHQRSRNGVRCLHLTRLMKNKTSNNCIWKQELRTKYARKSIGTNQTCKASIVPISPTSKVSWRNDEKFQYDELNHCFQSRCYICMVDEFLTSQICPECQQRSLKNKKHSANQSLHAVPKCNFCSMVWDRDHLGAINIRTIFVYMANHKDERPDT

SEQ ID NO: 3547 - protein, 373 aa, Rhizomucor miehei
MTDYDHTHEGNRALFERVFDPQKYKFLRETDKSLFTNQISTDGYAVHFQLAHATRKPSVQLELQDFSSAEIDRYYDVCALDPGRRHIFTAAYGCGDDAHEVRRVSRLEYSAFIAAKARNKHLVKLKKENGIEEIESNFPTAKTANVAQYRSYVQHFFQHEETLCQFYSHEQGETRFRNLQGRHRAREELANILINGGKKYNPKKRKHRSENRKKRKKYRQKRKRHRHARKCRRIPLQPVSAMRSTVNLSAEKEYKWTREKKIQRRKEKMPLIVFGDGMFGKDGTRLKGHESGVTNVLWKMLKQREARGEVALVTIDEYLTSQICHSCQERSLTKLKTEDNISHHGILSCQNCDMLWNRDINASKNMYFIARST

SEQ ID NO: 3548 - protein, 288 aa, Rhizomucor miehei
MNHSILKDEVAKSGNEFVYSGTDYGLCKMSASVALTNDRYQYHLDPYERFDVLADSVENEESGEMDVDEPIEPVDIEERKDFSKIEPHCITAEELNGKTLYNKIIKLRNNSNFSFETWEIRKQRPNLQSFYWNKRGRKDARTLRLQKEQVYDQVASQEQRYLRSAVTKITNLLVLKALALALVCAATLEKGGKWLWKRHMRYSTVVMTNEHRSSQTCSFCFSPVDRPHIPKIIKDKRRFVQQHRNSVCYNIDSITLFAEPARLPRTEMLLQGRISVCQEHRQSFKVVR

SEQ ID NO: 3549 - protein, 373 aa, Rhizomucor miehei
DNDTLFTNHINTDGMAVHFQFARATRKPSIQLEIGDFSSQEVDECFHVCAIDPGRQHIFTAAYGCCEEQHEMRRVSRAEYSAMIGAKARNKRLQTQKKENGIEAIESGFPTAKTTNIQPYNHYVQYLLVHETTLRQFYSRYHAHIRFPNLQGRNRVREELPNIVINGGKKYNRKKRKKRAANRKKRTNYRKKRKKYREQRRRSTGRIPSQPESAVRSTLINMQTQKEKRWSREKVPQRTKDKMPLVVFGDGMFGKDCNRIKGHESGVVGILWKMLKRREARGEIALVTINEYNTSQICHTCMSKSLQKLKTEDGISHHGILDCQTCGMLWNRDSNASKNMYFIARSIWEGSGRPEVFCRPNQSTTADVGPERV

SEQ ID NO: 3550 - protein, 385 aa, Rhizomucor miehei
MLRAYRNVIHAEADDLASLQAATDAINDERRSPVADNSVARKSFAMSSRMLLVYVHSHISVTVLYDSKARPQNHLLAYVKMAELCEEHSIKLFQSLPLRPFYFKLETTQLPFDLNMWKQVVDLKKRPFKNQGTDRSMAFQGNIYTDGLSVSIVKQNFQPGFDRKARQDKESDVDINVFIDPDRRDLLYCMHNNSKPDDRMVYRYTRNTKAKETKATQYRKLRQRIKSKEVKQCETRLSEHSSKTINIEKYKTYLEVRSEVAPILSEHYHLLVFRKLHIRSYTYMQRADDALTKRIKQQFGPNPVLIMGNWSNRSSVTARYHEPSGKCGTFTYAPKERLYAVLNRRIQAIEPLPTLHRSPWRSSSWSLIRRCTNGNDTLKSNAMDY

SEQ ID NO: 3551 - protein, 225 aa, Rhizomucor miehei
MSTEYRKLRQELKMKTEEVKKCEADLSAHSSTTVNVERFSTYLKARRDVTATLSRYYQSLTFRILRFRSYLYKNRADDRLVKEIKDRFEPNPALNVGNWSARASLMARYHESIRSIGLLRMLMKKGNLLDRRIQTSTLCPDCEHGLEKFKWARNPRPYRRKTTPQVKCHGLLRSAFFALYIFELGHSTCKDFFRCWNEDCTAVLSNHGNRCKETLGQGPRCCAKL

SEQ ID NO: 3552 - protein, 359 aa, Rhizomucor miehei
MRLHTGGIISRNPVFPPQVQNSRDVQAFADDTIDEIRILSPHDHFFGKDPFAVDVVRTETPWVVDSTQADAEPELSLEDFEPTEISEFFWVCAIDPGAKDLFTAAYGSGNVPHEIRTASTAEYYAIMGSKSRNHNLKKEKERQGIMQLESQTPTAKTVSLFQYTRYLRHMLQHRATESPGGSNQDPDHWRQKSITESTTQGVSVRTTSTAKGSLPKKWSWTKVDVNHNNKLSLVVFGTGMFQQGLRYRGYRRQVVKKLYNNLKRKEKVGEVLVLTIDKYLSSKVCNSCQTRNLYKLTTPEDNIIHHSILVCTNCAILWNRNVCASKNLFQIASSIWAGNGRPLPFPRSTSITTTNEGAS

SEQ ID NO: 3553 - protein, 982 aa, Rhizomucor miehei
MEDNKEQYRLLCKEADSLRKKLSSVLQDNDACRKAQERMEAQIYAQQQELAEAQKEIQLLTKQKRDLEKRLEIELHNYESDRLMWHQRETELCSELKRRAQDSWRNHGQPRRTRSATASNVWNRDNLAAEETRELMTDLYKWNEHRISALQVKDIKTRAQARLLADFAAQVEQQKRIIQDAILTTEAQASRVEELEKELFSVKQLNASLMEDNECYQTLLREKTMTGDFLKNVEEEDEEEGEEEGNQTTTLAAELGKTTSEMDSSLGNQNDTVTKLAEEVRILQESNKALTLYMNKILLKIVDNQELVDVLNIDVDEDEQQTYNKSNDRKQPQKQSTSVDSSVIKPTEQSNLSAQSNSRPRRSTISSWITAPKQSLATESPTIAVRHRSQTNAALSTSGGGGWANSALFEFVFRSSSTGVLNIPPPSMSRAGRPTPDSSRSQNASSPSSSPTSPSTTSNMEYVGPIRRNHTNNRNAHRFDPLSASSIPMSDRAFIEFTRCLYQAKTIVKELQTFSDSLCPGLRLSPFNGHSASSSLYDPRLASKEFVQQVYQYVGNTFQKFSRLCKVLLLILDKMEKAPHVRRERIDSFRTEVWEQVRIATDTKELLTSYIQHYVENNNLSPTSSSASTPVAGNRISNNAIPTSSSSISSNISTPSKFPITLKQSTIQFALVGYPNRCVKVNDGRLSNHNTCHRKKLPLDTRKVAHNVDVDEDEEENVEEDVDVDKRVTVMAITAELTAMELRISADGKEEPIAYQSNFSEEDIAGFDVVMDPSSENYRRDRIRTNGYDVQFMFKKPKKEQRDPLTPSQFKDVFKKDPIIWRVDPGINVVFVAADGGADDCHRIRKLSPKEYHDICGCNEANRTAAKYWEQDHQIKQIIDRIPSLKTASLDNLKKPVYPIESATTAAFVDSTIKILGRTIHLNTSQICLKCQQCSLKNKKDLGNQSLHAVLKCDSCSTVWDRDHLGAINIQDDLYLHGEPQR

SEQ ID NO: 3554 - protein, 213 aa, Rhizomucor miehei
MGRLIHLIESQLTVEEYYDICGYNKARQTRTKYLIEDPGMKLIVDKIPSLKTSSLASLTEALEYRFKHHKEICEVYDKNFRLKSYGNKRNGLSELACYLLGGSKKYANQAVPLDGNNQTQPAMTKLQKWRRKPPNDNPETDTGKAIIIAYGNGTFSDSMKGKITGPTKCIFKALRSRVKRMKWPVIIVKTDEYLTSKICPKWCQKMVENAKEI

SEQ ID NO: 3555 - protein, 563 aa, Rhizomucor miehei
MQFGKEHERFTRAVPFDNAVKAEHRQRLKQAACRMSSWLSHMMLRAAVVVNGYFIWQGQNGIPTYMFSQNFCDILSAACQEMATVYTNNIVENFQPRVVAYIQHKLDSFVPEMLSKEELKKISNDYIYEWIAGGEPAELDIFAEAPLELILAVQEIKDLLMPLAPRPWTTKSMSATPGAFVPVLYAILQDDNDTLFTNHINTDGMAVHFQFARATRKPSIQLEIGDFSSQEVDECFHVCAIDPGRQHIFTAAYGCCEEQHEMRRVSRAEYSAMIGAKARNKRLQTQKKENGIEAIESGFPTAKTTNIQPYNHYVQYLLVHETTLRQFYSRYHAHIRFPNLQGRNRVREELPNIVINGGKKYNRKKRKKRAANRKKRTNYRKKRKKYREQRRRSTGRIPSQPESAVRSTLINMQTQKEKRWSREKVPQRTKDKMPLVVFGDGMFGKDCNRIKGHESGVVGILWKMLKRREARGEIALVTINEYNTSQICHTCMSKSLQKLKTEDGISHHGILDCQTCGMLWNRDSNASKNMYFIARSIWEGSGRPEVFCRPNQSTTADVGPERV

SEQ ID NO: 3556 - protein, 309 aa, Rhizomucor miehei
MTHILQKPKNTALDLKMWKQVVNDKSKPFKSQGPDKSMAFKGTIFTDGFGVSIVKQTSDTKEFRYISQLDQAALKQIQPRAVFIDPGRRDLMYCMHQDTYLKARRDVTATLSRYYQSLIFRKLRFRSYLCKNRADDRLVKEIKDKFGPNPAFIISNWSTRASLMAGYHEPIRSIGLLRMLKKKGFQVDLIDEFKTSSLCQDCEIDLEKFKWVRNPRPYRRKTIPEVKCHGLLRSAFRAPYICDVGYSIYKVVFRCSNEDCIAVLSNQGNTGARRLWNRDLAAVLNFRHIMNGLCETRKIPTRFQRSSNQ

SEQ ID NO: 3557 - protein, 356 aa, Rhizomucor miehei
MGTLESKRIDEGRKYGKLMAARKAVDDLYLDNLRKRNETQKICVKTCTLPTTRRESNHGSKKRRKSTGIWKRQKLCSSSTSSRKKLQRSSLLTSWVVTLTPSSLPPPPNKLSNKSSIVFGDTNRRSSTMTLQSSSRYLSRSPCLHGKWKQAATFERHHPKWREAFKAKNGGSSAEDTRKREKESRTREIRKDVFHREFATQPRASNSRSTVHFFGSWRSSNNKIRGAHTRLQRITQTLCKSRKNEAFITTDEYNTSNTCNYCLRPIVLHKYLRDDGKLKRVKCQNPQCPSRSLQYMTRNRDKVGATNIAILGIQGAFPTMACLYRHSEDENNPAQEFTPKWIATSSGSAFQPRNDG

SEQ ID NO: 3558 - protein, 482 aa, Rhizomucor miehei
MKSFPFYVVMGIPFLCRYASSAAAGTPPPPGGKPGGGSAAAWYLYKKSQETRKYPATFTRSIEDKVEQLGKDSQKTYDEARDKAQDNKEEAQGYVESAKAKVGEQIDKGKEAVGDQAALARSYVDAAKTKESLHFHITKGGSNPFLCDQLLSASEVDMCTSIYCHVPATDGAGLSVIKQTHETVARASIQDRAPPPPPQSRYVTDLLRGDSTPEEPVKLRYTQNERQKTSNARKYRQQGCGELNNENDVLAVRARQRLNFLSQTNSKSNHVNAFEIYMQTAARAHNDLLAFFGQLKNFWRQRRCGDWQLGWCTPAIPRTPQRQNPRPWRDDDMVVHGLLGCTNRTCYVSRDGQARTRYWNRDLLSTLNIIHIVRWMREHPEDEEHRRPPIFRRGQQALEPINLPLQNWTTIASSQISVHTKQPVSSVSSSVSFKVPRSLTPEQLPFAYIELRRYRIDVNGSLLAKVHDAYTHAKLKCVYISA

SEQ ID NO: 3559 - protein, 444 aa, Rhizomucor miehei
MDFAARRSPFSVEESKQNAVNXXXXXXXXXXXXXXXXXXXXXXXXXXXXXXXXXXXXXXXXXXXXXXXXIGFTDVFITTFLQNLGDFLPDADPEIVDSIQSDFESHEGSSIEFLFDIKEKATVAKGNRVQVIKRDYDRKLRKTIQDTDGNEVKRFVCANRFTTDGILCNAYYRDWCTPAKKDKKLDLPDVSTMFGRTDIGGVIGVDFGQTYTAAAFYLPIADADEDQECAQVDIKRNELNGRQKLNSSILEQHKARDPALLKKEELMSKGSKRGIGPEFLQYCRGWQSSEGQSSFYDKGAIKRLSWDTKRSSQSKIDKAADLILGMIPKDTSKSTLICFGLDGVSAPTARGAPSSMETRLAKRIMDKAKASSKDIIVTRTSEYNTSQVCPRCLGQTIIARDAIKFGTRPKCFTPDAKTKKPARKKGTKTKQQQPSQNKTTKKQQ

SEQ ID NO: 3560 - protein, 268 aa, Rhizomucor miehei
MYNASIHTSSDVAKYITSCGYRCAYLPSYCPELNPIEQFWSVVKSKVKRNMFLEKETLTTRITEATESLKPSDYEVGWDSGEACPISAIFVPSNEKRKGLVWAHEARIKAAEEKPPANCKKSNFDKLRLYIRAWQEEGRGISIQNFCTKPSVMHKGWDTRMSMQAEIDKAVQQIVNLSKSVLPRTEKRPVLFAFGMDGMLKANHHRKGALPSLDFKLTQSLYSYLQGTPHTRCRIDDYNSSKICCLCLKKGKISNVSVLEKPACQTIY

SEQ ID NO: 3561 - protein, 499 aa, Rhizomucor miehei
MRSRRTLYPGFKTVRQPQAEYRRDPCRANRQGKVTTRTSLVVSRYVVENGQAAIPTYIFSQSFWYSLVSFLLEPHCPAVSRLRYPLENVTGYSDILSTACTEISTGYTNHITENLQNKVESFIQHQLNKFVPSILSKKQVQQIANEYLYEVIAEGQLVELDFLEEAPLELVIAMQEIKYFLMPSAPRPWTTRETSANPGFFISVLYAILREFEKNMWQRETRKNAPRLYLLTPRLSFKWRFTTLNAKTLRSLLGISIRQTIILWMDAAKNRKKSRELVGRSTAHDWRQTRNKSLQNVTKGNRHRDDRVKIPNVEDGQRLANDMKRHDSKITRTPQGSRGTRKRLKQWWKKLQLQETIPSQPISALCSTLNIPPEKESKWERKKEIQIHKGKISLILLGDGMFSKDGNKIKGHERGVVGVLRKMLKRKEARGEIAVGKIDEYLTSQICHSSLDRKLRKLTTEDRISHHGILECQSCVSGKDLSAQSLLLDLQQINPLLRT

SEQ ID NO: 3562 - protein, 352 aa, Rhizomucor miehei
MVLRVLFAMFCADILISARNRPAIGFTDVFITTFLQNLGDFLPDADPEIVDSIQSDFESHEGSSIEFLFDIKEKATVAKGNRVQVIKRDYDRKLRKTIQDTDGNEVKRFVCANRFTTDGILCNAYYRDWCTPAKKDKKLDLPDVSTMFGRTDIGGVIGVDFGQTYTAAAFYLPIADADEDQECAQVDIKRNELNGRQKLNSSILEQHKARDPALLKKEELMSKGSKRGIGPEFLQYCRGWQSSEGQSSFYDKGAIKRLSWDTKRSSQSKIDKAADLILGMIPKDTSKSTLICFGLDGVSAPTARGAPSSMETRLAKRIMDKAKASSKDIIVTRTSEYNTSQVCPRCLGQTMP

SEQ ID NO: 3563 - protein, 459 aa, Eremothecium coryli
MPIFPNKKRQTTWKNKLVLQQGNELKKEQLNIPSWTSFKLIDHGQDANDQVLIPKIPSKVDPCSAPKDLWRPKTIRIYPTMKQKEILLLWLTATRHMYNLAVAERIKLGQIAKENGTKVKLKLKHLREVTPLKKSYDYSKDEKLSYLKDVPFLIKDNGLRDFDKDYRTNLAKSKISQKPFKIHFKRAKDKQSMTVEKKVWGLSRGIFHEVFSSTVLRGTEALPEKLPHDSRLVREYGKWFLVIPFGAEGQQPKAEQPINAVAVDPGVRTFLTTYDSSQKVLEIGEDGYLKLQHLDRRLRSIQSDIHKLKSKCTLSKVDRKRKIRNRRKVATRLYHRKKNLANDIHRKASTLLASKYNYILIPVLNFHNFKKTNRRVKANLANMKHCLFVQRLKNKAQHYENTTVIEVDEEFTTKTCSSCGVRTNIGASKIFKCSNCESVFDRDHNAAKNILLKYLGEIE

SEQ ID NO: 3564 - protein, 387 aa, Belgica antarctica
MISSTQTKTARKLTKTLVTRKNLARKTAKPRANTGKPKKGEGEKKGLPPKKRTLNDHPAYEYRDRVIKICLGGFFRNSFTQKILQPNDTAAVKQGLHLPSTKGLSKIAQAAAVQYGVNKLTNLTTHMRKRFSLFYQFIHTSKLTKKEADXXXXLTSFSTAKNMIQGPADEXXXXTDGISVSILIRKRPHQGAFTFRAGLDPGYRYMYSAVIFDEPTMTWQRNILLRSSKHQHEAGEPARRKKLQKITGRIEEKVHLQTIRRLQQIQEAYENDGTVLNTERELVALELGYADEKFIATLRNELCRLSFNQYWQKRKTIDGNVSGFFPNRGTLLMCYGAGINSQTVIKKGINSLERHPKITVKYVDEFRTSKICCYCLEQLKVSKCPMR

SEQ ID NO: 3565 - protein, 294 aa, Belgica antarctica
MFKIENFLKVDADGAMKQRFGLSIKTDGISVSILIRKRVTIKSHQGAFTSRAGLDPGCRYMYGAVIFDEPTMTWQRNILLRSSKHHHEAGEPTRRKKLQNITGRIEEKVHLQTIGRLQQIQEAYGNDGTVLNTERELVALKLGYADEKFIATLRNELCRLRFNQYWQKRKTLDGMYLALFRTVQFSFRYKKPPLQDLINSLERHPNITVKYVDEFRTSKKCCYCLEQLKVSKCPMRYVNCPACHRTNNRDINAAQNIMQDAFNPAPIFIRPAXXXXHLPGNFVQKVRQASAPLP

SEQ ID NO: 3566 - protein, 588 aa, Coccomyxa sp.
MEFGDRPPDPGLPHYKTLKTSLASVLKVPEKQQVISQAAATMNGIVIRGLLLLRLFLIHRIGTPPAVDTVLVETCLKVVCVRKATGRPPTTGRALRDELTTFYTQHFEPLLPEGDQQPSYTHLNTVLAYAAVQVVAAFETNVKEHFVEYVEAYVDALWHKDYLVQRIRATRKTKRDREAGVRKLCTTLRQLKNDLLGVGSEPLQSHPSYHAWVRQHRAVVLPAKQRYEKDLLKYDLQCAPQDYWPGMLRMTRAMEQTGKKIRNFCPLRTSVIPRHICLDTTVLVHLLFTEANGPKEKMLRKGELVRNKDKIWSLFFRTDQRAFSAKDYRFNNMVYTDGVACSILLIRRDLYGKKCSKGKPAVVASERYIDDLSSDEKARLRIRTVVGIDPNMSDLLYCVDENASKHYRYTQNQRRRETKAKKYRDIVLKERTHTRIQNRTVAEWESDLSAYNHKQVDSAGFKAYVRAKLLVNSKVTAFYEERVYRKLRLNTFYNIRKSEQRLTQRFKEVFGTPDEVVIGIGDWEQSKHRKYKEPTKGKGFRSLLRRAGYPVFLVDEFRTSCQCSHCQSEGGKCEKFRVDERAPEGGAF

SEQ ID NO: 3567 - protein, 732 aa, Coccomyxa sp.
MDELRGELVLKTRLRHLLSDRGKLHRLRDAVARVDRIVHDAYIFLKLLYCDAFEIALRSREWDATLWVSLPPVTSPDFINDCLKTCSTSLTATGKKQGGAYGPTKSDHMARLRAFHERLQAEGLMPERHSSLHLAHVLYYSKIEMATALSNNVVMRYASYVYRFVNTRLLPMELRRLGVQSLTALPTSVRADVLSGINAVKKDVETRRDPKLSPVRFHAWIDQHVDDLVRPKPSGAGNDWNAFDYLEDDIPRCLSYMVHINRLLEDDGQRLFSPLCLRMSWTPGHIRLDTAAMAEILLEDADEVSRIRTDLSLTSVPETALTWDLPELKRKESLQWSLKKLCTPELYKRLQGDEQRNSALLKTEYWRSICRLDTNRHNRSLYKGRVFNNMIDTDGYAVSMHFVPPHLHGATAYNGGKVASKRTSKNAKARKRVKREWPYVHELSKDERAELLRDERLLAGVDPGKRDLVTVCDAVRGPKVRYSAVQRRWELFSKRHREQRLRLLRSAVPEDCRFHDLRRMFDPGGTRVTTYEGLQALLTETTSRSSRYDVFARYVARRQAILQHMKRLFSANSFRAAKYRTHVAERSSEAKLVSRIEKAFPQGDPVLMYGNWGRDPNLRNSAPTPGVGLRRRLSRRFRTVTVDEHLTSSVCASCHTKKVAHPIGRSYTRGGRRHDRPLHSLLRCQNEMCSSKWWARDVMGAVNILCNGRHVLRHGAGHRAFRRQSRGGNEGF

SEQ ID NO: 3568 - protein, 689 aa, Coccomyxa sp.
MHNGGHRTADPPSLLCHLSEVLLGILIENLGASGSGERNLADTKEMRRPKKPPKDPQLRLQEQYLVYAKNKLFKEKKVKEKAVREDVKERAVTNAHSTFTVVKTTWRSLCKRAARLLDLETALREVNTTIAEAYLLANVHVVRLCTAGIPLCKLNQSFFYQCLSAVSVSEREKPEIEDFELRMSVKLYRSWRPQGYQPPDSTNLSSGFHQQASRQMATNMRNSTVANFYRRFKRYLKLRYSLDGKQAYEALLAIRAAEYEGEDPLVKRYRDMLPPKPEKSRLEDNPELVMPLQHHFLRAFEAAQADQQAEKPPRLFSLVPTKQGFECSHIKICSSGLYGLLRRSGIKDLPSSKGFPGKADAFWRRFFHISKFETTNRRFAGEILTDGKGVSIVLRKPKVEPAAKGAPLDPDTFGEVWGLDPGRREMFVASNDAQRVQRVTTRQFYHDAKYRESNAKIRVWQDHDPDILEAIRNMPSKKHSHLEGLQAYVSYLLPMLDFLLRWHMCKAFRDLKFKRYVFAKKVLRTICQNLTREAGQNTLVGFGDWSNQDSAGIIKKSPAGPVKRLENELRRHCRVVSVDEHLTSKLHSCCHHRMKQMYQRRVCRDGVMRSVKVHSVLHCDNNGCHGMTVNRDVNASRNILHILRATAGGGPRPEAFHRSRTKYSEAPATSGLPLNGQSTLALLPVPDSH

SEQ ID NO: 3569 - protein, 868 aa, Coccomyxa sp.
MEFGDRPPDPGLPQYKTVKTSLASVLKLRCKQPVIAEAACTINKVVIRSLLFLRLYLIHHRDDPPVVDAQFVDTVFKTVCLVKAVGRPPSTTKALRETLSAFYRQHFVPLLPAGDQPPSFTHLNVVLDYASVQVMTTFETNIKQHFVEYVESYVNSVWEKDYIVERIRATRKTKRERESAVRKLIATLRLLKQDLLNVEQDVVFKSHHSYHEWIRQHRAIVLPGKQEYAKGLLKYDLQCKPQDYWPAMLRMTDAMERNGKRVRNFCPLRTSAVPRHITLDTNTLVHLLYTEEFGKKSEMLTKGELVRNKDRIWKLFFRTDKRAFETRHYRFNHMVNTDGVSCSVLLIRRDLYGKKSSRGKPAVVASEKYIDDLSADERARLRTKKVVGIDPNMSDLLYCVDEDASHHYRYTQNQRRRETKAKKYREIVLKERNHTRIQGRTVAEWESDLSAHNHKLVDSERFKSYVRAKLLVNSKVTAFYEDRIYRKLGLNTFYNTRRSEQRLLQRFREQFGAPDEVVVGIGDWEQSKHRRYKEPTKGKGFRSLLRKAGYPVYLVDEFRTSCQCSHCQTEGAKCEKFRVNVEKELIPWGLSVTNANVSELRDMPGEENKYFASLQMKAISGATNDARVEVAEAKKRGDIGTATRDGEASVETTRINAANVTARNARQQEIERSNNQLRLVKLECEQEQAVRQKEAQMAPMNREAILQTELNKLDAMKQLEFLRSTQFAKATVEAESLAKVAEGRATATKLEADADLYKAQKEAEAILAKAQAQAEGLQRFMDTAEPDLVKFYLGLERNLFVDMAQKTAQAVQGLNPKINIWNTGASGESDAMSPLRNLFTSIPPMLDAVQTQTGVRMPSWMPQQATEA

SEQ ID NO: 3570 - protein, 732 aa, Coccomyxa sp.
MDELRGELVLKTRLRHLLSDRVKLRRLRDAVARVDRIVHDAYIFLKLLYCDAFEVALGSREWDATFWVSLPPVTSPDFINDCLKTCSTSLTATGKKQGRAYAPAKADHMARLLAFHERLRAEGLMPERHSSLHLTHVLEYSKTEMATALSNNVCMRYASYVYRFVNTRLLPLELRRLGVSSLSALPQNQRAEVLGGINAVKRDIETRRYPKLSPERFHTWVDRHVDDLVRPKPSGAGDAWNAFDLLEDDVPRCLSYMVHINRLLEDDGQRLFSPLCLRTSWTPGHICLDTAAMAEILVGGADEVQRIRADLRLTPVPGTALTWDLPELKRKESLQYSLNRVCPTELYKRLQGDEQRNSALLKTEYWRSICRLDTNCHNRSRYKGRVFNNMIDTDGYACSMHFVPPDLHGATAYNGGKVTSKRTSKSAKARKQVRREWPYVHELSEDERAELLRDERLLAGVDPGKRDLVTVCDGARGPKVRYSAVQRRWELFNKRHREQRHRLLRSAVPEDCHFHDMRRLFDPGGTRVTTYEGLQALLTETTSRSCRYGVFARYVARRQAILQHMKRLFSANSFRAAKYRTHVAERSSEAKLVSRIEKAFPQGDPVLMYGNWGRDPNLRNSAPTPGVGLRRRLSRRFRTVTVDEHLTSSVCASCHTKKVAHPIGRSYTRGGRRHDRPLHSLLRCQNEMCSSKWWARDVMGAVNILCNGRHVLRHGAGHRAFRRQSRGGNEGF

SEQ ID NO: 3571 - protein, 553 aa, Coccomyxa sp.
MHLCRHHLACQNDAYNXSLFDVVPTKSAVEADPRIPLRAMHTVLRHFEGAEACRGTRLFTILPTKQGFRCSHIKIGNAALHDILVSAGVERDPDFMERKRLYWSRLFDVERFERSGKSFGYEIVTDGRAVSVLLTRPRLSPKVKKTQKKVKKREDPAYDCTGIDLDSYSRVLGLDPGRRDGARVAKPPSGALGWTTRRSLVSKFEGETLKSSMWCMAPHICHLFVATDGDGDVTRCSSRRYYHEAGFTRTQRTMRTWYDQDLQVQSWLRTMTSAKTGSVRMLLEHFRNLFPKIDPLLDFHLGRKFRDKRFTRFCGSKRVIHRLCKAITKGDGEKTLVGFGDWSNIDTGGFIQGAPAGPVNPLKRELRRHCKVVSVDEHLTSKLCQFCASGTFFTGERSLMDTSSRLSIDRDRGDISYAFDPYDPGGNILVNRTGHHIQHAENGGEYRFPEMHKRKADGFDEITNTVYEYNGSLFHGDPRRYPADQPHPLIVKKTCGEVYQKTLDRDRWIRDQGYTLVTMWEMDWDVGVKAVIRLQRLWRQRKGISNGRKKVRS

SEQ ID NO: 3572 - protein, 335 aa, Parasitella parasitica
MENEPSTVASKGFVYRKLQEIQFVQSLNRKRFRSLQEEKVLQSINSSETFVPGKKLSSLTLQQISILQQFIDTVKARIEDRTFFPAKYTDPRGYRFFSIAPVYSAQNKAIQIDAQALWSNVITTDGYSIYFHFIRAVKKKTEGYVEKKPSDFINDIQLGCQIFAIDPGIRDITTAVDQSGRERKTSLNEYYHLCGFNTASTQREEHKKQHMNEYQQISILSSFKTTNLDDSVKACKERFDLYDNIKKYYDSDNRSSKLRFKCYIKKQKCVDEICRRLTFGSSKYGQKSKMAAKKQKTTYVPPSPIDDAKPRKTILALGNAIFNGNLRGNKASPVR

SEQ ID NO: 3573 - protein, 231 aa, Parasitella parasitica
MKCLSSDDLEKIKTFIAATQKKIQDKTFKPLTAADFCENIKNDQVHFGVLILALPISTLLLILVMLIKLNLKSYIKKQNATHEIAKSLFQENKATDPSVKTRIIVYGNASFGTSMKGKLPAPIKRITEAVKKLSKDSKGTYFIYVDEYLTSQACNKYKQQKFANLNAAGSKRKVHAVLKCNSCNTVWNRDVMASKNSYYIMLHMSQHNNERPPEFAKPSGTTESITCMRSP

SEQ ID NO: 3574 - protein, 551 aa, Sporisorium scitamineum
MSLVTLTNIPRDDLGIGRGPDIYPFHDANLAQHYQYLIPPSEEVLAMVDPNRPANTALERCWVHTTTSTFSYPGLTNETYIPVFWPFASTTVIERDTAMFSSDRGLLEPADLGDQVEAALANLTEPSPATATAAAATTATNTITTAASVAKPPITNLRTRKYRLKLPTKLKEIMREWSRCANVSFNEALRHVNHIERHSDARRALITYYHNLPAHSRAAYIDTISPATKAKDMQRGFTLFFAKNSGSIQFRMEGENIVDMKFQIAPVCATRAGVNSIKYEIRHEWGIQLDRYGQWHLLFPFDIPAPTLQAREHFFEGPITVKSADPGVTTPLSVWDSSNGTAIDIGCVEDGARPEKLRGQDDKLKSRRSQRQPLPPSPLPPHTPVPVTPFALSSSEGRKLLKRSKRVCKRIHNLVSDLHCRAANFLASSSDVIIMPRMEVRQMIRHRRGQSLARSTRQKLLGWGHIAFLNRLAVKCFDVSVNERYNKARPTVLLVQPEAYTSKTCGTCGELNHSLGSSCRFNCANCCYIADHDYNGAYSMLLKAIKRGSTG

SEQ ID NO: 3575 - protein, 235 aa, Arabis nordmanniana
MVRIKQHREIPQGHIIKSCTISMTPTGKYYVSILTEYEKEIVQKEVETVVGLDFAMDQLYVSSEDERANYPKFYREILDRLAKAQRVLSRRTKGSGRWNKQRIRVAKLHEKVANQRKNFLHHKSKELATHFDVVAIEDLNMKGISQALHFGKSVADNAWGMFTSFLAYKLNEQGKQLVKIDKWFPSTKTCSSCGNVKNMSLSERVYSCICGVNLDRDYNAAINIKNEAIRLLALA

SEQ ID NO: 3576 - protein, 329 aa, Heliconius ismenius
MWIKAVYAKSTKHAIMETEKAFRNFFQGKANFPKFKKKKHQDVSMYFVKNDKKTIIRCERHRIKVPSLNWVKLKEKGYIPKHDDKHSIKSGTISQQANRYYLSVIVEQDCTAQVLNDTPTEGVGIDLGLKDFAILSTGKTYKNINKSGKIRKIEKQLKRQQRKLSRKYESEKKRVNEKQSKRGEATRKNVEKQVLKVQKLHKRLTDIRRDRVNKIVSELVKTKPAYITIEDLNVKGMIKNRHLSKAVREQSFYAFRKKLADKCKVSTIELRLADRFYPSSKLCHECGHKKVALKLSERTYRCENCGYVADRDYNASMNLKDVKEYNVIA

SEQ ID NO: 3577 - protein, 386 aa, Heliconius ismenius
MKLMERLKAYKFRIYPTEEQEIFFAKSFGCVRKVYNLMLDDRKKAYQEVKNDPSKKMNFPTPAKYKEEFPFLKEVDSLALANAQLNLDKAYKNLFRDKSVGFPRFKSKKNPVQSYTTNNQNGTVSLIDHKFVKVPKLKSLIKIKLHRRPKGMIKSATISRHSSGKYYISLLCKEEICELPQTNSAIGIDLGITDFAIFSTGQKIDNNKFTSKMAKKLKREQRKLSRRALLAKQRGFNLFEAKNYQKQKRLVARLHEKVMNQRNDFLNQLSTEMIKNHDIICIEDLNTKGMLRNHKLAKNISDVSWSSFVKKLQYKADWYGRKMIKVDQWFPSSQICSKCGQKDGKKSLEIREWTCPLCHAHHDRNINASINILTEGLRIKSLTEIT

SEQ ID NO: 3578 - protein, 1059 aa, Gonapodya prolifera
MTPDNFAHHLRIEQIPLSWFLPLAKGWRRDECNLVRKHLFAVVCVQMQTALNLASVPHAYHVVLKRWLTDRLLTQEADFFGEPKYRGVPLVINLVLKRTLAQHIARVKTDLGLTNNLPLWKKVENHLHRYIPVLRRASKLYNSTVHVVAGHGAAIRAAKGAISLSFKSFVRGSNEDGRGKVFDRSGKLLERVAGFLGWELARFVAETTRPTTSNNFSQLVDTLSQDLADRARLCFVLVEEGGLFAMQPPVEQPVGEPMPLYLEEVCKRMMAVARRDNPTKKTTKQKRNTTIYGGDINNLRERLRRAVFDVVTASVRSKASRATYRLLTTAAVVALRAFRAHSEGRQLEPAFASRTVNETSSMEDPKLARSVQRLCSPERMGSLAADIDWILATFANRGVSADTLMDGSRPGWEDLAVLSSTRRLPAQTVDVDGISRTGILLIQGCCEFDVVDLQGCGQRLASFDPKRRGQLQKIHRTVCAAVMRDVLASTDSFASRRAVLDTFGSGKHLISDDRRLDLQNFVRQLRVLVDPTRQQVDSEDVLDEASASSESGRDLQPTENLAPLDRDVNKKTRKKKERKDRFAVAPDPGNGVGALRIDSVTELWMLKKTAYFQNLSAGMYAAYKGILRSYLWNCGKLATNTHLPGSDTAPRPFKSVVVTNAEWQITFANRESSAVARAPPDATDTDFDCPSKKVPQHRYHPSSTLRPQERQMHALGRPTTASREMIFYFDPNRGSVNHKHNRPTVGLDLLPETATGRSAGRTNKKWAVERNVRYMDTGRAADDQEITNPKSRDVEVHGRITTRGFHHNRGHHYARWVADVMRTLSRMGDSASMDDAAVQLRTGQKKAEGWKTVKKAILLEDERTQTLPRGDTSASGQPRVEAWDSGATLRRAVGEGTMREYVRAVSRDWTWRRLFADNNIFHELKFRTYSQSQRVVMETVRKHVLAPVKETIRSGIPVNTVTLVYGGASFNPTSRGXXXSVDRRIRDALQNLAGPHTVKWKTVDGTVHTHTFTVVFELLEEYHTSALCSCCXGFLEPITVKNFEKRDTGKDGLLHCTID

SEQ ID NO: 3579 - protein, 432 aa, Mucor circinelloides
MAWNLPVLPGFKAVRLYGEVTFTRRNTNTSESANAEIDWMEDQDNDEMLKELKSRKAAFEQLLKDATKELNKCLVENNSVRSEKRQWKENPDDRDMHYHRVHYLKLMKRGLMLNVRNAKEQLQATKREIYEHRHPASTTSSSPIIVNSEEPCLQDPIDMDDAWESGCRQLPPTLTLGPKEINQQSGLATYTASLVKKKKRTTLGHQVLQSEQFLSECSLHQSANTNELDSNYREHEQCREPIRSLYYSNSQCKKGRRLELSKTKHHDRVAASERKSSNHKKPIMFVGDRGHGVGSRIKGHQRFGGAWKQELHGRYTPTLITNEYNSLQTCLFCFHKLSHPMVAIKDKVKATNGSFVCLNAQCPNAYTVVCRGQVSALAIGLAGLASLLFGVTFPCFDEHPNRVKRDEFNQSALSFLHRKQLQDSPIDDGNTF

SEQ ID NO: 3580 - protein, 286 aa, Mucor circinelloides
MFLNGLYTDGYTYRVLFARRVLPSSPEDNIRLELDDFSREEVNKHFRPCTVDPGRRHPFVCYHGGTDIRRLPSIKYYNMGGSVTRMKKQHKYKQELGIEKIETDIPLPKTASVEQFVLYVAYMLQHMNTFFDFYGFDTSKVKWLNYLSSQQVIEESVNILINGGKKYNKGDKSKMPLVVFGDGLKNKDHIKFRGLRHGVSNKICNNCLKEDLENLKISHDNKETKIHQILKCKTCNIYWNRDAMASKNMHTIATSIWCGNGRPQVFKRHTATSNVVVVAHSGESAT

SEQ ID NO: 3581 - protein, 591 aa, Mucor circinelloides
CKFESLKLFVNYYVLENHALTGAPKVIFSQNFWYSIIQMLNGKRPTNSASLPQQQLLNSFDQFKRQHRSILYTEKXLPGISQCVTEACKELATSYTNNIVENFENHLLYXLRYKLQGLFMFMPKKIIGEVAKKYCYQEICKGSPTWPNTELLDNEAKSTTIQNFCEPWKNMISKPITQVELSANLGNFIPFLMSLNAELEQEXIDHKPYDVRKLPLPRRFCILPKPSFHWRFVTISVNALSCFVELSLPRGYQAQLEMFFLIFKFKKLRFNDITELTPNGNNSILFGNIVRTDGVSVDFLFYRKHQVGPGPSYQRFDMALEDFDLSDVKDKYLPISLDPGRKSVFTATVGLQSNRHVRCTTKEYYHMTGSTRFSRKQNKLKKDTGIESLESEIPSPKTSKSSAYSDYVKYMLXNKDSFFGFYGKDTAKXRFQLYRGVQRATDQMANILIHGTSKKQKWKPAPYLKSKTKIPLIVFGAGMFGKDAVKLKGHRCGVVGKLFRTLKRHETKGRLIVTTIDQFKTSKTCNLCLSDGLTIINTDKFKGVGVVCCHHCKQLWQRDINASNNMMTISKAVWSGQGRPQVFTPERNTSP

SEQ ID NO: 3582 - protein, 964 aa, Mucor circinelloides
MRIKTRHIDIFTPGETNINAAASLQKPQGRHSAEKHTESGKKRYMGALKRQFRFRLRSEINKCNQDKNKDFGGLLKLLLAAKRLPKGNEEEEEAEEEEEEYQDIQQRTCSASLSSIIRKDLPPAIRQAFMDTINITIVQVSNYMAEFSKQVLNIALLFNDHAFSKQNRRIALVPQEGISLDPVLPVGNLDYTVRVPKPVDADCLKDPDFCSKYSQLFQLPHLELILSTYYGALGVQESSLKATPLHREIVEAVPRDDPSPYEALSSHAMKMARQLYDIEEQLVQDEIKAEKSQDISKRRLRKLVQVARSALFHNDVISQAYIEKNLEQATEKEIDVISRIVVFVKPYIPPKVNYRSFAFQLPFVLMANQVLRSIGRESQVVKITPIVSPTSLKALVIDTATLFSLFCSKDATSKMYLQDYSGRLIQAKSALYHKDAVLGSFFNMQKLHSLAKDYGMEFNHRMHILPGLKTVRISGIVSIMRTKPKTLEPAKAENQDMPSDENEHDDETLAKLNDRKTALEKLLRDTTKELHQFLVENGSVRSQRKEWKQKPDERQDIGSKRDNLKVETRERMTRVCDAREQLQAARRAIYEHRHPNTVPATNPIIIDSKPSLHKAEECELSGRVSLTNAVFAGTDNGLIKTTETVFFDIERFALHLELYRHFHISEDPMDIDDIVPSTCLNLPETHTMGSKQIAQQTGLTSYISSLVSKKKRTAAGHQVMEAEGLLSGCSIHQPTTAEELDRNYQVHEQCRNSVRSFYYSNNQCKRRRHLELSKRRARDRIAAAEQKASGFKEGGKALVMFVGDRGHGVGSHIKGHQRFGGSIANMGSFVDFLDVLLLLTAKLEKCAMDITSAVEELENRRSSIGIAFSRNRSLLQGKRRDAWMRPTYYSPPRDAAADAKLPVHLFGLDKDDSDAHSEEDVEDNQASDASDTNADQFGWVYQDGAWRNVFVKESGVDTHRPDEE

SEQ ID NO: 3583 - protein, 594 aa, Mucor circinelloides
MKGKRERDDQDDDPKPMFGLLMGKRKRPTLYLSKSKYKQRPSSTLPHTIEARAASEATSSETSAVLSPVIVDDESDKEEEDALITNSPDLTAKEIRALVAICCALCQAPEYPDGVTSQDIKQKLYHDKQESIPAHCLDTGARLINAVRRITPKKDQNFLVASWCQMRTLRNILVVFAGRRTKRNPVKLTIVKQKDNDDQHAVRIDSGALYHLFSSDYDLYQSNGADKFTSVSVVKTEEQKLNLFNNFFRSKEADKQAVKTLNDEIKASRQTYTALAKQLKQLELARMAAGNKSRVFERKHKRRDPRLYGDLVAARKAFNNVHKEQSNLLHVIQERHSRMYLLNKKVNGQSAPSKGRLTDANIRHIVAEPTTIIQGIVTVASGMATSPASLFSAVNRFQAISDEAMVPHPRDKEHRFSLTVSKVNTAVMSNQDDRKVKRRCRLKKYHQRKVVSDKALNCQPKGSFTVTFTGNWSGSGAYIKGHSCRSTKPYYKQLAASYHDSVVSVDEHKSTVTCSSCFGRTSKRLTTRSTTINRDLNGAKNIALIGFSSLAAENGLPLPPFRRTHNPNKFILSSTFLAHQTHGFLLSKLQKHLK

SEQ ID NO: 3584 - protein, 1056 aa, Mucor circinelloides
MTQTRKRKATAEAGPSKPRKPKRTEPAPPPPPPPPPPAGAAVNTELKTQFVVRKCKIGPLLREPYKQYKNFFRTLAEDYSVLRQDAMNFVLLILIQFFNTQQVELVQIYTNNITNVQRSINQLNHYVRLAEQLLTELLSLITNINQNIDTDSENITAALQGLTAPINNLLDQLRPHIQDVDDIVHQMHAAVTQENPDIANVNQLHDRLNHSVTELRPQINAVQALITQKLQYLRQTKTRIENDITDILDRLTQEERTIINIITQSRDTTERIESGRQMLRARLNQFRREDLNQAEILLQSQLNAQLRIFIQNQQDVLTASQRYQDQQRQTIEASADIQQCLQLDTIKRQLQQIEKQNTALFQLAEITSQQLSLAIAEPEGRPLFPKLTDATFWSHVYRKVAIDPNGLNRTIQFNQSIQRNFPDFDISRKIAGSEEYAYTVPTLDRLHIAISSQYGTTIIQNVVMHLLNTRLWIVRIFKGYFVSQQNPPDQEFHRLPIMTLAKKATDGIISHKRFDEIVFREENDDELPIFENLNNLYDQVRLIYEAEFPGLNYDQVDDYSTASSHPLKYLRLSYRLLQLATSMHDTPIKLWSLIPQGSHSIVHVLLSGVTVLYRLFKRAHENHLPVPERLIRNNVFIRLTDFDNAYFRYEEKRDLWNDVFDLARIQDRELRLGFGMKTDGHMISILFEKIAQNFVPQNKKEIMMQKTQKNLTNWTNGLYPLYKNPVGITAEDRIVGIDPGKTNLIAFEIAIIKLNSSYKLRSGMSWLKQKELQSRTQTNIQASYDRLQTRKACSNEGIMQFLNAFSGERTEIHRFMRSWQHREHKGYAYSNRKMAQDYIARVVLGRTKAGEDFKLAHSSSSSSRRKKRKRFRQQHQPELRPLTDIRRTVIAYGDANIRGTYKGNTPIPVKSVQRAIAEKAIVITVDEFRTSVTCCHCHRRLNNATSELHGCNHRKKRHRIAGVEKRSRMKCIDEEGNIIHLSSQCPDRRLTRQNNTIYPLKLCTQCPVNRNNDLYWQRDINAATNIRSILVEYINSNFNIGSRPAALSRGRQDQGS

SEQ ID NO: 3585 - protein, 295 aa, Mucor circinelloides
MRIKTRQIDSFTPGETNISAVASLQKSQGRYKAEKHTESNKKRYMGALKSQFRFRLRSEINLVSKKKRTTAGHQVMEAEELLSGCSIYQSTTAEELDRNYQEHEQRRESVRSFYYSNNQCKRRRHLELSKRRAHDRIAAAERKASGFNEGGKALVMFVGDRGHRVDSHIKGHQRFGGTWKQEIHGRYTPTVIINEHNSSQTCLFCFLKLSHPLKTIGDEVKTSNGSFVCTNDKCPNAFKLVCRDQVSVLAIGLAGLASILFGVTFPCFDQQPCRLKRQQFNDSALSFLEQKQQQA

SEQ ID NO: 3586 - protein, 263 aa, Mucor circinelloides
MQKAIVNVAVGFQEHDPEEKSAIDRPFKSFHITGYYKRYDLPEITQRLIMRRHSTSSVKSNSCWRADLKQVIHYRQASALIQPNTLNIQLPSSSEEPPPKRRRGRFRKQVQQAKITAIPESDTPLPSMFLGIGSAKNLNELRDAFEALGRVARHSTALAYRQPLARWKIASERQSSNRKKPIVFVGDRGHGVGSHIKGHQRFGGAWKQKQHVHYTPTLIINECNSSQTCLFCFYKLSHPMVAAKDKVKTANGSFVWCDISLLR

SEQ ID NO: 3587 - protein, 687 aa, Mucor circinelloides
MSLKVRPSTAAAYRKSSKEWQVSVDLSKYVGTRSIVFMFYCHSNWEDFCGENRHRYSVDFRLPLTVGPTEFVLAYFKESVLKRTYKKSISIETNVRTQIALRNDENEKSELTLLEIAENAPSSKNSNKGVIDILLGVEALNYNHLSVSEEDQRDFRFDQESLKALLIDTTTLFSLFCSKNVADKMHIYDFSGHLINRLPRAMAWNLPVLPGFKAVRLYGEVTFTRRNTNTSESANAEIDWMEDQDNDEMLKELKSRKAAFEQLLKDATKELNKCLVENNSVRSEKRQWKENPDDRDMHYRRVHYLKFMKRGLMLNVRNAKEQLQATKREIYEHRHPASTTSSSPIIVNSEEPCLRKVEECMIDDSQLDLNQAVFSGTDNGLIKTTETVFFGIDRFIFHLELYNRFQILEDPMDXDDAWESGCRQLPPTLTLGPKEINQQSGLATYTASLVKKKKRTTLGHQVLQSEQFLSECSLHQSANTNELDSNYREHEQCREPIRSLYYSNSQCKKRRRLELSKTKHHDRVAASERKXSNHKKPIMFVGDRXHGVGSRIKGHQRFGGAWKQELHGRYTPTLITNEYNSSQTCLFCFHKLSHPMVAIKDKVKATNGSFVCXNAQXPNAYTXVCRXQVSALAIGLAGLASLLFGVTFPCFDEHPNRVKRDEFNQSALSFLHRKQLQGSPIDDGNTF

SEQ ID NO: 3588 - protein, 582 aa, Mucor circinelloides
MNTSASLNIIPHKQRHARDRHKKQQEQPISALFLKDSISRPYIEKKLENVSEQEIDTVIRIVQFAKPYIPAKANYRSFAFQLPFLLMANQVLRSIGRESQVVKIAPIISPTFLKALLIDTTTLFFLFCSKHVVEKMHIYDFNGHHTKSGAALAHKDAVLGSFFDIERLKSVTKSYGLEFANRIYVLPGLKAVRLYGEVSFTRRNTKASESATAEIDSMEDQDDDETLKELKSQKAASEQLLKEATKELKKCLVENNSVRSEKRQWKENPEDRDKHYRRVYYLKFMKRGLMLNVRNAKEQLQATKREIDEHLHPASTTAPSPIMIVNSEPCLHKADVYTACCSFKLCLILEDPMDTYDANEPECRLLPPILTLGPKGINQQSGLATYTASLVKKKKKTVPGHQTLQSKQLLSGCSLRQSANTNELDSNYREHEQCREPIRSLYYSNSQCKKKRRLGLSKIKHQERKSSNHEKPIMFVFDRGHDVGSHIRGHQRFGGAWKQKLHGRYTPTLITNEYNSSQTCLFCFHKLSHPMVASQRQQDQKHKRIICLSECSMPPMHRLSSAEIKSLPWQSVSLGLVAFCLV

SEQ ID NO: 3589 - protein, 222 aa, Mucor circinelloides
MSEATFKSIILEKKRQVFESRKANAFEDAICVDCSKSGHYTKAYFKCKLYIADTANTVGSSSGKNRKQTYEDTSHCLWCRNVRQRCSQSEGAQMWCTVVPRYKRLVGGAKSVSYIESLLNRGTTVVGKLFRTLKRREAEGRLIVTTIHEFKTSKTCNLRLSDGLTIIDTDNFKGIGVVCCHRCKQLWQRDINASNNMMTISKAVWSGQGRPEVFTPERNTSP

SEQ ID NO: 3590 - protein, 305 aa, Mucor circinelloides
MAALPLINDNGHCKSIQAVVVLDGTNNSSLKAEQVTLDGGPVNWDTRYGGTDNGIVTFTETSKFDLPRSQSHLELYNRYQCLESKGDNASEFSASDSKDAGTQNPDSKDAHSKDRGSGNQKRRSKKDSDFGKQIASFEAMKSDYSFLSATAAEEHQRCRLIDRLRVEERQDLGRQPVLFVGDRGYGINFRIKGHYLRCWGGSWKAKVHGRCCPVLVTNEHNTSQICLFCFKKASHPLKLVTKNKQYVRNVNGSSVCTNPTSTLRTKGETHKARDSLPALAVGLAGLSTVIFGQPILSFDPSFSES

SEQ ID NO: 3591 - protein, 416 aa, Mucor circinelloides
MPRIPIYPEVEKFIILKKHTKLKEVESDNKKENSTTQTPKRTSTKRKDSPALITAKRKAKRSRQASTSAASSSKNNCSSCQEEEHSSARSSQCKNYNPKLPERLQIRLGSHQRYTLSVPFETLCNDNPKKANALKKVKDISSFVREVLFKAQLFVNHFILQHPTKLTNDFFEQNFWYTISRVIRGSSDTVKSTLQAYKDTKKGRPAGQNLDVDQLASSFVNLSATTNGSLFVSENGLKNYGQSLLTACETVATTYNNYYIEKFENIICNYFIYTLKTEYPISDKSKMPLVVFGDGLKNKDHIKFRGLRHGVSNKVYKQLQARERINEFKTSKICNNCLKEDLENLKISRDNKETKVHQVLKCKTCNIYWNRDFMASKNMHTIATSIWCGNGRPQVFKRHTATSNVVVVAHSGESAT

SEQ ID NO: 3592 - protein, 271 aa, Mucor circinelloides
MDXXDIVXSTCLNLPETHTVGPKQIAQXTGLTSYTFSLVSKKKRTAAGHQVMEXEELLSGCSIHQSTTAEELDRNYQVHEQCRNSVRSFYCSNNQCKRRRHLELSKRRAHDRIAAAERKASGFKEGGKALMMFVGDRGHGVGSRIKGHQRFGGTWKQEIHGRYTPTVITNEYNSSQTCLFCFRKLSHPLKTIGDEVKTINGSFVCINDKCPNAFKVVCRDQVSALAIGXAGLASILFGVTFPCFDQQPSRLKRQQFNDLALSFLEQKQQQA

SEQ ID NO: 3593 - protein, 1147 aa, Mucor circinelloides
MRTKTRQIDSFTPGVANINAAASLQKPQGRHSAEKRTESNKKRYMGALKRQFRFRLRSEINKCNQDKKKDFGGLLKSLLAAKRLPKGVVTDAEASIKATDQPIQQFLNSNYRKKNLQTVNLWRDYVKKNFDDIKRFVLKGDDGDDDSNEESDNDEEEEEAEEEEEEYQDIQQRACSASLSSIIRKDLPPAVRQAFMDTINITIVQVSNYMAEFSKQVLKIALXFNDHAFSKQNRRIALVPQEGISLXPVLPVGYLDYTVRVPKPVDADCLKDPDFCSKYSQLFQLPHLELIXSTYYGALGVQESSLKATPLHREIVEAVPRDDPSPYEALSFHAMKMARQLYETNLQNMWADNTIVNKLLTRLLRFLLLIHLRPDQDRDPKAKKKELQDKSKGKGKGKQVLQDTNTSIPVESISLINKTRNGRRRSFRNEQQRKKKYEDKGNTRAAERCQMRLDTYREVLARERREREDQRGETYQQQQPVESYDIEEQLVQDEIKAEKSQDISKRRLGXXVXVARSALFHNDVISQAYIEKKLEQAXEKEIXVISRIVVFVKPYIPPKVNXRSFAFQLPFVLMANQVLRSIGRESQVVKITPIVSPTSLKALVIDTATLFSLFCSKDSTSKMYLQDYSGRLIQAKSALYHXDAVLGSFFDMQKLHSLXKDYGMEXNHRMHILPGLKXVRISGIVSIMRTKXKTLEPAKADNQDMPSDENEHDDETLAKLNDRXTALEKLLRDRTKELHQFLVENGSVRSRRKXWKQKPDERQDIGSKRXNLKVETRERMTRVRDARXQLQAARRAIYXHRHXNTVPATNPIIIDSKPSLHKAEECELSDRVSLTNAVFAGTDNGLIKTTETVFFDIERFALHLELYRHFHISEDPMDIDDIVLSTCLNLPETHTVGPKQIVQQTGLTSYTSSLVSKKKRTAAGHQVMEAEELLSGCSIHQSTTAEELDRNYQVYEQCRNSVRSFYYSNNQCKRRRHLELSKRRARDRIAAAERKASGFKEGGKALVMFVGDRGHGVGSHIKGHQRFGGTWKQEIHGRYTPTVITNEYNSSQTCLFCFRKLSHPLKTIGDEVKTXNGSFVCINDKCPNAFKVVCRDQVSALAIGLAGLASILFGVTFPCFDQQPSRLKRQQFNDSALSFLEQKQQQA

SEQ ID NO: 3594 - protein, 608 aa, Mucor circinelloides
MRTKTRQIDSFTPGETNVNAAASLQKPQGRHRAEKHTESDKKRYMGALKRQFRFRLRSEINKCNQDKKKDFDGLLKSLLAAKRLPKGIVTDAEASIKATDQPIQQFLNSNYRQKNLQTVNLWRDYVKKNFDDVKKFVLKGDDGDDDLSEQSDNDEEVEETEEEEEYQDIQQRTCSASLSSIIRKDLPPAVRQAFMDTINITIVQVSNYMAEFSKQVLKIALLFNDHAFSKQNRRIALVPQEGISLGPVLPVGYLDYTVRVPKPVDADCLKDPDFCSNKPSLHKAEECELSDRVSLTNAVFAGTDNGLIKTTETVFFDIERFALHLELYRHFYISEDPMDIEDIVPSTCLNLPETHTVGPKQIAQQTGLTSYTSSLVSKKKRTAAGHQVMEAEELLSGCSIHQSTTAEELDRNYQVHEQCRNPVRSFYYSNNQCKRRRHLELSKRRACDRIAAAERKASGFKEGGKALVMFVGDSGHGVGSRIKGHQRFGGTWKQDIHGRYTPTVITNEYNSSQTCLFCFRKLSHPLKTIGDKVKTINGSFVCINNKCPNAFKVVCRDQVSALAIGLAGLASILFGVTFPCFDQQPSRLKRQQFNDLALSFLEQKQQQA

SEQ ID NO: 3595 - protein, 225 aa, Gongronella sp.
MDAKVRIERTNKAVLYDESFGKAATTKNAPSGSLNVIVGVDPGLKTFATAAALNWKDFVHHVRNIPRFATHFNDAVANDTPAPVKALTIASKHIRHIAGTTSRQNQLEARKPKLVMEMEKKLAVAATPSTTPYDARATQLECRPALIDFYVKSKNATTDARSKLSLKERAYACAANAVNALAKSPSQATVYFGDGSSCQLPNQGPYAVIACSIHHQAQGTNGKNQ

SEQ ID NO: 3596 - protein, 1136 aa, Gongronella sp.
MSSQSVVDQLVPRHIKSSVNTSSPEFEANVAEWKDILKTLDDRLEEATGAGPDKYVKAHRKKGQLSARERINLLLDENSPFLEIGALVGFGQKEYAVGGSVVGGLGLVSGVLTMVYANVPTIGGGAMNYASTLKIHRFMEIAMTNRIPIVTLVHSAGADLKSQFNVFHYGAPMFRNQAIMSKDGVPQCCVVFGNSTAAGAYIPGMSDYVIMVKKQAQIYLGGPQLVQMATGEINDPESLGGADMHSRISGVSDALAFDEYDGIRKAREWVAGLNYEMKGTLPLRHVQGHYEEPYYDPKELLGIVSANIRNPYDAHEVIIRLADGSRFTAFKPLGFCLVALHNNTVSGGNLYGVSRIPNVLFLPFAAALPGRSVGVIAPSNAPERALHSTIKTTQTEYASCGEKGNCVVLHPLRENAFFRRTVRIWLPLAQTGPDCHRCSLRNLRGIACDLAEIKRKSSKIRVLHKEDDVDVGALHPITPADFPPSIAVDLHGIVMAILLELAAIKPAQLRNVTPTILRRRPQDTIAVYVALLRCYDTYKRDNPLSEVFVLTFNLLPMISNRHRFITLNIATISAILQRRYIPHDVPAMPNPDNERQFYPKALCAAPIFAWFLNLTVIGYETAQQLKTGAVYDRLFSGVIKSNGVQAHITFSRHSSRPKPPTLKDIDLQGLAAEGFSPCGVDLGRRTYLTSSHHPSVGDHDDPLAERATRKVSASEYQATSGEVNRALSREARKKRRLPRQQGTIEDLEASIPEHRTGDIASFRAFIRNKITKEDTMNVFYGSPIETQHRFKAYQGRQRAIAHAANTTTTGGRKYRKEARIKKKTRRNRRRRHRKALARQAARGAAFVTLQAQTIEIEAAIEAIDVTIRGQQERHALLGDQAPAIARQQQELADQERSVLNSRLAENQEARRRLETRDQQQPQRALKTQFSGKQPTIEGIPLVGWSNGLLKKESNKIKGHTVGRSSMILQNLHQRQACGQLLVTHVDEYLTSKTCHRCHRRISTLPVVDGNQTRQVFASVFCPGCGHIFGRDENAADNMLTIVCDRVLNNRRPAALTRPARQRQPDPNQAPTNTTNATNTTGLGRQAAAALPAMDNEEAMPDVSTTTTRMRPRSPSPPLRRSTRRRTRPDRYTPGDT

SEQ ID NO: 3597 - protein, 482 aa, Gongronella sp.
MQSRLQHQQQGQGQGHAGRRQLHRQGLGQQQFQQQDTGQFYKLFNWYPLRRSWVPSAVQVDTRILAQCILPNVVYRNNHNGLTLEEYKFQLWSLAANLTNAIWQAEGTPDDHGVPQGWPHANDQWRRFCFRGTIYTDGACLSVLKATRDTNASQPRRPFVPAQRETRYITELTDQEKADILQNMEDHPDTAPVVYVDCGRRDLMYAMAHDSTREHRRTFIYTQAQRRNELGRTRQRDLLFETGSGAMADVTAAQLQEVLAAQQRLSTLIAKTQNLGDFIAYLGQQALEADTLHAWYALRSTRDRGPGERHPLPLYRKLRFDRYIANQQSDSRLARSIRAKFGNQAVLVMGNWGAPMVRNQEPIRGLGLRRMLKKKGFTVFLIDEFRTSKICPNCLSEPENERQGVALFGLLQHDPRQIENPRPWRSNLVTVWGKLICQRCQVPQNRDTLACRNMVTIGNAVLMNEAIPAEFQRPTPQFPPNL

SEQ ID NO: 3598 - protein, 918 aa, Gongronella sp.
MDIPLIGAAPRARKSILQAIFQVLIHLPGHMYEARTANPIGMSFYYSISIAQAFQLIILAQKVRREREHPPCPDCQRPGHRSRRDPACPMHVQALQRAARRRGNQAHRDAVRNTQVFRCLSCGQLGHRNRRSRLCPMHVPTKLEFLNDMLPLREKYTRCSSLEQGVRPAYQEQIRQQAIAASDAVRNTLLRAQLLLSDFVLSHQGADISFFFGENGMYQLTRLIRDKLAGEERDIFPQALIEHWTTSFSTRFPAARTTAIDEIHMTKALAHACEEIGTSNKQHADLLPHRVKSYIKFRILAILKDRGVRTSPMRHVYEAVEHVFNQATNAVPGVPMAPLDDDNDDPDEQDDNAGMNAQRQVLLEAMRVVYEEIQEFKPGALATLDEETVHAHPSASISMQATFLHVYDLYKAQQDDNDDDDDDDGSSIGVPSFSILPIPSRHRRFVTIAPESIGTFSGISIPRRQLGANPPPAFIDAFRHFWQVFNMQKWGYASLDAMQRSVFLGHIFDAVVRTDGVQVHFVFTRLKAASRPPALREEDMGNLDAVGHSCVGIDPGRRTIATMAYEVPIDEAGDATGPSAIRRVSLQEWQVVAGEPSRARAYQGRLRAAGRVDSDVPEHRTAIQEQFGEYVDHRLANETTDSAFFADDHAAARFEAHKGKQRAAQHAANVIMYGGKKHSKRGRRHTKRNRKQRHARALRKRRLRLIEAHDANAATKVHHDQLAAVLEGIETTIIALEAMDANTTLTQIIQQSRDQVQALQELQRQDHAIMAARLAHASHPSSPMRDSKRQRHGTWKNVSSSTQLIMYGTGLMGRRDQARIGGIPAGRSELVRQRLTEHQAQGHCMVVLTDEYLSSQVCNSCTSRLDNFGNVFALKHCVEEAKVINRDDNAATCILQIGQHQMQHGSRPFALRRPPPRP

SEQ ID NO: 3599 - protein, 911 aa, Gongronella sp.
MDEIPLQHHIIRPTELDVPGGGPQTRYTIVKTSISSVGLNIGNIGNNLEDYVIRVNYLIKHQLQALKYIYLALFDIHGNTLLNSQQQAHPDMSRLVNDEYFSRCVFTYLADGTIPGQQYILVPGFQTLMEEYIRHSQFQRAIFFGRVQQTSHYATNQVNAAYLNNVQQNFERRVLYTLDFVFKQRNVREWARRQRRTENPGAEDDEDQENTEFNEGAYATNIRQLKAQIGAVNADGVPQLIENVVDAVPAHLRGPMLQEAQELVNDLRLCFGQIQLQPNEFIRADSYFVDVKYSPKRYVNAFYLLSRYAAAHEAPLVHQQEPGEQVDFQSYRSYNWYPTRKSWVPSAVQIDTMILRECVQRLNFDTLASRRPAGRQNTQDYKFDIWSLVVNFANDVWWSQGQIQGDEQQPPAWPHDGHWRPFCFNGTIYTDGVSVSILKTTRATNAGGPRRTFVPSVRETTYIHELEQVDRQRLLAVHQDAQSSLVYVDCGRRDLMYCMSSTSTPQNQQTYCYTSSSRRKTLHRRHYRMLRQNVPHEVSQSQQRMNTVNSKTQNLAAYVDFLGQQAVEWEILHDWYANATTLGNGETGQPQPLYRKLRFNQYIARQQHDQDLANAIRTTFHDNTVLVMGDWSAPHMRFHEPIRGIGLRRTLKKLGFEVYLIDEYRTSKVCPVCLTNTARMDPQRIENPRPWQNSTVKVWGKLVGHSGVTHLTPHEMPNFDFFELRVINASQTVEWEILHDWYANATTLGNGETGQPQPLYRKLRFNQYIARQQHDQDLANAIRTTFHDNTVLVMGDWSAPHMRFHEPIRGIGLRRTLKKLGFEVYLIDEYRTSKVCPVCLTNTARMDPQRIENPRPWQNSTVKVWGKLVCSNNDCGRTFNRDNMACRNMVIIGDAILNNNPVPDVFTRGGA

SEQ ID NO: 3600 - protein, 205 aa, Gongronella sp.
MMSSKRGAKQFHAFTAIHENCHLQQAVEWEILHDWYANATTLGNGETGQPQPLYRKLRFNQYIARQQHDQDLANAIRTTFHDNTVLVMGDWSAPHMRFHEPIRGIGLRRTLKKLGFEVYLIDEYRTSKVCPVCLTNTARMDPQRIENPRPWQNSTVKVWGKLVCSNNDCGRTFNRDNMACRNMVIIGDAILNNNPVPDVFTRGGA

SEQ ID NO: 3601 - protein, 692 aa, Gongronella sp.
MAEIPPLHYCIIRPAALDEPGNAPTKFTTLKVPFSSVGWNVDHFQRLQDYVLQVNYLIKHQHQALKYIFLSLFDIHGDNLLNFDGVQNLHPDMSNLVNNNAFIQAVFTYLANGTIPGDTPVIVPGLETLLEEYIRLSQFQRTPFIGLVQNPATYASNQVQAEYLNNVQANLNRRVMLTLDKIFKMAEVRDWLRQQEAENIDADANDPDVDDELNDVFNNGEYAANLRLLKRQIGDANVNLADIQQTVDAIVNVVPPQHRGTMLQEGRALVNGLRHHFEQVDGTVHSQNYLVDVKYHPERYVNAFYLLSRHFAEHEAPPGEQEDRINAYPLYNWYPLRKSWLPVWWAQTYNDDNVPTPVQWRFGEGTWGRFCFQGTIYTDGVSISILKTSRHTNASGPRRTFVPSARETAYIDELPPQECQELLDMSDGGQGSIVYVDCGRRDLMFCMASTSTAANPQVYRYTVNDRHKALGRARQRELIEDIPANVAQAQQRLSTVTAKTQRLTAFIDYLGQQGAEWGVLHNHYANHQTRSAGNRGYTVPLYRKLRLNMYIARQQADQDLARDIRAAFHDNTVLIMGNWGAPHTRFHEPIRGVGLRRALKKMGFTVYLIDEFRTSKVCPNCMQRTVRPNPAIVENPRPWQNTTGRVWGKLECSACPSILNRDSMACRNMITIGTAILNGEDIPEIFRRPATA

SEQ ID NO: 3602 - protein, 862 aa, Gongronella sp.
MPFFSIVKEKLDAKARAAQQEEQGEEGEEGEEGETAATAARVEQQDGDRLRAEAKARLELAYTHARPTNQLCPDYIKRKSVTTKERLGKTRRTTIKHGLVSLLSNDITDDDQRILLDGIHNIVTFNRHLAINAILFTQKYVVDILHSGGHVPRALFTQAFFIAVFQLILGNPVSNKALFADNDTHLAFLQAFDQFKTEHPQIHMNKMVGANGKPNGFASVTDYTAIQLATMMKNHVVENFEIFFMRYLAAKFAMDHPDLKPHHCRSYAMYAYDKVCKDELFPPELPDYKKMKAEQKEQLKNDADDLAQHAESKLARVGDFVVEEKAQIAEASRKRQEANDRARDMSLANRNAIIAALTFSSTSRTVVAESSAAGKLARVGDFVVEEKAHIAEASRKRQEANDRARDMSLANRNAIIAALTFSSTSRTVVAESSAAGAAQEAAIAAQGAAIAAQEATIAALEAAIVQGDALQAAALQSARDRAAELHAAAAEAQVAAMAQAQETEFAGNVAATMHIAARNTHATYNACAHAANSHHANVIPSLAAAASAAHAALGQAPAAMAAIAQESFRQADQSYRDALNYSAMLVAAVENAQRNAEASHFVAQQAAQVHATAIALSTAKNAAAEAAAADASAADAQVTSIMAAMAAANDDNNNNDNGDDDEDHPMEIEPLDDDDVSMMHASDAMSTSTVGAAAMAQLHVSHNARLFGKCPLICIGDAQFRRMNWRGKPSGRPALLRRALALAQRACRLLVVQVPEPYTSKTCSSCGRRSLTNVTKRDSGVDNFKLHGALTCTWCARIWQRDVNAARNIRAIALMNINGRNLPALDPDNKDSRPAVFTKAYDEPDPQQPPFHWLPKKQTMIA

SEQ ID NO: 3603 - protein, 944 aa, Gongronella sp.
MPYFSLVKEKLDAKARAAEEQEQGEGGESAATSDRVDQQSETTGGGQGDSETNDKRSKKGKSRMTTKRKQRSDEKEAKMTAKGDFQAATKASSAAVKNPCPRCKSAADRLDGEATAMIERQSDFTSDPAAARARMDEDPEYQRLRGEAKARLELAYTHSRPTNASCPDYMERKSVKTKRRLGKTRRATIKHGLRTLLRGDIPDNDKDTFMDGIKEIVQFNRRLTIHTMLFTRKYVLDLLDTGAHVPRALFSQEFFHAVFQLLLGDTVTNKALFADNETRTSFLDAFARFKSDHPTIAISKLRGVTGKANAFTEVTGYTAKELAVTTATLTRYPHFFMEILFDALKQMEVWNDEDAAKPAEVATEATYAWTKHQLEKKVPAWINLNFRRRSRLTRVIKKIINGNNDTLDITRLPYQNQLVGQSSKDAIHAIVTETKQKIKNSTFKPEIYIARPAIRLFAIVPAPSFRWRYIHVSHRTLLTVLQFVGLTRYKQGNQTAPDDGSMHPVFERLFNWTKIQKPKTAVFDNALATDGMATSVFYRIPVSGKAFPELTLEDIHPEDLKRCHVWGVDPGINEVFVAVDGSGHEDGIYGATRPRLPRLPRSAGIRVRSSSVAPDTRGRERDPKATRTRSASLPPYRSRRTTEMAQSHQVRSFSTREFFHVAGITQTNQKLKARKESAADQEGMTIAQLESQLTSAKTAIPARMTLHVQSVLAALPRLLAFYGQAHQGLRFLNFQGRQRALQEMVAILCHGGQKYKPKDTTGPRPTDQQNGPSEQTPGTGQGDLKWRKEPNRRDFAACPLICIGDAQLKRLNWRGKPSGRVALLRRGLALAQRACRLLVVQVKEPYTSKTCSSCGRRSVTNMTKRDSGKDTFKLHSVLTCEWCARIWQRDVNAARNIRAIALMHINGRHLPALDPDNKDSRPAVFTKAYNEPDPKHPPYWLQKK

SEQ ID NO: 3604 - protein, 451 aa, Gongronella sp.
MAQFTSYIRRKQQRRASILREQEERDAAAQVEEAARAAEEAARVSDQPESSTMAQARQQGEEQTIQRQEGQPAVAKRQKVGKGRSTAKRRQNADEKEAKVEAKEEHADAIKASTTVVLKPCPRCTKDSQEADKFADAILVADPSYVQDPAATHARLSEGHQEYRRLRALALERLEQARTHARPTNKDCPFYIPRQKVQTQTRMGADVKLRTVTIKHGLFSLLRNDIADQDKTAIFHAIGQVVAFNRILEIHAMAFARFYITAILQSDPAVHVPRALFSPDFFHGVFQLLTGGEWTNTKIFGETAWRAAPHVASPDKCPVICLGDGNFDRIRFRGKSHGHVKLLRQKLRQAQKQGRLIVVDVAEGYTSKTCSTCGRRALANVKVFLPFQKVYALHAVVFCNKCNRVWQRDANAARNIRSIAILAVQGSSLPAVKKTNPTSRPLVFTKSYDNS

SEQ ID NO: 3605 - protein, 368 aa, Gongronella sp.
MPFFSIVKEKLDAKARAAQQEEQGEEGEEGETAATAARVEQQDGEAPTGGQQSDGQGQVAADDAAGATTEQIQAASEAGTSSDASAKRQKKGKGRMTAKRRQNKDEKEKKITAKEEFAAATKASSAAVQNPCPRCKSAAARLDDEATALIEGHADPVAAQDDPEVERLRGLDHQALRFLNYRGKQKAASEMINILVKGSRKYPRPDDDTIAMRTSVEKPAKWRAAPHVASPDKCPVICLGDGNFDRIRFRGKSHGHVKLLRQKLRQAQKQGRLIVVDVAEGYTSKTCSTCGRRALANVKVFLPFQKVYALHAVVFCNKCNRVWQRDANAARNIRSIAILAVQGSSLPAVKKTNPTSRPLVFTKSYDDS

SEQ ID NO: 3606 - protein, 905 aa, Gongronella sp.
MNKLVGVNGKPNGFSKVTDYTAIQLATMMKNHVVENFEIFFMRYLAAKFAMDHPELKPHHCRSYAMYAYDKVCKDELFPPELPDYKKMKAEQKEQLKNDADDLAQHAESKLARVGDFVVEEKAHIAEASRKRQEANDRARDMSLANRNAIIAALTFSSTSRTVVAESSAAGAAQEAALQAAQEADIAAQEATIAAQEAAIVQGDALQAAALQSARDRAAELHAAAAEAQVAAMAQAQETEFAGNVAATMHVGARNTHATYNACAQAANVHHSAVIPPLAAAASAAHAALGQAPAAMAAIAQESFRQADQSYRDALNYSAMLVAAVENAQRNAEASHLLAQQAAQVHATAIAMSTAKNAAAEAAAADASAADAQVASIMAAMAAANDDNNNNDNGDDDEDHPMEIEPLDDDDVSMMHASDAMSTSTVGAAAMAQLHVSHNASVTTATLTKYPHFFIKVLYDALKEMEAWNDDNAARPAQVAAEATFPWTKHQLEEKVPAWEHLNYRRRSLFSLRHLLGALHEIVDVPVGLLAQVRDGHRNLALDLADVDLVCAGVAAQHAEKTPAPRTQHCRRGPPLFAIESGLPQCGRSSMMRRRIRQDRLRRFSAHEFDHVAGIKRSNAKIKTWKANDIDQEGSTIANLESQLASAKTSMPSRMAQHVESVLAAMPRLLGFYALAHQGLRFLNCQGRQYQGRQRATEEMVRILCHGGGKYQPKDTTGLPPRDQDGASTQTASMVDRDLKWRKAPNRRLFGKCPLICIGDAQFRRMNWRGKPSGRPALLRRALALAQRACRLLVVQVPEPYTSKTCSSCGRRSLTNVTKRDSGVDNFKLHGALTCTWCARIWQRDVNAARNIRAIALMNINGRSLPALDPDNKDSRPAVFTKAYDESDPQNPPFHWLPKKQTMIA

SEQ ID NO: 3607 - protein, 879 aa, Gongronella sp.
MRTDFYRLKDTISQTNIAPDGMQPNHPEYRLLMTNNDFEENQQDQPRRMIVKTSFSSVFNLTTPQVRQAFQTYVIDVNNITKHAYQFLKWCLLRQKALYPDFDPTPYVDARNTAFYKHVWGAMISNGAAHNNNDFNGLFANQHEVNGILHPSHLQSYLDLTGYVPPQFNNFGQTQTYEATKMQQSYVNNVRQRYGQHFCRVINILLNLKENIADARQQGRSNHWSQARISAHVQQQWVLPAREFKTRIAEFPHNQDWVDGLDGIYLAAFQELQPVFEGYQGRNFNMPHPDDLTRRINSIFYHVKANRVETMVHFRSFVALHDILAARPNTRNFVAFPLRKANSPRYCQIDSRILAVNILKVPGATNATYNHDTKMNLWRHGSFFDNGGPIANILLRPFRPKPVEADDENQIPVEVVRRTKRGRMAFRGSIQTDGVGVSVLKSNFDSTARGYRDRSTASLPGPPTLQLLMTWTNEHYNQHPLIEHIATSGVFIDPGRRDLITAMGVHSYIGPDVSAADGAAAADGAAAGEGAAAGEGASAGEGAAVGEGAAVDEGAAAGDGTAAGDGAAGAPEFINRPMIYRWTAAQRRNETRAKRYQDLIRTLKPANVSAAENLLSHWPSDVQDIDRYADYLRIRTAVQPTLNAYYQDARARSAADAVVRPRSNHRLQLDPQATGHHLIRKLRFSRYIRKQQSYDRLAKNLVAAFGRHAVVSALGLEGPGFDFTDIPEKPVLVFGDWSASNVRFHQPVPSLTLQRAMQARGFDVVLIDEFRTSKLCPTCLDNAHPQEVFKKVRNPRIFRRQNQPTVRRWGLLRCTSRSDECLAGLNPPHHRRAMRQYRYWNRDISACINMRTKFFGMLGDDDHLVPVPFRRPGQPGAQQ

SEQ ID NO: 3608 - protein, 663 aa, Gongronella sp.
MASIGVYKLLDTRHMEAQIQATPFAQLIKRLKTQIGYRRPQFGLDQTIQDIIQGLPQACTEPFRVELYTNGLTFVNQLRDNLETRNPVGGNYFADVKRHPEHYINTFYWLSRFFADNEAPHAQNDQHQQQGQGQGHAGRRQLHRQGLGQQQFQQQDTGQFYKLFNWYPLRRSWVPSAVQVDTMILAKCILPNVVYRNNHNGLTLEEYKFQLWSLAANLTNAIWQAEGTPDDHGVPQAWPHANDQWRRFCFRGTIYTDGVSLSVLKATRDTNASQPRRPFVPAQRETRYITELTDQEKAAILQNMADHPDTAPVVYVDCGRRDLMYAMAHDSTRDNRRTFIYTQAQRRNELGRTRQRDLLFETDSGPMAGVTAAQLQEVLAAQQRLSTLTAKTQNLGDYIAYLGQQSLEADTLHAWYALRSTRDRGPGERRPLPLYRKLRFDRYIAHQQSDSRLARSIRAKFGNEAFIQAVVQYLASQSAHSPAPRIVPSLEGLLDEYKIRSGFASARFPGTSVTQRRYIESFGLTAVLVMGNWGAPMVRNQEPIRGLGLRRMLKKKGFTVFLIDEFRTSKICPNCLSEPENERQGVALFGLLQHDPQQIENPRPWRSNLVTVWGKLICQRCQVPQNRDTLACRNMVTIGNAVLMNEAIPAEFQRPTPQFPPNL

SEQ ID NO: 3609 - protein, 1040 aa, Gongronella sp.
MNLREDQFQQHGSAEAMAAEHGITETEAKTLRLQLLKARGELGRPCTSCGSRLHRNNSDARCPNHADRVLRRQRRMGDVGLRMDARNPDAATICASCGQHGHATAHSPLCPNHECTNREFKRAHMPTSSSFTRVYSFHRLIQPPLRNILKARLRQADLYVRKVLNRLQLFLVDYLLHFPNDAPAVIFTHNGLYQVSKIVRCRMGTGPVGTRNNPLRAIPQSMLDHWPTFARDMGWPTTRYDDQKLTSVLTEECKVQANANRLHVSDLMEKRIKAYAEFRVRATRDEVPPKRVMNLIKSVVWAQFCSANVLMTEGLAALENVEEDDERDDAEDQHDDNDDDDDNDENDDAGADHEEDDVDVEALHPITPADFPPSIAVDLHDVVMAILRELAAIKPAQLRNVTPTILRRRPQDTIAVYVALLRCYDTHKRDNPLSEVFVPTFNLLPMISNRHRFITLNIATIPAILQRRYIPHDVPAMPNPDDERQFYPKALCAAPIFAWFLNLTVIGYETAQQLKTGAVYDRLFSGVIKSNGVQAHITFSRHSSRPKPPTLKDIDLQGLAAEGFSPCGVDPGRRTYLTSSHHPSVGDHDDPLAARATRKVSAPEYQATSGEVNRALSREARKKQRLPRQQGTMEDLEAHIPEHRTGDIASFRAFIRNKITNEDTMNVFYGSPIETQHRFKAYQGRQRAIAHAANTTTTGGRKYRKEARIKKKTRRNRRRRHRKALARQAARGAAFVTLQAQTIEIEAAIEAVGAILRDQQTRHALLGDQAPAIARQQQELADQERSVLNSRLAENQEARRRLETRDQQQPQRALKAQFSGKQPTIEGIPLVGWGNGLLKRESNKIKGHKVGRSSMILQNLHQRQACGQLLVTHVDEYLTSKTCHRCHRRISTLPVVDGNQTRQVFASVFCPGCGHIFGRDENAADNMLTIVCDRVLNNRRPAALTRPARQRQPGPNQAPTNTTNPTNPTNATNTTNTTNATNTTGLGRQAAAALPAMGNEEAMPDVSTTTTRTRPRSPSPPLRRSTRRRTRPDRYTPGDT

SEQ ID NO: 3610 - protein, 1365 aa, Gongronella sp.
MGFKIFIRAKEDAKIRRQEAAAAAEAAAAAEQERLKEAQQQEKDADDAPEREKDGQPPKKRQKKGKGRSTSKRRQKKDEKDAKVTAKDEFKESTVAASTIVKNPCSKCREESGKLDAEATAMLQGHESYANDPEAALAALEANEEYVRKRAAAKKRLEIAYTHARRTSRLCPDYMARQSVLTRTQAPLKMRPFTVKHGLDTLFAGHISNNDKAEITAAVRNVVQFNRQLAIHAMLFTRIYATELLAAGSHVPRGIFTQAFYLSVFQLLLGDKVTNKSLFNDSERAHFLQAYDNFKEQHPTAPVSKLRSPASEKALGFVDVTSYTAIELATVVKNHVVEGFEGYFISYLQASLMRRVETLKPYQARGYAIYIYDMAAKDPNFPAEKPSYKKMDATVLAQMESATSDLIQETRRKWQAVYGYVLEEKAKIAEASRVRKAANEEALARRLANRNAELALMTFSTTRQDGADQDEEMATSDVDVAGQDPPSDDTTAVDDGPAGPMDDNSAAPPPGGPVNGPANAVVDALAQQEHAARLIAAQQAADLATASAAHAVETTNFAGAINLAAQITTRMENEAREAFGTLKNVAYTGQQILASQGAFLSSIAQMATEQDIAHAAEAQSEASRAATYAAEKAMAAEKLFKEALAALEYAASAQRDAIRFSESIAAQASTAQVAAQAAAQASTQASVQTSIQAPIQSPVQALVQAPIAAQADAAPANASDTEMTEAVQEASEDAMSTSTIGSLGLSDLQLGDIKVNTATLTKYPHFFMRVLYDVLVEMENWNEDAEQQPAQVLEEVPFAWMRAQLADDRVVEWPKLNYKKRTHLTRVLCTVVNKKKAIVRQRLPAKLGDKSFAAIEALIDDTKKQLKEKTFAPEIRVAKPPARLFAVIPVPSYRLRYIHITYRMLLTLLKFYGLKRLAIGPNKLPTDGTPHPIWNHLFDMGRIRRPAGAVFQNALDTDSVGTSFFFLRPVHENTRPLLTLDDFEPADLRSCRLWGVDPGVTDVFVASDGCSALSGIYNNQLRPNLPPLPPSNNCRIRSTSVRIPRPSIQSAGRNPTVKSGRRRSASSPRSTRWPQTRTSSAESHEIRQFSAAEYDTIAGLIKTKQKIKQYKADSADANGITITNVESTLATAKTARVARANQHVQAVLAALPRLLEFYGHRHQELRFMNYVGRQRATSEMVAIFCNGGKKYTRPNERKRPAMRQDRWRRTPFHNDEERCPIVCLGDGKFTRRGWRGKAIGHADRLRRALKLAQRDYRLVVVAVKESYTSKTCSTCGHRTLKNKEIKEHGSSYKLHGVLECDLCGRFWQRDTNASRNILAIAHLQVLNQGPMKVPPMDAKDNPESRPLVFTKEYEEIDALSPSSPH

SEQ ID NO: 3611 - protein, 683 aa, Gongronella sp.
MPFFSIVKEKLDAKARAAQQEEQGEEGEEGETAATVARVEQQAGEAPIGGQQSDGQGEVAADDAAGATTALSAIVGSLAQAGLVSRMLDAASRAHRLGRCRPSCLAFAQQEEQGEEGEEGETAATAARVEQQDGEAPTGGQQSDGQGQVAADDAAGATTEQIQAASEAGTSSDASAKRQKKGKGRMTAKRRQNKDEKEKKISAKEEFAAATKASSAAVQNPCPRCKSAAARLDDEATALIEGHADPVAAQDDPEVERLRAEAKARLELAYTHARPTNQLCPDYIKRKSGTKSAPDDGSVHPVFDQLFNWTKIRNNEGGRLTLAEVFVAVDGSNQDDNIYGPTHPTLPPRPPSVRHRVRSASVRPLKHDAASNQARSPSIPRHQSHRHVEKGQRHQVRRFSAHEFDHVAGIKRSNAKIKTWKANDIDQEGSTIAHLESQLASAKTSMPSRMAQHVESVLAAMPRLLGFYVLAHQGLRFLNYQCRQRATEEMVRILCHGGSKYQPKDTTGPPPGDQDGARWRKAPNRRLFGKCPLICIGDAQFRRMNWRGKPSGRPALLRRALALAQRACRLLVVQVPEPYTSKTCSSCGRRSLTNVTKRDSGVDNFKLHGALTCTWCARIWQRDVNAARNIRAIALMNINGRNLPALDPDNKDSRPAVFTKAYDEPDPQQPPFHWLPKKQTMIV

SEQ ID NO: 3612 - protein, 805 aa, Gongronella sp.
MSVQELSHRKSHLQCVHELLLELAEPRFVADTANIAIFGINYALTEDVARLVAPNAKISTAIQEYVFERFCAHPVLEIEVEQNPPAQGAANRTRGRRRGAGGARRGGAGAANQADGAAEDQGAGVPTELPEGAQQGVGNDQVGDDQEATNGPAMRAIAVTDMPESIPAEWRDRVLQVLQKVADIKPITMRQLTPVTIARHPEELIEPLVNIMRSYDDCKKQATLQGNKLRDVPTFNLLPELSFHKRFVTISAETAHQLLPWELIMREAAESDAEAMSLDSRATDPISLDTAADDDGNDDDDDGNGNDDGDEGNGNEDDDEGANPLDNAPFARTLQWFWDVFRMDRFGWATLQDMQSSVLYGKAFAGTMMTNGTELHVHFVRFAPSSRRPQLKDKDLAGVGLSNAIVGIDPGRKVVMTGAHAPVAELLGLPCAIRRTSMEEYQAMSGETKRRIALESRKTEPLHDPPGPGTTISEIETLLPSGRTANAAEYRCRVAYLLQHEQQLRQFYGDDHSEARFAAYRGRQRAIAKSVNRMISGSDKYGQQADRQQTPEEIRRRQQQIDNALEAAQRSLAELDQAVKRERREWQKNVSLADAGFWAALTAQHGAQRQNLTAIVTHLQQQQAAHVAGREMWLARPPPLNERRPVKAHWSGMQTTPAGMPLVAFGNGMLRKDTNAISGRPSGRTENIRKNMLDRHARALVAVTLTDEFRTSKRCWQCHEPVATLRLRDANGNVQQIFATLLCTNCHALMDRDHNAAMNMLQIQESWCTNGSRPQYIARPADRAEDDQDDDEDEEEDDEQDDDFH

SEQ ID NO: 3613 - protein, 743 aa, Gongronella sp.
MDEIPLQHHIIRPTELDVPGGGPQTRYTTVKTSISSVGLNIGNIGNNLEDYVIRVNYLIKHQLQALKYIYLALFDIYGNALINGQQQAHPDMSRLVNDESFSRCVFTYLADGTIPGQQYILVPGFQTLMEEYIRHSQFQRAIFFGGVQQPSHYATNQVNAAYLNNVQQNFERRVLYTLDFVFKRRNVRDFARRQRRAENPGVEDDEDEENTEFNAGAYATTVRQLKAQIGAVNADGVPQLIENVVDAVPAHLRGPMLQEAQELVNDLRLCFGQIQLQPNEFIRADSYFVDVKYSPRRYVNAFYLLSRYAAAHEASLVHQQEPGEQVDFQSYRSYNWYPTRKSWVPSAVQIDTMILRECVQRLNFDTLASRRPAGRQNTQDYKFDIWSLVVNFANDVWWSQGQIQGEEQQPPAWPHDGHWRPFCFNGTIYTDGVSVSIVKTTRATNAGGPRRTFVPSVRETTYIHELEQVDRQRLLAVHQDAQSSLVYVDCGRRDLMYCMSSTSTPQNQQTHRYTSSSRRKALHRRHYRTLREDVPHGVSQSLQRMSTVHSKTQNLAAYVDFLGQQAVEWEILHDWYANATTLGNGETGQPQPLYRKLRFNQYIARQQHDQDLANAIRTAFHDNTVLVMGNWSAPHMRFHEPIRGVGLRRALKKLGFEMYLIDEYRTSKVCPVCLTNTARMGPQRIENPRPWQNSTVKVWGKLICSNCHRTFNRDNMACRNMVIIGDAILNDNPVPDVFTRGGA

SEQ ID NO: 3614 - protein, 779 aa, Gongronella sp.
MDHAIYCHFRGFPCGLSCDLVVETEGVWRRVAGYIAEERRTIALAKQARQQASAQLQVARQERRTRQFGESSSSGVQQTEDTEDTEDMDDMDVDEEEVDMNNDDMEVDNQDDDDNQSIATSATMATVLTATTLGSLGASSMAVSDIPANISVTTTQITKHPHFFLRIMYEILAAMESWNDADTLLPNTPQDQASFPFVRHELETLLVHDWKKLNHRKRTQITRTSMTLINNDIEPHPTRFCKSISHAGKADVAYFIQEVQLQMRQNQFMPPGILVRASLRLFALVPVPSMRLRYIQVTHRVLKTILVNFDLKQHNSGTLKVPADGTPHSVFQLFDMTKLKRAEGSAFENSFHTDGYATSFSFKRPKGEPRPQLTLDKVTPQHLQQCRAWGVDPGVDEIFVAVDSSSYASAIYAASAPTMPPLGDRGINELTLHDTKDDEVIVAAPIGAFARRRARSTSVPPVAVQDRPLRGNRSLSVDARPCDARKPTSPRSRRDYTSHPRHEIRRFSAREYNDMAGIPFVRKWLEEKRTASHITPIESTLPTAKTARLDRVHERVRALLDALPTLLHFYDISHQAKRFSIFRGKQRADAEMVNIFLSGGKKYNNQQATLSRPPTATKNRWRKAPFTANAPGVPPLLFLGDGSFGRMTWRGKPHGHAKRLRRLLAIAQQQGRLLVVSIPEPFTSRVCSRCGARNMANINVLAADAKHKLHGVLHCQHCSTLWQRDVNAARNLHAIATLVILGHHLAPVFKKKNPASRPLVFTKPNGPPPYEPSFYRAQP

SEQ ID NO: 3615 - protein, 698 aa, Gongronella sp.
MNQTRVQRLGNALDRRNAVFATMNHGGIGARLVRRVVKDSAHNVFSTSLGEHHDHAQTTMLERVKELVSKQNQVRTHASAFFKFICLHELERNPAFDIGTLMNEGFLQAILQAMAMHAPGPNAPHATIINRYYDMYLNPGNGAPARLDPPALNLHYYVNIRNYEATQMMVALSNNVKMNFGNKLRQVVNKVLDVKNRRRAIMQDMRAQNTAALQRNEAPLFTDQQIADAIFHQVTEPARVFKDMIAVSPINRDDAWFEDHESPVVRDAFNVLRPVFDVYPQDWACFQTEVAGDDLEEGAPEPAPQIVDSIYARVRVRNEAHLHFKAYYILGQQAAAVGLRLPNIFPMRRNWSPSYMLIDTTAAHHNLRLLHTGAAGVGPITPLRSKFNIWDPVVNFTAKSFQAQGPQRRIKFRGTLYTDGVGVSIVKQDRHTRAQGFQDLQAQRPEDVRNIATLDEEEHDALVGRLVFIDPGRRDVLFTMHEDSTPEDPLTYRYTANQLRKETKRRKYASLVARSKPQIVQQTETFLSQNSAKFNSVSSFNDHLNARAIASGPMRSFYEDLATTGGPNHHGHNPPFIRKLKFNRYMRRQQADARLVRTLLEQYTRVGENGQPILPAFVIGDWSAGNARFHEPTPTKRLTRMLVKHGLEVFKIWEYNTSKICPICQDHINLLETFRSVENPRPHRRASNPTVTCWGLLR

SEQ ID NO: 3616 - protein, 1355 aa, Gongronella sp.
MSAPSSHTDANKADTPASKDDHKSAADQQKKKKKRERRRKKAKSSTKEAIKTKVIVRRLPPNLPEDVFMNAVSRWTGDDIVDYKVYIPGKVSQSKGKENTFSRAYFHMKTMDAVIAFHQGFDGHIFMDSKGNENRAVVEFAPYQGVPKEPKAPDARQGTIEEDPDYIKFLEMLKEEQEKPADTDAQGEGTTPLERLENRLASLTAQSHAQEQASKPKTTPLLDHLRALKAAKAETKAKKKAASKSKKAKQQETIASKSPAANANANAAPAEKAKRRRPKKKATKDASNQGSATPSPAPGASNASSPAPAQQKPPRQPRQPRQKPSSASNDANATPNANANASGSNAKPKRTRNRKPKAGGGGGGDKQAAPPNKEFFSKFMPGSEKYTRVVDLRETLRPDLPQQAVAHLQTSIHRDSRFVSDVLARCQFVLTDFLLMNPTANCKNLFSQNGYYTLTRIVRGTMPRPQNQQRRRGAPPRRRQNPNVPVEALQRHFDALAVISPPMAHFHPGFASQLSIACKTQAANNKEHVSTLFDKRVKDFTKFHLAQLLHADEKPPKAKVSTAIQDYVYERFCMHPVLEIEVVQNPPAQGAANRTRGRRRGAGGARRGGAGAANQAAGAAEDQGVDVPTEPPEGAQQGVGNDQVGDDQEATNGPAMRAITVADLPETIPAEWRDRVLQVLQKVADIKPITMRQLTPVTIARQPENLIEPLVNIMRSYDDCKKQSTLQGNQLRDVPTFNLLPQPSFHKRFVTISAETAQQLLPSHRIMHEPAQSNNDAMSIDSRLTDAMSVDPVAEANDDDDDDDNDNDDDDDDDQANDERANPLENAPFARTLQWFWDVFRMDRFGWASFEEMQSSVLYGKAFAGTMMTNGTELHVHFVRFAPSSRRPQLKDKDLAGVGLSNAIVGIDPGRKVVMTGAHAPVAELLGLPCAIRRTSMEEYQAMSGETKRRIALESRKTEPLHDPPGPGTTISEIETLLPLGRTANAAEYRCRVAYLLQHEQQLRQFYGDDHSEARFAAYRGRQRAITKSINRMITGSDKYGQQPDRQQTPVEIRRRQVRRWTNRRLRRMAAPRRRLARFIKKQQQIDNALEAAQRSLAELDQAVKRERPWCTTPESDAQRSLAELDQAVKRERREWQKNVSLADAGFWAALAAQHDAQRQNLTAIVTHLQQQQAEHVAGREMWLARPPPLNERRPVKAHWSGTQTTPAGMPLVAFGNGMLRKDTNAISGLPSGRTENIRKNMLDRHARALVAVTLTDEFRTSKRCWQCHEPVATLRVRDANGNVQQIFATLLCTNCQALMDRDHNAAMNMLQIQESWCTNGSRPQYLARPADRAEDDQDDDEDEEEDDEQDDDFH

SEQ ID NO: 3617 - protein, 1156 aa, Gongronella sp.
MSVQELSHRKSHLQCVHELLLELAESRFEADTANIAIFGINYALTEDVARLVAPNAKISTAIQEYVFERFCAHPVLEIEVVQNPPAQGAANRTRGRRRGAGGARRGGAGAANQADGAAEDQGVDVPTEPPEGAQQGVGNDQVGDDQEATNGPAMRAITVADLPETIPAEWRDRVLQVLQKVADIKPITMRQLTPVTIARQPENLIEPLVNIMRSYDDCKKQATLQGNKLRDVPTFNLLPELSFHKRFVTISAETAHQLLPWELIMREAAESDAEAMSLDSRATDPISLDTAADDDGNDDDDDGNGNDDGDEGNGNEDDDEGANPLDNAPFARTLQWFWDVFRMDRFGWATLQDMQSSVLYGKAFAGTMMTNGTELHVHFVRFAPSSRRPQLKDKDLAGVGLSNAIVGIDPGRKVVMTGAHAPVAELLGLPCAIRRTSMEEYQAMSGETKRRIALESRKTEPLHDPPGPGTTISEIETLLPSGRTANAAEYRCRVAYLLQHEQQLRQFYGDDHSEARFAAYRGRQRAIAKSVNRMISGSDKYGQQADRQQTPEEIRRRQISAILAPLAAAATTGRPETQIVPTIHNTKNQRQQGHELFLQDVRNPLVPERCASCRRPGHATASSLQCPNHPTNNKEFFSKFMPGSEKYTRVVDLRETCDPTSLSQAVAHLQTSIHRDSRFVSDVLARCQFVLTDFLLMNPTANCKNLFSQNGYYTLTRIVRGTMPRPQNQQRRRGAPPRRRQNPNVPVEALQRHFDALAVISPPMAHFHPGFASQLSIACKTQAANNKEHVSTLFDKRVKDFTKFHLAQLLHADEKPPKAKVSTAIQDYVYERFCMHPVLEIEVVQNPPAQGAANRTRGRRRGAGGARRGGAGAANQAAGAAEDQGVDVPTEPPEGAQQGVGNDQVGDDQEATNGPAMRAITVADLPETIPAEWRDRVLQVLQKVADIKPITMRQLTPVTIARQPENLIEPLVNIMRSYDDCKKQSTLQGNQLRDVPTFNLLPQPSFHKRFVTISAETAQQLLPSHRIMHEPAQSNNDAMSIDSRLTDAMSVDPVAEANDDDDDDDNDNDDDDDDDQANDERANPLENAPFARTLQWFWDVFRMDRFGWASFEEMQSSVLYGKAFAGTMMTNGTELHVHFVRFAPSSRRPQLKDTLF

SEQ ID NO: 3618 - protein, 884 aa, Gongronella sp.
MEQTQEERRIAQLERLRAMKRLKLQQQQAQEHQAAIQVGPCARCNRMGHRDARSRRCPHNPHYGQPTAAEQAALRRAGITELEDATANPNAPPCPHCIDGTCGCLPHSRSSSRLCHAHRLNTKEVCDSLLGPAHVERVVKATLHGTLHLNGPNRRQRHLAKGRVIAQIRHVVDTMQAVALRATQFVHFLILRQLDEDAALPIHERQGLPSYMLTQRYMYGPLQLVTGNTVTSTNPLVPPGQDAAFQEFQEAMGDTMINAVGMSPALAYLALDLATAFRNSIAMTFKTRALQYLAFRVRQALPRDQWPRVKTLSKMCDWAYQALTNTMASDAVPMTMPQAVIDVFAQVQQEGGLGPSSAARPIDQTRLNAEGTVYLAHMHAWLRQMEQNNAEADVINGEAQMVTEVDGGWVAEHLRDIDDVAALSRRRLSRLRFHVKNMINNPNLAVTFGNGIPQPLQVQLAALVHQARGQIERSALYMAGRILIDPASCMWSTTVRRVATVKLFSLFQTTKWTKRFIAVPANLLGVILAGVNVVHTPHSRHQDEPSHVQMQADADVFQSVFNFRKVKLFQAANVYHHFHHLNPGPVPGLKKVFLNIIHTDGHQVAFHYAQRASEDKGLPALTIEDFQDEQGIDIIGADPGHTHLFTAIDGYYPTQTRTRLSNREWISKSGFFIRRRQQLAARAADGIDPLLNSLPAQRTTSPVAWLDYCHAAQQVQPQLVAHFGYNYANWRFLAYHGSQKMQAEAVNIFLGCSRKYPHHDRRQQLPVIAYGAGTFGSMPGKNPKRSVLPALKRAEAEGHLCVVMIDEAYTSQVCLLCQERSLQAKHALSSVSGTMEALWGAKECTICHTNWNRDHAASRNILELAQTLRQGNPRPALFTYTPSA

SEQ ID NO: 3619 - protein, 2102 aa, Gongronella sp.
MFTPPFNRTNFDGLTPTQQSQYLRYKKKHEQELAEQEAADDEDDEDNDDDDDPGEGSSTGHLVNTQRRVLGRQSVATKRAKKQGRKDARRAMQQKQPKKYNRGATKAQRLADLIGTKFHTVTRVGKLSSVLNLEGAVKDGVMSAIRETGCFATAMRVVKLAFVNFYVVAQFEAMQPLPPCLYTKEFQHGIQQLILRKQMTDETILGMHRPRIAALFEDFMAQYPTLMISSPHGHLEHAAVLNYQNTDLSTCLSNFVTECFFQRLASFMCHQLQNDIPTIKKGKAFNIVKALLFERFDIDEESNIPTIDDDLPVGQVNAAVDALRTALSADTASMQAVIALVNSPFRHDGIPVRAEAMQIWARCRHWGDSTTRDDLLAIARGASVAIPAYSKISLATISRFREVFHQYLLLLDHVAERSNAALHPYSTETTRSWAHRAIKKIGVVLNRSQQRRLAKAMVQAANDRDALDHPPFDTSKWHHLGVGTLNAIQASVKKARKELYWSRRCQEWASHDPHMIARCHFPPAPATKRCKVYGASPTSSMRRTHITLDAHSMPTIMSAAGEKIARTEAAYENVIRQDVLVRPGALAGQSPHLASRHICTTDGYKICMQYAKASRPQETLPHLEIADLEPWHLPYFHVWGLDPGERDLVSAADGCTMDVSPMKHPHQFRKMSCASYMAPAWQWGRELDSIRKKHGIKKIESSIPTARTVSIAALSRYLAYLAQHLNALLQFYTLRVNRGRFNVSRMRYKADASIVNQFINSPTTAPGHIDPIPRGQKWRAAPTASDARLPCIFFGDAKLGESVFRGSSTQAGLPKRVKKLFKEAANQHRLLFVEIDEYLTSQICSCCKQRTLEHVPVDLSAPHRASASSGSAPTQQPMPREAPWLHQHYDDQMNVLMDYQGGEFDKLLDRQNLEYRSLLQRQHTEHLQLQQGQLQQVQDGTDMDHLLLESAAQVHQHKLLRKSMSFGQFQERQCTLHDFEQEMSDLLHHQRMQNLIDAFQVRQKKKRKSTRLMLIFMPTAPTAAATTIPRAAATATRAVPTATRSITAAAGAGPFIWPRNDQTFIFCPPVQNLLDILEPRSQRQPQHPTKRHLHGAAWVISSRICAPIHSRATASTTSSRATSRAASRAATTNTTKTSTSGPIYVCIFQSSIQLTGRGTDKTKSRTRVDGICRPFRVSSANDSSCSTLYAIAFEPEYMAKLHPEPAARRSGALLSWLRLAVYCFTAIFFSYQLHYCVPAPKTHRGVSPGSHQAEFSEYNAMSTISYLSDTIGYRIVGTVEEHQTAVYLKNIIRDYQKNAAVVPGAPKFEMWAQHETGTHRFDIMDHMVLKAYTNITNIIVRLSCPENDFTLGTERQCEQDAVLVNSHFDTTLGSPGATDDGSGTAVMLEIIRVMSQRDWSGYRNSVVFLFNGAEESLQDASHAFITMHDLKDTIKSVVNIDACGTTGREILFQANSREMIEAYKHAPYPHGTVMANDVFRTGLILSDTDFRQFVQYGNLTGIDMAIYKNSYLYHTHLDVSQHLEPGAIQHLGENTLAILDHLAKNTSLANIEPTSEMVFFDVHGVLFLVYTWATAFRIQMVTVVLVYVYLGFVIHRTSKQSPYRSVGVLLASYARSIVSVWASGTTALVLPISVALFLMSDVINRHMAWFRHEWYGMLIFVPMGLIGSYGVQALFYKLPGPLHVDMEYGVFNSMVAAFAGMTFITTLTGMASSYVLWVYCSVLFVAALINEFALKPSASRAKQGTPKIHTFTYLIATFPLAFIYSDNVFALIDIFVPLTGRMGIDTPVDVIISIIFGSIAYMFCLPALAHIHRYGQRVLSKILVILVLFQVSILALVVVCGGSPGGWAFPYDEMHPKRLFIQHLKNLTSGESYVSVAEADHGPYINSVLDAMEQELAVSREERTGIYGLQDWDSIYPFSHFLGGYRFNTAPYIRTHTTDVKMARGEKPLLDAHDGVFPVLTVHNDRYDAETGVRSLSIYSMSPSYTWTVISFDAHVVNWSIRDEQPLARPARYVVRHVNGYAGDNGWKLDVSVIVPEEERALAEKGEWKLRVEFTALEGENFAGREQERLVGGVGMLGIIKRILPEWTTTTWLSTVVQDWHL

SEQ ID NO: 3620 - protein, 864 aa, Gongronella sp.
MKARDIIRQKREDKLEQQVQAIAAAVQQAIAALEDRNTQEENSTVQQVVAGEEDESDTPVAESSSMAQKRSLMKKQSAATKREKQDGRRDAQQQRILGPQAKRVQKTSKKTRLLDILGANVNCARVGRLNRVLRVNLPDDQASRLVAVIRDVCLYATRMRFLQMAFTKYFILVCHDAHLPLRPYIFDPHFYHAVQQLFLGKAITNAAVIAHHSTTILRVFVQFRQQYPALQISRLGGIHGTREYATTLNHLNKQTATGHINFVVETFHTRLMHCLAAQLHGHLSNLKHGHALAYARHLIVEQCKLAEEHPAPNVDYINEERVQHAVEQVRQGLRIDLETICTVYALEKTEGEHEAWDAWANARNLGEDATLAILQGIAQEARETIPPVGRVDMAFITRKPHLFLHYLLMVDEYAEEHNDFIQRQSTKMLFEADRPFAFQQLNQLRLHLTRPQRRRLARAIVSAINAEPPYHPPHDDHLHDDDDDTDEAHGAAIARRQAFDPQPWRHLGTNALHKLSTVVAQARKRLYWSNKVRQWGNTSDRSILARCLYGKGSPATRQLRVFGPSPTPSFVRIHITLDDESFPHQVRQLSSMEYRVAQHQQQTKMETWKRKSGIKLVESQMPSPRTTQLDKLHDYLVYINTHLNDLLRHYSLKYNKARFEIRRATQKMDAEAVNILIHGGKKYQTQDPRTITSEENLSSTAKWRPSEQRARDRRPSLVFYGDATLDSQVFQGRRTQAGLPGRIKRLYQGANAQGRLVMINISEFLTSQVCSACGARSLSHLTPVDTERSLYSVLMCSTCRTKWNRDVNAAHIKATLTQRLFHAGRMKLGRGRGNDSLPHHLFLVPMWRAGVSASLCKSMRERKG

SEQ ID NO: 3621 - protein, 594 aa, Gongronella sp.
MDVDEDGRDDGMDVDVDHDDDDAPDDDPDVDNDDNDDDNDMYIATAMTTASQSTVGSLGVSNLAITMESCNDADALLDETAQSKVSFPWTRHVLQEYIPNDWAKLNHHKRAQLTRTVMLLINENVEPLPLRLSPSLSHASKDMVVHMVEETQAKIDKYTLVLPEIVVRPSLRLFTLVPVPSFRLRHIHIHHKKSLNKILLHFGLENYNAGGQALPCDGSTHVIFNMFNITQFHRSSESAFENALDTDGFSTSFTFKHVNPDPPPIVELDKITLEQLRRCRVWSVDLGVDHIFVAADGSSVNTGIYSAAPPTTPPPPAGPTRHRPRSIEEPALTTRAFDLLPSLRGQSVSVNPRQSDTSSASTSPRSRREYTTHTAHEIRRMSSAEYNKLAGVPQAKKWLHDRKEEAGIVVIESRLPTAQTARIDRVQERVRALLTTLPTLIAFYDMDHQKRRFSLYRGKQKANHEMVNIFLGGGRKYDMDSQQPMSSLPPIHRQQSQFTHNDPGDPPLIFLGSGQFGCRTRRAKPHGHAKRHRAMLNKAQRQGRVIVTSVNEAWTSQVCSRCGKRCMKNIKVFSPCCPFPKLHGDVKCQSCQTL

SEQ ID NO: 3622 - protein, 424 aa, Gongronella sp.
MGDNPVWTHHHDPLLQLLWLNWPWCALIVAIIRQVWTHSSSVVLFTQTAWVEYNALVGRLVFIDPGRRDMFFTMHEDSTPEDPLTYRYTANQLRKETKHRKYTSLVARSKPRIVQQAETFLSQKSAKFNSISSFNGYLNARAIASGPMCSFYEDLAATGGLNPRGHNPPFIRKLKFHRYMRRQQADARLVRTLLEQYTRVGENGQPILPAFVIGDWSAGNARFHEPVSTKRLTRMLVKHGLKVYKIWEYNTSKVCTTCQDHVNLLETFQPVQNPRPHRRASNPTVTRWGLLRFTSTGVDCLNGLARPRPVNLNISTRFWNRDLAACLNFRNIVQSLRNDQGLAFYESVRSATMESAFAGRQPSAQFLGGVPTRVRADAHSKGSLLQQGPNRLQTKLAMTVEDIVPQICRKLLPNQAHPHPFCIP

SEQ ID NO: 3623 - protein, 744 aa, Gongronella sp.
MAEIPPLQYCIIRPAALDEPGDTPTKFTTLKVPFGSVGWNVDHFQRLQDYVLQVNYLIKHQHQALKYIFLSLFDIHGDNLLSFDGVQNLHPDMSYLVNNNAFIQAVFTYLANGTIPGDTPVIVPGLETLLEEYIRLSQFQRTPFIGLVQNPATYASNQVQAEYLNNVQANLNRRVMLTLDKIFKMAEVRDWLRQQEAENIDADANDPDVDDELNDVFNNGEYAANLRLLKRQIGDANVNLADIQQTVDAIVNVVPAQHRGTMLQEGRALVNGLRHHFEQVDGTVHIQNYLVDVKYHPERYVNAFYLLSRHFADHEAPPGEQEDRINAYTLYNWYPLRKSWVPAAVQIDSKILCTSILGHPWRSVERHQRPPGHQNTQAYKFALWSQAVDFRLPVWWAQTYDNDDNVPTPAQWRFGEGTWGRFCFQGTIYTDGVSISILKTNRHTNASGPRRTFVPSARETAYIDELPPQECQELLDMSDGGLGSIVYVDCGRRDLMFCMASTSTAADPQVYRYTVNDRHKALGRARQRELIEDIPVNVAQAQQRMSTVTAKTQRLTAFIDYLGQQGAEWGVLHNHYANHQTRSAGNRGYTVPLYRKLRLNLYIARQQADQDLARDIRAAFHDNTVLIMGNWGAPHMRFHEPIRGVGLRRALKKMGFTVYLIDEYRTSKVCPNCMQRTVRQNPALVENPRPWQSTTGRVWGKLECSACPSILNRDSMACRNMITIGTAILNGEDIPEIFRRPAAA

SEQ ID NO: 3624 - protein, 1077 aa, Gongronella sp.
MTTRRKQNRDELEAKTAAKEAHQKALKEGSAKVQAPCGKCVLASDSQFDTARDMLAEHLDVLRGATGDEEDEEDQEEVTMAHRELMANDEEYAELFNGAKARLATAHTHSRASNHECIAYMPRQRVKTKQRAGGVTMRSFTIKNGLTTLLQPDIPQEDKTKFLDGMQKVVEYNRLMVIHAMAFVQHYIIAQLSADRQVPRGLFDSSFFYGVFQLLLGQPFTNKTKFNDAERAAILDAFRLFQHAHPAIHLDPVPSEHAKPCMFSEVLSASAQQLATHMKSHVVENFDTFYTNYLAASLARSLVQEGFDDVKPHITRGYAAYAYQRSVHDDDHPAEAPAYKMDARLKERIVELSDALVPETEAVWRRVAGYIADERRAIALAKQARQAAASRGQAARELRRTRQFSASSDNDDNGVDEAEEDVISVSTEVTVGSIGASNLSVAEIPPVIRVTTSAITQNPQFFLKVMYEILVMMENWNDSDALLPATPQDEVSFPWVRHVLHDLLDDDFKKLDHRKRTQLTRTVVMLINKDIEPNASRLSRSISSQGRQLVVQLVEDVQLLIREHNFIPHGILVRSSLRLFALVPVPSMRLRYIHVTHRILKTILGHFSLKDYNKGKKTVPADGTPHKVFELFDMTKLKRCRASAFENAFDTDGYATSFTFKRPKGEAPTNLTLENVTRQHLGQCRAWGVDPGVDEIFVGVDGSSYESGIYSATPSSIPPPPADRTADELALDADDNIILHAGPARRRPRSVSAPPLAVQAMQVLMKPDRKRAVTVDGHPCDANDPLFPRSRRDYTTHPTHEVRRFSPKEYNEMAGIPMVNGWLAEQKVASGVIDIESRLPTAKTARTDRADERVRALLQALPTLLSFYDMQHQAKRFSLYRGKQKAGAEMVNIFLGGGIKYTRPNQNTQRLASAPTATRKWRAAPFSPNAPGITPLIFLGNGQFGRRTWRGKPHGHAKKLRKLLSIAQRQGNLLVVSVDEAWTSQVCSRCGRRSMSNIPVLPLIGPSYKLHGVLKCQSCSTLWQRDANAARNIHAIATLNVLGRHLHHIFKDSNPSSRPLAFTRANAIPPPPSRAQP

SEQ ID NO: 3625 - protein, 892 aa, Chlamydomonas asymmetrica
MAGRVAKPGTKAYFKNLLQLNGVATSPKDTKATLMQKLREGALLSAGELMAYGKACGGANAAAEPATVTKAVTHITVVKCSLRRAMRNLDCPADDASGTNSTNRTNSTNSSKPAATMLARFKAIVDDHVNVISRMLRRGSLALAYHLVHRAANGDAIPDLYNMKTTYWKDWLRVGINDCYPSDDVKTTYPHIAQHLGFAMQSKSPDHLAALPAHFDQVLAYAATTFETAVANNAWVPLFNRIARLTKHTLRDLGVGLNTHGVSVFDVVSSIRMAHPSTASMYQFFPDEVRAFVMDVRRRLLAPDGQVLFDQYGKTVSFPTLFAFNHWMAERFSALKQRQNCLSPIFRVRRAHVRFDVKTLSKVFESLFPDCDAIAAVRSAANAHEGDVKKGGNGHSNPDEFMLPTDAPAKVLKLDCETEEAWNAYKASVDAYKERVETAKATPEYQDQKAKHDAWMRLRRDAVASFFGKLPKRVGQAGKDEQGWQFDGSIVTDGVGVSLQFSRQVMQTSVVTKGRGKRGPKASEDAADDAYDREMASTCFTLNGDDTVVLGCDPGRTNLATVSVIQLSGENGEACSKKTWSWSLSRGMFYDKSNTARANRRQRQRFRDHGLDGDWATLSGQQNDASLRSHRPDAILQYLEAYSAMEGRWWRAALASEESLANLRRYAGKRRVLDKFFANVKREAGQLFPGRRIVLAYGSAYRSMKATGKGETAVPIGSTYKAAVRHMQVVVTDEFRTTQVSWKTGNRKLVVYKKFDGTKEILCSTPFRAPPKVSPEDEESVDRYTTRRCHKEKQRRGGVVPALPRGEDDDDRGQDDDAVADCGRVDAVHAAKDKKTTKRYPEVRGLRFCPEERMYRDRDVEAALTIARLCTLRLQGKGRPTPFCRSTRLSMS

SEQ ID NO: 3626 - protein, 901 aa, Chlamydomonas sphaeroides
MSGRTLASKAFRVAAAIRAAVAADPLVTCARLARLIHETLGIRISPQLARSVLRAAGVTRKKARFHGAPVHHEATTAAFLAARRRYIEQGLTFWSLDETGFGRRGAPVFGYATRGHALRIQKRQQPCVTNTSALVIANAEGTMIREFQTQAYRVGTFVSFLTRLEVPRDAVILLDNLSVHKHRDVHRVAAEKGWHLLYVPPYSPWFNPIEGIFSIVKRAWYGGASIADAFDRPLPACKKRSRPDRAEKLRARKETRETVVKCSLQALLLGSKGQRNRVAEAIDTRVVAYSKRAVLASRGLNLLARNLFKDVQQHKDLVDFQVELDVVHVNTVRQLMLGTAGCARRVPLVHQLHRERPFLLHDPRDRSQSDCNIYTDGAVGFAANVHTHLKENLLRVVKRVVYDCTDGTRDQQVLALFRICGWPPPVPRKPKKPKKPKKPKKTRGAEASEEPPPPPTLTQAQEDRVKLCRDVLGLRGDTKITRAWLKAKANAPGILKFFVLALRLLEEHAPTAKPFALLPICRRKRHFITIDTTSLFGIARDADLVRKGCQLPAFRALGDAHWCSILDVSRVAPRGARFTGTIDTDGVSVCVHFARPKQPKKQRPANEEEGCGGGRADRLASRPSQEKIDSSRVVVFDAGRKNILYGVEILPDGTVQRYRLTRRQYYQESGIASAAARTEAWHRGVRAQLLALSRVSTKGYRVADFEAYLAVDMAVATALWREYLKRRWAAQRLRLHGGKKRVLARFFNRIEEAGRARGDARPILAAYGSAKMAPGGKGEVSVPVSGVFVECQRRLETHLVDEYRSTRVHHADDHVLQGVGVVRRKPDGSRAAATVRGLLWCSSTKDARSSAGSGKFIDRDENGALNILRCFLLPQRPAALDRSACRGQRLPVATVGKWVRR

SEQ ID NO: 3627 - protein, 311 aa, Chlamydomonas sphaeroides
MGKDTCSPSQLTDAHALIESCDYRPMVEPLQRAGGAAAGMLMCSCGMLVVCAVAAPVAPQLVVLLVALGLFVFSIFNTACSPLPTIGLFLVTAVFGPRKAPALSALGKPSDKGKQGSGSAPGGANAATPQGKSPADAEAGVRFSAAELKNLFLCGLDPGASHRHQCGYLERRQWMEWQLNYQPQLAAYQFAIPSARVAIRAAHEMRLRHLFGGWGGLGVQDFLAHYFDPRQRKKRLEVYIGEQRVLHREAVRLTGGRPKDKVVVGWESGSAGWNSVISRQGQPPRKEFVRLLRERYARHVVIIDECRTSQV

SEQ ID NO: 3628 - protein, 260 aa, Chlamydomonas sphaeroides
MQRPARRPDGEVQEAEAGVRFSAAELKGLFLYGVDPGVGTYWTCAKGFSHVSGFTGDLLQAAGCASHRQQCGYLERQQWMEWQLNCQPQLSAYQSAIPSARVATRAAHEARLRHLFGGWGGLGVQDLLAHYFDPRQRKKRLEVYIRKQRVLHREAVRLTGGRPKDEVVVGWGSGSAGWNSVISRQGQPPRKEFVRLLRERYARHVVIINECRTSRVCNNGGCGQLHEEFLPGARSAHGVQVCQGCGTTWSRSGGYVRPVG

SEQ ID NO: 3629 - protein, 1557 aa, Chlamydomonas sphaeroides
MAEALPVTVIWPPCPPHLGRISAVTADAAAGLIYTGCEDGSIVRWQLVPGAPARAQVLLAGHTAPIRHLAAGLTALDPGDGAAGGSRPRRLLSADDSGVCCLWREPEGRCELRRRLPELGPGLGLSGALLAPQHAGVLSEGWLLAALPPTAPPAAAALPPPGSDRNFSFHRTTHVRGSGSGSGSGHDRAGANGTAGHCVAAEAAEARPPVAVVLDWRSLEVRQLLPMRPLQQLAAATMAAAAGLAQDTAAAAAAGTDPFLCLSLSGCDEGAHASQPAADGCAAALAVAVTASGCLYGCVVPHDPYAAAPRELLGPADAGADGEPDASVAAPTDCGGPLLAAALGDGLRWAVLASADAWLVFRARTGPAGHGTAAYGRVRVSYELVCRISLLHQSAARSWSLAAQRQVPRGRRHAPRMLRFQSFAVDLEAESGDGSEGSGSDTDDEARGPGAFSNGVGGAAPARAAGLCTAAPPPHACRHAVRAASHLLLARCPPAQQHDLGGAGSAEVAPAAGGEGADDRSGVLLEVLAWDGSGRQQLVTIAAEEDRVASVTELVALPAAAGEQRRLPLQRPSGAVTASHCCVMPLPQPGPAAPLAPSAAADGAASGLAVVAVHSFSASGVGGAPAVLQWQLPPPLCTTAAADAGQVHEREAAEPPSDLQACVGTLADGCGLGDGRAVSLDRGPWSFPYGMPDAVSWSFRRGYLACGGRDPSGAWCVAVFDLTPAQPSLDRLITGPDAAALLPPPPPRAAEAAAEAALAPPTASGLSSAARQPPYHPTSGLPPPAVVTAASSSTAALPPAAALGGSFWSLSCSRPDVLLAAVDAETALAAVAAATAAAAVPPAGRSTPMAVPLDRRRSLSRGGAANGGWVLSPTTSASTAPLGNGTPGGMSPASATPPASRSASLDIHSGAVLGMPPPPAAAAALRCALSNGGSGGGGGGSGRTSLDAGSAAAAAASAVAAAAAVARPNATLTALLGLLHTWGADGAADAAVAAALVEAGVAPVAPPPVVAEGCAALLAAAASVDVAAFVEALSRGPMGEGVPPLHPLAAAALRRLAASRPGRAALAAAGPRLAAVLAAAAAASCPGGRPRPDLPPPLARCAAFAAADAAAALPVLALHAGGMQLAAASPLPLPRRTEPAAQSAQHHSYVTVYDLEYGSVTWQLPLTPGPDALAPLPPAAAAALPPPPPAPASAPPPPPAAVAAQLRGLAGAGVVALAFSPQLAQPAARLRPARKRPAAAAARLRLAARKRPAAGTGGGVAKEARAQLDLLAHYFDPRQRKKRLEVYIRKQRVLHREAVRLTGGRPKDEVVLGWGSGSAGWNSAISRQGQPPRKEFVRLLRERYALHVVLLNECRTSQNCSAMATVEAASVEPSAPAPVPEPETQTSAAAAVAAVAGQHPHEDEDSSAFECNICLELAKEPVVTLCGHLFCWPCLYRWMQVQAYSRACPVCKAGVEIDKVVPIYGRGSEPSANPQEAVKPVPPRPAGQRPTPIVPTAVAGQQQQQQQQGVLPSLFGFHLGPGQGYNEALTPEQQHQAFLSRLLLMLGSFVIMCLLLF

SEQ ID NO: 3630 - protein, 237 aa, Choanephora cucurbitarum
MSLIQINGYSIRFVLDEKYVELAPKDLIEDIYGVALIWMLIPGSLILLLLAPLLMNTTIHEEFETPLTEYYSLCGYHIASKEKMPYQKYHQESFQFFSQLPSLKTSDINQFARASIARYLNHELISDYYGKDCWLSKSKFQVYVKKQKATYEISNRLFHGSKKYDKDNIVGSKQKNDFKWVSSPPENHDAKSRMPIIAYGNATFSSSMRGEVVAPTKRITQAIRKLANTMAKLNLFM

SEQ ID NO: 3631 - protein, 312 aa, Leptopilina clavipes
MFDFSKTERGKEGAFSEAFSTNGVDVSVLFDVPKEKKSEDVNEEKSLPEKQKYKIFYGFDPGKKATLGGVYRLGSPNPSSTDKSKDKHLYMKSSSFRWEMNDHKRKETKKNKFGLDLQDFYKNYVIENPDMSNFSLNNPRDYERIVKYKLYVFHTFQTQHEQKGLVRLKMDKYISRQRQCEKIVNYIIGDTKRKPCFVAFGNASLSGVTRGHIGTPLNQLKRAFYLRAKQQGDRRLKIVTVNEYHTTALCSNCCFLMDRSVSPHRFMRCNKCLTTWERDINAGRNILNVALIDEKIIEKAEPFTDATFYYRK

SEQ ID NO: 3632 - protein, 545 aa, Candida sp.
MTDDVNIDPTEGTEEAWVVIDLIYAGMVMVPLFLIRQHLMFPETANINSSPNGTILKEESTEIGSSTSLVDEEPTSSIVEPRSSAPSSLLATWRVSKPLIQHRAHQRDGFCDPMELLAEANAGPYICHCKEHGVECGHQFDSIGKLLQHLADHYAKFMAEHGSTDESPCCKKKWAKFNTVRFIDHYLSNHMPPGSKFFECPDCKKPFRSSSALHRHCNEQKHTKPVPPAWKNAVPEKLTVLRHWFLASVAALTVITNKSVVLLVRAWWDQILDEQPYLSWTDPSSWTLFPVNFTAKFKHPPYNELPETITKRGRLVYTIDGKYRLNFPYEFAKRPRGHNNQDVIAAIDPGVRTYYSLVDSEGTGKSIGHGYRDTLNDQWDEITLLRNLIIKHSENPRKIAELEAQTARLMMRSEEKRAQNHGRVASYLCRNYQFVLLPKLNFNSKTWHMNVARRKAFLRLAHCECLRRVTQKAHEFEGSTVVIQVCESYTSKVCSSCGALNSPKASEVYECQECHLKVNRDLHGAKNIMLLYAAAVLSAFLPGRS

SEQ ID NO: 3633 - protein, 544 aa, Candida sp.
MSSSIERKKEALRQVFLGELILPSATVLEYIKSVYSSQESLEKRQDEIFEIQKESNWFMQSPYPRYLSEGWNLPGPNAPKETVDCKSAASRSYQRIDGDPTVRELCYTLLTALREDGFYGSYVPFNGKYRQTGDPLRLVDESESGLIQQVPFRLKLTTQQKIRCQDYLVQGRDLYNLIVLATNDRLFYDRRVDDHDFNIIEWFRGIRNNLTNQSAYLPPELAWIALMTGGLKNSVVWDVRNTITSMRGRWNKKGQSFSMTLHLKDPKRTRGQSISVPSACWCSKADDLDFIFNPNHEVVCKAGDKDIYRALPKEVKHIFRLKYGDDRNYYFIIPMKVSRPRIDNRPSSNTVISIDPGFRTYYTGVDSNGYVVAYGENLSLFNYIDQLLTAEDTAKRRPTWSNIKKYEKLFTQRKQAMTDNIHRMASHLSRRNAFIIIPRLNWNRFVSLLANGNSSALAKYSHCEALDHLIWKAKSYESGGPTVIEVDEIFSSKVCSSCGHYFRSLGDNEVFDCPACPLVCNRDQNGAKNIGIKYYSALLRALLD

SEQ ID NO: 3634 - protein, 463 aa, Porphyra umbilicalis
MAKHVHLVYVDEHNTSQTCAECGHGLCNTYVSPDLPVDLTPLKAASSYAHRASVSAAKRASPHRGGRRARRGVTTGSRSGPRDGAAAQRAKEHAEAVRTKVLQAIAAHGKWAFGTDPLALWGVKLCTNVACPASYVGRDTNAARNMSKISIKSMQGRSIYPHIRGYTVSRAPPQEDPVQAVRHAAAIDVGTYEAGYGWTRCSPTSCERWRRPVVTDPPVAEAGTAPTAVPVAAPTVRVEALGVVADGAHDAAAASASGDLAPSNVGQIAAASPAPAVGHSHSSSSRLERAASLLTSSRGDYWLSEKRMLIQDPRHPPPVVADAPVFAGSLTTDRPSSCPHPRAIFGWQTATVHLPSGPAVAAEDHTGIHPLGRVIPNASRQPMGCTEKPVAKDAVHSACPSVNRPLRALTQRHDNQWNGQTCCSQVTRKKVLHYIVNTSVLIGFLRYAREYVRSKRPVTVGHH

SEQ ID NO: 3635 - protein, 302 aa, Porphyra umbilicalis
MAKHVHLVYVDEHNTSQTCAECGHGLCNTYVSPDSPVDLTPLKAASSYAHRASASAAKRASPLRGGRRARRGVTTGSRSGPRDGAAAQRAKEHAEAVRTKVLQAIAAHGKWAFGTDPLALWGVKLCTNVACPASYVGRDTNAARNMSKIAIKSMRGRSIFPHIRGYTVSRAPPQEDPVQAVRHAAAIDAGTYEAGYGWTRCSPTSWKPWRRPVVADAPVAEAGTAPTAVPVAAPTVRVEALGVVADGANDAAAASASGDLATSNVCQMAAASPAPAVGHSHSSPSRLERVIVDCSPGSSRGV

SEQ ID NO: 3636 - protein, 274 aa, Porphyra umbilicalis
MAKHVHLVYVVEQNTSQTCAECGHGLCDTYVSPDSPVDLKNLKAASLYAQRSLASAAKRASPLHDGRRARRGVTTGGWSGPRDDAAAQPVKEHAEAVRTEVLQEMAAHGKWAFGTDPLALWGVKLCTNVACPATYVGRDTNAARNMSTIAIKSTQGRSVYPHIGGYTVSRAPPPDDPVEAVGHAAAIEAGTEEAGFGWTRCSSTTWEGWRRLVVADPPVAEAGTAPTAVAGAAPTVRVETLGVVADGAHDAAAKAASGNLATRNVGQMAAASLV

SEQ ID NO: 3637 - protein, 295 aa, Porphyra umbilicalis
MSNHVHLVFVDEHNTSQTCAECGHGLCNTYVSPDSPLDLTSLKAASTYAQRPSTSAAKCASPLREGRRARQGVTTGSWPGPRDGVAAQRAKEHAGAVRTEVLQAIAAHGKWAFETDPLELWGVKLCTNVACPATCVGRDTNAAPNMTKIAIKSMQGRSVYPHIRGYIVSRAPPQNDPGQAVRHSAVIEAGTYEAGYGWMRCSPTSWERWRRPVVADPSVAEAGTAPTAVAVAAPSVRVEALGVVADGAHDAAAASASGDLATSNVDQMAAVSTALVTAHSHSSSSRLERESQTVH

SEQ ID NO: 3638 - protein, 302 aa, Porphyra umbilicalis
MAKHVHVVYVNEHNTSLTCAECGHGLCNTYVSPDSPVDLTPLKAASSYAHRASASAAKRASPLRGGRRARRGVTTGSRSGPRDGAAAQRAKEHAEAVRTKVLQAIAAHGKWAFGTDPLALLGVKLCTNVACPASYVGRDTNAARNMSKIAIKSMQGRSIYPHLRGYTVSRAPPQEDPVQAVRHAAAIDASTYETGYGWTRCSPTSWERWRRPVVADAPVAEAGTAPTAVPVAAPTVRVEALGVVADGAHDAAAASASGDLATSNVGQMAAASPAPAVGHSHSSPSRLERVIVDCSPGSSRGV

SEQ ID NO: 3639 - protein, 277 aa, Porphyra umbilicalis
MAKHVHLVYVDEHNTSLTCAECGHGLCNTYVSPDSPVDLTPLKAASSYAHRASASAAKRASPLRGGRRARRGVTTGSRSGPRDGAAAQRAKEHAEAVRTKVLQAIAAHGKWAFGTDPLALWGVKLCTNVACPASYVGRDTNAARNMSKIAIKSMQGRSIYPHIRGYTVSRAPPQEDPVQEVRHAAAIDAGTYEAGYGWTRCSPTSWEPWRRPVVADAPVAEAGTAPTAVPVAAPTVRVEALGVVADGAHDAAAASASGDLATSNVGQMAAASPAPGV

SEQ ID NO: 3640 - protein, 300 aa, Porphyra umbilicalis
MAKHVHVVYFEEHNTSQTCAECGHGLCNTYVSPDSPVDLTPLKAASTYAQRASASAAKRALPLRGGRRARRGVTTGSRSGPRYGAAAQRAKEHAEAVRTKVLQEIAAHVKWAFGTDPLALWGVELCTKVACPATYVGRDTNAARNMSKIAIKSMQGRSVYPHIRGYTVLRTPPQHDPVQAARHAAAIEAGTYEAGYGWTRCSPTSWERWRRPVVADPPVAEAGTAPTAEAVAAPTVRVEALGVVADGVHDAAAASASGYLATSDVDKMAAASPAPAVRHSHSSSSRLERIVVDCSLEGDG

SEQ ID NO: 3641 - protein, 304 aa, Porphyra umbilicalis
MAKHVHVVYVNEHNTSQTCAECVHVLCNTYVSPDSPVDLTPLKAVSSYAHRASVSVSAAKRASPLRGGRRARRGVTTGSRSGPRDGAAAQRAKEHAEAVRTKLLQAIAAHGKWAFGTDPLALWGVKLCTNAACPATYVGRDTNAARNMSKIAIKSMQGRSICPHIRGYTVSRAPPQEDPVQATRHAAAIEAGTYEAGYGWTRCSPTSWQRWRRPVVTDPAVVEAGTAPTAVPVAAPTVRVEALGVVADEAHDAAAASASGDLATSNVGQMAAASPAPAVGRSHSSSSRLERVIVDCSPGSSRGV

SEQ ID NO: 3642 - protein, 491 aa, Mamestra configurata
MSLTCKTCGGSDHTRISSKKCKEYLPPIRKRHLSDAGAELEIYTVKRGFVSSLCPLLESEKKLKLLTEIRRDVRDLSRVYIELGVWLNFYMKTATQLPSKPDVLNFIYAMKGKGPYADAYRVMFGDRKYDDRLRSFVVQEMAKQYETVLHTNISTHAYARLARYFNVKRNDPALYAAFFKKDLPEDNEEMRRVCTIINVDTVGGAKWWSTIHEWLKIQAKLEDFKLFPQPSHGLKHLTYTSRGWHELLRRVDPKSITSYWTRIVDHRRELWSPWLDVDMKKFGCSLQTDGISKTYDRVIAVDPGSRIPVAAVESKRLQFRRITKKYVRSHTLEWKRERIRNKLCRVSEEAEQKAREKLTFPVSSKNTIHVVEYTVFRMTWFDVRQEPYEKHAKLTRLGLDKYLRTAKCEEKIIKEVFDGGGVESTLVLYGAGSKFMNTASFSGRKFKHDSLIKRLRSKRNIDVEVVDEKYTSQACSSCNAKTGVSEDRHES

SEQ ID NO: 3643 - protein, 348 aa, Ammotragus lervia
MLGDKIDHYKTTKTTLNNTPAQYKKEFEWLKEVDSLALANVQQNLRAAYSKFFKQGAGFPKFKKKGIKDSYTTNNQKGSVAVTKNTVKLPKIGHIKVKIHQSVNGLIKSATISRTPSGKYYVSLLIETIVNELPKTHSNIGIDLGLTDFIVLSDGSKVANPKFLSKLQAKLAREQKILAKRRAAAKADQRKLSESRNYQKQRIKVAKVYEQITNSRKDFLHKLSFNLIKNHDVIAIEDLNIKGMVKNRKLAKAISDSSWSAFTTMLTYKADWYGKALVKIDRWYPSSKTCSNCDHLLNKAELPLSVRTWDCPSCLQKNDRDINASINILNQGLLLAKQSKTVGATGLA

SEQ ID NO: 3644 - protein, 384 aa, Ammotragus lervia
MIRGHIIELKPNNVQANHLARACGVARKAYNWALHEWQRQYALDKAYRDACLAAGVEVDTKNLNKPSQAKLRRELNAIKRELFPYMLEVTKCAPQAAIMQLGDAYNNFFKGLAKYPTARKKGRDDRFSLSNDQFAIKGKSIRIPNLGWVRLKEALRFDGKIMSATISKRGGKWFVSVAVEIQKAVIPTKKTGKSVGVDLGITDLLVLSDGTKIKAPKPLQANLKKLRTLNKALSRTKKGSKNREKAKTKLSRLHYKIRCIRQDSLHQITTSLVNEFDVIAIEDLNVKGMVKNRRLSRAISDLGFFEFKRQLIYKATEQGKVVKSVGPFYPSSKTCSNCNHILGKDELTLKMREWLCPNCQVSHDRDLNASINILNNATVILTAA

SEQ ID NO: 3645 - protein, 308 aa, Chlamydomonas eustigma
MRRSHVLRVLNRYVKRRGNPPADAGGHGDVFWFDTFDFRKIKPSRSNFAWSITTDGVGMCTTFEMPPVAMGSALAASYSPSPGDVVIGNDPGRINIYYMVGLYGGNPAVMKLTRKQYYTESGATSARASAGRPTSGASGRHQEALWSEYLKPRWARLRLSLYGGKKRVFANFFNRLSVRLPFPAGGRLVIAYGNAKFAPGGPGEQSVPTTRAYKECASRVATYSTDEFRTSKVHCRDDSTLQLLRGSDRRFSLRGLLYNPDLNKFVSRDLNAALNIRRCLVGPKPAILCREGVTQRLEQHIVKVLRRR

SEQ ID NO: 3646 - protein, 226 aa, Chlamydomonas eustigma
MRPNAWYICLPRELKPEKRKPVFENAAYKACFIDPGVRSFGTFYSPEGVCGKYGEDFTNLHLQSISDKIDRLKSLASKSRFKTARNMRRRCQKLRNKLTNKVTDLHWKTCTFLTTAFQKIFIPKFGVTGMVGHHRVIGCKTARQMLELSHCRFLERLRHSARTKQRTVYIVPEAYTTKTCGRCGVVNENVGGRHIFNCPSCDFKMDRDLHAARNICLSTMSKMRLF

SEQ ID NO: 3647 - protein, 487 aa, Notospermus geniculatus
MKRQRPVLTLWEAAHVKGHSTMWKWWNSIRCRDLTVRDATVGLDLTDFASKKKKSDDKKVMTTFSVGLKPTKNQRLVLEEMLRSSNTAFNMCSYLVEQKEVKPSQFDLQKFVCKAKVQDVDDSYRVPGDDWLYREGGNPHTTIRLTACKMWCANYKSAKTWQKKRNKTGERIELQRRNQVDPYTDSFQVQKLYARFLSDEDLKYASDKSKFRRRYIRLLPQAFGGLRNPKERFLKLKKTTSKLPPIDHDVTVSKLPGGRFVLRIPCEANYTRTATRVPGTENAMCGIDPGGRTFATVFDETNKAAWQVGLVEDKQHLIRPLMDKIDDQRRRLSLAKSRTQTQSGKDAGRCMAKLHYKMANVANTIHATLASHLVTNYGLVSLGDISVRRIVLKDKSGKGKLSKRAKRDLLCWRHSAFRNRLVHRALGTKCSVVLQDESYTSKTCGRCGVKNEKLGGSETFKCSQCQYEVHRDLNGARNILRKTLNIF

SEQ ID NO: 3648 - protein, 233 aa, Notospermus geniculatus
MRVDGKFVLLIPCDANYTRTAKRVPGTENNMCGLDPGGQTFLTVFEETNCCAWQVGLVEDKRYDLGPIHREIDETHRRLTMAKDRRQEEAAKGLRRHLARLHYKITRTIDNIHDQVASYLVTNNGLISLGKIGISDIVRKDNPMSNIGKKVRRDLLTWRHYAFRRRLVHRATGSDCVVVVQDERYTTKTCGRCDMRNEVGASRTFQCKSCGYSVHRDVNGARNILRKTLKLMK

SEQ ID NO: 3649 - protein, 487 aa, Notospermus geniculatus
MKRRRSALTLWEAACVKGHSTMWKWWNSIRRRDLTVRNATVGLDLTDFASMKIKTDDKKVMTMFSVGLKPTKNQRRVLEEMLRSSNAAFNMCSYLVDQKGVKPSQFDLQNFVCKAKAQDVDDSYRVPGDDWLYREGGNPHTTIRLTSCKMWCANFKSVKTWQKKRNKTGEPIELRRRNQVDPYTDSFQVQKLYARFLSDEDLKYASDKSKFRRRYIRLLPQAFGGLRNPKERFLKLKKNTSKLPPIQHDVTVSKLPGGRFVLRIPCEANYTRTATRVPGTENAMCGVDPGGRTFATVFDETNKAAWQVGLVEDKQHLIRPLMDTIDDQRRRLSLAKSRSQTQSEKDVGRCMAKLHYKMANIANTIHATLASHLVTNYGLVSLGDISVRRIVLKDKSGKGKLSKRAKRYLLCWRHSAFRNRLVHRALGTKCSVVLQDESYTSKTCGRCGVKNEKLGGSETFKCSQCQYEVHRDLNGARNILRKTLNIF

SEQ ID NO: 3650 - protein, 503 aa, Notospermus geniculatus
MKRNRPPSLTLWEAANVKGHKNMWHWWRGLRRRPLGTGNGVGLTTDDFQLGISPTDEMGRSVSPKKACNGDPPKVMSTFSVGLKPTGHQRRILQEMIRASNLSYNTCNYLVYDKDLKPTQQVLQKLVCKAKAQDVPDAYRMPGDQWIYDNNNAYTTIRLTACKQYCVNYKSAKTNRRSKRASDEKLRDRNVIDPLSGTIEIQKLYVRKLNENDVRYGRTESGKRFIMKRHLCIIPAAFGSIKTPSERFLKIAKKRVDSIPPIEHDVKIKMRVDGKFVLLIPCDADYTRTAKRVPGTENNMCGLDPGGQTFLTVFEETNCHTWQVGLVEDKRYDLGPIHREIDETHRRLTTAKDRRQEEAAKGLRRHLARLHYKITRTTDNIHEQMASYLVTNNGLISLGKIGISDIVRKDNPMSNIGKKVRRDLLTWRHYAFRRRLVHRATVTDSLVVVQDEAYTSKICGRCDTQNKDLGVSRTFNCKTCGYSVHRDVNGARNILRKTLKLVK

SEQ ID NO: 3651 - protein, 1129 aa, Apophysomyces variabilis
MDRLRQALEKADRIPRGSFEEADKKAGVPKGTIEKQIRSRLSSSHKTGEFWRQCAVDNFDDVLAVVKAEGKQNRPKKKDEDSDNLFRTCTVPLKSVLRPDLDENLKRIFMHTVESTSVQMTDYVSDLATVVRATMLKYVSVSLSLDPASGSVKAELDQTSTGFDIRTVVPKEKLRDESMLVDDYFVPVAPMPDNLSQFLDEMPGRRNNDLLSMFNENHIQFLHGLYFGTKGNVSKEKHYLWMQFHDQTLDNQPVIPDGLCRTSHFYMKQFSTNLKNMWAGSLYNRSMNHLLRVLLRVNLAPRREEKVREIREKAKLAREKEIEQQQVIKYQYRKKAIKRKLKNEKKQLRNLKKQIEQEEEDDILVRLATRAATCAEAIERLENQLLARSESRSNPKSIKVEQMNNRASVTKEEEQQAKILISLGETHIGVFEQIEEELEEEEKEETSEPSRRKLGILQAITKALLQSDKISGHVTVEDVLATSHADDAFSPQEIDTVVNIANALRPYVIRGQIAPCIPLRLNFVVLANALLCSIGYQEFTASICPTISPASVHALPLDAVAMYEMFGSSYAQLDIYKADGSVFTNRDEAIAEKRTVIGSFFNVEAIEKTCKERGLVPRWRITVTPQKTAIIDGNVCEQRRPIESRYEARRKKYYRKKEPYVQEPSIEQQSTPELAKTLDDTKKDVKTLETLKCQHTKLVKEATKLVAGLRSSYQENQAICQKRIRDKRKADKHENVTEKEAAYQQQKLSYEALKAAKLNWSNQQMALNQVHDRLANARRKKYKLEQNRTVGESASKEKSGRCPGCEDGVGRLDLGPLLEDQNNILTFSGTDYGLQVLLTTVPITRQRADFHLQLYNRYSMLGVNNVNDHDDDIDVSPTDMLQLPKPIRITAKLLDETTLARTFRKKRERRKKSNTEVLAAEEQLKEASMEKAMSVQDIIRCQKIGRSCRKTLRDFYHSNRWHKEKVIQDLYKERIYDRVAANERRKIAMEAGPHDSGRRVIPVMAIGTQGTCVGSRLKGHPKREGKWLRARHRRRYKEIKWRTMNGSSRCVNSKCVTFKAGRTTQNRDVQAAVAIGLAAISNLFSAERITLPPFDPSHFDAGISNIADTTVQRCVQSSSESHHIGRCYC

SEQ ID NO: 3652 - protein, 372 aa, Apophysomyces variabilis
MFQQHTFTGWWKKFKSLPEVETASLEAFIKETIDAIESNTFAPEKYTDPKGTRKFTLLPVYSFQMRPITIDNQALARLLFQAGRRDNQTPVNPSETRREYFYLFDMAKIGYPTYESLENEKTMFWDVIRTDGVDVEFVFKKYREPFDPKKKPLTPANLKGKYDNAVIWGVDPGVSSLFVAADGNPSSPHRVRTSTTIEYYSICGYNRANQRRKQYMDAEPEAKKLIDDIPSLKTSELRKLTDSVKYVMQHYETITEFYSRDLSSQNRKKPNEKKWVAHCPNDEQDERNGPIIIAYGNGTFSGSMHGRVAAPTKAIVKELKHQAFRRKSPAYVSVVDEYLTAQICPRCKEKASKETRNARMQMVKKAREYMLC

SEQ ID NO: 3653 - protein, 910 aa, Apophysomyces variabilis
MVLRGDVYQFIGYDNYSTQINLADVFPADYDFGDHKAKHSIVSLPFINADAAVDSNIFTFAQFQNMFYSTVGGIYTEQIPKPWFSINGVLSSLVDPNDDAVASQFQADSLRALYTAANNLYSGSLYPRSLANVIRLLLRVNLAPRRMSKYMQLVKEKAEEKKDRQEQRQDLRSNVQRRRNRSYWTKELKKAYMNGRPDNVVETIQRKIADNLPRKDRTEDQKKSNEEEIKSQKADDEYEAFRLDQAEDDLVNDSEDDEDTAATTSSQAPITSKETSARTIRTLVAIVRMLVESPLIKRTISAKDVADAVHTGTILTITEQQVAAKVANFLKPYTPRRNEPDEPPAKHILTVLPIAALSNVVSTILGMQDRVNKLTIETSNKWALPVKADGIYKIMIDAFDIPTNRQGEFITSGLQARTEKETVFKAFFQMDKIHRMMNRRHLFFRWRLVFVNEWTVRVVGTINRNTPHQVSALQERRNNQRFVEPEIELTLSKAQLQERIDRTQASILGLEQQLKPIQKEIGALEKERMNHSTSAHGRTNSTAYRKLKQTRQQIRSKQNTAIVLQEKLKQARRDRYVLNKAMREVSRKGKGKEKRSASTSRSRKRKRKKQKRSSQATSSAKAKITEGYMPQMLSLVKPLFEKHSIPVCGVDPGIRTIGVSTSTTSAWMIQRIRNFTSNTTTELRHDIYNTWSLRASAVNHHSRSSRHRLRRERAKNAEKEGTEAENRRIEREKRTREVFTQKAYHKYADIERMHFPPDMIFQKAVHFYGHWQPTNSRIRGHARRGLKRLRGVQRRKGLVVIVNEYNTSKTCHWCLKPLQLQKYRGKDGKVRKCNGAVCCVNPNCVTVVNGCSTMNRDGNASKNIALKGVSMIVSSDGSPIPVFNSQYSSNYKLAQQFASQPTPVRLLHGP

SEQ ID NO: 3654 - protein, 230 aa, Apophysomyces variabilis
MKGKFDDALTWGVDPGVASVFVAADGTHDSRHRVRSISTEEYYSLCGFNHASRVREKYNKQEPAIEDVIDKTPSLKTSDLEKLIISIRYCIQHYDIISEFFSRNQSSDSKENICKSCDSKWAPLSANDRPEEKEKPIIIAYGNGAFSGSLKGRKAAPTKAILKELQRKARQRKAPTFVFLIDEYLTSQICPVCQKRNLQNAKEGKDARGQEGSKIHAVLTCSNKSCTTMF

SEQ ID NO: 3655 - protein, 282 aa, Apophysomyces variabilis
MKNIAMRSYHHPRKNFTKLAHYNASKAIMDRMKNEKPKIQQIEKDMPSARTASISQFDRYARFLLLHMSTLHQYYDKRHIDRQQASDEFAERLISSGSKYPTKNTRNQRRHRKQKKKLRKRQNKTKAGTVKRTEISDTEPSCRRLDSSLENRSRISCRRLPNIFASTLKGTRAGISNIIRRKIKENEARGRCKVVDVDEFKTAKIWSGCGAKKLRNVKGSLGQSLHAVVHCEQCKTVWNCDCNASRNIRRVAEHMALNNNNRPSPFQRKNQLPGQTPSKTCK

SEQ ID NO: 3656 - protein, 278 aa, Apophysomyces variabilis
MRMLPANGHEKYSHEIISSSTKEFYHFAHYNASKAIMDRMENEKPKIQQIEKDMPSAKTASISQFDRYARFYCCTCRHYTNTTTASDEFAERLIFGGSKYPTKNTRNQRRHRKQKKKRRKRQNKTKAGTVKRTEISELNRVVVVWTLPWKIEVESVVEGCRIYLRGTRAGISNIIRRKIKENEARGRCKVVDVDEFKTAKIWSGCGAKKLRNVKGSLGQSLHAVVHCEQCKTVWNCDCNASRNIRRVAEHMALNNNNRPSPFQRKNQLPGQTPSKTCK

SEQ ID NO: 3657 - protein, 412 aa, Apophysomyces variabilis
MKAICWDYVVEVIVDGEPHWPTTSVSIVYIRAVNAAKTVLDELSHHIHGPCRPANVPASPGSYVPVLRFILQSFPLAHREAEAASALVGLAGIQDNDQQSITPPRLFSLVPLPSFGWRSVTINGNALQIPSSARRPSNNHESTDKYEANFNLFNQCFDLEKYGFGRDNQQLYCNQTMTDGFSVHFQFSRVKSTQSHSEEQIRLQDLTTDEVAQFYRPVAVDRGIGHLFTASYSHGADQHEIRKCSTAEYYAVTGFYHSGRGHSRFHNYQSRQRAREEVANILLHGGKKTAESAVRSTTSNRRFPRWKKTKVKFDNDGKMPLVVFGSGMFGKGQMNRTLTKLKTLDGVTHHSVLDCKTCGTPWNRDVNAAKNLFEIAVSVWSTGNRPAVFSRPVPDETRTNITVANAGSPTGI

SEQ ID NO: 3658 - protein, 238 aa, Apophysomyces variabilis
MDCRKKEKPKIQQIEKDMPSAKTASISQFDRYARFLLLHMSTLHQYYDRSGRQQASDEFAERLISSGSKYPTKNTRNQRRHRKQKKKRRKRQNKTKAGTVKRTEISDTEPSRRCSDFSLENRSRTSCRRLPNTFARRKIKENEARGLCKVVDIDEFKTSKICSGCGAEKLPNVKGSLGQSLHAIVHCEQCKTVWNRDCNDSRNIRRIAEHMARNNNNRPSPFQRKNQLPGQTPSKTCK

SEQ ID NO: 3659 - protein, 619 aa, Apophysomyces variabilis
MNPKAVCRHCGEHGHKLKTIGKKRKATEVDTEEQKAEKKKGCTSRDALNAKSDAARRQRRNRTIKQEIQVRYGNKVDRFSRKILFQNVVRPDFTGYSDALSAACKTLRDTCTNDIVENLQQTVCGFIIHRLQMLVPDLSKSSASRITYDYLYESIAGDKPAWPSCLENASFDLFLAIVNLRDFLIPLMPQTCTFEALSGQPGVCIPVLRAILEMYEQEHQHNDDEESGNLPRLFLLAPQPSFHFRFVTINAKALRALFQVRNDTDDYEGNVEIFNQVFDLNKYGFRSMNCKTFTNEICTDGFSVVFHFARSAKLNTVELELEDFTTEDINRYYRACGIDPGVRHLYTASYGAGETEHDIRRCWSAEYYCMTGSPQRGQQLQKQKRRQGIDTIESNFPSAKTSDIRKYNGRVDYFFLHKDVLFNFYGPNDRERRFRDHQGRQRADKSSNYSHNDGIPEQPLSVVRSTVNESRRARNWKQSQPNPDNNGKMPLFVFGAGMFGKDKCRYKGHRKAAVNKLWRILKRREARGEVLVVKIDQYLTSQICHKCKTKTLCNVVTEDGIKHHGIQDCKTCRMRWNRDINASKNMFYIAQSMWNGHGRPDAFRRPTQITATNAGPERV

SEQ ID NO: 3660 - protein, 851 aa, Apophysomyces variabilis
MYIIQGKRKDGVEKHQKKRAKIERNQANKNPNAAGPCASCNETGHLTSRSSRRRNHKTNIKEKVKQLLQSDSEMYTRVLPYESVVRQEHADRLRTRIVELSAFVREVICRAQMFVNGYIINHSRSEISVDVFSQNFWYSVCQLVLGKTITNTNPNFPESIRQEWLVYRALYSEIVYPLRGFVGYSHALSAAWPSIAEAYTSHIVDNFYGRISTYSLYKLQRLVPALSTSHARQIVWDFIMEVVANGEPIWPVHAVDLVSVYIVDSVWDILDELQAVIPLPYEQAALATSPGRYIPLLRHILASNNTTQHKQRISLPKLFSLAPLPSFQWRFVTVNSQALSTLASISLPTSNDYDSNLALFNQCFDLDRYGFNRIDSKQVFRNQILTDGFSVHFQFSRAKPVRTTMDEGIQLEDLNIKEVQEYFRPAALDPGVRALFTVSYGYSEESHEIRRCSTAEYYALTGSARRNNQLNKEKQTAGIKEIESKPPSAKTCGSVQYSESRGRFYNYQGRQRARDEIANILINGGKVYDRRRRKKTKRNRKERRRNRKKKKDKRVRGCQERLAGSPKRTEPSHDSNIRRPESSIRSTNTNRRLLQWNKQKVKVDNDGKMPLIAFDLSLLHQRTLQKMKTLDGVTHHGVLGCKNCGTLWDRDVNASKNLYEISLSVWSNGSRPAVFRRARDSQNDANITTSNLPAFDTLHATYPRATKKAWNGFWNARLPNTAHTILWRLYHNSLPYRQRLHELLPARFTSPFCPICGLVESQEHLLWSCPYKQPVWQRLANLFLVSPSHLTSASVFTVDPPPLPLQEHASIDFLTFIACVTMNIWRSHWAFVFDNTPFHPAQVIAKTIQDA

SEQ ID NO: 3661 - protein, 1295 aa, Apophysomyces variabilis
MLPNLNFVGNPGLNMGDAISRSPTKNYEQCMQTVIAGARGRPISKENRSKALQWLQARGIQTVSKLFNTSPLEAALSVAVVRCLGDKQHAVSLRLSDNQTIPANGLLRLIAIAKMYNIRVYLFSTQSKPKVIGNNQSVYNMSLLHEVDSHTGTSRWVPLYIARFTSPKLPGPETTIEKSPFISPAATMKNVVGERRKKKQRAPLGVTEEVIKDELRKEINKRIHLEFSRITRNKNPTRAALEKFKEKFMNRNKTPKGLITSSGSSDHLFKTLKEKYGTKASPSALEQHFKGPDKPVLLWNDMARFFYRNQLKKITDHEIQAASVKDSKRKASDIHGDDSEGDNRSGDEPSEDEEQSDDEDDNHQEYVRVATTTLRKLVRPDIDLDTVLRGDVYQFIGYDNYSTQINLADVFPADYDFGDHKAKHSIVSLPFINADAAVDSNIFTFAQFQNMFYSTVGGIYTEQIPKPWFSINGVLSSLVDPNDDAVASQFQADSLRALYTAANNLYSGSLYPRSLANVIRLLLRVNLAPRRMSKYMQLVKEKAEEKKDRQEQRQDLRSNVQRRRNRSYWTKELKKAYMNGRPDNVVETIQRKIADNLPRKDRTEDQKKSNEEEIKSQKADDEYEAFRLDQAEDDLVNDSEDDEDTAATTSSQAPITSKETSARTIRTLVAIVRMLVESPLIKRTISAKDVADAVHTGTILTITEQQVAAKVANFLKPYTPRRNEPDEPPAKHILTVLPIAALSNVVSTILGMQDRVNKLTIETSNKWALPVKADGIYKIMIDAFDIPTNRQGEFITSGLQARTEKETVFKAFFQMDKIHRMMNRRHLFFRWRLVFVNEWTVRVVGTINRNTPHQVSALQERRNNQRFVEPEIELTLSKAQLQERIDRTQASILGLEQQLKPIQKEIGALEKERMNHSTSAHGRTNSTAYRKLKQTRQQIRSKQNTAIVLQEKLKQARRDRYVLNKAMREVSRKGKGKEKRSASTSRSRKRKRKKQKRSSQATSSAKAKITEGYMPQMLSLLKPLFEKNSIPVCGVDPGIRTTGVSTSTTSAWMIQRIRDFTSNTTTELRHDIYNTWSLRASAVNHHSRSSRHRLRRERAKNAEKEGTEAENRRIEREKRTREVFTQKAYHKYADIERMHFPPDMIFQKAVHFYGHWQPTNSRIRGHARRGLKRLRGVQRRKGLVVIVNEYNTSKTCHWCLKPLQLQKYRGKDGKVRKCNGAVCCVNPNCVTVVNGCSTMNRDGNASKNIALKGVSMIVSSDGSPIPVFNSQYSSNYKLAQQFASQPTPVRLLHGP

SEQ ID NO: 3662 - protein, 521 aa, Apophysomyces variabilis
MIVIPSAVKEYEEAIRNHLTANFEPKTVQYLLVRMSDDKDEAFRWKSTVAEHNRDYVKSCVEFLQQSIGITEIDETKLNAEPHLFLPWFFQVLKRLEQKIFIAEPTAQKYVSPGYIHRMVDKKLPKRLVKSLEVNVRIAIRKRERLSLAKKFARVSETALSNLQEFIKEIGDAIDAGTFKPEKYTDPRGMRRFTMLPVYSTQMRHITMDNQALGRLMCKSGLRDTLAPVKPDEAREVYFKLFDMSKIGYRTIKDLETEKVLFWDKIRTDGTDVEFIFKKYKAPYDPKKKPLTPSDMKGKVREKYNKQEPAIKDLIDKTPSLKTSNLEKLIIAIRYCIQHYDTISEFFSRNQRSYSKENTCKFSDSKWVPLSANDRPEEKEKPIIIAYGNGAFSGSMKGRKAAPTKAILKELQQKARQRKAPTFVFLIDEYLTSKICPVCQKRNLQNAKEGKDARGQEGSKIHAVLTCSNKSCTAMFWNRDSMAASNILHVFLHMRDNANRRPGPLLDWQTHNSIQLEDIMS

SEQ ID NO: 3663 - protein, 1289 aa, Apophysomyces variabilis
MFRLSAMQVPHPQIRENKRKRKRVIQSNISLDKAIEALHDVFQNQLVTIISKELEDKPRKNTAKKARFQSEVEKQAKTNKILQELRTRLEKADRVPRTSLEQADDSINVTRGTIRRTLCFHYPEPASIGKLWRDYAAAHFNDAVAEARARLEEHGEVEEAGSSKEVTVNDDSKEEKEIIRTCSVRLSKILREDLDNQVKQTFLETIAITSEQATNYASELGTAVHATMLKYASGSVVLDAESKQAHYQQDGKTFNVLDVIHEEWIRHPELLNSELAIAVAPMPDNIKNYVKALSKKHNDEFLNLFTEAHLQFLHSDYFGRQSYKAQGKSFWSSLQHQGLKDLPKPPAGLSTVMHFQLKQYATDLQNMWAGGLFHKSINHLLRILLRINLASEREKKIQEITEKKLQEKEKQREESSRTMRRKKEWRRRKIKGRLKQERKSLRRLEKRLGIEMDGNQRANLLQRKKSCVEAIRRLEKQAKEKYRPKKADNQPHQKDEEARGDMDKLAISADISVMDDEGIEETIETAIEEAQDELEEVEIKTLKKEPSRRRLIRIQAITKKLLLSTDIDGNVQASDVSDIWNDNDELQKVEIDIVVKLANALRPYVPKGRLSSAISLRLRFVLLSNAILHATGYSKFTANICPTISPASIHALPLDAASMYEMFGSNSAKFNLYKEDGSTIDNIREARTNKSAVIGSFFDQEKVKHICNTRGLEPRWRITITPHQMAVIDGDVKKGRVIDTSHYEERKKKSKGKRADSASSQFEDKSGLDIANITCSLEDAKQRVKALESAEKQIKNALRQREEVVESRMESYRRSKDVARRKVRDKRKSEKFDIYDSRAKQKQTDIYKDLKAAKLERAKSQSELSKIRSQLADQRRLRYIYQKQLDILKKQQTNKETKPKDDEQEQETKLCKVASWNRPGCEANTEFLDISELHQEVKQDPKKTITFGGTDYGLRTLATTVPVTMERARLHFDLYNRQFGDGQTPVSIPKEMSTLPKPMRITAGYLEEKTLCRSFRKKRERRKKNNPAVISAEKTLSKRSSASATTVEQVLESQAVKRNCRRELRAFYHSNRAEHEKRTQKLYTDRIYDQVAAQERKFIKAAATTQTDGRQKALPIMAIGTQGTGVGLRLKGHLKRGGKWLRKRHRRYVPVSMTNEHRSSQLCVYCFERVERAKARRRKSRQWKTVRVNGASQCVNPCCPAYQSGHATQNRDVQAAVAIGLASASNILSANRSTLTPFDPSIFSAGKPFVPGATNFWCVNSSRKLCEELREPGPVAMTGVIRTYASEEF

SEQ ID NO: 3664 - protein, 237 aa, Apophysomyces variabilis
MLDSLQQTHASGWQIAHYTKVTAAVTQRQSYGTIFTIPGVSEHQLSTITRARTDIVCTENEPKMLRKRGPKLTTGELNVKSVLERCLPRKHTTSMLTSNPTNSRIRGHARRRLKRLRGVQRRKGLVVIVDEYNTSKTCHWCLKPLQLQKYRGKDGKVRKCNGAVCCVNSNCVTVVNGCSTMNRDGNALKNIALKGVSMIVSSDGSPIPVFSSQYSSNYKLAQHFASQPTPVRLLHGP

SEQ ID NO: 3665 - protein, 1289 aa, Apophysomyces variabilis
MFRLSAMQVPHPQIRENKRKRKRVIQSNISLDKAIEALHDVFQNQLVTIISKELEDKPRKNTAKKARFQSEVEKQAKTNKILQELRTRLEKADRVPRTSLEQADDSINVTRGTIRRTLCFHYPEPASIGKLWRDYAAAHFNDAVAEARARLEEHGEVEEAGSSKEVTVNDDSKEEKEIIRTCSVRLSKILREDLDNQVKQTFLETIAITSEQATNYASELGTAVHATMLKYASGSVVLDAESKQAHYQQDGKTFNVLDVIHEEWIRHPEFLNSELAIAVAPMPDNIKNYVKALSKKHNDEFLNLFTEAHLQFLHSDYFGRQSYKAQGKSFWSSLQHQGLKDLPKPPAGLSTVMHFQLKQYATDLQNMWAGGLFHKSINHLLRILLRINLASEREKKIQEITEKKLQEKEKQREESSRTMRRKKEWRRRKIKGRLKQERKSLRRLEKRLGIEMDGNQRANLLQRKKSCVEAIRRLEKQAKEKYRPKKADNQPHQKDEEARGDMDKLAISADISVMDDEGIEETIETAIEEAQDELEEVEIKTLKKEPSRRRLIRIQAITKKLLLSTDIDGNVQASDVSDIWNDNDELQKVEIDIVVKLANALRPYVPKGRLSSAISLRLRFVLLSNAILHATGYSKFTANICPTISPASIHALPLDAASMYEMFGSNSAKFNLYKEDGSTIDNIREARTNKSAVIGSFFDQEKVKHICNTRGLEPRWRITITPHQMAVIDGDVKKGRVIDTSHYEERKKKSKGKRADSASSQFEDKSGLDIANITCSLEDAKQRVKALESAEKQIKNALRQREEVVESRMESYRRSKDVARRKVRDKRKSEKFDIYDSRAKQKQTDIYKDLKAAKLERAKSQSELSKIRSQLADQRRLRYIYQKQLDILKKQQTNKETKPKDDEQEQETKLCKVASWNRPGCEANTEFLDISELHQEVKQDPKKTITFGGTDYGLRTLATTVPVTMERARLHFDLYNRQFGDGQTPVSIPKEMSTLPKPMRITAGYLEEKTLCRSFRKKRERRKKNNPAVISAEKTLSKRSSASATTVEQVLESQAVKRNCRRELRAFYHSNRAEHEKRTQKLYTDRIYDQVAAQERKFIKAAATTQTDGRQKALPIMAIGTQGTGVGLRLKGHLKRGGKWLRKRHRRYVPVSMTNEHRSSQLCVYCFERVERAKARRRKSRQWKTVRVNGASQCVNPCCPAYQSGHATQNRDVQAAVAIGLASASNILSANRSTLTPFDPSIFSAGKPFVPGATNFWCVNSSRKLCEELREPGPVAMTGVIRTYASEEF

SEQ ID NO: 3666 - protein, 1726 aa, Apophysomyces variabilis
MFRLSAMQVPHPQIRENKRKRKRVIQSNISLDKAIEALHDVFQNQLVTIISKELEDKPRKNTAKKARFQSEVEKQAKTNKILQELRTRLEKADRVPRTSLEQADDSINVTRGTIRRTLCFHYPEPASIGKLWRDYAAAHFNDAVAEARARLEEHGEVEEAGSSKEVTVNDDSKEEKEIIRTCSVRLSKILREDLDNQVKQTFLETIAITSEQATNYASELGTAVHATMLKYASGSVVLDAESKQAHYQQDGKTFNVLDVIHEEWIRHPELLNSELAIAVAPMPDNIKNYVKALPKKHNDEFLNLFTEAHLQFLHSDYFGRQSYKAQGKSFWSSLQHQGLKDLPKPPAGLSTVMHFQLKQYATDLQNMWAGGLFHKSINHLLRILLRINLASEREKKIQEITEKKLQEKEKQREESSRTMRRKKEWRRRKIKGRLKQERKSLRRLEKRLGIEMDGNQRANLLQRKKSCVEAIRRLEKQAKEKYRPKKADNQPHQKDEEARGDMDKLAISADISVMDDEEIEETIETAIEEAQDELEEVEIKTLKKEPSRRRLIRIQAITKKLLLSTDIDGNVQASDVSDIWNDNDELQKVEIDIVVKLAKALRPYVPKGRLSSAISLRLRFVLLSNAILHATGYSKFTANICPTISPASIHALPLDAASMYEMFGSNSAKFNLYKEDGSTIDNIREARTNKSAVIGSFFDQEKVKHICNTRGLEPRWRITITPHQMAVIDGDVKKGRVIDTSHYEERKKKSKGKRADSASSQFEDKSGLDIANITCSLEDAKQRVKALESAEKQIKNALRQREEVVESRMESYRRSKDVARRKVRDKRKSEKFDIYDSRAKQKQTDIYKDLKAAKLERAKSQSELSKIRSQLADQRRLRYIYQKQLDILKKQQTNKETKPKNDEQEQETKLCKVASWNRPGCEANTEFLDISELHQEVKQDPKKTITFGGTDYGLRTLATTVPVTMERARLHFDLYNRQFGDGQTPVSIPKEMSTLPKPMRITAGYLEEKTLCRSFRKKRERRKKNNPAVISAEKTLSKRSSASATTVEQVLESQAVKRNCRRELRAFYHSNRAEHEKRTQKLYTDRIYDQVAAQERKFIKAAATTQTDGRQKALPIMAIGTQGTGVGLRLKGHLKRGGKWLRKRHRRYVPVSMTNEHRSSQLCVYCFERVERAKARRRKSRQWKTVRVNGASQCVNPCCPAYQSGHATQNRDVQAAVAIGLASASNILSANRSTLTPFDPSIFSAGKPFVPGATNFWCVNSSRKLCEELREPGPVAMTGVIRTYASGKRNRGLHIVSKKRKVRLEAIAHAIAEAHYDVVTLQEVWMWSDVDYIKNKTGHILPYAQHFYSGTLGSGLVILSRFPIVSSQYHRYTLAGRPLKIFHGDYYVGKGCGSACIDHPDIGLIDVFTTHLHAGYGNTDEYEAHRISESWEIARLVRSSACEGRQTGDFNSTPSSYNYRLLRDHAFMTDSWLEVNSSNSSTDELQRLGITCDSPRNTWSKRVLKQNAHDTELGDRLDYIFYRRTPQLTCIRSCVAMTDFVPNTLMSFSDHFAVHSTFAISPDGKAIGPFAPSLMQLRHPSFSALEPLILHNILELFQKDQLTTRKTAMRLLYGFVSCVLLVLGIYAAIVVVSSIPSLRINHPTALIVTIVCGVLMIVLAAIAPVCLIVGFVFGHAEHRALRQFIAELQLLLEGIQMQGKQLKTVQSAELISLVNRDDTTSLQRLN

SEQ ID NO: 3667 - protein, 651 aa, Apophysomyces variabilis
MPTDFSSSWREFRDKHPQMQQAPNTQLRSSDVLSEACVLLATCYSNNIVENFETRMRSFVEHKLSVAFPSMEKTDIQNIASEYAFERIAGGSPQWPNLIEPDLPLVAIVDKICDDLEALTPKPATQQAISASPGAYIPTLKYILSSYEEEHEIVAVSEKSSSDTTLPRLFSVSPKPSCKWRLVSINAKLLASLLSIREPTQPSEYPRVYFEALDLARFGFNKILSDGFAVNLVFARKQKERVPATEIDLEDFTIDEVEQWFEPWVVDPGLNQIYTAADGSGSQRHQLRRVSTKEYYAMTGSTRRAKQLEKQKDAAGITRIETGLESCKTASSVRGVLRPEFSSIDRPQESGIRPTQNKPHPSTKKWHPKAFQASKKIPLIVCGSAMFGTSGHASRKGKRAALVNTFDEVYTSQVCNSCLQRGLEKVTTSDSVSHHGVVVCKLYRTLWQRDINPAKNMFYITNSVCRGQSRPIEFCRPAKNDIPLRMWFPRNEDLDLYVSNGKFNNLNSHFSNDWSFHLAQPFLVHIIWLTQTISLNNANCYAINSIILVGASAPAGAVKRHDSQCKNHWFGSFRRKSFYSSLNVALCRVMQNQLFPWSLPYLCLKSNPPLAKFVLSLWSVVVVSMLFSCLYIHPAIELSRANMSGIDAVLK

SEQ ID NO: 3668 - protein, 366 aa, Apophysomyces variabilis
MPTGTNLAKQSVSLLQAIVDEEIEKSNQKLSKGRKRKRKSKDKDLTKITANDIKYAKMNIRGMTEDPSAGITFFGTDYGVITMSESVSFPIERFAYHLKLHNRFSALETQDDDTEDDFASDFQKIPKTFKITAKQIDDLSFTRRVGRQREYRKRATEEGKKIAKDNKDILRKFYSEKKSVKKSKRTQDIYTQKAYATIASNERNFLNGSGKKTNILLMMTGSAGTGVCSPIRGHYRRGGKKLRGQHLQQTSVGMTNEFRSSQLCPYGYQVLSHLHKKKDGDIKKNFGTVLCTNSECISVKKGYGSRGWDQNAALNIDLAGTSALFSKHHKPFSEFNPKKASKYLLDNNLLASLMFIPEGCGVGARA

SEQ ID NO: 3669 - protein, 678 aa, Apophysomyces variabilis
MIHNFRYKARYYTDNYHEHIDGQIVPYLTLALGKVNDNLLILCETCLCATFSLHCPQIHVLHVVPLNTEVPERRVGLRHTKSTEEILEDQLRKGFETFTPKAPLHSVVVEAHRDQLQRKVQELSQHTREVIAKTQLFVNQYILDHQVIPPICFTQNFFYRVTQLVLNKSMTTKNNKMPTDLSSSWREFRDKHPQMQQAPNTQLRSSNVLSEACVLLATCYSNNIVENFETRVRSFVEHKLSIAFPNMNKTEIQNIAWEYAFERIAGGSPQWPNLIEPDLPLPATEQAISASPGAYIPTLKYILSSYEEEHKVVAASEKSSSDTTLPRLFSISPKPSCKWRFVSINAKLLASLLSIREPTQPSEYPRVFFEALDLTRFGFNSLGDFTGNGNHPFACRILSDGFAVNLVFARKQKEKVPATEIDLEDFTINEVEQWFEPWAVDPGLNQIYTAADGSGSQRHQKDAAGITRIETGLESCKTASSEKHHQFVECFAQNFPVLTAFYGPGMAEKRFHNYQGVQHAREELVDVLVNGGKKPQESGIRSTQNKPHPSTKKWHPKAFQASKKIPLNAFGSAMFGASGHASRKGKRAALVNTFDEFYTSQVCNSCLQRGLEKVTTSDSVSHHGIVVCKHCRTLWQWDINSAKNMFYIANSVWRGQGRPIEFCRQAKNDIATTNVVSS

SEQ ID NO: 3670 - protein, 1193 aa, Apophysomyces variabilis
MDRLRQALEKADRIPRGSFEEADKKAGVPKGTIEKQIRSRLSSSHKTGEFWRQCAVDNFDDVLAVVKAEGKQNRPKKKGEDSDNLFRTCTVPLKSVLRPDLDENLKRIFMHTVESTSVQMTDYVSDLATVVRATMLKYVSVSLSLDPASGSVKAELDQTSTGFDIRTVVPKEKLRDESMLVDDYFVPVAPMPDNLSQFLDEMPGRRNNDLLSMFNENHIQFLHGLYFGTKGNVSKEKHYLWMQFHDQTLDNQPVIPDGLCRTSHFYMKQFSTNLKNMWAGSLYNRSMNHLLRVLLRVNLAPRREENVREIREKAKLAREKEIEQQQVIKYQYRKKAIKRKLKNEKKQLRNLKKQIEQEEEDDILVRLATRAATCAEAIERLENQLLARSESRSNPKSIKVEQMNNRASVTKEEEQQAKILISLGETHIGVFEQIEEELEEEEKEETSEPSRRKLGILQAITKALLQSDKISGHVTVEDVLATSHADDAFSPQEIDTVVNIANALRPYVIRGQIAPCIPLRLNFVVLANALLCSIGYQEFTASICPTISPASVHALPLDAVAMYEMFGSSYAQLDIYKADGSVFTNRDEAIAEKRTVIGSFFDVEAIEKTCKERGLVPRWRITVTPQKTAIIDGNVCEQRRPIESRYEARRKKYYRKKEPYGQEPSIEQQSTPELAKTLDDTKKDVKTLETLKCQHTKLVKEATKLVAGLRSSYQENQAICQKRIRDKRTADKNENVTEKEAAYQQQKLSYEALKAAKLNWSNQQMALNQVHDRLANARRKKYKLEQLVKAHQKKKGKSPAGRKERKSKGGEDEKMEEADGDEEDTKYKKEKEKKKDKHNDNNDEENEEEDEEEEEDSLCRPQSGRRPGCEDSVGRLDLGPLLEDQNNILTFSGTDYGLQVLSTTVPITRQRADFHLQLYNRYSMLGINNVNDHDDDIDVSPTNMLQLPKPIRITAKSLDEKTLARTFRKKRERRKKSNTEVLAAEEQLKEASMEKAMSVQDIIRCQKIGRSCRKTLRDFYHSNRWHKEKVIQDLYKERIYDRVAANERRKIAMEAGPHDSGRRVIPVMAIGTQGTCVGSRLKGHPKRGGKWLRARHRRRYKEIKWRTMNGSSRCVNSKCVTFKAGRTTQNRDVQAAVAIGLAAISNLFSAERITLPPFDPSHFDAGISNIADTTVQRCVQSSSESHHTGRCYC

SEQ ID NO: 3671 - protein, 515 aa, Apophysomyces variabilis
MSRRLTKLILGLSRKNAKAIAGDYIYELLARGDPHWPFEDELAVSDFDQAQYDPKNEEAEKAKGSFKDLTRLFSLSPSPSTDWRFICVNSKTLQQLTNISHRKDYEDQLAQFYQVFDFHKLGFDSLEQLQNFGNSGRIAFKNVIFTDGYAIDFQFARARKIESVVTDASLSVEDIDGNHIYDNFAPCAIDPGINQVFTASYGCGSEPHEIRRCSTKEYYVYTGSPNRQNKMEKEKKQQGIQDIETSLESGKTAHIEAYDGYLRSIFGNMDVLFQFYGPHRAEARFRGYQGVQTAREEMVNILAFGGKEYNCSRRKRTRSNRKSRKRKRKSRKKHVNKDSEVGNPLHQSLPQPNTSAERSTLKKTKRLPHWRQKKFTVERKVPLIVFGDGMFNNRCNYKGHRKGVVNILWRSLKRREKREELLVLTIDEYLSSQVCHSCRYRSLQKLTTADCVSHHSILVCKNCKMLWDRDVLASKNLFLIAESIWSGQGRPREFARPSLDQYIAVTNTVGPSGDF

SEQ ID NO: 3672 - protein, 535 aa, Apophysomyces variabilis
MASGLQTRVSWLHRRERAKRYWKEWEKDLVETYTEYFVPCTVHHIPPKLTATTKELASVYVPKTIANAKLHIVNNNESSGSATRAKKMAQCVCKKKPVEEMNWESLTLSHEKEAKALYKKHLEKYLSLPYLRQLEEQELPMDKDTEAKDEKDDQEVHEEIMTNQNDDDIFIPIDVLQQCIEFSSFLDRDAEALESKLRAFVLWGFLTDCHYKGKAVPQELIGRIRSRYGINHSRRSISKEAYDRNRREVEWREYIWESMFDLNILQPNQRKAKKGQQPRKTSKRDFNRLKKERDLSKQNRGIYHLRKNPTSIGDITIIRVVGIDPGIWDVASAVDSADGLHTHSLYPTRSTKISQLPRSGSMFTWCKQIQPKIRQKADMQAQVYDKLNEASPKTASVQGFQKYLKTLSKVNAKIHDFSCHYRHRENRILLFRARNITLDQLTNRNFSRRRIGFWPENAWTTITSYDASASTTTKRYYTEHLNVLIKGNLYWNRDINAGLNIRRILIECMMTNDLGSRPTGLKRPSKQQGLEEQGI

SEQ ID NO: 3673 - protein, 1103 aa, Apophysomyces variabilis
MDRLRQALEKADRIPRGSFEEADKKAGVPKGTIEKQIRSRLSSSHKTGEFWRQCAVDNFDDVLAVVKAEGKQNRPKKKDEDSDNLFRTCTVPLKSVLRPDLDENLKRIFMHTVESTSVQMTDYVSDLATVVRATMLKYVSVSLSLDPASGSVKAELDQTSTGFDIRTVVPKEKLRDESMLVDDYFVPVAPMPDNLSQFLDEMPGRRNNDLLSMFNENHIQFLHGLYFGTKGNVSKEKHYLWMQFHDQTLDNQPVIPDGLCRTSHFYMKQFSTNLKNMWAGSLYNRSMNHLLRVLLRVNLAPRREENVREIREKAKLAREKEIEQQQVIKYQYRKKAIKRKLKNEKKQLRNLKKQIEQEEEDDILVRLATRAATCAEAIERLENQLLARSESRSNPKSIKVEQMNNRASVTKEEEQQAKILISLGETHIGVFEQIEEELEEEEKEETSEPSRRKLGILQAITKALLQSDKISGHVTVEDVLATSHADDAFSPQEIDTVVNIANALRPYVIRGQIAPCIPLRLNFVVLANALLCSIGYQEFTASICPTISPASVHALPLDAVAMYEMFGSSYAQLDIYKADGSVFTNRDEAIAEKRTVIGSFFQRKKEPYVQEPSIEQQSTPELAKTLDDTKKDRIRDKRKADKHENVTEKEAAYQQQKLSYEALKAAKLNWSNQQMALNQVHDRLANARRKKYKLEQLVKAHQKKKGKSPAGRKERKSKGGEDEKMEEADGDEEDTKYKKEKEKKKDKHNDNNDEENEEEDEEEEEDSLCRPQSGRRPGCEDSVGRLDLGPLLEDQNNVLTFSGTDYGLQVLSTTVPITRQRADFHLQLYNRYSMLGVNNVNDHDDDIDVSPTNMLQLPKPIRITAKSLDEKTLARTFRKKRERRKKSNTEVLAAEEQLKEASMEKAMSVQDIIRCQKIGRSCRKTLRDFYHSNRWHKEKVIQDLYKERIYDRVAANERRKIAMEAGPHDSGRRVIPVMAIGTQGTCVGSRLKGHPKRGGKWLRARHRRRYKEIKWRTMNGSSRCVNSKCVTFKAGRTTQNRDVQAAVAIGLAAISNLFSAERITLPPFDPSHFDAGISNIADTTVQRCVQSSSESHHTGRCYC

SEQ ID NO: 3674 - protein, 701 aa, Apophysomyces variabilis
MYIIQGKRKDGVEKHQKKRAKIERNQANKNPNAAGPCASCNETGHLTSRSSRCRNHKTNIKEKVKQLLQSDSEMYTRVLPYESVVRQEHADRLRTRIVELSAFVLEVICRAQISRQNNHQYEPKLSRIDQAIVVGYRALYSEIVYQLRVFDGYSHALSAASLSIAEAYTSHIVDNFYGRISTYSLYKLQRLVPIVWDFIMEVVANGEPTWPVHAVDLVSVYIVDSVWDILDELQAVIPLPYKQAALPISPGRYIPLLRHILARYTELHQEAEAASILMTLASNNTTQHKQGISLPKLFLSAPLPSFQWRFVTVNSQALSTLASISLPRNNDHDSNLALFNQYFDLDRYGFNRIDSKQVFRNQIMTDGFSVHFQFSRSKPVRTTIDEAALDPGVRALFTAEYYALTESARRNNQLNKENQTAGIKEIESKFPTAKTCRSVQYSEYLQYFFLHREELFGFYHYGRGRGRFYNYQGRQRARDEIANILINGGKKYDRRRRKKTKRNRKERRRNRKKKKDKRVRERQERLAGNPERTKPSQKRSTNTNRRLPGWKKQKVKVDNDGKMTLIAFGNGMFNQRKTKFKGHPSGVVGKLWSSLKRRERQRQVLVVTVDEYLSSQICHCCHQRTLQKMKILDGVTHHDVLGCKDCGTLWDRDVNASKNLYEISLSVWSNGSRPAVFRRARDSQNDANIITSNVGSFSRRI

SEQ ID NO: 3675 - protein, 882 aa, Apophysomyces variabilis
MLQAVFEWCCSKLTALIPRSYEWNWQGIVCLCKIRKYFQQEAERLKREEVFCKDCGQNGHPNKRYKACPLNARHGKKPVGVKRKLNATEEAEFSAAKKRGRQLKAEETSNPNKSNKPCPSCGGIDHSKSSSKNCRKPSKTKKSVIAEKLNDNHYETFTRKLPTSSVVRQEFREIFQENSVRLSAFLREVIFRAQLLVNSYIIANCDRPVPSYIYTQNFWYSACQLIMGINISNNNPNFPQDLRDHWRAFLDNHPNALYPVRNFSGYSDALSAACVTLATTYSNNVAENFEGRLKFYISRRLTKLILGLSQKNAKAITGDYIYELLARGDPHWPFEDELAVSDFDQAVETICGEFATLMPEWQTNAEKLSAFPGSYIPVLAYILTEYNREHEEAKQKQNAQGEQYDPKNEEAEKAKGSFKDLPRLFSLSPSPSTHWRFICVNSKTLQQLTNISHRKDYEDQLAQFYQVFDFHKLGFDSLEQLQNFGNSGRIAFKNVIFTDGYAIDFQFARARKIESVVTDASLSVEDIDGNHIYDNFAPCAIDPGINQVFTASYGCGSEPHEIRRCSTKEYYVYTGSPNRQNKMEKEKKQQGIQDIETSLESGKTAHIEAYDGYLRSIFGNMDVLFQFYGPHRAEARFRGYQGVQRAREEMVNILAFGGKKYNCSRRKRTRSNRKSRKRKRKSRKKHVNKDSEVGNPLHQSLPQPNTSAERSTLKKTKRLPHWRQKKFTVERKVPLIVFGDGMFNNRCNYKGHRKGVVDILWRSLKRREKREELLVLTIDEYLSSQVCHSCRCRSLQKLTTADCVSHHSILVCKNCKMLWDRDVLGSKNFILDCEVNLVWARKTRRVCLALIRSIYRRYEYGWSLWGLLGFYGGHAGKFTITV

SEQ ID NO: 3676 - protein, 255 aa, Apophysomyces variabilis
MYRSLATDGYAAAFTFSRRRQHLIEDKKLAKTKDFQGDVHRFDLIGVDPGITDAYVASNGHEKYSHEIIIIIQERILPPRPLQRKQSNHGPYINEKPKIQQIEKDMPSAKTVSTSQFDRYARFLLLHMSTLHQYYDRRRIGRLQASDEFAERLISGSSKYPTKNTRNQRRHRKQKKKRGKRQNKTKAGTVKRTEISDTEPSENKWSKATPHPSKSKPLFAFGSAMINSTLKGTRAGNSNIRRKIKEMKPKDDARS

SEQ ID NO: 3677 - protein, 803 aa, Apophysomyces variabilis
MLQAVFEWCCSKLTALIPRSYEWNWQGIVCLCKIRKYFQQEAERLKREEVFCKDCGQNGHPNKRYKACPLNARHGKKPVGVKRKLNATEEAEFSAAKKRGRQLKAEETSNPNKSNKPCPSCGGIDHSKSSSKNCRKPSKTKKSVIAEKLNDNHYETFTRKLPTSSVVRQEFREIFQENSVRLSAFLREVIFRAQLLVNSYIIANCDRPVPSYIYTQNFWYSACQLIMGINISNNNPNFPQDLRDHWRAFLDNHPNALYPVRNFSGYSDALSAACVTLATTYSNNVAENFEGRLKFYISRRLTKLILGLSQENAKAIAGDYMYELLARGDPHWPFEDELAVSDFDQAVETICGEFATLMPEWQTNAEKLSAFPGSYIPVLAYILTEYNREHEEAKQKQNAQGEQYDPKNEEAEKAKGSFKDLPRLFSLSPSPSTHWRFICVNSKTLQQLTNISHRKDYEDQLAQFYQVFDFHKLGFDSLEQLQNFGNSGRIAFKNVIFTDGYAIDFQFARARKIESVVTDASLSVEDIDGNHIYDNFAPCAIDPGINQVFTASYGCGSEPHEIRRCSTKEYYVYTGSPNRQNKMEKEKKQQGIQDIETSLESGKTAHIEAYDGYLRSIFGNMDVLFQFYGPHRAEARFRGYQGVQRAREEMVNILAFGGKKYNCSRRKRTRSNRKSRKRKRKSRKKHVNKDSEVGNPLHQSLPQPNTSAERSTLKKTKRLPHWRQKKFTVERKVPLIVFGDGMFNNRCNYKGHRKGVVNILWRSLKRREKREELLVLTIDEYLSSQLQMQVPTKAYYSRLRFSP

SEQ ID NO: 3678 - protein, 1112 aa, Apophysomyces variabilis
MLPNLNFVGNSGLSIGDAISRSPTKNYEQYMQTVIAGARGRPISKENRKAALSVAVVRCLGDKQHAVSLRLCYNQTIPANGLLRLIAIVKMCNIRVYLFSTQSKPKVIGNNQSDYNMSLLHEVDSHTGTSRWVPLYIARFTSPKLPDPETTIEKSPFISPAATMKNVVGEPGKKKQRAPLGVTEEVIKDELRKEINKRIHLEFSRITRNKEKFMNRNKTPKAASIKDSKRKSSHIHGDDSEGDNRRGDEPSEDKEQSDDEDDNHQEYIRVATTTLRKLVRPDIDLDTVLRGDVYKFIGYDNYSTQINLADAFPADYDFGDHKAKHSIVSLPFINADAAVDANIFSFAQFQNMFYSTVGGIYTEQIPKPWFSINGVLSSLVDPNDDAVASQFQAHSLRALYTAANNLYSGSLYPRSLTNVIRLLLRINLAPRRMSKYMQLVKKKAEEKKDRQEQRKDLRSNVQRRRNRSYWTKELKKAYMNGRPDNVVEAIQRKIADNLPRKDRTEDQKKLNEEEIKTEDDLVNDSEDDEDTATTTSSQAAITSKETSARTIRPLVAIVRMLVESPPPDQTYYKCKRRRGRCSYGYYIDHSRATNGCQSCQLPEPYTPRRNEPDEPPAKHILTVLPIAALSNVVSTILGMQDRVNKLTIETSNKWALPVKADGIYKIMIDAFDIRTNRQGEFITSGLQARTEKETVFKAFFQTDKTHCMMNRRHLFFCWRPVFVNEWTVRVVETINRNKPHQLQERIDRTQASILSLEQQLKLIQKEIGALEKERINHSTSAHGRTNSTAYRKLKQTRQQIRSKQNTAIVLQEKLEQARRDRYVLNKAMREVSKKGKGKEKSSASTGRSRKRKRKKQKRNSQATSYAKAKITEGYMPQMLSLVKPLFEKNSIPVCGVDPGIRITGVSTRAEAEDRRIEREKRTREVFTQKAYYKYADVERMHFPQDMISEKAVHFYGHWQPTNSHIRGHARRGLKRLRGVQRRKGLVVIVNEYNTSKTCHWCLMPLQLQKYRGKDRKVRKCNGAVCCVNPNCVTIVNGCSTMNRDGKASKNIALKGVSMLSQVMEVQSRCSALNTQAITSLHNNLLVNQPRFDFCMAREGQLPSKYKHCSIGE

SEQ ID NO: 3679 - protein, 1193 aa, Apophysomyces variabilis
MDRLRQALEKADRIPRGSFEEADKKAGVPKGTIEKQIRSRLSSSHKTGEFWRQCAVDNFDDVLAVVKAEGKQNRPKKKDEDSDNLFRTCTVPLKSVLRPDLDENLKRIFMHTVESTSVQMTDYVSDLATVVRATMLKYVSVSLSLDPASGSVKAELDQTSTGFDIRTVVPKEKLRDESMLVDDYFVPVAPMPDNLSQFLDEMPGRRNNDLLSMFNENHIQFLHGLYFGTKGNVSKEKHYLWMQFHDQTLDNQPVIPDGLCRTSHFYMKQFSTNLKNMWAGSLYNRSMNHLLRVLLRVNLAPRREEKVREIREKAKLAREKEIEQQQVIKYQYRKKAIKRKLKNEKKQLRNLKKQIEQEEEDDILVRLATRAATCAEAIERLENQLLARSESRSNPKSIKVEQMNNRASVTKEEEQQAKILISLGETHIGVFEQIEEELEEEEKEETSEPSRRKLGILQAITKALLQSDKISGHVTVEDVLATSHADDAFSPQEIDTVVNIANALRPYVIRGQIAPCIPLRLNFVVLANALLCSIGYQEFTASICPTISPASVHALPLDAVAMYEMFGSSYAQLDIYKADGSVFTNRDEAIAEKRTVIGSFFNVEAIEKTCKERGLVPRWRITVTPQKTAIIDGNVCEQRRPIESRYEARRKKYYRKKEPYVQEPSIEQQSTPELAKTLDDTKKDVKTLETLKGQHTKLVKEATKLVAGLRSSYQENQAICQKRIRDKRKADKHENVTEKEAAYQQQKLSYEALKAAKLNWSNQQMALNQVHDRLANARRKKYKLEQLVKAHQKKKGKSPAGRKERKSKGGEDEKMEEADGDEEDTKYKKEKEKKKDKHNDNNDEENEEEDEEEEEDSLCRPQSGRRPGCEDSVGRLDLGPLLEDQNNVLTFSGTDYGLQVLSTTVPITRQRADFHLQLYNRYSMLGVNNVNDHDDDIDVSPTNMLQLPKPIRITAKSLDEKTLARTFRKKRERRKKSNTEVLAAEEQLKEASMEKAMSVQDIIRCQKIGRSCRKTLRDFYHSNRWHKEKVIQDLYKERIYDRVAANERRKIAMEAGPHDSGRRVIPVMAIGTQGTCVGSRLKGHPKRGGKWLRARHRRRYKEIKWRTMNGSSRCVNSKCVTFKAGRTTQNRDVQAAVAIGLAAISNLFSAERITLPPFDPSHFDAGISNIADTTVQRCVQSSSESHHTGRCYC

SEQ ID NO: 3680 - protein, 1390 aa, Apophysomyces variabilis
MNELNAFADNSDVPKICLVFDGDRLSTKRATHAARQAKKNLAWRKARRQTGDSRGLYFAARERLRRKYAKQWASFTPAIKDAIIHELNTRQDTRPYGRNFANEPVRIFIHEALFEADLEVVYLCDSLGEGVQSAIMSRDGDLFAYQGALDVPRITKMNWRHGPQRYNGTVSTKRDLVTAFMGLQTAITDGQAINAQIRFVVLAATCGNDYAKNLRGKSFKRVKAALEQVPQADEADTLLQTLMNNIVHSDEQPIHYGDIRLQNADTNIIESLARSAVAGTTPARHNQRPDYGSRYRLLEPTPELNEGVIEEENTGPHAPKSSKKQTRPAKKGRAGPSRRQAQFIRDAASGEIRDSFPEKITYTEEDTGHHITLYQSSRYVATADAGLYSSVLAAAVHRARRNRPDREGIDEASLIEKVMDKIIDDMSYVRYVGYHIANIAIREAYNLDNDAMLSLYELFFRNGKRTAQDLWRHIFYCATNYQTMGRSEPSLATHQAASEAQYIPQSDILHSDGQLRGHNDDGTNLFKAFTADTAFFYLSRMLKRPLERNVLLKARKLWYQDCSAEMCIAPTPMYMGEMVTEIANGASVDFRKNIVYNFKDCYCDYLRSRLKEVARVPVGWPAPDQGRFDEFIQDIIHSVHDGIQHVAAQERQPRFQYIAEANIHEQDNKFVTNMVNRYKNSIEAFDEDRWRRKVENHATVPPGWPRNRDKLITALFQRIWGMSVDISEAGADQEGFEEYEQDQEEERQATGDIFAGLANDVHTQIEDFITAERNLQVKGIRVSEVNLSECLGENGRQGTNGGNNDEENGYEDDEDDVLHRTYGGKLSRAKAARLIPIMIYFLERREGNSQSFVLCPLQAHHRIAISFNLSFTTTLLARIEHFSRPIIQQLEQKLTASPNDRRIAELARERDNLQNACVRLQGIKSRDPFSALFDIRRQATITRDGGVDVRDRGYMRWLNQRIPGNENKLRFSRRRVFRTDGVRLYCIYNDWLRSRRGNTTCKYLTEIRRTTRETLKDAWQAGSSGDQYDYLQHYDGVVGLDFGELTIKRGYLYGRTIPNRDWLEARKATNNIDNIEAALSEGSPRSTYDRYREIWDNAISQRSCLDKACYLITNQAKRTFDMNHEMDDNRRHVDEPRLVYAFGLDGMSRKSRRRGLAPMYHKIANALYRKINQKNRNKDRQHADVSTRVDEYLTSKVCCRCSKEGQDRRIDFLRRPPTATVQDRARLENGQEKVLRVVQCANCDRTFHGDGNAADNHATIARYMLRFQQRPRWFIRPSRRLEAAGEEEAMVMTGHAGLQHRASGEEVTEVPEIAEPRRHPSEGMAVTTPLEERASGREVAWAREVPGIAEPRRRPSQEAAVTTPTARRRTRASQTETMVEPPRSRRRISR

SEQ ID NO: 3681 - protein, 534 aa, Apophysomyces variabilis
MQFVGYSHALSAACLSVAEAYTSHIVDNFYGRISTYSLYKLQRLVPALSRSHARQIVWDFIMEVVANGEPTWPVRAVDLVSVYIVHSVWDILDELQAVIPLPYEQATLATSPGRYIPLLRHILARYTELHQEAEAASILMTLASNNTTQHKQGISLPKLFSLAPLPSFQWRFVTVNSQALSTLASISLPRTNDYDSNLALFNQCFDLDRYGFNSAKPVRTTMDEGIQLEDLNIEEVQEYFRPAALDPGVRALLTASYGYSEESHEIRRCSTADYYALTGSARRNNQLNKGKQTAGSKEIESKFPTAKSCSSVQYSEYLQYFFLHREELFGFYHSGRGRGRFYNYQGRQPARGEIANILINGGKKYDRRRRKKTKRNRKERRRNRKKKNKRAHERQERLAGSPERTEPSHESNIRRPESSIRSTNTNRRLPRWKKQKVKVDNDGKMALIAFGNVMFNQRKTKFKGHPSGVVEKLWSSLKKTGAATAGSSCQCRRIHIFIDLSLLPSAIFTEDEDFGRRYLPWCSWVQELWHTVGS

SEQ ID NO: 3682 - protein, 218 aa, Apophysomyces variabilis
MTRHQISKRYQRPSKSLGNKLVTFPLQDTSEDKGSIGKGRAKKERKVKAIEKKLSKNNVGNAVDIDSLHNYRKIAVDNRDTLRKFYSEKKSVKKSKHTQDVYTQKAYATVALNERNFLNGSGKKTDILLMMTGSVGTAVRSPIRGHYRRGGKKLREQHLQQTSVGTTNEFRSSQLYRYCYQVLSHPIQPKEASKYLLDDNLLASLTSILEGCGVGARA

SEQ ID NO: 3683 - protein, 271 aa, Apophysomyces variabilis
MFVSPEQLQNFGNSGGIAFKNVIFTYGYAIDFQFARARKTESVVTDVSLSVEDIDGSHIYDNFAPCAIDLGINQVFTASYGCGSEPHEIRRCSTKEYYVYTDIETSLESGKTAHIEAYYGYLRSIFGNMDVLFQFYGPHRAEARFRGYQGVQRAREEMVNILAFGGKNLPQPNTSAELSTLNKIKRLPHWRQKKFTVERNVPLIEFGDGTFNNRCNYKAHRKGVMNILWRSLKRREKREELLVLTIDEYLSSQLQMQVPAQAYHSRLRFSP

SEQ ID NO: 3684 - protein, 495 aa, Apophysomyces variabilis
MPDNIYDFWNQFRERHPAIVFPRNNFTGYSDALSAACKTLRDTSTNDIVENFQQRFCGFIIHRLQMLVPDLSKSSASRITYDYLYESIAGGEPAWPSCLENASFDLFLAIVNLRDFLIPLMPQMCTLEALSERLGVCISVLRVISDMYEQEHQQNDDEESGNLPRLFSLAPQPSFHFRFVTINAKALKALVQVRNDTDAYEGNLEIFNQVFDLNKYGFRRSVTYYLRIIVVFHFARSAKLNTVELELEDFTTEDINRYYRVCGIDPGVRHLYTASYGAGETEHEIRRCSSAEYYCMIGSPQRGQQLLKHKRHQGIDSIENGARKYKYRKRKHRGANRKKRKKNREQQRRRHKKKNTGRIPEQPLSAVRSTVNESRRARSWKQSQPNPDNNRKMPLILKRREARGEVLVVKIDEYLTSQICHKCKTKSLCNMVTADGIKHHGIQDCKTCRMRWNRDINASKNIFYIAQSIWNVHGRPDAFRRPTQITATNAGSERV

SEQ ID NO: 3685 - protein, 1155 aa, Apophysomyces variabilis
MDRLRQALEKADRIPRGSFEEADKKAGVPKGTIEKQIRSRLSSSHKTGEFWRQCAVDNFDDVLAVVKAEGKQNRPKKKDEDSDNLFRTCTVPLKSVLRPDLDENLKRIFMHTVESTSVQMTDYVSDLATVVRATMLKYVSVSLSLDPASGSVKAELDQTSTGFDIRTVVPKEKLRDESMLVDDYFVPVAPMPDNLSQFLDEMPGRRNNDLLSMFNENHIQFLHGLYFGTKGNVSKEKHYLWMQFHDQTLDNQPVIPDGLCRTSHFYMKQFSTNLKNMWAGSLYNRSMNHLLRVLLRVNLAPRREEKVREIREKAKLAREKEIEQQQVIKYQYRKKAIKRKLKNEKKQLRNLKKQIEQEEEDDILVRLATRAATCAEAIERLENQLLARSESRSNPKSIKVEQMNNRASVTKEEEQQAKILISLGETHIGVFEQIEEELEEEEKEETSEPSRRKLGILQAITKALLQSDKISGHVTVEDVLATSHADDAFSPQEIDTVVNIANALRPYVIRGQIAPCIPLRLNFVVLANALLCSIGYQEFTASICPTISPASVHALPLDAVAMYEMFGSSYAQLDIYKADGSVFTNRDEAIAEKRTVIGSFFNVEAIEKTCKERGLVPRWRITVTPQKTAIIDGNVCEQRRPIESRYEARRKKYYRKKEPYVQEPSIEQQSTPELAKTLDDTKKDRIRDKRKADKHENVTEKEAAYQQQKLSYEALKAAKLNWSNQQMALNQVHDRLANARRKKYKLEQLVKAHQKKKGKSPAGRKERKSKGGEDEKMEEADGDEEDTKYKKEKEKKKDKHNDNNDEENEEEDEEEEEDSLCRPQSGRRPGCEDSVGRLDLGPLLEDQNNILTFSGTDYGLQVLSTTVPITRQRADFHLQLYNRYSMLGVNNVNDHDDDIDVSPTDMLQLPKPIRITAKSLDEKTLARTFRKKRERRKKSNTEVLAAEEQLKEASMEKAMSVQDIIRCQKIGRSCRKTLRDFYHSNRWHKEKVIQDLYKERIYDRVAANERRKIAMEAGPHDSGRRVIPVMAIGTQGTCVGSRLKGHPKRGGKWLRARHRRRYKEIKWRTMNGSSRCVNSKCVTFKAGRTTQNRDVQAAVAIGLAAISNLFSAERITLPPFDPSHFDAGISNIADTTVQRCVQSSSESHHTGRCYC

SEQ ID NO: 3686 - protein, 622 aa, Apophysomyces variabilis
MTGSPQRGQQLLKQKRHQGIDTIESNFPSAKTCDIREYNGRVDYFFLHKDVLFNFYGPNDRERRFRDHLGRQRAIVELANILIDGGRKYNHRKRNQRGANRKKRKKNREQRRRHKKKNTGRIPEQPLSAVRSTVNESRRARSWKQSQPNPDNNGKMPLSVFGAGMILKRRKARGEVLVVNIDEHLTSQVCHKCKSKTLCDVVTEDGIKHHGMQDCKTCRMRWNRDINASKNMFYIAQSIWNGHGPPDAFRRPATNAGPERVVTSTPSSPVNMNFFQPRSANTSAPNKKLQEIEASRPWIEKYRPKSMDEIASQEQAVVVLKHALQSENLPHLLFYGPPGTGKTSTILALARELYGPSLVKTRVLELNASDDRGIQVVREKVKNFSRTTANQKVSGYPCPPYKIVVLDEADSMTKDAQSALRRTMETYSKTTRFCIICNYVSRIIDPITSRCAKFRFKSLPVEDLRARIDMICKEENVKLAPGAMEALFAACNGDLRRAIMILQIASNIPQGECITADVINETAGSVPESVTMTIVDAWKSNNHKQIENAVEAIMLQGYSAEFVLNQLHEYIVRSDDLNTLQKSQISEIMGETDFTLVSGADQHLQLLSLVLKIASIANNQAL

SEQ ID NO: 3687 - protein, 317 aa, Apophysomyces variabilis
MLVSLEQLQNFGNSGRIAFKNVIFTDGYAIDFQFARALKTESVVTDVSLSVEDIDGSHIYDNFVPCAIDPGINQVFAASYGCGSEPHEIRRYSTKEYYVYTGSPNRQNKMEKEKEQQGIQNIETSLESGKTAHIETYNGYLRSIFGNMDVLFQFYGPHRAEARFREYEGVQTAREEMVNILAFGGKEYNCSRRKRTRSNRKARKRKRKNRKKQVNKDSEVGNPLHQSLPQPNTSAERSTLNKTKRLPHWRQKKFTVERKVTLIVFGDGMFNNRCNYKGHRKGVVNILWRFLKRREKREELLVLTIDEYLSSQLSWSD

SEQ ID NO: 3688 - protein, 680 aa, Apophysomyces variabilis
MIELRRYRSSKNCRKSSKTKKRVIGEKLNDNHYETFTRKLPASSVLRPEFREFFQENGVGLSAFLREVIFRAQLFVNSYIIANCERPVPSYNYTQNFWNFSGYSDAVSAACVTLATTYSNNAAENFESRLKFYISRRLTKLILLIPKKKAKAIAGGYIYELVARGDHHWPFEEELAVSDFDRAVETICGEFATLMPEWQTNAEKLSASPGSYIPVLAYILTKYNQDHEQAKQKQNAPKNQESEKAKDSFKDLLRLFSLSPSFSTHWRFICVDSKTLQQLTNISHRKDYEDQLAQFYQVFDFHKLGFDSLEQLQNFGSSGRIAFKTITFSDGYAIDFQFARALKTESVVTDVSLSVEDIDGSHIYDNFVPCAIDPGINQVFAASYGCGSEPHEIRRYSTKEYYVYTGSPNRQNKMEKEKEQQGIQNIETSLESGKTAHIETYNGYLRSIFGNMDVLFQFYGPHRAEARFREYEGVQTAREEMVNILAFGGKEYNCSRRKRTRSNRKARKRKRKNRKKQVNKDSEVGNPLHQSLPQPNTSAERSTLNKTKRLPHWRQKKFTVERKVSLIGVMNILWRSLKRREKREELLVLTIDEYLSSQACHSCRCRSLEKLTTADCVSHYSILVCKNCKMLWDRDVLASKNLFWIAESIWSGQGRLREFARPSLDQYTAVTNTVGPTEDF

SEQ ID NO: 3689 - protein, 572 aa, Apophysomyces variabilis
MSDNAYFPNQKEIPPITHQLCYTLFALIAGEAHHADESLENAFATFQETLGNFPESKFKSKGFMTVVSSAAKEYEEAIRNHVCANFKKTVKDRTTMAEYMYNKLCDIDCQWPTSIDKNQGIIDISESLMKLGFEQKIAITEGKPQNHVSTAYVRRMMEELRLPKRFKPLPEAEMTSLESFTKETINAIESNTFAPEKYADPKGTWKFTMLPVYSFQMRHVTVDNQALARLLFQAGRRDNQTPVNPSETRREYYHLFDMAKIGYPTYESLETKRTIFWDVIRTYGVVVEFVFKKYKEPFDPKKKPLTPANLRGKYDNAVIWGVDQEFQATTTEYYSICGYNRANQRRKQYMDAEPEAKKLIDDIPSLKTSELRKLTDSVKYVMQHYEMITEFYSRDLRYNKLKFKSYIGRQKGRAEIAKSLLCDSKKYNMGSSQNRKKPNEKKWVAHCPNEKQDERNGPIIIAYSNGTFSGSMHGWVAAPTKAIVEELKRQAFRRKKYAHVARKKASKNKERPDANGQEGAGIYAVLVCQKESYTAMYWNRDHMAAMNIREVFLYMMSNKDERPSEFRRRAST

SEQ ID NO: 3690 - protein, 202 aa, Apophysomyces variabilis
MLSHDQLYVALSRVTEASNLRKSYIQRQKGRSEVAKILLYGSKKYDQSSKQKEPKRGDSKWVPLSPNDRSDEKSKPIIVAYGNGGFSGSMKGKKAAPTKAVFKELQQQARRRKDEYLTSQICPACHTRDLQKANEENDAQGHKGWTIHAVLTCQKKSCTMMFWNRDTMAATNILDVFLYMRDHNNERPGAFRRPKTTQSIQL

SEQ ID NO: 3691 - protein, 946 aa, Apophysomyces variabilis
MWAGSLYNRSMNHLLRVLLRVNLAPRREEKVREIREKAKLAREKEIKQQQVIKYQYRKKAIKRKLKNEKKQLRNLKKQIEQEEEDDILVRLATRAATCVEAIERLENQLLARSESRSNPESIKVEQMNNRASVTKEEEQQAKILISLGETHIGVFEQIEEELEDEEKEETSEPSRRKLGILQAITKALLQSDKISGHVTVEDVLATSHADDAFSPQEIDTVVNIANALRPYVIRGEIAPCIPLRLNFVVLANALLCSIEYQEFTASICPTISPASVHALPLDAVAMYEMFGSSYAQLDIYKADGSVFTNRDEAIAEKRTVIGSFFNVEAIEKTCKERGLEAAYQQQKLSYEALKAAKLNWSNQQMALNQVHDRLANARRKKYKLEQNRTVGESASKEKSGRRPGCEDSVGRLDLGPLLEDQNNILTFSGTDYGLQVLSTTVPITRQRADFHLQLYNRYSMLGVNNVNDHDDDIDVSPTDMLQLPKPIRITAKSLDETTFARTFRKKRERRKKSNAEILAAEEQLKEASMEKAMSVQDIIRCQEIGRGCRKTLRDFYHSNRWHKEKVIQDLYKERIYDRVAANERRKIAMEAGPHDSGRRVIPVMAIGAQGTCVGSRLKGHPKRGGKWLRARHRRYTPVAMTDEHRSSQTYVFCFQKIIHPKGRRYKETKWRTMNGSSRCVNSKCVTFKAGRTTQNRDVQAAVAIGLAAISNLFSAERITLPPFDPSHFDAGISNIADTTVQGCVQSSSESHHPGCTDVHIPSIVETMTNGSKKSNDRSQPPVSAVRREPASIAGNNVFPDLLFPPKRVGYFVLRHHRLTRKKNGICSHGSFFLVQIYSQHSEFDEVVNFVFLEIFSITRTPDAVCTNFFHVFLKRWLPCKLLQAVEFGSRGFLNCHHECSVSSSSVARLSLLLSMLHSASSRRSTTSSVGKPTFSSSTTVTLLCTV

SEQ ID NO: 3692 - protein, 612 aa, Apophysomyces variabilis
MRSRSCRSSSLCPSHVTSKSEDAKEALWEIALGTISHSEGLGESPLHVLFCCAEFSPMKYGLALTREIELLFSRFVLWRLSNSKPIPHLCFQQDFFYACGQMILGRNITSRQILQQLEFLTDLHTVYKGYERLRTGQDDKPLVGISGDIMHCFASTCAQMAVAASNHVVENYSQRMEKYIKYCLQIELARKALDITTEDIKKLAKFPYDIGAKEQPHYPYSIVPRAEFKTATNTVLQNVNICPENVPVTSTELAAKPRVYVRPLYEILEDLEPLGDTPVRKPMPILFRGWLFRKFSEKLESFKNLSRRKKIILGVDPGITDAYVASNGHEEYSHETISSSLKVCYHLGPLQRKQSNHGTYENEKPKIQQIEKDMPSAKTASISQFDRYARFLLLHMSILHQYYDRRRIGRQQASDEFAECLISGGSKYPTKNTRNQRRHRKQKKKRRIRQNKIKAGTVKRTETSDTEPSENKWSKATPDSMKRKPLFAFGSAMFNSTLKGTGAGISNIIRRKIKENEARGRCKVVDVDEFKTSKICSGCGAEKLRNVKGSLGQSLHVVVHCEQCKTVWNRDCNASRDIRRIAEHMALNNNNRPSPFQRKNQLPGQTPSKTCK

SEQ ID NO: 3693 - protein, 618 aa, Apophysomyces variabilis
MSNERSHKLVLSGRASQKFQSVALKKAKKTGRASKQASSSNTTFIANPCPTCGATEHRSTRAKSCPRHTKSTEEILEDQLGKGFETFTRKAPLHFVVVEAHRDQLQRKVQELSQYTGEVIARTQLFVNQYILDHQVILPICFTQNFFYSVTQPVLNKSMTTKNDKMPTDLSNSWREFRDKHPQMQQAPNTQLRSSDVLSEGCVLLATCYSNNIVENFETRVRSFVEHNLSVAFLSVNKTEIQNIAWEYAFERIAGGSPQWHNLIEADLSLVAIVDKICDDLEALTPKPATQQAISASPGAYIPTLKYIMSSYEEEHEIVAASEKVLVIQLCFVCSRFHQNQVARNLAFARKQKEKVPATEIDLEDFTIDEVEQWFEPWAVDPGLNQIYKAADGSGSQRHQKDSAGITRIETGLESCKTASSEKHHQFVECFAQNFPVLTAFYGPGMAEKHFHNYQGVQRAREELVNVLVNGGKKYCKQRRRKTRKNSRKRKRKTLKRREQEKLKWRSGSETKSMFAASGHASRKGKRAALVNTFDKFYTSQVCNSCLQRGLEKVTTSDSVSHHGVVVCKHCRTLWQWDINSAKNMFYIANSVWRGQGRPIEFCRPAKNDIATTNVVSS

SEQ ID NO: 3694 - protein, 344 aa, Apophysomyces variabilis
MTENRSDDTSLPQLFSISPKPSAPWRFVSINAELMVSLASLRRPQQPSEYCTVFFQVLDLSRLDLTGTYSIEFNPTMLNAIILLYVPSLDDFTQNVNHRFACRILTDGFAVNLLFARRAREGTLDTELELEDFSLDEVNRYFEPWAVDPGHNQVFIAVDGSGSKSHQVRRVSNKEYYAMTGSERRAKTLQKDKDTHGITTIETNMITCKTALSQRHHEFVACFLKKFPSLARFYGPCMAKIRFRNYQGTQRAPEELMNLILHMVSASYVMFGFMERYIQVCHACMRKDLTKVITADGVSHHGISVCKNCHILWQRDVNSAKSMYHIADSVWRGLGRPEEFRRPQ

SEQ ID NO: 3695 - protein, 826 aa, Apophysomyces variabilis
MNHEMDDNRRHVDEPRLVYAFGLDGMSRKSRRGGLAPMDHKIANALYREINQKNRNKDRQHVDVCTRVDEYLTSKVYCRCSKECQDRRIDFLRRPPTATVQDRARLENGQEKVSRYVATADAGLYSSVLAAAVHRARRRNRPDREGIDEASLIQKVMDKIIDDMSYVRYVGYHVANIAIREAYNLDNDAMLSFYELLFRNGKRTAQDLWRHIFYCATNYQTMGRSEPSLATRQAASEAQYIPQSDILHSDGQLCGYNDDGTNLFKAFTADTAFFYLSRMLTTPLDASVDFRKNIVYNFKDRYCDYLRSRLKQVARVPVAAQERQPRFQYVAEANIREQVNKFVTNMVNRYKNSIEAFDEDRDKIISALFQRIWGMSVDISEAGADQEDFEEYEQDQEEERQATGDILAGLANDVHTQIEDFITAERNLQVTGIRVSEVNLSECLGENGRQGTNGGNNDEENGYEDDEDDVLHRTYGGKVSRAKAARLIPFMIYFLERREARRTFDMNHEMDDNRRHVDEPRLVYAFGLDGMSRKSRRGGLAPMDHKIANALYREINQKNRNKDRQHVDVCTRVDEYLTSKVYCRCSKECQDRRIDFLRRPPTATVQDRARLENGQEKVLRVVQCANCDRTFHRDGNAADNQATIARYMLRFQQRPRWFIHPSRRLEAAGEEEAMVMTGRAGLQQRASGGEVTEVPEIAEPRRHPSEGMAVATPPREMAVITPSTETEMAVTTPLEERASGREVAGAREVPGIAEPRRSPSQEAAVIIPTARRRTRASQTETMVEPPRSRRRISRGEEERAESSRAPLRRSERQQAKRQKRIHESYG

SEQ ID NO: 3696 - protein, 421 aa, Apophysomyces variabilis
MHSVIHYLLLPSPRQVLHRFKSSAVRYTRTGHSQMPCLSLAGPTDTGAGPASAFGQDYPSGNKGRIESFDTVKVLQEKLKQARRDRYVLNKAMREVSKKGKGKEKSSASTSRSRKRKRKRQKRSSQAASSAKPKITEGYMPLMLSLVKPLFEKNSIPVCGVDPGIRTTGVSTSTTSAWMTQRIRNFTSNTTTELRHDIYNTWSLRASAVNHHSRSSRHRLRRERAKNAEKEGTEAENRRIEREKRTREVFTQKAYHKYADIERMHFPPRHDFSKAVHFYGHWQPTNSHIRGHARRGLKRLRGVQRRKGFLVIVNEYNTSKTCHWCLKPLQLQKYRGKDGKVRKCNGAVCCVNPNCVTVVNGCSTMNRDGNASKNIALKGVSMIVSSDGSPIPVFSSQYSSNYKLAQQLASQPTPVRLLHGP

SEQ ID NO: 3697 - protein, 702 aa, Apophysomyces variabilis
MDSLLLLSAILVSLGLPPYPPILYTLIKKLHVEIAVPLGIRQREVANAPCQKHMGREKPLMTTLRLRDKRSAEESTRSVQCENHVPTIKEKVQETFASGSETYTRVVAFDSFVRAEHRDQLHRKIIELCSFVREVVCRAQIFVNGYVINTAETEIPVCIFSQNFWYSVCQLVLGKAIWNKNTKFPPSVRIHWDTFSQQHPDIVYPLRGFVGYSDALAAACTTLQIAYTNHIVENFNNHIAAYCIHRFEQLLPELTKAQIKAICWDYVVEVIVDGEPHRPTTLVSTVYIRAVNAAKTVLDELSHRIHSPCRPADLSASPGSYILVLRFILQSFTLAHREAEAASALIGLAGIQDDDQQSITPPRLFSLVPTSFILLSARRPSNNYESTDKYEANFNLFNQCFDLEKYGFGRRDNQQLYRNQIVTDGFSVHFQFSRAKSTQSHSEEQIRLQDLTTDEVAQFYRPVAVDPGIGHLYTASYSHGADQHEIRNVPLRNIMLSLDIKDFESKFPTDKTTENDQYAKYVNYFFMHRDAIFRFYHSGRGHSRFQNYQGRQRAREEGVNILVHGGKKTAESAVRSTTSNRRLPRWKKTKVKFDNDGKIPLVVFGSRMFGKDEYLSSQICNSCHSRTLTKLKTLDGVTHHSVLDRKTCGTLWNRDVNAAKNLFEIAVSVWSTGNRPAVFSRSVPDETRTNITAANAGFPTGI

SEQ ID NO: 3698 - protein, 471 aa, Apophysomyces variabilis
MPTDLSGSWREFRDKHPQMQQAPNTQAFERIAGGSPQWPNLIEPDLSLVAIVDKICDDLEALTPKPATQQAISASPGAYIPTLKYILSSYEEEHKIVAASEKSSSETTLPRLFSISPKPSYKWRFISINAKLLASLLSIREPTQPSEYPRVFFEALDLTRFAFNKILSDGFAVNLVFARKQKERLLATEIDLEDFTVDEVEQWFEPWAVDPGLNQIYTAADGSGSQRHQLRRVSTKEYYAMTGCTRRAKQLEKQKDAAGITRIETGLESCKTASSEQHHQLVECFAQNFPVLTAFYGPGMAEKRFHNYQGVQRAREELVNVLVNGGKKPQESGIRSTQNKPHPSTKKWHPKAFQASKKISLIVFGSAMFGASGHASRKGKRAALVNTCWKMLKRRERRGELIATTIDEFYTSQVCNSCLQRGLENVTTSDSVSHHGVVVCKHCRTLWQRDINSEKTCSTLQTRFGADKVAP

SEQ ID NO: 3699 - protein, 635 aa, Apophysomyces variabilis
MREVKAGTKRTRQPEVQSVALQKAKKTGRASKQASSSNTAFIANPCPACGSTEHRSTRAKSCLRHTKSTEEILEYQLGKDFETFTRKALLHSVVIEAHRDQLQRKVQELSQYRREVTARTQLFVNQYILDHHVIPPICFTQNFFYSITQIVLNKSMTTKNDKIPTDLSSSWREFRDKHPQMQQAPNTQLRSSDVLSEACNMNKTDIQNIAWEYTFERIAGGSSQWPNLIEPDLPLVAIVDKICDDLEALRTNPATQQAISASPGAYIPTLKYILSSYEEEHEIVAASEKTSSDTTLPRLFSISPKTNLLSIREPTQPSEYPGVFFEALDLTSVGFNSLGDFTRNGNHRFACRILSDGFAVNLVFARKQKERVPATKIDLEDFTIDEVEQWFEPWAVDPGLNQIYTAADGSGSQRHQVRRVSTKEYYAMTGSTRRAKQLKKQKDAAGITRIETGLQSSFYGPGMAEKRLHNYQGVQRAREEIVNVLVNGGKKPQESGIRSTQNKLHPSTKKWHPKAFQASKKIPVVVFGSAMFGTSGHASRKGKRAPLVNTFDEFYTSQVCNSCLQRGLDKVTTSDSVSHHGVVVCKHCRTLWQRDINSAKNMFYIVNSVWRGQGRPIEFCRPAKNDIATTNVVSS

SEQ ID NO: 3700 - protein, 309 aa, Apophysomyces variabilis
MREVSKKGKGKEKSSASTSRSRKRKRKRQKRSSQAASSAKAKITEGNMPQMLSLVKPLFEKHSIPVCGVDPGIRTTGVSTKLRHDIYNTWTLRASAVNHHSRSSRHRLRRERAKNAEKEGTEAENRRIEREKRTREVFTQKAYHKYTDIERMHFSPYMIFQKAVHFYGHWQPTNSRIRGHARRGLKRLRGVQRRKGLVVIVNEYNTSKTCHWCLMPLQLQKYRGKDGKVRKCNGAVCCVNPNCVTVVNGCSTMNRDGNASKNIALKGVSMIVSSDGNPIPVFSSQYSSNYKLAQQFASQPTPVRLLHGP

SEQ ID NO: 3701 - protein, 722 aa, Apophysomyces variabilis
MSPTCLFFFTCRFRTLLIEKVMDKIIDYMSHVLYVGYHIANIAIREAYNLGNDAMLSFYELFLRNGKRMAQDLWRHIFYCSDILHSDGQLRGHNDDRMNLFTAFTADTAFFYLSRMLTILLERNVLLKARKLWYQDCSAEMCKAPTPIYMGEMVTEIANDASVDFRKNIQLVGLLQIKEDLMNSFIIHFVHDGIQHGAAQERQLRFQYIAEANIREQVNKFVTNMVNRYKNSNEAFDGDIDKLITALFQRIWGMSVDISEAGADQEDFEEYEQNQEEERQIEDFITAERNLQVKGIRVSEVNLSECLGENGTQRTNGGNNDEENGDEDDEDDVLHRTYGGKLSRAKAARLIPFMVYFLERREAGPNDRRIAELTRERDNLQNACFGLDFGEVCAAASVFRPREPGLYGSQLTIKRGYLYGRTIPNRDWLEARKAANNIDDIEAALSEGSPRSTMTDIGSTCDNSRQTRMVFGYGSFTPTDLSACYLITNQARRTFDMNHEMVDNRRHVDEPHLVYAFGLDGTSRKSRRGGLAFMDHKIANALYRKINQKNRNKDRQHADVCTRVDEYLTCKVCCRCSKEGQDRRIDFLRRPPTATVQDRARLENGQEKVLRVVQCANCDRTFHRDGNAADNQATIARDMLRFQQRPRWFVRPSRRLEAAGEKEAMVMTGRAGLQQRASGGEVTEVPEIAEPRRHPSEEAAVITPTARRRTRASQTETMVEPP

SEQ ID NO: 3702 - protein, 562 aa, Apophysomyces variabilis
MDNLSFDINSLIWAFFMISLNEFSAKEAIGTETRRDRLSPRLYEGRISYLKLTIARQLVCGYCGRSGHRDRRSYKCPLKEKKVGVKRKHQSDVQAESSKMAKERGRQRKQESAAKTPSTPRPCPGCDSTEHRNTRAKSCTAHKQSTNELLEAALGKNPEFYTCKITFDAVVLLGRSITTKNDNMPIDLEKSWQAFTHIHPVLLNPPRTTLRASDVLTEACVLLATSYSNNIVENFESRICSFVQYRLRGSHKKEAMDMASKYVFERIGGALTDSLCDDLEALVPKPASQETISASPGSYLPVLKYILSYYEEEHQRTVTENRSDDTSLPRLFPISPKPSAQWRFVSINAELMASLASLRRPQQPSDLDNFTQNANQRFACRILTDGFAVNLLFARRAREGTPDTELELEDFSLDEVNRYFEPWAVDPGHNQVFIAVDGSGSKSHQVRRVSNKEYYAMTWSERRAKTLQKDKDTHDEFYTSQVSAPYVMFGFMERYIQVCHACMRRDLSKVVTADGISHHGISVCKNCHILWQRDVNSAKSMYHIADSVWRGLGRPEEFRRPQ

SEQ ID NO: 3703 - protein, 1289 aa, Apophysomyces variabilis
MFRLSAMQVPHPQIRENKRKRKRVIQSNISLDKAIEALHDVFQNQLVTIISKELEDKPRKNTAKKARFQSEVEKQAKTNKILQELRTRLEKADRVPRTSLEQADDSINVTRGTIRRTLCFHYPEPASIGKLWRDYAAAHFNDAVAEARARLEEHGEVEEAGSSKEVTVNDDSKEEKEIIRTCSVRLSKILREDLDNQVKQTFLETIAITSEQATNYASELGTAVHATMLKYASGSVVLDAESKQAHYQQDGKTFNVLDVIHEEWIRHPELLNSELAIAVAPMPDNIKNYVKALPKKHNDEFLNLFTEAHLQFLHSDYFGRQSYKAQGKSFWSSLQHQGLKDLPKPPAGLSTVMHFQLKQYATDLQNMWAGGLFHKSINHLLRILLRINLASEREKKIQEITEKKLQEKEKQREESSRTMRRKKEWRRRKIKGRLKQERKSLRRLEKRLGIEMDGNQRANLLQRKKSCVEAIRRLEKQAKEKYRPKKADNQPHQKDEEARGDMDKLAISADISVMDDEGIEETIETAIEEAQDELEEVEIKTLKKEPSRRRLIRIQAITKKLLLSTDIDGNVQASDVSDIWNDNDELQKVEIDIVVKLANALRPYVPKGRLSSAISLRLRFVLLSNAILHATGYSKFTANICPTISPASIHALPLDAASMYEMFGSNSAKFNLYKEDGSTIDNIREARTNKSAVIGSFFDQEKVKHICNTRGLEPRWRITITPHQMAVIDGDVKKGRVIDTSHYEERKKKSKGKRADSASSQFEDKSGLDIANITCSLEDAKQRVKALESAEKQIKNALRQREEVVESRMESYRRSKDVARRKVRDKRKSEKFDIYDSRAKQKQTDIYKDLKAAKLERAKSQSELSKIRSQLADQRRLRYIYQKQLDILKKQQTNKETKPKDDEQEQETKLCKVASWNRPGCEANTEFLDISELHQEVKQDPKKTITFGGTDYGLRTLATTVPVTMERARLHFDLYNRQFGDGQTPVSIPKEMSTLPKPMRITAGYLEEKTLCRSFRKKRERRKKNNPAVISAEKTLSKRSSASATTVEQVLESQAVKRNCRRELRAFYHSNRAEHEKRTQKLYTDRIYDQVAAQERKFIKAAATTQTDGRQKALPIMAIGTQGTGVGLRLKGHLKRGGKWLRKRHRRYVPVSMTNEHRSSQLCVYCFERVERAKARRRKSRQWKTVRVNGASQCVNPCCPAYQSGHATQNRDVQAAVAIGLASASNILSANRSTLTPFDPSIFSAGKPFVPGATNFWCVNSSRKLCEELREPGPVAMTGVIRTYASEEF

SEQ ID NO: 3704 - protein, 1295 aa, Apophysomyces variabilis
MLPNLNFVGNPGLNMGDAISRSPTKNYEQCMQTVIAGARGRPISKENRSKALQWLQARGIQTVSKLFNTSPLEAALSVAVVRCLGDKQHAVSLRLSDNQTIPANGLLRLIAIAKMYNIRVYLFSTQSKPKVIGNNQSVYNMSLLHEVDSHTGTSRWVPLYIARFTSPKLPGPETTIEKSPFISPAATMKNVVGERRKKKQRAPLGVTEEVIKDELRKEINKRIHLEFSRITRNKNPTRAALEKFKEKFMNRNKTPKGLITSSGSSDHLFKTLKEKYGTKASPSALEQHFKGPDKPVLLWNDMARFFYRNQLKKITDHEIQAASVKDSKRKASDIHGDDSEGDNRSGDEPSEDEEQSDDEDDNHQEYVRVATTTLRKLVRPDIDLDTVLRGDVYQFIGYDNYSTQINLADVFPADYDFGDHKAKHSIVSLPFINADAAVDSNIFTFAQFQNMFYSTVGGIYTEQMYVLHLYINGVLSSLVDPNDDAVASQFQADSLRALYTAANNLYSGSLYPRSLANVIRLLLRVNLAPRRMSKYMQLVKEKAEEKKDRQEQRQDLRSNVQRRRNRSYWTKELKKAYMNGRPDNVVETIQRKIADNLPRKDRTEDQKKSNEEEIKSQKADDEYEAFRLDQAEDDLVNDSEGDEDTAATTSSQAPITSKETSARTIRTLVAIVRMLVESPLIKRTISAKDVADAVHTGTILTITEQQVAAKVANFLKPYTPRRNEPDEPPAKHILTVLPIAALSNVVSTILGMQDRVNKLTIETSNKWALPVKADGIYKIMIDAFDIPTNRQGEFITSGLQARTEKETVFKAFFQMDKIHRMMNRRHLFFRWRLVFVNEWTVRVVGTINRNTPHQVSALQERRNNQRFVEPEIELTLSKAQLQERIDRTQASILGLEQQLKPIQKEIGALEKERMNHSTSAHGRTNSTAYRKLKQTRQQIRSKQNTAIVLQEKLKQARRDRYVLNKAMREVSRKGKGKEKRSASTSRSRKRKRKKQKRSSQATSSAKAKITEGYMPQMLSLLKPLFEKNSIPVCGVDPGIRTTGVSTSTTSAWMIQRIRDFTSNTTTELRHDIYNTGSLRASAVNHHSRSSRYRLRRERAKNAEKEGTEAENRRIEREKRTREVFTQKAYHKYADIERMHFPPDMIFQKAVHFYGHWQPTNSRIRGHARRGLKRLRGVQRRKGLVVIVNEYNTSKTCHWCLKPLQLQKYRGKDGKVRKCNGAVCCVNPNCVTVVNGCSTMNRDGNASKNIALKGVSMIVSSDGSPIPVFNSQYSSNYKLAQQFASQPTPVRLLHGP

SEQ ID NO: 3705 - protein, 611 aa, Apophysomyces variabilis
MFVNGYIINHSRSEISVYVFSQNFWYSVCQLVLGKTITNTNPNFPESIKQEWLVYRALYSEIVYPLRGFVGYSHALSAACFSIAEAYTSHIVDNFYGRISTYSLYKLQRLVPYEPCSTDCLDFIMEVVANGEPKWPVHAVDLVSVYIVDSVWDILDELQAVIPLSYEQAALATSPGRYIPLLRHILARYTELHQEAEAASILMALASNNTTQHKQGISLPKLFSLAPLPAFQWRFVTVNSQALSTLASISLPRNNDYDSNLALFNQCFDLDRYGFNRIDFKQLGQPWMKGIQLEDLNIEEVQEYFRPAALDPGVRALFTASYGYSEETHAIRRCSTAKYYALTGSARRNNQLNKAKQTTGIKEIESKFPTAKTCSSVQYSEGLGRFYNYQGRQRARDEIANILINNGKKKDKRVRERQERLAGSPERTEPSHERRPESSIRSTNTNRRLPRWKKQKAKVDNDGKMPLIAFGNGMFNQRKTKFKGHPSGVVGKLWSSLKRRERQRQVLVVTVDEYLSSQVCHSCHQRTLQKMKTLDGVTHHGVLGCKNCGTLWDRDVNASKNLYEISLSVWSNGSRPAIFYRARDSQNDANITTSNVGSFSRRIYIVTLVGK

SEQ ID NO: 3706 - protein, 318 aa, Apophysomyces variabilis
MAYRKLKQTRQQIRSKQNTAIVLQEKLKQARRDRYVLNKAMREMLSVVKPLFEKNSIPVCGVDPGIRTNGVSTSTTSAWIIQRIRDFTSNTTTELRHDIYNTWSLRASAVNRHSRSNRHRLRRERAKNTEKEGTGAENRRIEREKRTREMFTQKAYHKYADVERMHFPQDMVSEKAVHFYGHWQPTSCYIRGHACRGLNRLRGVQRRKGLVVIVKEYNTSKTCHWCLKPLHCLLRDPNCVSVVNGCCTMNPDVECVEEHFTQRRIHDRITNGILIPVFSSQYQAIRSLHSNLLVNQPHFDFCMAREGQLPSKYKHCSE

SEQ ID NO: 3707 - protein, 1274 aa, Apophysomyces variabilis
MNEIQLPTPRGSARRKRKRQTEPQISYDQAKNTLLGVLLQKLKSTIANELWKNETKNSRKTKKGKQSAKTKGKRLKAQEKRMNRLRQALEKADRIPRGSFEEADKKAGVPKGTIEKQIRSRLSSSHKTGEFWRQCAVDNFDDVLAVVKAEGKQNRPKKKDEDSDNLFRTCTVPLKSVLRPDLDENLKRIFMHTVESTSVQMTDYVSDLATVVRATMLKYVSVSLSLDPASGSVKAELDQTSTGFDIRTVVPKEKLRDESMLVDDYFVPVARMPDNLSQFLDEMPGRRNNDLLSMFNENHIQFLHGLYFGTKGNVSKEKHYLWMQFHDQTLDNQPVIPDGLCRTSHFYMKQFSTNLKNMWAGSLYNRSMNHLLRVLLRVNLAPRREEKVREIREKAKLAREKEIEQQQVIKYQYRKKAIKRKLKNEKKQLRNLKKQIEQEEEDDILVRLATRAATCAEAIERLENQLLARSESRSNPKSIKVEQMNNRASVTKEEEQQAKILISLGETHIGVFEQIEEELEEEEKEETSEPSRRKLGILQAITKALLQSDKISGHVTVEDVLATSHADDAFSPQEIDTVVNIANALRPYVIRGQIAPCIPLRLNFVVLANALLCSIGYQEFTASICPTISPASVHALPLDAVAMYEMFGSSYAQLDIYKADGSVFTNRDEAIAEKRTVIGSFFNVEAIEKTCKERGLVPRWRITVTPQKTAIIDGNVCEQRRPIESRYEARRKKYYRKKEPYVQEPSIEQQSTPELAKTLDDTKKDVKTLETLKCQHTKLVKEATKLVAGLRSSYQENQAICQKRIRDKRKADKHENVTEKEAAYQQQKLSYEALKAAKLNWSNQQMALNQVHDRLANARRKKYKLEQLVKAHQKKKGKSPAGRKERKSKGGEDEKMEEADGDEEDTKYKKEKEKKKDKHNDNNDEENEEEDEEEEEDSLCRPQSGRRPGCEDSVGRLDLGPLLEDQNNVLTFSGTDYGLQVLSTTVPITRQRADFHLQLYNRYSMLGVNNVNDHDDDIDVSPTDMLQLPKPIRITAKSLDEKTLARTFRKKRERRKKSNTEVLAAEEQLKEASMEKAMSVQDIIRCQKIGRSCRKTLRDFYHSNRWHKEKVIQDLYKERIYDRVAANERRKIAMEAGPHDSGRRVIPVMAIGTQGTCVGSRLKGHPKRGGKWLRARHRRRYKEIKWRTMNGSSRCVNSKCVTFKAGRTTQNRDVQAAVAIGLAAISNLFSAERITLPPFDPSHFDAGISNIADTTVQRCVQSSSESHHTGRCYC

SEQ ID NO: 3708 - protein, 271 aa, Apophysomyces variabilis
MLPGIVMKNMAMRSYHHPRKNFTTSPHYNASKAIIDRMKNEKPKIQQIEKDMPSAKTASISQFDRYGRFLLLHMSTLHEYYDSRYASLRFWRHIGRQQASDEVAERLISGGSKYPTKNTRNQRRHHALSLTWTSRRRLDSSWKIEVEPVVEGCRIHLRGTRAGISNIIRRKIKENEARGRCKVVDVDEFKTSKICSGCGAKKLRNVKGSLGQSMYAVLHCEQYKTVWNRDCNARRNTRRIAEHMALNHNNRPSPFQRKNQLPGQTPSKTCK

SEQ ID NO: 3709 - protein, 504 aa, Apophysomyces variabilis
MGINISNNSSNFPQDLRDHWRTFLDNHPNALYPVRNISGYSDAFSATCVTLAITYSNNVAENFESRLKFYISRRLAKLIPGLSQKIAKAIAGDYIYELLARGDPHWPFEDALAVSDFDQAVEAIFIFTDGYAIDFQFASARKTESVVTEVRLSVENIDGSHIYDNFAPCAIDPGINQVFTASYGCGSEPHEISEMLNQRNYVYTGSPNRQNKMEKEKKQQGIQDIETSLESGKAAHIEAYDGYLRSIFGNMDLFFQFYGPCRAEARFRGYQGVQRAREEMVNILAFGEKPGKGSEKIGKKQVNKDPEVGNPLHQSLPQPNTSAERSSTLNKTKCLPHWKQKKFTIERKVPLIVCGDGMFNNRCNYKGYRKGIMNILWRSLKRRESREELLVPTIDEYLSSQVCHSCRCRSLQKLTTADCVSHHSILVCKNCKMLWDRDVLASKNFILDCEVNLVWARKTRRVCLALIRSIYRRYEYGWSLWGLLGFYGGHTGKFTITFFTEDTH

SEQ ID NO: 3710 - protein, 560 aa, Apophysomyces variabilis
MKPCLLNPTTTFEVLCNVKDNNMDGFDVFGPDGKTITTLPDARHNPDYHGLKFDHVIKVSPHHTAAIQGIVLDSRELVRSRYDKRKKSTRASASAIKKAQESSVVAAIEISIKESTSSMKKIEAKIKDCTGNIQSLSDQIDTKKRSKYDTSSAIADRQILKKERQQKNRKLLSECKKLQDLRHQKFIAINDNIQQQLRKEEEKRAKERKKSKKPKEDKESMTKVTSKHYKHEDDASKMDLSGLADNQAENILFSGTDYGFVTMSETVALPMERLNYHLKLYNRFTALESEEAASSDNTEGSEEKKSDDDDGSWEFQKIAKPFKIKAKYIENISFTRRVAKQREYRKRATEQGRRVKEIENRLKENSVKFATSMKDLTNYRKVAMDGRSDLREFYMQKKSVRKWKRTQQIYTQKAYSKIASAERQHLKKSGKDKDILIMCTGDAGTTMSFEVRRHVPTVCSRLHTIRRGKQISASQIMVSVTCTNCECPSVKMGYATRGRDTNAAVNIALAGSTRMLSSSYRPLPVFCRQKNARAYDLDMKMLNSFLAISDGVRKECLRQQ

SEQ ID NO: 3711 - protein, 730 aa, Apophysomyces variabilis
MLQAVFEWCCSKLTALIPRSYEWNWQGIVCLCKIRKYFQQEAERLKREEGKVIFRAQLLVNSYIIANCDRPVPSYIYTQNFWYSACQLIMGINISNNNPNFPQDLRDHWRAFLDNHPNALYPVRNFSGYSDALSAACVTLATTYSNNVAENFEGRLKFYISRRLTKLILGLSQKNAKAIAGDYIYELLARGDPHWPFEDELAVSDFDQAVETICGEFATLMPEWQTNAEKLSAFPGSYIPVLAYILTEYNREHEEAKQKQNAQGEQYDPKNEEAEKAKGSFKDLPRLFSLSPSPSTHWRFICVNSKTLQQLTNISHRKDYEDQLAQFYQVFDFHKLGFDSLEQLQNFGNSGRIAFKNVIFTDGYAIDFQFARARKIESVVTDASLSVEDIDGNHIYDNFAPCAIDPGINQVFTASYGCGSEPHEIRRCSTKEYYVYTGSPNRQNKMEKEKKQQGIQDIETSLESGKTAHIEAYDGYLRSIFGNMDVLFQFYGPHRAEARFRGYQGVQRAREEMVNILAFGGKKYNCSRRKRTRSNRKSRKRKRKSRKKQVNKDSEVGNPLHQSLPQPNTSAERSTLKKTKRLPHWRQKKFTVERKVPLIVFGDGMFNNRCNYKGHRKGVVNILWRSLKRREKREELLVLTIDEYLSSQVCHSCRYRSLQKLTTADCVSHHSILVCKNCKMLWDRDVLASKSLFLIAESIWSGQGRPREFARPSLDQYTAVTNTVGPSGDF

SEQ ID NO: 3712 - protein, 267 aa, Apophysomyces variabilis
MDIREMTEDPSTGITFSGTDYGVITMSESASLPIERFACDLKLHNRFSALETQDDETEDDLASDFQKIPKTFKITAKQIDDLSFTRRVRRQREYRKRATKEGKKVKAIEKKLSKNNVGNAVDIDSLHNYRKIAIDNRDILRKFYLEKKSVKKSKHTQDIYTQKAYATVASNERNFLNRSGKKTNVLLMMTGSAGTGVCSSIRGHYRRGGKKLREQHLQQTSVGITNEFCSSQLCPYGYQLLSHPEQEKRWRYQEKLWHSLIYKFRMH

SEQ ID NO: 3713 - protein, 705 aa, Apophysomyces variabilis
MDNLSFDINSLIWAFFMLSLNAFSAKEVIGTETRRDRLSPRLYEDRISYLKPTIARQLVCGYCGRSGHRDRRSYKCPLKEKKVGVKRKHQCDVQAESSKMAKERGRQRKQQTASKTSSTPRPSPGCGSTEHRNTRAKSCTAHKQSTNELLEAALGKNPEFYTRTITFDAVVREEYRDQVRTKIEELSSYLRLVVTRTQLFVNQYIIDHDVIPAICFTQNFFYSIMQLVLGRSITTKNDNMPIDLEKPWQAFTHIHPVLLNPPRTTLRASDVLTEACVLLATSYSNNIVENFESRTCSFVQYRLTSWFPTLSKKEALDMASKYVFERIGGGTPEWPDGIEPTLPLVALTDGLCDDLEALVPKPASQETISASPGSYLPVLKYILSYYEEEHQRAMTENRSDDTSLPRLFSISPKPSAQWRFVSINAELMASLASLRRPQQPSDLDDFTQNFNQRFACRILTDGFAVNLLFARRAREGTPDTELELEDFSLDEMNRYFEPWPVDPGHNQVFIAVDGSGSKSHQVRRVSNKEYYAMTGSERRAKRLQKDKDTHGITTIETNMIACKTALSQRHHEFVACFLEKFPSLARFYGPCMAKIRFRNYQGTQRAPEELANILVNGDEFYTSQVSASYVMFGFMERYIQVCHAWMRRDLSKVVTADGISHHGISVCKNCHILWQRDVNSAKSMYHIADSVWRGLGRPEEFRRPQ

SEQ ID NO: 3714 - protein, 867 aa, Apophysomyces variabilis
MLQAVFEWCCSKLTALIPRSYEWNWQGIVCLCKIRKYFQQEAERLKREEVFCKDCGQNGHPNKRYKACPLNARHGKKPVGVKRKLNATEEAEFSAAKKRGRQLKAEETSNPNKSNKPCPSCGGIDHSKSSSKNCRKPSKTKKSVIAEKLNDNHYETFTRKLPTSSVVRQEFREIFQENSVRLSAFLREVIFRAQLLVNSYIIANCDRPVPSYIYTQNFWYSACQLIMGINISNNNPNFPQDLRDHWRAFLDNHPNALYPVRNFSGYSDALSAACVTLATTYSNNVAENFEGRLKFYISRRLTKLILGLSQKNAKAIAGDYIYELLARGDPHWPFEDELAVSDFDQAVETICGEFATLMPEWQTNAEKLSAFPGSYIPVLAYILTEYNREHEEAKQKQNAQGEQYDPKNEEAEKAKGSFKDLPRLFSLSPSPSTHWRFICVNSKTLQQLTNISHRKDYEDQLAQFYQVFDFHKLGFDSLEQLQNFGNSGRIAFKNVIFTDGYAIDFQFARARKIESVVTDASLSVEDIDGNHIYDNFAPCAIDPGINQVFTASYGCGSEPHEIRRCSTKEYYVYTGSPNRQNKMEKEKKQQGIQDIETSLESGKTAHIEAYDGYLRSIFGNMDVLFQFYGPHRAEARFRGYQGVQRAREEMVNILAFGGKKYNCSRRKRTRSNRKSRKRKRKSRKKQVNKDSEVGNPLHQSLPQPNTSAERSTLKKTKRLPHWRQKKFTVERKVPLIVFGDGMFNNRCNYKGHRKGVVNILWRSLKRREKREELLVLTIDEYLSSQVCHSCRYRSLQKLTTADCVSHHSILVCKNCKMLWDRDVLASKNLFLIAESIWSGQGRPREFARPSLDQYTAVTNTVGPSGDF

SEQ ID NO: 3715 - protein, 544 aa, Apophysomyces variabilis
MPDNIYDFWNQFRERHPAIVFPRNNFTGYSDALSAACKTLRDTSTNDIVENFQQRFCGFIIHRLQMLVPDLSKSSASRITYDYLYESIAGVEPAWPSCLENASFDLFLAVVNLRDFLIPLMPQTCTLEALSERPGVCISVLRPILDMYEQEHQQNDDKESGNLPRLFSLAPQPSFHFRFVTINAKALRALVQVRNDTDDYEGNLEIFNQVFDLNNYGFRSMNCGTFTNEICTDGFSVVFHFARSAKLNTVELELEDFITEDINRYYRVCGIDPGVRHLYTASYGAGETEHEIRRCSSAEYYCMTESPQRGQQLLKQIRHQGIDTIESNFQVQKHAISANAMDEWITFSCTKMCYSISTGQIDRERRFRDHQGRQQAVEELANILIDGRRKYNYRKRKHRGANRKKRKKNREQRRRHKKMNTGRIPEQPLSAVRSTVNESRRARSWKQSQPNPDNNGKMPLFVFEAGMFGKDKCRYKGRRKAAVNKLWRILKRREARGEVLVVKIDEYLTSQICHKCKTKSLCNVVTEDGIKHHGIQDYKTCRMR

SEQ ID NO: 3716 - protein, 399 aa, Apophysomyces variabilis
MHGSTMTMKTVTLSVNQAEPPPSDNSLEAKGSGSKPRQKKHGADPGVADIYVCSNGSNDVYRDEADLELEDDQDIPDEDIVELPEPEVAEGENDDTEFEPHQIRQHSTVEYYARAGFKKTTQRINTSKTPLIRRLDSEIDTNRTADMDRIIRSIVSTLDALPEVTAFYAQQDIQGLKFLNYQGRQRLDEEMVKIFINGGTKYRDPLGNADCLFRARQQDQRMDNETLRPDGTRRWRRRRIQRQEAGEPSPPSHPSKEDKWRKSFTENDTAKLLVVVYCASRFGRNVYKGKPCGLADRFRKLLKRTDTSGRLIMIKMDEYNTSQVCSRCGTKSLTKLDPSGYRCLYSVLVCSSCHTVWQRDVNASRNIRATFMAMIQQRDRPVIFTRPRMTTTAPRNRNV

SEQ ID NO: 3717 - protein, 1638 aa, Apophysomyces variabilis
MFRLSAMQVPHPQIRENKRKRKRVIQSNISLDKAIEALHDVFQNQLVTIISKELEDKPRKNTAKKARFQSEVEKQAKTNKILQELRTRLEKADRVPRTSLEQADDSINVTRGTIRRTLCFHYPEPASIGKLWRDYAAAHFNDAVAEARARLEEHGEVEEAGSSKEVTVNDDSKEEKEIIRTCSVRLSKILREDLDNQVKQTFLETIAITSEQATNYASELGTAVHATMLKYASGSVVLDAESKQAHYQQDGKTFNVLDVIHEEWIRHPELLNSELAIAVAPMPDNIKNYVKALPKKHNDEFLNLFTEAHLQFLHSDYFGRQSYKAQGKSFWSSLQHQGLKDLPKPPAGLSTVMHFQLKQYATDLQNMWAGGLFHKSINHLLRILLRINLASEREKKIQEITEKKLQEKEKQREESSRTMRRKKEWRRRKIKGRLKQERKSLRRLEKRLGIEMDGNQRANLLQRKKSCVEAIRRLEKQAKEKYRPKKADNQPHQKDEEARGDMDKLAISADISVMDDEEIEETIETAIEEAQDELEEVEIKTLKKEPSRRRLIRIQAITKKLLLSTDIDGNVQASDVSDIWNDNDELQKVEIDIVVKLANALRPYVPKGRLSSAISLRLRFVLLSNAILHATGYSKFTANICPTISPASIHALPLDAASMYEMFGSNSAKFNLYKEDGSTIDNIREARTNKSAVIGSFFDQEKVKHICNTRGLEPRWRITITPHQMAVIDGDVKKGRVIDTSHYEERKKKSKGKRADSASSQFEDKSGLDIANITCSLEDAKQRVKALESAEKQIKNALRQREEVVESRMESYRRSKDVARRKVRDKRKSEKFDIYDSRAKQKQTDIYKDLKAAKLERAKSQSELSKIRSQLADQRRLRYIYQKQLDILKKQQTNKETKPKDDEQEQETKLCKVASWNRPGCEANTEFLDISELHQEVKQDPKKTITFGGTDYGLRTLATTVPVTMERARLHFDLYNRQFGDGQTPVSIPKEMSTLPKPMRITAGYLEEKTLCRSFRKKRERRKKNNPAVISAEKTLSKRSSASATTVEQVLESQAVKRNCRRELRAFYHSNRAEHEKRTQKLYTDRIYDQVAAQERKFIKAAATTQTDGRQKALPIMAIGTQGTGVGLRLKGHLKRGGKWLRKRHRRYVPVSMTNEHRSSQLCVYCFERVERAKARRRKSRQWKTVRVNGASQCVNPCCPAYQSGHATQNRDVQAAVAIGLASASNILSANRSTLTPFDPSIFSAGKPFVPGATNFWCVNSSRKLCEELREPGPVAMTGVIRTYASVLFEQTDEDFKRHFRNVTIDYASLLAALHVQFVLGVVKELNSEEKVVILHDGREIAYGYCVICTGSSYKIPWKVSCESTTSLEERFEYLQSQRDLYKQAKNILCIGAGAVGVEVASEICSRDPSKRVTLINSGPMALASAPGNLGASAQTVLSNIPSLSLISNELASSNDGKHYQTNKSKTVITADLVYQCVGITPNTEFLHQTHPQWLNEKRFIKVDSFLKASYEVFAIGDVNDSGDPKMFFNAHMQAVHTARNIQRILKGHEPIPYKGSRPAMVVSLGPNHAVGYVAGISLTGWPFNRRQGSKLASISKGMIERITMDDLYLEKPTNRVLYYTHEKGQLIPQILAKICLT

SEQ ID NO: 3718 - protein, 709 aa, Apophysomyces variabilis
MDHINEVIGKKRKATEVDTEEQKAEKKKGRTSRDALNAKPDAARRQRRNRTIKQEIQARYGNEVERFSRKIPFQNFVRPEYAILLQSRITSLSEFMRNLIIRMQFFVNAYIIEYSQREIPVYLYSQNFWYSIAQLVMNISVTHTNPHMPDNIYDFWNQFRERHPAIVFPRNNFTGYSDALSAACKTLRDTYTNDIVENLQQRVCGFIIHRLQMLVPDLSKSSANRITYDYLYESIAGGEPAWPSCLENASFDLFLAIVNLRDFLISLMPQTCTLEALSERPGVCIPVLRAIVEMYEQEHQQNDDEESGNLPRLFSLAPQPSFHFRFVTINAKALRALVQVRNDTDDYEGNLEIFNQVFDLNKYGFRSMNCGTFTNEICTDGFSVVFHFARSAKLNTVELELEDFITEDINRYYRVCGIDPGVRHLYTASYGAGETEHEIRRCSSAEYYCMTGSPQRGQQLLKQKRHQGIDTIESNFPSAKTCDIRKYNGRVDYFFLHKDVLFNFYGPNDRERRCRDHQGRQRAVEELANILIDRRRKYNYRKRKHRGANRKKRKKNREQRRRHKKMNTGRIPEQPLSAVRSTVNESRRARSWKQSQPNPDNNGKMPLFVFGTGMFGKDKCRYKGHRKAAVNKLWRILKRREARGEVLVVKIDEYLTSQICHKFKTKSLCNVVTEDGIKHHGIQDCKTCRMRWNRDINASKNMFYIAQSI

SEQ ID NO: 3719 - protein, 539 aa, Apophysomyces variabilis
MAVADSNHVVENYSQRMEKYIKYCLQIELASRTPVNVFRLTHFVQTQEKLKIDITTEDIKKLAKFAYDIGAKGQPHYLYSVVPRDEFKIEINTVLQNVNIRPENVPVTSTELAAKPHVYMRPLLAEDLPKLEKANDNGVTCIILCAKRTSLNAPNLFDEVIRSVFEDNISSVDYVYIQKLLAKTARKLVRGVFMPKIQGSSERLFTIMPRTATTWRYTQIDHQTLASLVGVSQRANKDEMFWESFDFTKTKEIRSLDEMKNSNQKMFRTLATDGYIAPFTFSRKRQHLTEDKKSAKTMKDFQEDLHGFDLKVNFTTSPHYNASKAIIDRMKNEKPKIQQIEKDMPSAKTASISQFDRYGCFLLLHMSTLHEYYDSRYASLRFWRHVGRQQASDEFAERLIFGGSKYPTKNTRNQRRHRKQKKKRRKRQNKTKAGTVKRTEISDTELRNEWSKATPHPTKRKPLFASGSAMINSTLKGIRAEISNIIRRKIKENEARGRCKVVDVDEFKTSKICSGCGAEKLRNVKGSLGQLLHVVMHWE

SEQ ID NO: 3720 - protein, 579 aa, Apophysomyces variabilis
MREVKANPCPACGSTEHTSTRAKSCLRHTKSTEEILEDQLGKGFETFTRKAPLHSIVIEAHRDQFRRKVQELPQYASEVIARTQLFVNQYILDHQVIPPICFTQNFFYSVTQLVLNKSMTTKNDKMPTDLSSSWREFRDKRPIHNYDHLMYFENFKTRVRSFVEHKLSVAFPNKNKTEIQNIAWEYAFERIAGGSPQWPNLIEPDLPLVAIVDKICDDLEALTPKPATQQAISASPGAYIPTLKYILSSYEEEHKIVAASEKSSSDATLPRLFFDFTKTNKSSVRKKQKEKVPATEIDLEDFTIDEVEQWFEPWAVDPGLNQIYTAADGSGSQRHQVRRVSTKEYYAMTGSTRRAKQLEKQKDAAGITRIETSLESCKTASSEQHHQFVECFAQNFPVLTAFYGPCMAEKCFHNYQGVQRARAELVNVLVNVGKKPQESGIRSTQNKPHSSTKKWHPKEFQASKKIPLIVFGSAMFGTSGHASRKGKRAALVNTFDKFYTSQVCNSCLQRGLEKVTTSDSVSHHGVVVCKHCRTLWQRDINSAKNMFYITNSVWRGQGRPIEFCRPAKNDIATTNVVSS

SEQ ID NO: 3721 - protein, 656 aa, Apophysomyces variabilis
MREVKAGTKRARQPEVKSVALKKAKKTGRASKQASSSNTAFIANPCPACGSTEHRSTRAKSCPRHTKSTEEILEDQLGKGFETFTRKAPLHSVVVEAHRDQLQRKVQELSQYTREVIARTQLFVNQYILDHQVIPPICFTQNIFYSVTQLVLNKSITTKNDKMPTDLSSSWREFRDKHPQMQQVPNTQLRSSDVLSEACNMNKTEIQNIASKYAFERIAGGSPQWPNLIEPDLSLLAIVDKICDDLEALTPKPATQQAISASPGAYIPTLKYILSSYEEEHKVVAASEKVLWRFVSINAKLLASLLSIREPTQPSEYPRVFFEALDLTRFGFNSLGDFTGNGNHRFACRILSDGFAVNLVFARKQKERLPATEIDLEDFTIDEVEQWFEPWAVDPGLNQIYTAADGSGSQRHQVRRVSTKEYYAMTGSTRRAKQLEKQKDAAGITRIETGLESCKTASSEQHHQFVESFAQNFPVLTAFYGPGMAEKRSHNYQGVQRAREELVNVLVNGGKKPQESGIRSTQNKPHPSTKKWHPKAFQASKKIPLIVFGSAMFGASGHASRKGKRAALLNTFDEFYTSQVCNSCLQRGLEKVTTSDSVSHHGVVVCKHCRTLWQRDINSAKNMFYIANSVWRGQGRPIEFCRPAKNDIATTNVVSS

SEQ ID NO: 3722 - protein, 276 aa, Apophysomyces variabilis
MNHEMDDNQRHIDEPRLVYAFGFHGMSRKSRRGTLASMDHKIANALYRKIKQKNRNKDRQHADVCSRVDEYLTSKVCCRCSKEGQDRRVDFLRRPPTAPVQDRARLENGQEKVLRVVQCANCGRTFHRDGNAADNQATIARYMLRFQQRPRWYIRPSRRLEAAGKEEAMVMIGRAGLQQRDSGGEERASGREVAGAQEVPGIAEPRRRPSKEAAVITPTARRRTRASQTETMVDPPRSRRRISQREEERAESSRAPLRRSERQQAKRQKRIHESSG

SEQ ID NO: 3723 - protein, 514 aa, Apophysomyces variabilis
MTGVSSAAKEYEDAIRNHVCANFKKKTTQCLLICMSDKNDEAFWESSTVKDRNIMAENQGIIDISESLVKLVRSTFSLVNTNPLSKRLRSSLKYAAREAIGRKSSLRLPKRFKPLPEAETASHEAFIEETIDAIESNTFQMRHITIDNQALARLLFQAGRRDNQTPVNPSETRREYFYLFDMAKIGYPTYESLENEKTMFWDVIRTDGVDVKFVFKKYREPFNSKKKPLIPANLKGKCDNAVIWGVDPGVSSLFVAADGNPSSPHRVCTSTTTEYYSICGYNRANQRRKQYMDAEHEAKKLIDDITSLKTSELRKLTDSVKYVMQHYETITEFYSRDLRYNKLKFKTYIGRQKGRGEIAKRLLCDSKKYNMYSSQNRKKPNEKKWVAHYLNDRQNERNGPIIIAYGNGTFSGSMHGRVAAPTKAIVKELKRQAFRRKSPAYVSMIEEYLTSQICPRGKEKPPKKQGTPGCKWSRRRGNTCCVGLSEIIMPGNILEPQSYGCHEYPRSILIRDKQ

SEQ ID NO: 3724 - protein, 383 aa, Apophysomyces variabilis
MVLRAYKGLCWKAEKLQDPGYEKRKKKHARPSATILRKAQESDTVTAIGKHFNFRHDKYLAVQVIVDEEIEKSNQKLSKGRKRKRKTKDKDLTKITANSFKCEDDVLKMDIRGMTEDPSTGITFCGTDYGVITTSESVSLPIERFAYHLKLDNRFSALETQDDDTDDDLASDFQKIAKTFKITAKQIDDLSFTRRVRRQREYRKRATEEGKKIAIDNRDTLRKFYSEKKSIKKSKRTQDIYAQKAYAIVASNERNFLNGSGKKTDILLMMTGSAGTGVCSPIRGHYRRGGKKLREQHLQQTSVGMTNEFRSSQLCPFCYQDLSHPNKKKDGDIKKNFGTVICTNSECISVKKGHDSRGRDQNAALNIALAKTSALFSKHHKPF

SEQ ID NO: 3725 - protein, 730 aa, Apophysomyces variabilis
MLQAVFEWCCSKLTALIPRSYEWNWQGIVCLCKIRKYFQQEAERLKREEGKVIFRAQLLVNSYIIANCDRPVPSYIYTQNFWYSACQLIMGINISNNNPNFPQDLRDHWRAFLDNHPNALYPVRNFSGYSDALSAACVTLATTYSNNVAENFEGRLKFYISRRLTKLILGLSQKNAKAIAGDYIYELLARGDPHWPFEDELAVSDFDQAVETICGEFATLMPEWQTNAEKLSAFPGSYIPVLAYILTEYNREHEEAKQKQNAQGEQYDPKNEEAEKAKGSFKDLPRLFSLSPSPSTHWRFICVNSKTLQQLTNISHRKDYEDQLAQFYQVFDFHKLGFDSLEQLQNFGNSGRIAFKNVIFTDGYAIDFQFARARKIESVVTDASLSVEDIDGNHIYDNFAPCAIDPGINQVFTASYGCGSEPHEIRRCSTKEYYVYTGSPNRQNKMEKEKKQQGIQDIETSLESGKTAHIEAYDGYLRSIFGNMDVLFQFYGPHRAEARFRGYQGVQRAREEMVNILAFGGKKYNCSRRKRTRSNRKSRKRKRKSRKKHVNKDSEVGNPLHQSLPQPNTSAERSTLKKTKRLPHWRQKKFTVERKVPLIVFGDGMFNNRCNYKGHRKGVVNILWRSLKRREKREELLVLTIDEYLSSQVCHSCRYRSLQKLTTADCVSHHSILVCKNCKMLWDRDVLASKNLFLIAESIWSGQGRPREFARPSLDQYTAVTNTVGPSGDF

SEQ ID NO: 3726 - protein, 633 aa, Apophysomyces variabilis
MVSTQDNSSKEKPRSLKGKEKATFDSDDDFQPLPPPQRKRMKFVEAVEEVVKHVRDITYAGSLLANSFFVRLLSENRRIPPITHDLCYRLFSLIAGKGKSADDDLQEVYANFKTSIPEFDEEKFRSQGYMTIVSTATKEYEESIRSHITANFEPKTIQYLLVCMSDQDDKLFQWKGLVKDRKILAEFIYKQACGTKARWPTAIPDNKQNRAYVKTCVESLKNFIGVIFIDEKKLNDEPHLFFPWLFKILGDVNLPKRLTNSLEVAVRIAIRRRKELFLTKKFDRLPKSVILKLQNFIKGTGEAIDNGAFKPEKYTDPRGARRFTMPPVYNMQMRHVTIDNQALGRLMWKAGLRSTMSPIKATEVRKEYFQLFDTSKMGYKTLESLETEKILFWDKIRTDATDVEFIFKKYKTPYDPKKKPLTPSDIKGKYEDAIVWGVDPGVSSIFVAADGVRSTTTEEYYSLCGFSHATRSREKYVKGDPAAKTLIDNIPSLKTTSMESLITAIRYCMQHYEHISEFFSRDRRYSKLKFKCYIQRQKGRSEVAKRLLYGSKKYDQSSKQKEPKRGDSKWVPLSPNDRSDEKSKPIIVAYGNGGFSGSMKGKKAAPTKAVFKELQQQARRRKVGYIVISSAYG

SEQ ID NO: 3727 - protein, 816 aa, Apophysomyces variabilis
MKEYWQYKGTKNEITDLDENNQPSIVPQDLAKHVPPTEASLDAGYLPGPSTSKKSKALAKAEKAYAKWNAKFDAKAKLLEDKQEERIASGNTLRCSTGGGTDHQRRTSKLCQDHKKKRKPPKNFKRTSVMKTSLANTCRSAEFVRSIEDVVKHIQDVTYVGSLFANFFFVQLLSENQNIPPITHDLCYSIFSMIAGEGKNANESLQEAYLRFKVSVPEYKEAKFRSRGYMTVISSAAKEYEEAIRNHLTANFEPKTIQYLLVRMSDEKDEAFRWKSTVAERRLLANFVYKKACGTEAPWPKSITDNRHNRDYVKSCVEFLQQSIGITEIDETKLNAKPHLFLPWFFQVLKRLEQKIFIAEPTAQKYVSPGYIHRMVDKVLDKERLPKRLVKSLEDNVRIAIRKREKLSLAKKFARLSETALSKLQEFIKETGDAMDAGIFKAEKHTDPRGMRRFTMLPVYSTQMRHITMDNQALGRLMCKSGLRDTLAPVKPDEAREVYFKLYDMSKIGYRTIEDLETEKVLYWDKIRTDGTDVEFIFKKYKAPYDPKKKPLTPSDMKGKFDDALIWGVDPGVASVFVAADGTHDSRHRVRSTSTEEYYSLCGFNHASRVREKYNKQEPAIKDLIDKTPSLKTSDLEKLIIAIRYCIQHYDTISEFFCRYQRSYSKENTCKSSDSKWVPLSANDRPEEKEKPIIIAYGNGAFSGSMKGRKAAPTKAILKELQQQARQRKAPTFVFLIDEYLTSQICPVCQKQNLQNAKEGKDARGQEGSKIHAVLICSNKSCTAMFWESRLYGCIQHFARFLAHERLCQSTTRSLY

SEQ ID NO: 3728 - protein, 259 aa, Apophysomyces variabilis
MNCGTFTNEICTDGFSVVFHFARSAKLNTVELELEDFTTEDISRYYRLCGIDPGVPHLYTASYGAGETEHEICRCSSAEYYCMTGSPQRGQQLLKQKRHQGIDTIESNFPSAKTCNIRKYNGRVDYFFLHKDVLVNFYGPNDRERRFRDHQGRQRAVEELANILIDGGRKYNHRKRKKNREQRRRHKNKNTGRIPEQPLSAVRSTVNESRRARSWKQSQPNPDNNGKMPLFVFGAGMFGRTSADTKDIEKRPLTNYGGF

SEQ ID NO: 3729 - protein, 481 aa, Apophysomyces variabilis
MQLVLGRSITTKNDNMPIDLENSWQAFTHIHPVLLNPPRTTLHASDVLTEACVLLATSYSNNTVENFESRICSFVQYRLTSWFPTLSKKDAMDMASKYVFERIGGSTPEWPYGIEPTLPLVALTDGLCDDLEALVPKPASQETISASPGSYLPVLKYIFSCYEEEHQRAMTENRSDDTSLPRLFSIFPKPSVQWRFVSINAQLIASLASLRRPQQPSEYSEDFTQNVNQRFACRILTDGFAVNLLFARRAREGTPDTELELEDFSLDEVNRYFEPWAVDPGHNQVFIAVDGSGSKSHQVRRVSNKEYYAMTGSERRAKTLQKDKDTNGITTIETNMITCKTALSQRHHEFVACFLEKFPSLARFYGPCMAKIRFRNYQGTQRALEKLANILVNGDEFYTSQVSAPYVMFGFMERYIQVCHACMRRDLSKVVTADGISHHGISVRKNCHILWQRDVNSAKSMYHIADSVWRGLGRPEEFRRP

SEQ ID NO: 3730 - protein, 808 aa, Apophysomyces variabilis
MKSMCENKSSVATLDWRIKYQTRRLRKLENRVSADDPRVQKLSAIIATLKSTRSNLLAQRSNQKELASNPSRETEDDEMDKVQLNDEDAEWERNGEEDEEDEEYQNGTKNDGKEAEEEEEVPTSGSHQAREKRPILASTSSEPNSKKRKITQETSRSRLQRLTTLRKRLLALEDVSVDNITVRKLQKEFSTAELYLKEAEAVIDLAVDRHPLLNAPLVLLANAVFTITDNKKFTRSIYPAVRPSAIYSLVLNPTTTFEILCCTRDDMDGFDVVGPNGKTMTSCPDATHNPKYILGAFFDLERIDRICHKHGLKFDNVLKISSYGSTSIQGTVLKSRKVARSRYEKRKKKHARPSATILRKAQESDTVTAIGKDIVKTTGKVKQLENSLRDRTETICLLTEEINAIKDGRPNTSNAEDLIDTIAFRNGLKNERKQENKKLLLERKKLQNFRHDKYLAVQAIVDEEIEKSDQKLIKGRKRKRKTKDKDLTKITANSFKCEDDVLKMDIRGMTEDPRTGITFSGTDYGVVTMSESVSLPTERFAYHLKLHNQFSALETQDKDTDDDLASDFQKIPKTFKITAKQIDDLSFTRRVRRQREYRKRATEEGKKVKAMEKKLLKNNVGNAVDIDSLHNYRKKAYATVASNERNFLNGSGKKTNVLLMMTGSAGTGVCSPIRGHYRRGGKKLREQHLQQISEGMTNEFRSSQLCPFYYQVLSHPNKKKDGYIKKNFGTVICTNSECISVKKGYGSRGRDQNAALNIALTGTSALFSKHHEPFPEFNPKKASKYLLDNNLLASLMSIPEGCGVGARA

SEQ ID NO: 3731 - protein, 670 aa, Apophysomyces variabilis
MRSKLCPTREVKAGSKRTRQPEVQSVALKKAKKTGRASKQASSSNTAFIANPCPACGSTEHRSTRAKSCLRHTKSTEEILEDQLWKGFETFTRKAPLHSVVVEAHRDQLQRKVQELSQYTREVIARTQLFVNQYILDHQVIPPICFTQNFFYSVTQLVLNKSMTTKNDKMPTDLSSSWREFRDKHPQMQQAPNTQLRSSDVLSEACSMNKTEIRNIAWEYAFERIAGGSTQWPNLIEPDLPLLAIVDKICDDLEALTPKPATQQAIPASPGAYIPTLKHILSSYEEEHEIVAASEKSSSDTTLPRLFSISPKPSCKWRFVSINTKLLASLLSIREPTQPSEYPRVFFEALDLTRFGFNNLGDFTGNGNHRFACRILSDGFAVNLVFARKQKERLLATEIDLEGFTVDEVEQWFEPWAVDPGLNQIYTAADGSGSQRHQVRRVSTKEYYAITGSTRRAKQLEKQKDAAGITRIETGLESCKTASAEQHHQLVECFAQNFPVLTAFYGPGMAEKRFHNYQGVQRAREELVNVLVNGGKKPQESGIRSTQNKPHPSTKKWHPKAFQASKKIPLIVFRSAMFGASGHASRKGKRAALVCNSCLQRGLEKVTTSDSVSHHGVVVCKHCRTLWRRDINSAKNVFYIANSVWRGQGRPIEFCRPAKNDIATKNVVSS

SEQ ID NO: 3732 - protein, 669 aa, Apophysomyces variabilis
MELQKQLQEEERLKKAGTKRTRQPEVQSVALKKAKKTGQASKQASSSNTAFIANPCPACGSTEHRSTRAKSCLRHTKSTEEILEDQLWKGFETFTRKAPLHSVVVEAHRDQLQRKVQELSRYTREVIARTQLFVNQYILDHQVIPPICFTQNFFYSVTQLVLNKSMTTKNDKMPTDLSSSWREFRDKHPQMQQTPNTQLRSSDVLSEACSMNKTEIQNIAWEYAFERIAGGSPQWPNLIEPDLPLVAIVDKIRDDLEALTPKPATQQAISASPGAYIPTLKYILSSYEEEHEIVAASEKSSSDTTLPRLFSIPPKPSCKWRFVSINAKLLASLLSIRESTQPSEYPRVFFEALDLTRFGFNNLGDFTGNGNHRFACRILSDGFAVSLVFARKQKERLPATEIDLEDFTVDEVEQWFEPWAVDPGLNQIYTAADEYYAMTGSTRRAKQLQKQKDAAGITRIETGLESCKTASSEQHHQLVECFAQNFPVLTAFYGPGMAEKRFHNYQGVQRAREELVNVLVNGGKKPQESGIRSTQNKPHPGTKKWHPKAFQASKKIPLIVFGSAMFGASGHALRKGKRAALVNTFDEFYTSQVCNSCLQRGLEKVTTSDSVSHHGVVVCKHCRTLWQREINSAKNMFYIANSVWRGQGRPIEFCRPAKNDIATTNVVSS

SEQ ID NO: 3733 - protein, 867 aa, Apophysomyces variabilis
MLQAVFEWCCSKLTALIPRSYEWNWQGIVCLCKIRKYFQQEAERLKREEVFCKDCGQNGHPNKRYKACPLNARHGKKPVGVKRKLNATEEAEFSAAKKRGRQLKAEETSNPNKSNKPCPSCGGIDHSKSSSKNCRKPSKTKKSVIAEKLNDNHYETFTRKLPTSSVVRQEFREIFQENSVRLSAFLREVIFRAQLLVNSYIIANCDRPVPSYIYTQNFWYSACQLIMGINISNNNPNFPQDLRDHWRAFLDNHPNALYPVRNFSGYSDALSAACVTLATTYSNNVAENFEGRLKFYISRRLTKLILGLSQKNAKAIAGDYIYELLARGDPHWPFEDELAVSDFDQAVETICGEFATLMPEWQTNAEKLSAFPGSYIPVLAYILTEYNREHEEAKQKQNAQGEQYDPKNEEAEKAKGSFKDLPRLFSLSPSPSTHWRFICVNSKTLQQLTNISHRKDYEDQLAQFYQVFDFHKLGFDSLEQLQNFGNSGRIAFKNVIFTDGYAIDFQFARARKIESVVTDASLSVEDIDGNHIYDNFAPCAIDPGINQVFTASYGCGSEPHEIRRCSTKEYYVYTGSPNRQNKMEKEKKQQGIQDIETSLESGKTAHIEAYDGYLRSIFGNMDVLFQFYGPHRAEARFRGYQGVQRAREEMVNILAFGGKKYNCSRRKRTRSNRKSRKRKRKSRKKHVNKDSEVGNPLHQSLPQPNTSAERSTLKKTKRLPHWRQKKFTVERKVPLIVFGDGMFNNRCNYKGHRKGVVNILWRSLKRREKREELLVLTIDEYLSSQVCHSCRYRSLQKLTTADCVSHHSILVCKNCKMLWDRDVLASKNLFLIAESIWSGQGRPREFARPSLAQYTAVTNTVGPSGDF

SEQ ID NO: 3734 - protein, 700 aa, Apophysomyces variabilis
MASRNKRKKKPQASTSADTQSDDDFQQLLPPKGKLNMKMQMTDSEPGPSTLPSSSMVSTQNNSSKEKPRSLKGKEKATFDSDDDFQPLPPPKRKQPLQVIPAQKYGAALAARQIMNEAQTSLINTCRSVKFVEAIEEVVKHVRDITYAGSLLANFFFVRLLSENRSIPPITHDLCYRLFSLIAVSTAAKEYEESIKNHITADFEPKTIQYLLVCMSDQDDKLFRWKGLVKDRKILAEFIYKQACGTEARWPTAIPDKKENRAYVETCVESLKNFIGVIFIDEEKLNAEPHLFFPWLFKVLRRLEQKVFITETTSQKYVSSGYVHRMILGDVNLPKRLTKSLEVAVRIAIRRRKELFLTKKFDRLPKSMRHVTIDNQALGRLMWKAGLRSTMSPIKATEVRKEYFQLFDMSKMGYKTLESLETEKILFWDKIRTDATDVEFIFKKYKTPYDPKKKPLTPSDIKGKYEDAIIWGVDPGVSSIFVAADGTGTSQHRVRSTTTEEYYSLCGFSHATRSREKYVKGDPAVKTLIDNIPSLKTTIMESLITAIRYCMQHYEHISEFFSRDRRYSKLKFKSYIQRQKGRSEVANRLLYGSKKYDQSSKQNEPKRGDSKWVPLSPNDRSDEKSKPIIVAYGNGGFSGSMKGQKAAPTKAVFKELQQQARRRKTNTSHPKSVQHVRLEICRKRTKMMHKATKARLYMLY

SEQ ID NO: 3735 - protein, 328 aa, Apophysomyces variabilis
MALNQVHDRLANARRKKYKLEQNRTVGESASKEKSAVDYSAYYETKSRFHLQLYNRYSMLGVNNVNDHDDDIDVSPTNMLQLPKPIRITAKSLDETTLARTFRKKRERRKKSNTEVLAAEEQLKEASMEKAMSVQDIIRCQEIGRSCRKTLRDFYHSNRWHKEKVIQDLYKERIYDRVAANERRKIAMEAGPHDSGRRVIPVMAIGTQGTCVGSRLKGHPKRGGKWLRARHRRRYKEIKWRTMNGSSRCVNSKCVIFKAGRTTQNRDVQAAVAIGLAAISNLFSAERITLPPFDPSHFDAGISNIADTTVQRCVQSSSESHHTGRCYC

SEQ ID NO: 3736 - protein, 246 aa, Apophysomyces variabilis
MKNIAMRSYHHPRKNFTKLAHYNASKAIMDRMKNEKPKIQQIEKDMPSARTASISQFDRYARFLLLHMSTLHQYYDKRHIDRQQASDEFAERLISSGSKYPTKNTRNQRRHHALSVTWTSRRRLDSSLENRSRTSCRRLPNTFARNIKENESRGRCKVVDVDEFKTSKICSGCGAEKLRNVKGSLGQSLHAVVHCEQCKTVWNRDCNASRNIRRIAEHMALNNNNRPSPFQRRNQLPGQTPSKTCK

SEQ ID NO: 3737 - protein, 382 aa, Apophysomyces variabilis
MFVATIDIVATILFLRLPNLTFILRLTVEDDQDIPDEDIAELSEPEVAKGENDDTEFEPHQIRQLSTAKYYTRAGFKKTMQRINTSKTPLIRRLESEIDTNRTTDIDRIFRSIVSTLDALAEVTAFYAQRDIQGLKFLNYQGRQRLDEEMVKIFINGGTKYRDPLGNADRLFRVRQQDQRVDSETLRPDGTRRWRRRRLQRQEAGEPPPPSHPPKEDKWRKSFAENDTAKVSYWCMVLRDLDGMSTRQTMWTGRQINCHTVWQRDINASRNICAMFMAMIQRDRPAIFTRPSTTTTAPRNRNVILTKERPLYLFSSIFLDSLTYRLWNPLPAHVWIWMDALTNMAFTLRREPLCHGFLQIGMENQYHNLSTSKLKLELTSGK

SEQ ID NO: 3738 - protein, 599 aa, Apophysomyces variabilis
MSLPVKPSKTKKSVIGEKLNDNHYETFTRKLPAPSVVRPEFREIFQENSVRLSAFFREVIFRAQLLVNSYIIANYLRDKWRAFLDNHPNALYPVRNFSGYSDALSAACVTLATTYSNNVAENFEDRLKFYISRRLTKLILDLSQKNAKVIAGDYIYELLARGDPHWPFEDELAVSDFDQAVETICGEFATLMPEWQTNAEKLTNISHQKDYEDQLAQFYQVFDFHKLGFDSLKQLQNFGNSGRIAFKNVIFTDGCAIDFQFARARKTESVVTDVSLSVEDIDGNHIYDNFAPCAIDPGINQVFTASYGCGSEPHEIRRCSTKEYYIYTSSPNRQNKMEKEKKQQGVQDIDTSLESGKTAHIEAYDGYLRSIFGNMDVLFQFYGPHQAEARLRGYQGVQRAREEMVNILAFGGKKYNCSRRKRTRSNRKSRKRKRKSRKKQVNKDSEVGNPLHQSLPQPNTSAERSSTLNKTKCLPHWKQKKFTIERKMPLISKRKEKREELLVLTIDDTFLRNCRFRSLHKLTTADCVSHHSILVCKNCRCYGTETSWPVKIFILECGINLVWQGRPREFAWPSLDQYTAVTNTVGPSGDFRFLRWSRR

SEQ ID NO: 3739 - protein, 1194 aa, Apophysomyces variabilis
MDRLRQALEKADRIPRGSFEEAHKKAGVPKGAIEKQIRSRLSSSHKTGEFWRQCAVDNFDDVLAVVKAEGKQNRPKKKDEDSDNLFRTCTVPLKSVLRPDLDENLKRIFMHTVESTSVQMTDYVSDLATVVRATMLKYVSVSLSLDPASGSVKAELDQTSTGFDIRTVVPKEKLRDESMLVDDYFVPVAPMLDNLSQFLDEMPGRRNNDLLSMFNENHIQFLHGLYFGTKGNVSKEKHYLWMQFHDQTLDNQPAIPDGPCRTSHFYMKQFSTNLKNMWAGSLYNRSMNHLLRVLLRVNLAPRREEKVREIREKAKLAREKEIEQQQVIKYQYRKKAIKWKLKNEKKQLRNLKKQIEQEEEDDILIRLATRAATCAEAIERLENQLLVRSESRSNPKSIKVEQMNNRASVTKEEEQQAKILISLGETHIGVFEQIEEELEEEEKEETSEPSRRKLGILQAITKALLQSDKISGHVTVEDVLATSHADDAFSPQEIDTVVNIANALRLYVIRGQIAPCIPLRLNFVVLANALLCSIGYQEFTASICPTISPASVHALPLDAVAMYEMFGSSYAQLDIYKADGSVFTNRDEAIAEKRTVIGSFFNVEAIEKTCKERGLVPRWRITVTPQKTAIIDGNVCEQRRPIESRYEARRKKYYRKKEPYVQEPSIEQQSTPELAKTLDDTKKDVKTLETLKCQHTKLVKEATKLVAGLRSSYQENQAICQKRIRDKRKADKHENVTEKEAAYQQQKLNYEALKAAKLNWSNQQMALNLVHDRLANARRKKYKLEQNRTVGESASKEKSPAGRKERKSKEEEDEKMEEADGDEEDTKYKKEKEKKKDKHNDDNDDDDDDEEEEEEEDSLCRPQSGRCPGCEDSVGRLDLGPLLEDQNNILTFSGTDYGLQVLSTTVPITRQRADFHLQLYNRYSMLGVNNVNDHDDDIDVSPTNMLQLPKPIRITAKSLDEKTLARTFRKKRERRKKSNTEVLAAEEQLKEASMEKAMSVQDIIRCQKIGRSCRKTLRDFYHSNRWHKEKVIQDLYKERIYDRVAANERRKIAMEAGPHDSGRRVIPVMAIGTQGTCVGSRLKGHPKRGGKWLRARHRRRYKEIKWRTMNGSSRCVNSKCVTFKAGRTTQNRDVQAAVAIGLAATSNLFSAERITLPPFDPSHFDAGISNIADTTVQRCVQSSSESHHTGRCYC

SEQ ID NO: 3740 - protein, 425 aa, Apophysomyces variabilis
MIVIPSAVKEYEEAIRNHLTANFEPKTVQYLLVRMSDDKDEAFRWKFTVAERRLLANFVYKQACGTEAPWPTSITDNRHYRDYVKSCVKFLQQSIGIAEIDETKLIAEPHLFLPWFFQVLKPFEQNYLLPSPQLKSTSPQGSRQRETAKATREKTRSECYQMRYITMDNQALGRLMCKSGLRDTISSVKPDEAREVYFNLFNMSEIGYWTIEDLETEKVLFWDKIRTDGTDVDLFLKNMKGKFDDALIWGFDPGVGSGFVAADGTHDSRHRVRSTSTEEYYFLCGFNHASRVREKYNKQEPAIKHLIDKTPSLKTSDLEKLNISTRYCIQHYDTISEFFSRNQRLLLLCSSLTNILRLKYIQSIRSETYRMQKKEKMREARKARKIRTVLTCSNKSCTTMFWNRDSMAASNILHVFLHMRGYANR

SEQ ID NO: 3741 - protein, 830 aa, Apophysomyces variabilis
MWNGATVPYITQRLILLLLRFALAPQRERQNYNLRKRKQERKDKHDMCENKSSVATLDWRIKYQTRRLRKLENRVSADDPRVRKLSAIIATLKSTGSNLLAQKSNQKELASNPSREREDDDMDKVQLNDEDAQWERNGEEDEEYQKALEDVSVDNITVRKLQKEFSTAELNLKKAEAVIGVYSFIKPFFLCPTGELAVDRHPLLNAPLVLLANAIFTITDNKKFTRSIYPAIRPSAIYSLVLNPTTTFEILCYTRDDIDGFDVVGPNGKTMTSCPDATHNLKYILGAFFNVERIDRICHKHGLKFDNVLTISSYGSTSIQGTVLKSRKVARSRYEKRKKKHARPSATILPKAQESDTVTAIGKDIVKTTGKVKQLENSLRDRTETICLLTEEINAIKDGRSNTSNAEDLIDTIAFRNGLKNERKQENKKLLLERKRLQNFRHDKYLAVQAIVDEEIEKSDQKLSKGRKRKRKTKHKDLRKVTANSFKCEDDVLKMNITGMTEDPSTGITFSGTDYGVITTSESVSLPIERFAYHLKLDNRFSALETQDDDTEDDLASDFQKIPKTFKITAKQIDDLSFTRRVRRQREYRKRATEEGKKVKAIEKKLSKNNVGNAVDIDSLHNYRKIAIDNRDILRKFNSEKKSVKKSKRTQDIYTQKAYATVASNERNFLNGSGKKTNVLLMMTGSAGTGVCSPIRGHYRRGGKKLREQHLQQTSVGMTNEFRSSQLCPFRYQVLSHPNKKKVGYIKKNFGTVICTNSECISVKKGYGSRGRDQNAALNIALAGTSALFSKRHEPFPEFNPKKASKYLLDNNLLASLMSIPEGCGVDARA

SEQ ID NO: 3742 - protein, 567 aa, Apophysomyces variabilis
MKNLEKINERYTRKLPLDSIIRPEYREEFKRKLTNLFGFLREVVFRAQIFVNGYIISNADQEINAYVYTQSFWYPIFQLVLDKKVSKKNSNMPSDLLGYWAQFRAAYPSVIFSPQGFSGYSDALSAACKILATCYTNNFVETFENRVVQYSIRKLKAAVPELPNGRINDLAREEVNSLFEELSSAIPVPATAETMSASPRRFVSALRHILSTYDEEYKNSKGSDYEELLRRFSLSPMPPTKWRFATINAKVLSCLIEFTSEGGFEQNTALFHTVFDFTKLGYRSVEELKDSSVDRGVIFTNQILSDGFARIPADRKCLRPHMGAATIRMKFTDAAEKKEAGIEAIETDLETGKTQSLEVYDNYVRCTFQHMNALFAFYGPTKAEGRFRNYQGRQPAPEEIVNILTNGGKKYNRNRQNEIASYVAKIKKTKEEKASKPGCNCDVWQRYCETQGHRSGVVGKLCKHFKRKERREGCLLSRWMSTLHRSCATIATRKTWKLTTADGISCHDILVCKHCGVLWQRDINACKNISSIALSIWVGEGRPQRFSRLPAPNNIPESNAGLPLGEV

SEQ ID NO: 3743 - protein, 972 aa, Apophysomyces variabilis
MLPDLNFVVNPGLSMGNAISRSPTKNYEQYMQTVIAGARGRPISKENRSKALQWLQARGLQTVSKLFNTSPLEAALSVAVVRCLGDKQHAVSLRLPGNQTIPANGLLRLIAIAKMYNIRVYLFSTQSKPKVTGNNRSVYNMSLLHEVDSHTGTSRWVPLYIARFISPKLPVPETTHEKSPFVSPAATKKNAVGERRKKKQRAPLGATEEVIKDELRKEINKRIHLEFSRITRNKNPTRAALEKFKEKFMNRNKTPKEKYGTKASPSALEQHFKGPDKPLKKITDHEIQAASIKDSKRKASDIHGDDSEGNNRSGDEPSEDEEQSDDKDDNYQEYIRVATTTLRKLVRPDIGLDTVLRGDVYQFTGYDNYSTEINLPVVFPADYDFGNHNAKHNGVLSSLVDPNDDAVASQFQADSLRALDTAANNLYSGILYLRSLTNVIHLLLRVNLAPRRMFKYMQLVKKKAKEKKDHQEQRQDLRSNKVYMNGRPDNVVEAIQRKVVSNLPRKDRTEDQKKSNEEEIKSQKADDEYEAFRLDQAEDDLVNDSEDDEDMAATTSSQAPITSKETSACTIRTLVAIVRMLVESPLIKRTISAKDVADAVHTGTILTIAEQQVAAKVANFLKPYTPRRNEPDEPPAKHILTVLSIAALSNVVSTILGIQDHVNKLTIETSNKWALLMKADGIYKIIIDAFDTFTNRQGEFITSGLQAKTEKETVFKAFFQMDKIHRMMNRRHLFFRWRLVFVNEWTRKKQKRSSQATSSAKAKITEGYMPQMLSVVKPLFEKNSIPVCGVGPGIRTTGVSTSTTSARTIQRICDFTSNTTTELRHDIYNTLSLQASAINYHSRSNRHRLRRERAKNAEKEGTEAENRRIEREKRTTEVFTQKAYHKYADVECMHFSQDMISEKAVHFYGHWQPTNFYIRKHTRRGLKRLRGVQRRKGLVIIVKEYNTSKTCHWCLKPLQLQNTREGRQGQKM

SEQ ID NO: 3744 - protein, 495 aa, Apophysomyces variabilis
MLATTTQFSSRPTDSVSAACVTLAIMYSNNVVENFESRLKFYISRRLTKLILGLSQENAKAIAGDYIYGPLARGDPHWPFEDELAVSDFNQTVETICGEFAILMPEWQTNSEKLSASPGSYIPVLTYILNKYNQEHEEAKQKQNASKNEEAEKAKDSFNDLPRWFSLSPSPSTHWIFICVNFKTPQQLTNISHRKDYEDKLAQFYQLNLSKMFVSLEQLQNFGNSGRIAFKNVIFTDGYAIDFQFARARKIDSVVTDVSLSVEDIDGSHISDNFAPCAIDPGINQVFTASYGCGSEPHEIRRCSTKEYYMYTDIETSLESGKTAHIEAYDGYLRSIFGRMDVLFQFYGPHRAEARFREYQGVQRAREEMVNILAFGGKNLPQPNTSAERSALNKTKRLPHWRQKKFTVERKVPLIVFGDGMFNNRCKYKGHRKGVVNILCKNCKMLWDRYVLASKNLFWIAESIWSGRGRPREFARPSLDQYTAVTNTVGPSGDN

SEQ ID NO: 3745 - protein, 984 aa, Apophysomyces variabilis
MLQAVFEWCCSKLTALIPRSYEWNWQGIVCLCKIRKYFQQEAERLKREEVFCKDCGQNGHPNKRYKACPLNARHGKKPVGVKRKLNATEEAEFSAAKKRGRQLKAEETSNPNKSNKPCPSCGGIDHSKSSSKNCRKPSKTKKSVIAEKLNDNHYETFTRKLPTSSVVRQEFREIFQENSVRLSAFLREVIFRAQLLVNSYIIANCDRPVPSYIYTQNFWYSACQLIMGINISNNNPNFPQDLHDHWRAFLDNHPNALYPVRNFSGYSDALSAACVTLATTYSNNVAENFEGRLKFYISRRLTKLILGLSQKNAKAIAGDYIYELLARGDPHWPFEDELAVSDFDQAVETICGEFATLMPEWQTNAEKLSAFPGSYIPVLAYILTEYNREHEEAKQKQNAQGEQYDPKNEEAEKAKGSFKDLPRLFSLSPSPSTRWRFICVNSKTLQQLTNISHRKDYEDQLAQFYQVFDFHKLGFDSLEQLQNFGNSGRIAFKNVIFTDDYAIDFQFARARKIESVVTDASLSVEDIDGNHIYDNFAPCAIDPGINQVFTASYGCGSEPHEIRRCSTKEYYVYTGSPNRQNKMEKEKKQQGIQDIETSLESGKTAHIEAYDGYLRSIFGNMDVLFQFYGPHRAEARFRGYQGVQRAREEMVNILAFGGKKYNCSRRKRTRSNRKSRKRKRKSRKKHVNKDSEVGNPLHQSLPQPNTSAERSTLKKTKRLPHWRQKKFTVERKVPLIVFGDGMFNNRCNYKGHRKGVVNILWRSLKRREKREELLVLTIDEYLSSQVCHSCRYRSLQKLTTADCVSHHSILVCKNCKMLWDRDVLASKNLFLIAESIWSGQGRPREFARPSLDQYTAVTNTVVTPTVHTILLVQPLSQPSSRTYYDFEKISEAMDHIAGLFEQQLQRENPRLGQVQYKMDELFRYIDSYKEFVALVFDPATKNYQPHDKQWIKDRLISHFSRHTNQPSQPSYRQPQNRPYGNRRW

SEQ ID NO: 3746 - protein, 242 aa, Apophysomyces variabilis
MDIRGMTEDPRTGITFSGTNYGVVTMSESVSLPIERFAYHLKLHNRFSALETQDDDTEDDLASDFQKIPKTFKITAKQIDDLSFTRRVRRQREYRKRATEEGKKIAIDNRDILRKFYSEKKSVKKSKRTQDIYTQKAYATVASNERNFLNGSGKKTNILLMMTGSARTGVCSPIRGHYRRGGKKLREQHLQQTSVGIINEFRSSQLCPYGYQLLSHPEQEKRWQYQEKLWHSHLYKFPNALL

SEQ ID NO: 3747 - protein, 1260 aa, Apophysomyces variabilis
MDRLRQALEKADRIPRGSFEEADKKAGVPKGTIEKQIRSRLSSSHKTGEFWRQCAVDNFDDVLAVVKAEGKQNRPKKKDEDSDNLFRTCTVPLKSVLRPDLDENLKRIFMHTVESTSVQMTDYVSDLATVVRATMLKYVSVSLSLDPASGSVKAELDQTSTGFDIRTVVPKEKLRDESMLVDDYFVPVARMPDNLSQFLDEMPGRRNNDLLSMFNENHIQFLHGLYFGTKGNVSKEKHYLWMQFHDQTLDNQPAIPDGLCRTSHFYMKQFSTNLKNMWAGSLYNRSMNHLLRVLLRVNLAPRREEKVREIREKAKLAREKEIEQQQVIKYQYRKKAIKRKLKNEKKQLRNLKKQIEQEEEDDILVRLATRAATCAEAIERLENQLLARSESRSNPKSIKVEQMNNRASVTKEEEQQAKILISLGETHIGVFEQIEEELEEEEKEETSEPSRRKLGILQAITKALLQSDKISGHVTVEDVLATSHADDAFSPQEIDTVVNIANALRPYVIRGQIAPCIPLRLNFVVLANALLCSIGYQEFTASICPTISPASVHALPLDAVAMYEMFGSSYAQLDIYKADGSVFTNRDEAIAEKRTVIGSFFNVEAIEKTCKERGLVPRWRITVTPQKTAIIDGNVCEQRRPIESRYEARRKKYYRKKEPYVQEPSIEQQSTPELAKTLDDTKKDVKTLETLKCQHTKLVKEATKLVAGLRSSYQENQAICQKRIRDKRKADKHENVTEKEAAYQQQKLSYEALKAAKLNWSNQQMALNQVHDRLANARRKKYKLEQNRTVGESASKEKSGRRPGCEDSVGRLDLGPLLEDQNNVLTFSGTDYGLQVLSTTVPITRQRADFHLQLYNRYSMLGVNNVNDHDDDIDVSPTNMLQLPKPIRITAKSLDEKTLARTFRKKRERRKKSNTEVLAAEEQLKEASMEKAMSVQDIIRCQKIGRSCRKTLRDFYHSNRWHKEKVIQDLYKERIYDRVAANERRKIAMEAGPHDSGRRVIPVMAIGTQGTCVGSRLKGHPKRGGKWLRARHRRRYKEIKWRTMNGSSRCVNSKCVTFKAGRTTQNRDVQAAVAIGLAAISNLFSAERITLPPFDPSHFDAGISNIADTTVQRCVQSSSESHHTGRSAQKVIKTYLQHGLLQTLYSYGAKLPKFSKQGLDMHELIVSINTSVTQQSTWEVFKALPLVHKLLLDALDQNLDDILRSLCMQSFFLPCLRHGHFTMCSFILPCSGPFEADMKSRFANKDTIARKIHVGFSHFS

SEQ ID NO: 3748 - protein, 653 aa, Apophysomyces variabilis
MELQKQLQVEERLKKCITLKVCLITGTKRTRQPEVQSVALKKAKKTARASKQASSSNTAFIANPCPACGSTQHRSTRAKSCPRQTRSTEEILEDQLGKGFETFTRKAPLHFVVVEAHRDQLQRKVQELSKYTREVIARTQLIVNQYILDHQVIPPICFTQNFFYSVTQLVLNKSMTAKNDKMPTDLSSSWRAFRDKHPQMQQAPNTQLRSSDLLSEACVLLATCYSNNIVENFETRVRSFVEHRLSVAFPNMNKTEIQNIVSEYAFERIAGGSPQWPNLIEPDLPVVAIVDKVCDDLEALTPKPATQQAISASSGAYIPTLKYILSSYEEDCKWRFVSINAKLLASLLPIREPTQPSEYPRAFFEALDLTRFGFNSKSSVRKKQKEKVRQRKLTSRTLSLMKSSIDSNHGSGSQRHQVRRVSTKEYYAMTGSTWRAKQLEKQKDAAGITRIETGLESCNTASSEQHHQFVECFAQNFPILTGFYGPGMAEKRFHNYQGVQRARKELVNVPQESGIRSTQNKPHPSTKKWHPKAFQASKKIPLSVFGSAMFGTSGHASRKGKRAALVNTFDEFYTSQVCNSCLQRGLEKVTTSDSVSHHGVVVCKHCRTLWQRDINSAKNMFYITNSVWRGQGRPIEFCRPAKNDVATTNVVSS

SEQ ID NO: 3749 - protein, 1193 aa, Apophysomyces variabilis
MDRLRQALEKADRIPRGSFEEADKKAGVPKGTIEKQIRSRLSSSHKTGEFWRQCAVDNFDDVLAVVKAEGKQNRPKKKDEDSDNLFRTCTVPLKSVLRPDLDENLKRIFMHTVESTSVQMTDYVSDLATVVRATMLKYVSVSLSLDPASGSVKAELDQTSTGFDIRTVVPKEKLRDESMLVDDYFVPVAPMPDNLSQFLDEMPGRRNNDLLSMFNENHIQFLHGLYFGTKGNVSKEKHYLWMQFHDQTLDNQPVIPDGLCRTSHFYMKQFSTNLKNMWAGSLYNRSMNHLLRVLLRVNLAPRREEKVREIREKAKLAREKEIEQQQVIKYQYRKKAIKRKLKNEKKQLRNLKKQIEQEEEDDILVRLATRAATCAEAIERLENQLLARSESRSNPKSIKVEQMNNRASVTKEEEQQAKILISLGETHIGVFEQIEEELEEEEKEETSEPSRRKLGILQAITKALLQSDKISGHVTVEDVLATSHADDAFSPQEIDTVVNIANALRPYVIRGQIAPCIPLRLNFVVLANALLCSIGYQEFTASICPTISPASVHALPLDAVAMYEMFGSSYAQLDIYKADGSVFTNRDEAIAEKRTVIGSFFNVEAIEKTCKERGLVPRWRITVTPQKTAIIDGNVCEQRRPIESRYEARRKKYYRKKEPYVQEPSIEQQSTPELAKTLDDTKKDVKTLETLKCQHTKLVKEATKLVAGLRSSYQENQAICQKRIRDKRKADKHENVTEKEAAYQQQKLSYEALKAAKLNWSNQQMALNQVHDRLANARRKKYKLEQLVKAHQKKKGKSPAGRKERKSKGEEDEKMEEADGDEEDTKYKKEKEKKKDKHNDNNDEENEEEDEEEEEDSLCRPQSGRRPGCEDSVGRLDLGPLLEDQNNVLTFSGTDYGLQVLSTTVPITRQRADFHLQLYNRYSMLGVNNVNDHDDDIDVSPTDMLQLPKPIRITAKSLDEKTLARTFRKKRERRKKSNTEVLAAEEQLKEASMEKAMSVQDIIRCQKIGRSCRKTLRDFYHSNRWHKEKVIQDLYKERIYDRVAANERRKIAMEAGPHDSGRRVIPVMAIGTQGTCVGSRLKGHPKRGGKWLRARHRRRYKEIKWRTMNGSSRCVNSKCVTFKAGRTTQNRDVQAAVAIGLAAISNLFSAERITLPPFDPSHFDAGISNIADTTVQRCVQSSSESHHTGRCYC

SEQ ID NO: 3750 - protein, 354 aa, Apophysomyces variabilis
MANKKREAKHQAKKEAQQKKTEGNEVVCGSCGKTGHNRASNAASENHKPRRKTLTQLKRTSIVKTCLQNTCRNPDFVEAIRTANKELPVISHNLYKTDGIDAEFIFKRPKRESSSKLLTPADLKDMAKDALIWGVDPGVTDTFVAVEGCGKESHQIRKTSTADSNPQIKELIDRIPSMKSAHRTEVITSLRYRFQRHQEITSFYYLDERLIRKQKGVTEIAKRLLDGSKKYAVQQVDSDTPKRSSDKKRKQRKAPARVIMVDEYLTSQICPVCSKRELKKQQERPGNHEKAGAALHAILRSNSCAIVWNHDVLGAKNILAVFKYTVTSNNERPSPFERAAKSKTSPEMQEPDLP

SEQ ID NO: 3751 - protein, 730 aa, Apophysomyces variabilis
MLQAVFEWCCSKLTALIPRSYEWNWQGIVCLCKIRKYFQQEAERLKREEGEVIFRAQLLVNSYIIANCDRPVPSYIYTQNFWYSACQLIMGINISNNNPNFPQDLRDHWRAFLDNHPNALYPVRNFSGYSDALSAACVTLATTYSNNVAENFEGRLKFYISRRLTKLILGLSQKNAKAIAGDYIYELLARGDPHWPFEDELAVSDFDQAVETICGEFATLMPEWQTNAEKLSAFPGSYIPVLAYILTEYNREHEEAKQKQNAQGEQYDPKNEEAEKAKGSFKDLPRLFSLSPSPSTHWRFICVNSKTLQQLTNISHRKDYEDQLAQFYQVFDFHKLGFDSLEQLQNFGNSGRIAFKNVIFTDGYAIDFQFARARKIESVVTDASLSVEDIDGNHIYDNFAPCAIDPGINQVFTASYGCGSEPHEIRRCSTKEYYVYTGSPNRQNKMEKEKKQQGIQDIETSLESGKTAHIEAYDGYLRSIFGNMDVLFQFYGPHRAEARFRGYQGVQRAREEMVNILAFGGKKYNCSRRKRTRSNRKSRKRKRKSRKKHVNKDSEVGNPLHQSLPQPNTSAERSTLKKTKRLPHWRQKKFTVERKVPLIVFGDGMFNNRCNYKGHRKGVVNILWRSLKRREKREELLVLTIDEYLSSQVCHSCRCRSLQKLTTADCVSHHSILVCKNCKMLWDRDVLASKNLFLIAESIWSGQGRPREFARPSLDQYTAVTNTVGPSGDF

SEQ ID NO: 3752 - protein, 539 aa, Apophysomyces variabilis
MWVWERALRSSMEHPVFNMCCCQGKIRLPPLSPPPEPLLRLPTANTEAGKQFRLNIRAYNNVFAFSSMGVQLDESIVNATKLNAEPHLFLRWFFQVLKRLEQKIFIAELTAQKYVSPGYIHRMVDKVLDKEKLPKRLVKSLEVNVRIAIRKREKLSLAKKFARISETALSKLQEFIKETGDAIDAEIFKPEKHTDPRGKRRFTMLPVYSTQMRHITMDNQALGRLMCKSGLRDTLAPVKPDEAREVYFKLFDMSKIGYRTIEDLETEKVLFCVFVAADGTHDSRHRVRSTSTEEYYSLCGFNDASRFREKYNKQEPAIKDLIDKTPSLKTSDLEKLIMAIRYCIQHYDTISEFLAEIKGVADFLCYNSNIITSPRYSKLRFKSKENTCKSSDSKWVPLSANDRPEEKEKPIIIAYGNGAFSGSMKGQKAAPSKAILKELQQQARQRKAPTFVFLIDEYLTSQICPVCQKRNLQNAKEGKDARGQEASKTHAVLTCSNKSCTAMFWNRDSMAASNILHLFLHMRDYANGRPDPFIKVAST

SEQ ID NO: 3753 - protein, 597 aa, Apophysomyces variabilis
MDNLSFDINSLIWAFFMLSLNAFSAKEVIGTETRRDRLSPRLYEDRISYLKPTIARQLVCGYCGRSGHRDRRSYKCPLKEKKVGVKRKHQSDVQAESSKMAKEHGRQRKQQTAAKTPSTPRSCPGCGSTEHRNTRAKSCTVHKQSTNQLLEAALGKNPEFYTRKITFDAVVCEEYRDQVRTKIEELSSYLRLTLSKKEAMDMASKYVFERIGGGTSEWPDGIEPTLPFVALTDGLCDDLEALVPKPASQETISASPLFLFASTKCFPANVNDLRGSTVPRLFSISPKPSAQWRFVSINAELMASLASLRRPHQPSEYFTVFFQVLDLSRFGFNSLDDFTQNVNQRFACRILTDGFAVNLLFARRAREGTPDTELELEDFSLDEVNRYFDPWAVDPGHNQVFIAVDGSGSKSHQVRRVSNKEYYAMTGSERRAKTLQKDKDTHDITTIETNMITCKTALSQRHHEFVACFLEKFPSLARFYGPCMAKIRFRNYQGTQRAPEKLANILVKGDEFYTSQVSAPYVMFEFMERYIQVCHACMRRDLSKVITADGISHHGISVCKNCHILWQRDVNSAKSMYHIADSVWRGLGRPEKFRRPQ

SEQ ID NO: 3754 - protein, 447 aa, Apophysomyces variabilis
MSISPQLVLDKKVSNKNSNMPSDLLGYWAQFRAAYPSVIFSPQGFSGYSDALSAACKTLATCYINNIVETFENRVVQYSILKLKAAVPELPNGHIKDLAREYVYERICRGDPLWPDAVPLVSTGINSAVNSICEELSSVIPVPATAETMSAFPGRFVPALRHTLSTYDEEYKNSKGYRSFEELKNLSVDRGVIFTNQILSDGFAVDLQFARKSGKKERATVNAELTVTDFTEEEITDYFQPCAVDPGRSQVFMAAYGCGNSPHEIRRCSTREYYTYTASPLRQRIIQAEKKEAGIEAIKTDLETGKTQSREIYDSYVRCTFQHMNALFTFYGQTKAEGRFPNFQGHQRASEEMVNILINGEKKRACPPESAVRSTLCRNKGFRKWKGAGYQESEKMLFIIFGDGMFGKDTVKLKGHQSGVVGKLWKHIRRRERRGELLAVKIDEYLT

SEQ ID NO: 3755 - protein, 990 aa, Apophysomyces variabilis
MRDDLPADDRQTFQEKMAATAIQVTDYAADMMAVVNALMLEIANKGIIVKKTGEVEISLNQTSLYPKVDLFLPKYALRHPDQGRCNNSTIPVAPLPRNLDKLGNNGDFHKMFTYEHLQFLHTRLFSQRLTATSAARHPVWNKLLPSHQPGFSFPAGLSLTLTEKLRQLATNIQNIWHGHIYSRSLDRLILVYLRTHLAPKREAKYKEMADRRAEERKEKKESPSLKKRSGTRQLLRRENRYLNKCQQKVQTAINHEDKRKWQLRAQQSEGRLNVMYKRHIDSRPARSQSAAETVEASTHQAEIVSYDPQISVLLKNHLSANEVTEFLLDNESDDNDEDASVKEEKEDKEPPDVTARRIRVLKRIAKDHIIAGIEHKELKKFIRDAYEGQDSNREVDAVYNLCSVIRAFVPPKETQPCVLTHIPVVLLANIVQRVAGYAEFTMKICPHHWRSRYTLNGSDMQSISSADMAVHRKSETLGSFLDTEKMQDICSSYGLDFDNRIIVSNHGTIHLQGVLQESVRTAISYYDIRKKKARNQKEKAATKPVSKETKPKTIPTAIQRELETYDRKIKDLEKQLRSENSSLGRTVKQLQEFKERLFSASNQDNRRLSSELKALKKARAANQSQVNSTRLTLKDTCNQRYHLWEKAKMDPKNKKPKKEIRYNPPNSQYPAYEEDEEYIDLQSFIHSMEASGKEVSFGGTDYGLVTMSITVSLSNQQCLQMIETYNRSSSLSKKTEHGQTMKDPVEQMMNTVSPKCLRTTAQELNQSGLVRKYQKKRQRQKALKPDVKNAETKLSKNSATLATSSSEIWRCHQVNAWWQWRVARSLENFIIQRELERKETTINRFRSIIYNKFALIGRRFVGGPDKHSTVICIGKLGTGARPRIGGYSRRGGAQIRKRHRSHTTVVITDEFRISQTCSVCFQPVVRPKGRRYIDGKWKTFSLNGGSLCMNPECASFATGSNTKNREVEAATCIVIAVASRWLTGSRLPPR

SEQ ID NO: 3756 - protein, 389 aa, Apophysomyces variabilis
MKAICSDYVAEVIVHGEPHWPTASVSIVYIRAVNAAKTVLDELSHHIHGPCRPAYLSALPGSYIPVLRFILQSFTLAHRESEAASTLIARGPSNNHESTDKYEANFNLFNQCFDLEKYGYGRLQDLNTDEVGQFYRPVAVDPGSGHLLTASYSHGADQHEIRKRSTAEYYSVTGSGRRNNALYKDKQAAGIKYIERKFPTGKFYHSGRGHSRFHNYQGRQREREEIANIMVHGGKKNREREKEKRARERQDEASNATQGVEVLSRIPESAVRSTTSNRRLPRWKKTKVKVDINGKMPLVVFGSVMFGKRQMNHTEISNSCHSRTLTKFKTLDGVTHQCPGLVVYWKPTRCIQSTRARRNSNQYHCCERGFPNWDLDCYDVQIDKPFITF

SEQ ID NO: 3757 - protein, 1153 aa, Apophysomyces variabilis
MNRLRQALEKADRIPRGSFEEADKKAGVPKGTIEKQIRSRLSSSHKTGEFWRQCAVYNFDDVLAVVKAEGKQNRPKKKDEDSDNLFRTCTVPLKSVLRPDLDENLKRIFMHTVESTSVQMTDYVSDLATVVRATMLKYVSVSLSLDPASGSVKAELDQTSTGFDIRTVVPKEKLRDESMLVDDYFVPVAPMPDNLSQFLDEMPGRRNNDLLSMFNENHIQFLHGLYFGTKGNVSKEKHYLWMQFHDQTLDNQPVIPDGLCRTSHFYMKQFSTNLKNMWAGSLYNRSMNHLLRVLLRVNLAPRREEKQLRNLKKQIEQEEEDDILVRLATRAATCAEAIERLENQLLARSESRSNPKSIKVEQMNNRASVTKEEEQQAKILISLGETHIGVFEQIEEELEEEEKEETSEPSRRKLGILQAITKALLQSDKISGHVTVEDVLATSHADDAFSPQEIDTVVNIANALRPYVIRGQIAPCIPLRLNFVVLANALLCSIGYQEFTASICPTISPASVHALPLDAVAMYEMFGSSYAQLDIYKADGSVFTNRDEAIAEKRTVIGSFFNVEAIEKTCKERGLVPRWRITVTPQKTAIIDGNVCEQRRPIESRYEARRKKYYRKKEPYVQEPSIEQQSTPELAKTLDDTKKDVKTLETLKCQHTKLVKEATKLVAGLRSSYQENQAICQKRIRDKRKADKHEKVTEKEAAYQQQKLSYEALKAAKLNWSNQQMALNQVHDRLANARRKKYKLEQLVKAHQKKKGKSPAGRKERKSKGGEDEKMEEADGDEEDTKYKKEKEKKKDKHNDNNDEENEEEDEEEEEDSLCRPQSGRRPGCEDSVGRLDLGPLLEDQNNVLTFSGTDYGLQVLSTTVPITRQRADFHLQLYNRYSMLGVNNVNDHDDDIDVSPTNMLQLPKPIRITAKSLDEKTLARTFRKKRERRKKSNTEVLAAEEQLKEASMEKAMSVQDIIRCQKIGRSCRKTLRDFYHSNRWHKEKVIQDLYKERIYDRVAANERRKIAMEAGPHDSGRRVIPVMAIGTQGTCVGSRLKGHPKRGGKWLRARHRRRYKEIKWRTMNGSSRCVNSKCVTFKAGRTTQNRDVQAAVAIGLAAISNLFSAERITLPPFDPSHFDAGISNIADTTVQRCVQSSSESHHTGRCYC

SEQ ID NO: 3758 - protein, 1289 aa, Apophysomyces variabilis
MFRLSAMQVPHPQIRENKRKRKRVIQSNISLDKAIEALHDVFQNQLVTIISKELEDKPRKNTAKKARFQSEVEKQAKTNKILQELRTRLEKADRVPRTSLEQADDSINVTRGTIRRTLCFHYPEPASIGKLWRDYAAAHFNDAVAEARARLEEHGEVEEAGSSKEVTVNDDSKEEKEIIRTCSVRLSKILREDLDNQVKQTFLETIAITSEQATNYASELGTAVHATMLKYASGSVVLDAESKQAHYQQDGKTFNVLDVIHEEWIRHPELLNSELAIAVAPMPDNIKNYVKALSKKHNDEFLNLFTEAHLQFLHSDYFGRQSYKAQGKSFWSSLQHQGLKDLPKPPAGLSTVMHFQLKQYATDLQNMWAGGLFHKSINHLLRILLRINLASEREKKIQEITEKKLQEKEKQREESSRTMRRKKEWRRRKIKGRLKQERKSLRRLEKRLGIEMDGNQRANLLQRKKSCVEAIRRLEKQAKEKYRPKKADNQPHQKDEEARGDMDKLAISADISVMDDEEIEETIETAIEEAQDELEEVEIKTLKKEPSRRRLIRIQAITKKLLLSTDIDGNVQASDVSDIWNDNDELQKVEIDIVVKLANALRPYVPKGRLSSAISLRLRFVLLSNAILHATGYSKFTANICPTISPASIHALPLDAASMYEMFGSNSAKFNLYKEDGSTIDNIREARTNKSAVIGSFFDQEKVKHICNTRGLEPRWRITITPHQMAVIDGDVKKGRVIDTSHYEERKKKSKGKRADSASSQFEDKSGLDIANITCSLEDAKQRVKALESAEKQIKNALRQREEVVESRMESYRRSKDVARRKVRDKRKSEKFDIYDSRAKQKQTDIYKDLKAAKLERAKSQSELSKIRSQLADQRRLRYIYQKQLDILKKQQTNKETKPKDDEQEQETKLCKVASWNRPGCEANTEFLDISELHQEVKQDPKKTITFGGTDYGLRTLATTVPVTMERARLHFDLYNRQFGDGQTPVSIPKEMSTLPKPMRITAGYLEEKTLCRSFRKKRERRKKNNPAVISAEKTLSKRSSASATTVEQVLESQAVKRNCRRELRAFYHSNRAEHEKRTQKLYTDRIYDQVAAQERKFIKAAATTQTDGRQKALPIMAIGTQGTGVGLRLKGHLKRGGKWLRKRHRRYVPVSMTNEHRSSQLCVYCFERVERAKARRRKSRQWKTVRVNGASQCVNPCCPAYQSGHATQNRDVQAAVAIGLASASNILSANRSTLTPFDPSIFSAGKPFVPGATNFWCVNSSRKLCEELREPGPVAMTGVIRTYASEEF

SEQ ID NO: 3759 - protein, 568 aa, Apophysomyces variabilis
MSTEPAPWKETWKPSKTKKSVIAEKLNDNHYETFTRKLPTSSVVRQEFREIFQENSVRLSAFLREVIFRAQLLVNSYIIANCDRPVPSYIYTQNFWYSACQLIMGINISNNNPNFPQDLRDHWRAFLDNHPNALYPVTNFSGYSDALFATCVTLATRYSDNVAETFESRLKFYISRRLTKLIPGLSQKNAKAIEGDYIYELLARGDPHWPFEDELAFSDFDQAVETICGELAKLMPEWQTNAEKLPASPGSYIPLTNISHQKDYEDQLAQFYQVFDFHKLGSDSLEQLQNFDNSGQIAFRNVIFTDGYATDFQFARARKTESVVTDVSLSVEDIDGSHIYDNFAPCAIDPDINQVFTASYGCGSEPHEIRRCSTKEYYVYTGSPNRQNKMEKEKKQQGIQDIEISLESGKTARIEAYDVYLRSIFGNMDVLFQFYGPHRVEARFRGYQGLPKSKRGNGQYTSIWCLPQPNTSAERSTLNRTKRLPHWRQKKFTVKRKVPLIVFGDGTFNNRCNYKGHRKGVVDILWRSLKRREKREELLVLTIDKYLSLQLQMQVPAKAYNSRLRFSP

SEQ ID NO: 3760 - protein, 798 aa, Apophysomyces variabilis
MKEYWQYKRQKNEITDLDENNRPSIVPQDLAKLAGISKGKGKEKANDTLEGDFQDSFSPKQGTWADEQLQTLKIVPPTEATLDAGYDPGPSTGKSQKHWSRLRRLMLSGMRNLMQKLNYRKTSKKRELHQAVLYGAVLVVEQTINGGQRTSVIKTSLANTFRSAEFVRSIKDVVKHIRDVTYVGSLFANFFFVQLLSENQNIPPITHDLCYSIFPMVAGEGEYANESLQEAYLRFKVSVPEYKETKFRSRGYMTVISSAAKEYEEVIRNHLTANFEPKTIQYFLVRMSDDKDEAFRWKSTVAGRRLLANFVYKKACGTEAPWPKSITDNRHNRDYVKSCVEFLQQSIGITEIDETKPNAEPHFFLPWFFQVLKRLEQKIFIAEPTAQKYVSPGYIHRMVDKVLDKEKLPKRLVKSFEVNVRIAIRKREKLSLAKKFARIWETALSELQEFIKETGDAIDAGIFKPEKHTDPWGMRRFTMLPVYSTQMRHITMDNQALGRLMCKSGLRDTLAPVKPDEAREVYFKLFDMSKIGYRTIEDLETEKVLFWDKIRTDGTDVEFILKKYKAPYDPKKKPLTPSDMQGKFDDALIWEVDPGVANVFVAADGTHDSRHRVRSTSTEEYYSLCGFNHASRVGEKYNKSDSKENTCKSSDSKWVPLSANDRPEEKEKPIIIAYGNGAFSGSMKGRKAAPTKAILKELQQQARQRKAPTFVFLIDEYLTSQICPVCQKRNLQNAKEGKDARGQEGSKIHAVLTCSNKSCTAMFWNRDSMAASNILHVFLHMRDYADRRPGPFIRLANT

SEQ ID NO: 3761 - protein, 1090 aa, Apophysomyces variabilis
MTVISSAAKEYEEAIRNHLTANFEPKIIQYLLVRMSDDKDEAFRWKSIVAERILLANFVNKQVCGTEATWPKSIADNRHNRDYVKSCVEFLQQSIGITEIDETKLNAEPHLFLPWLFQVFKRLEQKIFAAPTALKYVSPGYIHRMVDKVLDKEKLPKRLVKSLEVNDRIAIRKREKLSLAKKFAHLSETALSKLQEFNKEIGVAIDAGTFKPEKYTDPRGMRRCTMLPVYGTQRRHITMDNQPLGRLMCKSGQRDTMSPVKPDEAREVYFNLFDMPKIGYRTIEDLETEKVLFWDRIGTNGIDIEFIFKKYKVPYDPKKKPLAPSDMQGKFDDALIWEVDPEVANVFVAADGTHDSRHRVRSTSTEEYYSLCGFNHASRVGEKYNKSDSKESACKSSDSKWVPLSANDRPEEKEKPIIIAYGNGAFSGSMKGRKAAPTKAILKELQQQARQRKTPTFVFLMDEYLTSQICPVCQKRNLQNAKEGKDARGQEGSKIHAVLTYSNKSWTTMFWNRHSMAASNILHVTVSRATCSLFVNDSLPVEMNKHIRNQSSSGSAGRIHRTVSQAGLYAAARLSSSTSAPPWDQSHASAMTSEDSAIPMPTSTETRNGPLRSRLSGALNALAISPDAESVAVAGLLKILSVSKSEVVETINLRAGSQFNEWLMGFPPQVTKYKVATAATNGAIILWDLNKTGRKAERVITEHSRAVNRICFQPDNGNILLSASQDGSMKCWDFRDPKNGARYRFEGKSESKWDMRNPKALYDRKVSAHNGPCLTVDWHPGGKIVASGGRDKTIKVWDLGADNRRPLYTIRTMAAVARIQWRPDHDDEIASCALLTDSRIHVWDVRRPNIAKFAFDEHESTPTGKHFIPKTAKKQTKKWKRPGVAITSEDAAAQYIPPQSCGIAHMPLFDFESFSVFAENYAISGKDISAICENNTRKVAWKMGRYRTSQTWKIIALLFDTEEEEEEEKQSTHEQDLKEQDALNERTGDDHLKESASEQTLAMQNQNYLTDDRDSEHEHIEERSDSDLEEEKQIGNFGEDKEISDAESSIPCSEHTELWATWQHRDVVMGLLDYYTEQVQLSGLYYMNAF

SEQ ID NO: 3762 - protein, 472 aa, Apophysomyces variabilis
MKMIQNFQCNAQYYTDNYHELVDGQIVPYLTLALVAIVDKICDDLEALTPKPATQQAISASPGAYIPTLKYILSSYEEEHKIVAASEKSSSDTTLPRLFSISSKPICRWRFVSTNAKLLATLLSIREPTQPSEYPRVFFEALDLTRFGFNGLGDFAGNVNHRFACKILSDGFAVNLVFARKQKEKVPATEIDLEDLTFDEVQQWFEPWAVDPGLNQIYTAADGNGSQRHQVRRVSTKEYYAMTGSTRRGKQLEKRKDAAGVTHIETGLESCKTASSEQYHQFVECFAQNFPVLTAFYGPDMAEKRFHNYQGVQCAREELVNVLVNGGKKPQESGIRSTQNKPHPSTKKSSKGIQASKKIPLIVFGSAMFGASGHASRKGKRAALVNPFDEFYTSQMCNICLQRGLEKVPISDSVSHHGVVVCKHCRTLWQRDINTAKNMFYITNSVWRGQGRPIEFCRPAKNDVATTNVVSS

SEQ ID NO: 3763 - protein, 1289 aa, Apophysomyces variabilis
MFRLSAMQVPHPQIRENKRKRKRVIQSNISLDKAIEALHDVFQNQLVTIISKELEDKPRKNTAKKARFQSEVEKQAKTNKILQELRTRLEKADRVPRTSLEQADDSINVTRGTIRRTLCFHYPEPASIGKLWRDYAAAHFNDAVAEARARLEEHGEVEEAGSSKEVTVNDDSKEEKEIIRTCSVRLSKILREDLDNQVKQTFLETIAITSEQATNYASELGTAVHATMLKYASGSVVLDAESKQAHYQQDGKTFNVLDVIHEEWIRHPELLNSELAIAVAPMPDNIKNYVKALPKKHNDEFLNLFTEAHLQFLHSDYFGRQSYKAQGKSFWSSLQHQGLKDLPKPPAGLSTVMHFQLKQYATDLQNMWAGGLFHKSINHLLRILLRINLASEREKKIQEITEKKLQEKEKQREESSRTMRRKKEWRRRKIKGRLKQERKSLRRLEKRLGIEMDGNQRANLLQRKKSCVEAIRRLEKQAKEKYRPKKADNQPHQKDEEARGDMDKLAISADISVMDDEEIEETIETAIEEAQDELEEVEIKTLKKEPSRRRLIRIQAITKKLLLSTDIDGNVQASDVSDIWNDNDELQKVEIDIVVKLANALRPYVPKGRLSSAISLRLRFVLLSNAILHATGYSKFTANICPTISPASIHALPLDAASMYEMFGSNSAKFNLYKEDGSTIDNIREARTNKSAVIGSFFDQEKVKHICNTRGLEPRWRITITPHQMAVIDGDVKKGRVIDTSHYEERKKKSKGKRADSASSQFEDKSGLDIANITCSLEDAKQRVKALESAEKQIKNALRQREEVVESRMESYRRSKDVARRKVRDKRKSEKFDIYDSRAKQKQTDIYKDLKAAKLERAKSQSELSKIRSQLADQRRLRYIYQKQLDILKKQQTNKETKPKDDEQEQETKLCKVASWNRPGCEANTEFLDISELHQEVKQDPKKTITFGGTDYGLRTLATTVPVTMERARLHFDLYNRQFGDGQTPVSIPKEMSTLPKPMRITAGYLEEKTLCRSFRKKRERRKKNNPAVISAEKTLSKRSSASATTVEQVLESQAVKRNCRRELRAFYHSNRAEHEKRTQKLYTDRIYDQVAAQERKFIKAAATTQTDGRQKALPIMAIGTQGTGVGLRLKGHLKRGGKWLRKRHRRYVPVSMTNEHRSSQLCVYCFERVERAKARRRKSRQWKTVRVNGASQCVNPCCPAYQSGHATQNRDVQAAVAIGLASASNILSANRSTLTPFDPSIFSAGKPFVPGATNFWCVNSSRKLCEELREPGPVAMTGVIRTYASEEF

SEQ ID NO: 3764 - protein, 918 aa, Apophysomyces variabilis
MPPRKRPRINSKPLPPNQTLITSFFTRTNRLQVEPDPSETVSTSCIDQKDIIQAPEDPSSEEQSGTKNEITDLDENNRPSIVPQDLAKLLGISKGKGKEKANDTLEEDFQDTFSPKQGTWADEQLQTLKIVPPTEATLDAGYDPGPSTGKKSKALVKAEKAYAKRNAKFDAKAKLQEDKQEKRIASGSTLRCSTCGGTDHQRRTSKLCQDHAKKRKPPKNFKRTSVIKTSLANTCRSAEFVRSIEDVVKHIRDVTYVGSLFANFFFVQLLSENQNIPPITHDLCYSIFSMVAGEGKNANESLQEAYLRFKVSVPEYKETKFRSRGYMTVISSAAQEYEEAIRNHLTANFEPKTIQYLLVRMSDDKDEAFRWKSTVAERRLLANFVYKKACGTEAPWPKSITDNRHNRDYVKSCVEFLQQSIGITEIDETKLNAEPHLFLPWFFQVLKRLEQKIFIAEPTAQKYVSPGYIHRMVDKVLDKEKLPKRLVKSLEVNVRIAIRKREKLSLAKKFARISETALSKLQEFIKETGDAIDAGIFKPEKHTDPRGMRRFTMLPVYSTQMRHITMDNQALGRLMCKSGLRDTLAPVKPDEAREVYFKLFDMSKIGYRTIEDLETEKVLFWDKIRTDGTDVEFIFKKYKAPYDPKKKPLTPSDMKGKFDDALIWGVDPGVASVFVAADGTHDSRHRVRSTSTEEYYSLCGFNHASRVREKYNKQEPAIKDLIDKTPSLKTSDLEKLIIAIRYCIQHYDTISEFFSRNQRSYSKENTCKSSDSKWVPLSANDRPEEKEKPIIIAYGNGAFSGSMKGRKAAPTKAILKELQQQARQRKAPTFVFLIDEYLTSQICPVCQKRNLQNAKEGKDARGQEGSKIHAVLTCSNKSCTAMFWNRDSMAASNILHVFLHMRDYANRRPGPFIRLANT

SEQ ID NO: 3765 - protein, 801 aa, Apophysomyces variabilis
MGTNISNNNPNFPQDLRDHWRAFLDNHPNALYPVRNFSGYSDALSAACVTLATTYSNNVAENFEGRLKFYISRRLTKLILGLSQKNAKAIAGDYIYELLARGDPHWPFEDELAVSDFDQAVETICGEFATLMPEWQTNAEKLSAFPGSYIPVLAYILTEYNQEHEEAKQKQNAPKNQEAEKAKDSFKDLPRLFSLSPSPSTHWRFICVNSKTLQQLTNISHQKDYDDQLSQFYQGFDFHKLGFDSLEQLIFTDGYAIDFQFARARKTESVVTDVSLSVEDIDGSHIYDNFAPCAVDPGINQVFTASYGCGSEPHEIRRCSTKEYYVYTCSPNRQNKMEKEKKQQGIQDIETSLESGKTAQIEAYDGYLRSIFGNMDLLFQLYGPHRAEARFRGYQGVQRAREEMVNILAFGVKVVLSFMTGTTNAATATSEEANASLDRPITEADGSSNTEAFVLDPAIASTAYEEEKRRQAMKRRNYKFWSDAEVRKILEWMTSEGNIGKFSRNKAQACREVAKELFNGDEYMAISIRSKLMSLEKCYFAAERLRASLKETDMDESTINGKVPKNVVAKVTDFNRFQEESRALFAESSTPVASTTSASSVPQTMSTTTTAPVVIPATPENVPDTNATAANVTRPILPRVPEVLPSPEYTATLELPTLPAAAASVLNDREERMTHVCHCELSEPSYSRRSCQTEKRKASDDHPDHEYSKEKKAAIRQARYAARQAEFEAIKAKHEEQKMEFAVKLAEIEKERDLLGLRKLELEMEIIKLRGNFFSLQVGLQLQHIRADTHVRVHPGQQWVM

SEQ ID NO: 3766 - protein, 603 aa, Apophysomyces variabilis
MYKRHIKSRPARSQSAAETVEASTQQAEIVSYDPQISVLLKNDLSANEVTEFLLDNESDDNDEDASVKEEKENNELPDVTARRIRVLKRIAKDHIIAGIEHKELKKFIRDAYEGQDSSREVDAVYNLCSAIRAFAPPKETQPCVLTNLPVVLLANIVQRVAGYAEFTMKICPVMTTTIGGPAYMLNGSDMQAISAADMAVHRKNETLGSFLDTEKMQDICSSYGLDFDDRIILQEFKERRSSASNQHKRRLSSELKALKKARAANQSQVNSTRLTLKDMHNQRYHLWEKAKMDPKNKKPKKEIRYNPPNNQYLACEEDEEYIDLQSFIRSMEASGKEVSFEGTDYNLATMSTAVSLSNQRCLQMIETYNRSSSLNKKTEHGQTMKEPAEQMMNTVSPKCLRTTAQELNHFAGYIRILILMFPFYALKPDVKNAETKLSKNSANLATSSSEIWRCHQVALENRKTLREFYHSKRARKERNTINRFRSIIHNKFASIERRFMRGSDKHSTVICIGKLGTCVVSRIGGYSRRGGAQIRKRHRCHTNVVITDEFRTSQTCSVCFQPVVKPKGKRYIDGKWKGFSLNGGSLCMNPGCASFATGSNTKN

SEQ ID NO: 3767 - protein, 1193 aa, Apophysomyces variabilis
MNRLRQALEKADRIPRGSFEEADKKAGVPKGTIEKQIRSRLSSSHKTGEFWRQCAVDNFDDVLAVVKAEGKQNRPKKKDEDSDNLFRTCTVPLKSVLRPDLDENLKRIFMHTVESTSVQMTDYVSDLATVVRATMLKYVSVSLSLDPASGSVKAELDQTSTGFDIRTVVPKEKLRDESMLVDDYFVPVAPMPDNLSQFLDEMPGRRNNDLLSMFNENHIQFLHGLYFGTKGNVSKEKHYLWMQFHDQTLDNQPVIPDGLCRTSHFYMKQFSTNLKNMWAGSLYNRSMNHLLRVLLRVNLAPRREEKVREIREKAKLAREKEIEQQQVIKYQYRKKAIKRKLKNEKKQLRNLKKQIEQEEEDDILVRLATRAATCAEAIERLENQLLARSESRSNPKSIKVEQMNNRASVTKEEEQQAKILISLGETHIGVFEQIEEELEEEEKEETSEPSRRKLGILQAITKALLQSDKISGHVTVEDVLATSHADDAFSPQEIDTVVNIANALRPYVIRGQIAPCIPLRLNFVVLANALLCSIGYQEFTASICPTISPASVHALPLDAVAMYEMFGSSYAQLDIYKADGSVFTNRDEAIAEKRTVIGSFFNVEAIEKTCKERGLVPRWCITVTPQKTAIIDGNVCEQRRPIESRYEARRKKYYRKKEPYVQEPSIEQQSTPELAKTLDDTKKDVKTLETLKGQHTKLVKEATKLVAGLRSSYQENQAICQKRIRDKRKADKHENVTEKEAAYQQQKLSYEALKAAKLNWSNQQMALNQVHDRLANARRKKYKLEQLVKAHQKKKGKSPAGRKERKSKGGEDEKMEEADGDEEDTKYKKEKEKKKDKHNDNNDEENEEEDEEEEEDSLCRPQSGRRPGCEDSVGRLDLGPLLEDQNNVLTFSGTDYGLQVLSTTVPITRQRADFHLQLYNRYSMLGVNNVNDHDDDIDVSPTNMLQLPKPIRITAKSLDEKTLARTFRKKRERRKKSNTEVLAAEEQLKEASMEKAMSVQDIIRCQKIGRSCRKTLRDFYHSNRWHKEKVIQDLYKERIYDRVAANERRKIAMEAGPHDSGRRVIPVMAIGTQGTCVGSRLKGHPKRGGKWLRARHRRRYKEIKWRTMNGSSRCVNSKCVTFKAGRTTQNRDVQAAVAIGLAAISNLFSAERITLPPFDPSHFDAGISNIADTTVQRCVQSSSESHHTGRCYC

SEQ ID NO: 3768 - protein, 1210 aa, Apophysomyces variabilis
MNEIQLPTPRGSARRKRKRQTEPQISYDQAKNTLLGVLLQKLKSTIANELWKNETKNSRKTKKGKQSAKTKGKRLKAQEKRMNRLRQALEKADRIPRGSFEEADKKAGVPKGTIEKQIRSRLSSSHKTGEFWRQCAVDNFDDVLAVVKPEGKQNRPKKKDEDSDNLFRTCTVPLKSVLRPDLDENLKRIFMHTVESTSVQMTDYVSDLATVVRATMLKYVSVSLSLDPASGSVKAELDQTSTGFDIRTVVPKEKLRDESMLVDDYFVPVAPMPDNLSQFLDEMPGRRNNDLLSMFNENHIQFLHGLYFGTKGNVSKEKHYLWMQFHDQTLDNQPVIPDGLCRTSHFYMKQFSTNLKNMWAGSLYNRSMNHLLRVLLRVNLAPRREEKVREIREKAKLAREKEIEQQQVIKYQYRKKAIKRKLKNEKKQLRNLKKQIEQEEEDDILVRLATRAATCAEAIERLENQLLARSESRSNPKSIKVEQMNNRASVTKEEEQQAKILISLGETHIGVFEQIEEELEEEEKEETSEPSRRKLGILQAITKALLQSDKISGHVTVEDVLATSHADDAFSPQEIDTVVNIANALRPYVIRGQIAPCIPLRLNFVVLANALLCSIGYQEFTASICPTISPASVHALPLDAVAMYEMFGSSYAQLDIYKADGSVFTNRDEAIAEKRTVIGSFFNVEAIEKTCKERGLVPRWRITVTPQKTAIIDGNVCEQRRPIESRYEARRKKYYRKKEPYVQEPSIEQQSTPELAKTLDDTKKDVKTLETLKCQHTKLVKEATKLVAGLRSSYQENQAICQKRIRDKRKADKHENVTEKEAAYQQQKLSYEALKAAKLNWSNQQMALNQVHDRLANARRKKYKLEQNRTVGESASKEKSGRRPGCEDSVGRLDLGPLLEDQNNILTFSGTDYGLQVLSTTVPITRQRADFHLQLYNRYSMLGVNNVNDHDDDIDVSPTNMLQLPKPIRITAKSLDEKTLARTFRKKRERRKKSNTEVLAAEEQLKEASMEKAMSVQDIIRCQKIGRSCRKTLRDFYHSNRWHKEKVIQDLYKERIYDRVAANERRKIAMEAGPHDSGRRVIPVMAIGTQGTCVGSRLKGHPKRGGKWLRARHRRRYKEIKWRTMNGSSRCVNSKCVTFKAGRTTQNRDVQAAVAIGLAAISNLFSAERITLPPFDPSHFDAGISNIADTTVQRCVQSSSESHHTGRCYC

SEQ ID NO: 3769 - protein, 1275 aa, Apophysomyces variabilis
MLPNLDFVGNPGLSMGDVISRSPTKNYEQCMQTVTAGARGRPISKENRSKALQWLQARGIQTVSKLFNTSPLEAALSVAVVRCLGDKQHAVSLRLSDNQTIPANGLLRLIAIAKMYNIRVYLFSTQSKPKVIRNNQSVYNMSLLHEVDSHTGTSRWVPLYIARFTSPKLPGPETTIEKSPFISPAATMKNVAGERRKKKQRAPLGVTEEVIKDELRKEINKRIHLEFSRITRNKNPTRAALEKFKEKFMNRNKTPKGLITSSGSSDHLFKTLKEKYGTKASPSALEQHFKGPDKPVLLWNDMARFFYRNQLKKITDHEIQAASVKDSKRKASDIHGDDSEGDNRSGDEPSEDEEQSDDEDDNHQEYVRVATTTLRKLVRPDIDLDTVLRGDVYQFIGYDNYSTQINLADVFPADYDFGDHKAKHSIVSLPFINADAAVDSNIFTFAQFQNMFYSTVGGIYTEQIPKPWFSINGVLSSLVDPNDDAVASQFQADSLRALYTAANNLYSGSLYPRSLANVIRLLLRVNLAPRRMSKYMQLVKEKAEEKKDRQEQRQDLRSNVQRRRNRSYWTKELKKAYMNGRPDNVVETIQRKIADNLPRKDRTEDQKKSNEEEIKSQKADDEYEAFRLDQAEDDLVNDSEDDEDTAATTSSQAPITSKETSARTIRTLVAIVRMLVESPLIKRTISAKDVADAVHTGTILTITEQQVAAKVANFLKPYTPRRNEPDEPPAKHILTVLPIAALSNVVSTILGMQDRVNKLTIETSNKWALPVKADGIYKIMIDAFDIPTNRQGEFITSGLQARTEKETVFKAFFQMDKIHRMMNRRHLFFRWRLVFVNEWTVRVVGTINRNTPHQVSALQERRNNQRFVEPEIELTLSKAQLQERIDRTQASILGLEQQLKPIQKEIGALEKERMNHSTSAHGRTNSTAYRKLKQTRQQIRSKQNTAIVLQEKLKQARRDRYVLNKAMRERKRKKQKRSSQATSSAKAKITEGYMPQMLSLVKPLFEKHSIPVCGVDPGIRTTGVSTSTTSAWMIQRIRNFTSNTTTELRHDIYNTWSLRASAVNHHSRSSRHRLRRERAKNAEKEGTEAENRRIEREKRTREVFTQKAYHKYADIERMHFPPDMIFQKAVHFYGHWQPTNSRIRGHARRGLKRLRGVQRRKGLVVIVNEYNTSKTCHWCLKPLQLQKYRGKDGKVRKCNGAVCCVNPNCVTVVNGCSTMNRDGNASKNIALKGVSMIVSSDGSPIPVFNSQYSSNYKLAQQFASQPTPVRLLHGP

SEQ ID NO: 3770 - protein, 719 aa, Apophysomyces variabilis
MASRNKRKKKPQASTSADTQSDDDFQQLLPPKGKLNMKMQMTDSEPGPSTLPSSSMVSTQNNSSKEKPRSLKGKEKATFDSDDDFQPLPPPKRKRTPSGHPSSSADFVQAPLTSSKSKCFLKPKKPMQSGAKMKFVEAIEEVVKHVWDITYAGSLLANFFFVRLLSENRSIPPITHDLCYRLFSLIASKGKSADDDLQEVYANLKTSIAEFDEEKFRSQGQACGTEPRWPTAIPDNKENRSYVETCVESLKNFIGVIFIDEEKLNAEPHLFFPWLFKVLRRLEQKVFITETTSQKYVSSGYVYRMILGDVNLPKRLTKSLEVAVRIAIRRRKELFLTKKFDRLPKSVISKLQNFIKETGEAIDNGIFKPEKYTDPRGARRFTMAPVYNMQMRHVTIDNQALSRLMWKAGLRSTMSPIKATEVRKEYFQLFDMSKMGYKTLESLETEKILFWDKIRTDATDVEFIFKKYKTPYDPKKKPLAPSDIKGKYEDAIIWGVDPGGSSIFVAADGTGTSQHRVRSTTTEEYYSLCGFSHATRSREKYVKGDPAVKTLIDNIPSLKTTSMESLTTAIRYCMQHYEHISEFFSRDRSSKSYIQRQKGRSEVAKRLLYGSKKYDQSSKQKEPKRGDSKWVPLSPNDRSDEKSKPIIVAYGNGGFSGSMKGKKAAPTKAVFKELQQQARRRKTNTSHPKSVQHVRLEICRKRTKKMMHKATKARLYMLY

SEQ ID NO: 3771 - protein, 1490 aa, Apophysomyces variabilis
MFRLSAMQVPHPQIRENKRKRKRVIQSNISLDKAIEALHDVFQNQLVTIISKELEDKPRKNTAKKARFQSEVEKQAKTNKILQELRTRLEKADRVPRTSLEQADDSINVTRGTIRRTLCFHYPEPASIGKLWRDYAAAHFNDAVAEARARLEEHGEVEEAGSSKEVTVNDDSKEEKEIIRTCSVRLSKILREDLDNQVKQTFLETIAITSEQATNYASELGTAVHATMLKYASGSVVLDAESKQAHYQQDGKTFNVLDVIHEEWIRHPELLNSELAIAVAPMPDNIKNYVKALPKKHNDEFLNLFTEAHLQFLHSDYFGRQSYKAQGKSFWSSLQHQGLKDLPKPPAGLSTVMHFQLKQYATDLQNMWAGGLFHKSINHLLRILLRINLASEREKKIQEITEKKLQEKEKQREESSRTMRRKKEWRRRKIKGRLKQERKSLRRLEKRLGIEMDGNQRANLLQRKKSCVEAIRRLEKQAKEKYRPKKADNQPHQKDEEARGDMDKLAISADISVMDDEEIEETIETAIEEAQDELEEVEIKTLKKEPSRRRLIRIQAITKKLLLSTDIDGNVQASDVSDIWNDNDELQKVEIDIVVKLANALRPYVPKGRLSSAISLRLRFVLLSNAILHATGYSKFTANICPTISPASIHALPLDAASMYEMFGSNSAKFNLYKEDGSTIDNIREARTNKSAVIGSFFDQEKVKHICNTRGLEPRWRITITPHQMAVIDGDVKKGRVIDTSHYEERKKKSKGKRADSASSQFEDKSGLDIANITCSLEDAKQRVKALESAEKQIKNALRQREEVVESRMESYRRSKDVARRKVRDKRKSEKFDIYDSRAKQKQTDIYKDLKAAKLERAKSQSELSKIRSQLADQRRLRYIYQKQLDILKKQQTNKETKPKDDEQEQETKLCKVASWNRPGCEANTEFLDISELHQEVKQDPKKTITFGGTDYGLRTLATTVPVTMERARLHFDLYNRQFGDGQTPVSIPKEMSTLPKPMRITAGYLEEKTLCRSFRKKRERRKKNNPAVISAEKTLSKRSSASATTVEQVLESQAVKRNCRRELRAFYHSNRAEHEKRTQKLYTDRIYDQVAAQERKFIKAAATTQTDGRQKALPIMAIGTQGTGVGLRLKGHLKRGGKWLRKRHRRYVPVSMTNEHRSSQLCVYCFERVERAKARRRKSRQWKTVRVNGASQCVNPCCPAYQSGHATQNRDVQAAVAIGLASASNILSANRSTLTPFDPSIFSAGKPFVPGATNFWCVNSSRKLCEELREPGPVAMTGVIRTYASVMFMLRSSSSCILRRTFATSVTACTAKKLNENRNMVNGVLIPGQYLHFFKDNKKSKSSSAENTDSFVGFEHIHTKAPRAFVQNEFDSSPSKAQERMAERINRALSMVYSVESLPTHLITPSAIRIYNVKVSRNLRRCQISYQPLTTNDSKKTTVHDAIRKHNHLLAALIRSHAQIPRPLSIKFVPDSQAEELESVYEKIAAELK

SEQ ID NO: 3772 - protein, 732 aa, Apophysomyces variabilis
MNLKAVCRHCGEHGHKLKTIGKKRKATEVDTEQQKAEKKKGRTSRDALNANPDAARRQRRNRTIKQEIQARYGNKVERFSRKIPFKNVVRPEYATLLQSRITSLSEFMRNLIIRMQLFVNAYIIGYNQREIPVYLYSQNFWYSIAQLVMNISVTNTNPYMPDNIYDFWNQFRERHPAIVFPRKNFTGYSDALSAACKTLRDTYTNDIVENFQQRVCGFIIHRLQMLVPLCPHAWKMRTSTYSLAIVNLRDFLIPLMPQTCNIEALSERPGVCIPVLRAILEMYEQEHQQSDDEESGNLPRLFSLAPQPSFHFRSVIINAKALRALVQVRNDTDDYQGNLEIFNQVFDLNKYGFRRSVTYYLRIMYEAKHHFSMNCGTFTNEICTDGFSVVFHFARGAVELELENFSTEDINRYYCVCGIDPGLRHLYTASYGAGETEHEIRCCSSAEYYCMTGSPQKGQQLLKQKRHHGIDTIESNFPNAKTCDIRKYNGRVDYFFLHKDVLFNFYGPNGRERRFRDHQGRQRAVEELANILIDRGRKYNHRKRKHRGANRKKRKKNREQRRRHKKKNTGRIPEQPLSAVRSTVNESRRARSWKQPQPNPDNNGKMPLFVFGAGMFGKDKYRYKGYRKAAVNKLWRILKRREARGEVFVVKIDEYLTSQCKTKILCNVVTEDGIKHHSIQDCKTCRMRWNRDINASKNMFYIAQSIWNVHGRPDAFRRPTQITVTNAGPERV

SEQ ID NO: 3773 - protein, 590 aa, Apophysomyces variabilis
MGDAISCSPTTNYEQYMQTVIAGTRGRPILKENRSKALQCLQARGIQTVSKLFNTSPLEAALSVAVVRCLGDKKHAVSLLLSDNQTIPANGLLRLVAIAKMYNIRVYLFSTQSKPKMIGNNQSVYNVSLLHEVDSHTGTSRWVPLYITSSGSSDHLFKTLKEKYGTKASPSALEQHFKGPDKPLKKITDHEIQAASIKDSKRKASDIDGDDNEGDNRSGNEPSEDESNAMKKTITIKSTFVWLPQLCENLFAQISILILTEINLADAFPADYDFGNHKAKHSIVSLSFINADAAVDSNIFTFAQFQNMFHSTVGGIYTEQIPKPWFSINSVLSSLVDPNDDAVASQFQADSLRALQATPSAKAKITEGYMPQMLSVVKPLFEENSIPVCGVDPGIRTTGVSTITQRQSYGTIFTIPEVSEHELSTITRARADIVCAENEPRMLRKRGPKLRTGELNVKSVLERCLPRKHTTSMLTSNPTNSRIRGHARRGLKRLRGVQRRKGLVVIVNEYNTSKTCHWCLKPLQLQKYRGKDGKVRKCNGAVCCVNPNCVTVVNGCSTMNRDANASKSIALKGVSMIVSKDGSQIPMFSS

SEQ ID NO: 3774 - protein, 334 aa, Apophysomyces variabilis
MTDGFSVHFQFSRAKSTQSHSEEQVRLQDFTTDEVAQFYRPVAVDPGIGHLFTAPYSHGADQHEIRKCSTAEYCAVTGSGRKNHALDKDKQATGIKDIESKFPTGKTTENDQYAKYVNYFFTHRDANFRFYHSGRGHSRFHNYQGRQRAREEIANILVQGGKNNATQGVEDLSRTAESAVRSTTSNRRLPRWKKTKVKFDNDGKMPLVVFGSGMFGKGQMKYKRHPPGVVGQLWKSLKRKEKNYQVLVVTIDKYLSSQQNFDETQDFGWRYSSQCPGLMVYWKPTRCPQSTRARRNSNQYHRCERGFPHWDLDCYGTGIRQCFPVSISANAYLP

SEQ ID NO: 3775 - protein, 1275 aa, Apophysomyces variabilis
MLPNLNFVGNPGLNMGDAISRSPTKNYEQCMQTVIAGARGRPISKENRSKALQWLQARGIQTVSKLFNTSPLEAALSVAVVRCLGDKQHAVSLRLSDNQTIPANGLLRLIAIAKMYNIRVYLFSTQSKPKVIGNNQSVYNMSLLHEVDSHTGTSRWVPLYIARFTSPKLPGPETTIEKSPFISPAATMKNVVGERRKKKQRAPLGVTEEVIKDELRKEINKRIHLEFSRITRNKNPTRAALEKFKEKFMNRNKTPKGLITSSGSSDHLFKTLKEKYGTKASPSALEQHFKGPDKPVLLWNDMARFFYRNQLKKITDHEIQAASVKDSKRKASDIHGDDSEGDNRSGDEPSEDEEQSDDEDDNHQEYVRVATTTLRKLVRPDIDLDTVLRGDVYQFIGYDNYSTQINLADVFPADYDFGDHKAKHSIVSLPFINADAAVDSNIFTFAQFQNMFYSTVGGIYTEQIPKPWFSINGVLSSLVDPNDDAVASQFQADSLRALYTAANNLYSGSLYPRSLANVIRLLLRVNLAPRRMSKYMQLVKEKAEEKKDRQEQRQDLRSNVQRRRNRSYWTKELKKAYMNGRPDNVVETIQRKIADNLPRKDRTEDQKKSNEEEIKSQKADDEYEAFRLDQAEDDLVNDSEDDEDTAATTSSQAPITSKETSARTIRTLVAIVRMLVESPLIKRTISAKDVADAVHTGTILTITEQQVAAKVANFLKPYTPRRNEPDEPPAKHILTVLPIAALSNVVSTILGMQDRVNKLTIETSNKWALPVKADGIYKIMIDAFDIPTNRQGEFITSGLQARTEKETVFKAFFQMDKIHRMMNRRHLFFRWRLVFVNEWTVRVVGTINRNTPHQVSALQERRNNQRFVEPEIELTLSKAQLQERIDRTQASILGLEQQLKPIQKEIGALEKERMNHSTSAHGRTNSTAYRKLKQTRQQIRSKQNTAIVLQEKLKQARRDRYVLNKAMRERKRKKQKRSSQATSSAKAKITEGYMPQMLSLLKPLFEKNSIPVCGVDPGIRTIGVSTSTTSAWMIQRIRDFTSNTTTELRHDIYNTWSFRASAVNHHSRSSRHRLRRERAKNAEKEGTEAENRRIEREKRTREVFTQKAYHKYADIERMHFPPDMIFQKAVHFYGHWQPTNSRIRGHARRGLKRLRGVQRRKGLVVIVNEYNTSKTCHWCLKPLQLQKYRGKDGKVRKCNGAVCCVNPNCVTVVNGCSTMNRDGNASKNIALKGVSMIVSSDGSPIPVFNSQYSSNYKLAQQFASQPTPVRLLHGP

SEQ ID NO: 3776 - protein, 315 aa, Apophysomyces variabilis
MFRPLATDGCTAAFTFSRKRQHLTEDKKSAKTMKDFQGDLHGLNLIGVNPGITDAYVASNGHEKYSHEIISSSTKEFYHLAHYNASKAIMVRMKNEKAKIQQIEKDMPSVKTASISQFDRHIGRQQASDEFAERLISGGNALSLTWTSRRRLDSSLENRSRTSCRRLPNTFARNEWSKATPHPTKRKPLFAFGSAMFNSTLQGIRAGISNIIRRKIKENKARGRCKVVDVDEFKTSKICSGCGAKKLRNVKGSLGQSLHAVVHCEQCKTVWDRDCNASRNIRRIAEHMALNNNNRPSLFQRKNQLPGQTPSKACK

SEQ ID NO: 3777 - protein, 279 aa, Apophysomyces variabilis
MLSLLKPLFEKNSIPVCGVDPGIRTTGVSTSTTSAWMIQRIRDFTSNTTTELRHDIYNTWSLRASAVNHHSRSSRHRLRRERAKNAEKEGTEAENRRIEREKRTREVFTQKAYHKYADIERMHFPPDMIFQKAVHFYGHWQPTNSRIRGHARRGLKRLRGVQRRKGLVVIVNEYNTSKTCHWCLKPLQLQKYRGKDGKVRKCNGAVCCVNPNCVTVVNGCSTMNRDGNASKNIALKGVSMIVSSDGSPIPVFNSQYSSNYKLAQQFASQPTPVRLLHGP

SEQ ID NO: 3778 - protein, 666 aa, Apophysomyces variabilis
MVNRCKNSIEAFDGDTCRLEVENHATVPPGWPRNRNKLITALFQRIWGMSVDISEAGADQEDFEEYEQNQEEERQVTGDILAGLANDVHTQIEDFITAERNLQVKGIRVSEVNLSECLGENGTQRTNGGNNDEENDFITAERNLQVKGIRVSEVNLSECLGENGTQRTNGGNNDEENGDEDDEDDVLHRTYGGKLSRAKAARLIPFMIYFLERREAGPNDRRIAELTRDNLQNACVRLQGIKSRDPFSALFDIRRQATITRDGGVDVRDRGYMRWLNQRIPGNENKLRFSRRRVFRTDGVRLYCIYNDWLRSRRGSTTCKYLSEIRRTTRETLKDTWQAGSSGDQYDYLQHYDGVDGLDFGEVCAAASVFRPREPGLYARKAANNIDDIEAALSEGSPRSTNDRYQEYLRQLKTNENGLRLWKFYSNRSVRRRIWDNAISQRSCLDKACYLITNQARRTFDMNHEMMIIVDIQDEGFGAYEPQDCQCFVPEDQPEESKQGQTTCRRRPRPTYRLFATPPTATVQDRARLENGQEKVLRVVQCANCDRTFHRDGNAADNQATIARYMLRFQQRPRWFIRPSRRLEAAGEEKAMVMTGRAGLQQRASGGEVTEVPEIAEPRRHPSEEAAVITPTARRRTRASQTETMVEPPRSRRRISRREEERPESS

SEQ ID NO: 3779 - protein, 347 aa, Apophysomyces variabilis
MHDSTMTTKKGADPDFTDIYVCSNESNDVYRDEADLEHEDIVELPEPEHYGRFFVGFVGSPLANDEPDEEFPTVEVAEGEDDDAEFEPHQIRQLSTAECCTRAGFKKTNAKGQHKALWEVVPDVLLLINEGRQGLDEEMVKIFINGGTKYRDPLGNADRLFRARQQDQRVNNETLHPDGIRRWRRRRIQRQEVGEPSPPSHLPKEDKWRKSFMEYDTAKVPVVVYGTLRFGRNVYKCKPCELADRCRKLLKRADTSRQLIMIEMDEYNISQICSRCGTKSLTKLDLGGHRCLHSVLVCGNCHTVWPWEVNTSRNIRAVFMATIQQRGRPAIFTRPCTTTTAPRNRNV

(The sequence listing continues in the following parts.)